United States Patent Application Publication US 2026/0103690 A1 - sequence listing, part 7

SEQ ID NO: 10893 - protein, 339 aa, unidentified
  source 1..339: note = protein_acefdc2
  REGION 6..147: note = RuvC_domain
  SITE 9: note = RuvC_P1
  SITE 52: note = RuvC_P2
  SITE 87: note = RuvC_P3
  SITE 89: note = RuvC_P4
  SITE 92: note = RuvC_P5
  REGION 210..296: note = Tnp_domain
  SITE 218: note = Tnp_P1
  SITE 248: note = Tnp_P2
  SITE 256: note = Tnp_P3
  SITE 257: note = Tnp_P4
  SITE 269: note = Tnp_P5
MNHTTVGVDIAKNVMQLHYIDAETGEIVNKPVKRAAFLEHFANRAPCLIGMEACGGSQHWARKLTAMGHQVKLMPGKFVKAFVMGNKNDSADARAIWMAAQQSGKSVAVKTETQQAVLGLHRMREQLVKFRTMQINSLRGLLTEYGEVMAKGRAALDKAIPDVLERLVDRLPTILIDTLREQWNGLAELDKQIAQIERRLQAWMKEDKACKAIAAIPGIGLLTATAAVATMGDAKAFRSGREFAAWIGLVPRQTGSGGKVRLHGISKRGDTYLRKLLIHGARSVLFHSKKPGSWLEQIRERRPMNVTVVAQANKMARTIWAIVAHDRPYESGYVSAKPV

SEQ ID NO: 10894 - protein, 341 aa, unidentified
  source 1..341: note = protein_c42f49e
  REGION 7..149: note = RuvC_domain
  SITE 10: note = RuvC_P1
  SITE 53: note = RuvC_P2
  SITE 88: note = RuvC_P3
  SITE 90: note = RuvC_P4
  SITE 93: note = RuvC_P5
  REGION 211..297: note = Tnp_domain
  SITE 219: note = Tnp_P1
  SITE 249: note = Tnp_P2
  SITE 257: note = Tnp_P3
  SITE 258: note = Tnp_P4
  SITE 270: note = Tnp_P5
MGEVSTIGLDLAKNVFQAHGADASGAVLFRNKLRRHQVLAFFAAQPSCTVAMEACGSSHHWAREIGRLGHTVRLIPPAYVKPFVKRQKNDAADAEAICEAAQRPTMRFVAPKSEQAQAATLVFRARDLLVRQRTQIINALRGHLTEFGIVVAKGPAHVHQLVRAVEDPDEPIPEIARPILQMLIETLHRLDEKIAGLDQEVARRAKENETARRLMTIPGVGPVTAVALAALAPPAETFKRGRDFAAWVGLTPLQHSTGGKQKLGATSKMGERTLRRLLIIGAGAVVRWVARNGAPAGSWMARMVARKPPMLVRVALANKMARIIWALMARGGVYQAPVAAA

SEQ ID NO: 10895 - protein, 343 aa, unidentified
  source 1..343: note = protein_c39ebfb
  REGION 7..149: note = RuvC_domain
  SITE 10: note = RuvC_P1
  SITE 53: note = RuvC_P2
  SITE 88: note = RuvC_P3
  SITE 90: note = RuvC_P4
  SITE 93: note = RuvC_P5
  REGION 212..303: note = Tnp_domain
  SITE 220: note = Tnp_P1
  SITE 250: note = Tnp_P2
  SITE 258: note = Tnp_P3
  SITE 259: note = Tnp_P4
  SITE 271: note = Tnp_P5
MRTITTIGLDIAKSIFQVHGVDAVGQVVIRRRLKRRYVLTFFQKLPSCLIGMEACASAHHWPRELQALGHTVRLMPAAYVKPYVKRHKNDATDAEAICEAVTRPNMRFVATKTPEQQSCLTLHRTRHLFIRQQTAVINAIRAHLAEFGIVAPVGRNGVAQLLGIAADANDKRLPEVARACVSALGAQLRMLKTQILEFDRMINAWHRSNEASRRLDDIPGVGPALATALIASVADPKAFRSGRDFSVWIGLVPKQNSSGGKDRLGNISKRGDRYLRSLFTTGALAVIRYAKIHGTRHRPWLTALLARRPTKVAAIALANKIARMAWAMMARGERYKESAALAA

SEQ ID NO: 10896 - protein, 341 aa, unidentified
  source 1..341: note = protein_a230c8a
  REGION 6..147: note = RuvC_domain
  SITE 9: note = RuvC_P1
  SITE 52: note = RuvC_P2
  SITE 87: note = RuvC_P3
  SITE 89: note = RuvC_P4
  SITE 92: note = RuvC_P5
  REGION 212..296: note = Tnp_domain
  SITE 219: note = Tnp_P1
  SITE 249: note = Tnp_P2
  SITE 257: note = Tnp_P3
  SITE 258: note = Tnp_P4
  SITE 270: note = Tnp_P5
MDISVLGIDLGKNSCSVVGLDSTGKVVIRRRMRRETVIAYAAKMPTCIIAMEACCGAHHMGRALTAQGHTIRLMSPEYVRPYVKAQKNDDRDAEAIAEAATRPTMRFVELKSEQQLDMQTLHRVRDQLVGERTSLMNQIRSLLLERGHIIPQGRATLAVRLGEMIEAEEPVLGARIHRLVADMRERWRWLDEQIAALDAEFMEEARADERTCRLMTIPGIGALNATALVAAVGDARTFGRGRDLAAWLGLVPRQATTGGKPRLLGITKRGSRYLRKILIQGARSSLPTMSRSDTRLGAWLRGLLARAHPNTVVVALAAKMARIVWALLRHERTYQPAMLSA

SEQ ID NO: 10897 - protein, 323 aa, unidentified
  source 1..323: note = protein_81455bd
  REGION 4..157: note = RuvC_domain
  SITE 7: note = RuvC_P1
  SITE 57: note = RuvC_P2
  SITE 97: note = RuvC_P3
  SITE 99: note = RuvC_P4
  SITE 102: note = RuvC_P5
  REGION 195..281: note = Tnp_domain
  SITE 203: note = Tnp_P1
  SITE 233: note = Tnp_P2
  SITE 241: note = Tnp_P3
  SITE 242: note = Tnp_P4
  SITE 254: note = Tnp_P5
MSVVGIDIAKYSFDIATVQANGKHRTKGKLANDPAGFEALQQWLLKHADPQAWIVMEATGVYHEALAEWLYERNYRVSVLNPAQIAYYARSQLQRVKTDKVDAKLIASYGDKHQDELRIWKPDPPSLRRLKALVRRLKDLQELEQMEQNRLDVTSDARVVESIRSVLEHTRQQIKETLEAIKKHFDDNDDLRGKRDLLMSIDGVADKTAALLLAELGDLDSFDGSRAVTAYAGLNPRLQESGKFKGQTRISRTGSATLRAGLYMPGVVSITHNTAIRAMAERMRAKGKTGKQIVCAAMRKLLCIAYGVLKSGMPFDAELALAR

SEQ ID NO: 10898 - protein, 393 aa, unidentified
  source 1..393: note = protein_5258143
  REGION 36..165: note = RuvC_domain
  SITE 39: note = RuvC_P1
  SITE 90: note = RuvC_P2
  SITE 127: note = RuvC_P3
  SITE 129: note = RuvC_P4
  SITE 132: note = RuvC_P5
  REGION 237..324: note = Tnp_domain
  SITE 245: note = Tnp_P1
  SITE 275: note = Tnp_P2
  SITE 283: note = Tnp_P3
  SITE 284: note = Tnp_P4
  SITE 296: note = Tnp_P5
MQECNAAVQQIETASSPIALSAASGKGAAKQYAAYIGLDVHKETIAVAVAEPGRDEPLYRGEIANTPKKVERLIAQLSEAYDGGLLLFCYEAGPCGYGLYRQLIASGHDCEVVAPSLIPQKAGERIKTDRRDALKLARLLRSGDLTAVWVPDQEQERKARQQLNAFLLRHGQHWPKGKSRWTPAHENWLAGLKLDDPWQQVVLQSDIDAERAAGERVAQLNDQLMRALPEWSLAPVVDSLVALRGLDKLAAIVLLAELGDITRFDSPKQLMAFLGLVPSEHSSGGRRRQGAITLTGNSHARRMLIESAWSYRFPARQTKHLKAKAANASPAAKQIAWKAQVRLCGRYRSMTRAGKNTKLVCVAIARELAGFLWDIVRQERPRLALTQAPVTGA

SEQ ID NO: 10899 - protein, 376 aa, unidentified
  source 1..376: note = protein_83f61f1
  REGION 8..155: note = RuvC_domain
  SITE 11: note = RuvC_P1
  SITE 59: note = RuvC_P2
  SITE 95: note = RuvC_P3
  SITE 97: note = RuvC_P4
  SITE 100: note = RuvC_P5
  REGION 223..309: note = Tnp_domain
  SITE 231: note = Tnp_P1
  SITE 262: note = Tnp_P2
  SITE 270: note = Tnp_P3
  SITE 271: note = Tnp_P4
  SITE 283: note = Tnp_P5
MNEKLRFLGLDVHAETIAVAVAEPNGEVRSLGMIANREDSIRKFIRKLDSPEHLRACYEAGPTGFVLYWQLTQLGVKCDVVAPSLVPKKPGDRVKTDRRDALKLARSHRSDDLTAVWVPDEGSEALRDLVRAREAAKQDQLRAKHRLTKFLLRTGQRPPLGVKAWTEKYVEWVQQVRYTHPAQEATLLDCLNEVQHMEERVKRLEQSIVEVIQLAPAPMQEVVRGLQALRGIAHISAVTIVVELGNITSRFESARDLMGYSGAFPSEDSTGKRIRRGGITKSGNAHLRRIVVESAWSYRHRPAIGARLRRRQEGLPAEITEIAWKAQNRLHKRYMTLMARGKEQRKTMTAIARELLGFIWAIGIKAEAACKQQMAA

SEQ ID NO: 10900 - protein, 343 aa, unidentified
  source 1..343: note = protein_3749a19
  REGION 6..146: note = RuvC_domain
  SITE 9: note = RuvC_P1
  SITE 52: note = RuvC_P2
  SITE 87: note = RuvC_P3
  SITE 89: note = RuvC_P4
  SITE 92: note = RuvC_P5
  REGION 211..296: note = Tnp_domain
  SITE 219: note = Tnp_P1
  SITE 249: note = Tnp_P2
  SITE 257: note = Tnp_P3
  SITE 258: note = Tnp_P4
  SITE 270: note = Tnp_P5
MQIRSVGIDLGKTTFHLVALGDNGKVLLKKKFTQKQLITFTANMQTSLIGMEACGGAHFLGRALREQGHDVKLIPAQFVKPFVKSNKNDFIDAEAIAEAVDRQNMRFVPIKTDDQLDLQALHRVRDRLMTRRTSVINQLRAFLLERGLVFAKSPARLRERMPEILENADEDLTPRMRNLLALLWNEWKDLELQIVEMNDEVEQIATSDPACTRLRQIPGIGPLVATAIVASIGNGAAFHKGREFAAWLGLVPKQYSTGGKAKLYGISKRGNNYLRKILIHGARAVVLRSKRERIAMGAWMTSLETRAPRNVLIVATANKLARIAWAVLSSGEDYRAVQELVAA

SEQ ID NO: 10901 - protein, 347 aa, unidentified
  source 1..347: note = protein_3214d89
  REGION 6..149: note = RuvC_domain
  SITE 9: note = RuvC_P1
  SITE 54: note = RuvC_P2
  SITE 89: note = RuvC_P3
  SITE 91: note = RuvC_P4
  SITE 94: note = RuvC_P5
  REGION 213..299: note = Tnp_domain
  SITE 221: note = Tnp_P1
  SITE 251: note = Tnp_P2
  SITE 259: note = Tnp_P3
  SITE 260: note = Tnp_P4
  SITE 271: note = Tnp_P5
MKISRVGVDLAKNVYQVHGVGARDHVVWQKRLRRDNWLAELQRCVPEGAEVGIEACAGAHHWGRELVARGHQVKLMAPQFVKPYVKSNKSDRNDAAAICEAMSRPSMRFVALKSTEQQDIQAVHRVRSELIKQRTAKANQIRGLVGEYGLVAPLGIHTLRKALPCWLEDAGNGLSSRFRRILAGLAEDLRHLDERIKMLDDELANMVKEIPAAQRLTTLNGVGPTIATALVAALGAGEGFSRGRDFAVTLGLTPKHQGTGGKDRILGISKGDAYLRTLLIHGARAAVYAAKGKTDPLSRWINALLERCHANVVIVALANKTARMAWALLRHDRDYDANWSNVTAPVQ

SEQ ID NO: 10902 - protein, 340 aa, unidentified
  source 1..340: note = protein_c6b46e0
  REGION 7..149: note = RuvC_domain
  SITE 10: note = RuvC_P1
  SITE 53: note = RuvC_P2
  SITE 88: note = RuvC_P3
  SITE 90: note = RuvC_P4
  SITE 93: note = RuvC_P5
  REGION 209..293: note = Tnp_domain
  SITE 217: note = Tnp_P1
  SITE 247: note = Tnp_P2
  SITE 255: note = Tnp_P3
  SITE 256: note = Tnp_P4
  SITE 268: note = Tnp_P5
MGEVSIVGVDLAKQVLQVHGAAADGQVLFRKKLSRAQFAKFMASLPPCVVAMEACATAHYWGRELSRLGHEVRLIPPIYVKPFVKRQKNDAADAEAVAEAAQRPTMRTVAVKTADQQARAMLFRTRDLLVGQRTRLVNALRGHLAEHGIIIGQGVGNIARFVACLDQDTLPELVRDLGRLYLDQIAQISDEIDKLDKRIATAARENSTARRLQTMPGIGPVCAMAIASFAPAMREFRRGRDFAAWLGLVPRQHSSGGKQKLGRTSKMGQRDIRRLLIIGAMSVVHWRGRHGGRPGSWLSRMLARKPRKLVAIALANKMARMVWAMLAGETDYRDPTGAIC

SEQ ID NO: 10903 - protein, 407 aa, unidentified
  source 1..407: note = protein_da7ebdc
  REGION 5..164: note = RuvC_domain
  SITE 8: note = RuvC_P1
  SITE 61: note = RuvC_P2
  SITE 101: note = RuvC_P3
  SITE 103: note = RuvC_P4
  SITE 106: note = RuvC_P5
  REGION 272..358: note = Tnp_domain
  SITE 280: note = Tnp_P1
  SITE 311: note = Tnp_P2
  SITE 319: note = Tnp_P3
  SITE 320: note = Tnp_P4
MRLLIGDDWSEEHHDVEVMDTSGRRLAKARLPEGVKGMARLHAMIGEQLGDDAEDAEVLVGIETDRGPWVQALIAAGYRVFAVNPLQAARYRDRLSVSGAKSDGADAHLLADMVRTDSHQLRMVAGDTAQAEAIKVVTRTHKTLIWERTRHTQRLRHALRDYFPAALAAFEDLDAPDTLELLGKAATPASAAKLSIGQISAALKRARRRNVAAKAAIIQAALRAEHLGQPDVVALAYAASVRALIAVLSTLNEQVTALQEQVETHFGTHPDAEIVLSQPGLGPILGARVLAEFGDDPHRYPHAKSRKNYAGTSPITRASGKKKVVLARFVHNDRLIDALGSQAFAALTASPGARAYYDQLKAREVSHRAALRQLANRLVGILHGCLKTGTLYDEATAWSHRTDTLAA

SEQ ID NO: 10904 - protein, 343 aa, unidentified
  source 1..343: note = protein_2927aca
  REGION 2..115: note = RuvC_domain
  SITE 12: note = RuvC_P2
  SITE 53: note = RuvC_P3
  SITE 55: note = RuvC_P4
  SITE 58: note = RuvC_P5
  REGION 218..305: note = Tnp_domain
  SITE 226: note = Tnp_P1
  SITE 256: note = Tnp_P2
  SITE 264: note = Tnp_P3
  SITE 265: note = Tnp_P4
  SITE 278: note = Tnp_P5
MEDVSKVKVGLEATGHYSYNLLGYLIDKGLPTYAINPLHTNLYRKSLSLRQTKTDKVDARTIASMLMSDVNLKSYSDTSYHNEELKSLTRYRFDKVKERAKLKSSVSRLVCILFPELEKLVPTLHMASVYALLSEFPGAKQVANVHLTRLTNLLTKASKGRYGKETAITFRDAARTSIGSNMPAKSLELKHTIKLIRELTSEIDEIENEIKIIMDEIHSPILSIPGINYRMGAMIIAEIGDFNRFDSPDKILAYAGFSPSTYQSGQLDGAYSHMEKRGSRYLRYALYNAAKYVCHWDSTFAEYLARKRAEGKHYNVAISHAIKKLVRVIYHLEKTNQQYIKAD

SEQ ID NO: 10905 - protein, 342 aa, unidentified
  source 1..342: note = protein_9f28cc1
  REGION 6..149: note = RuvC_domain
  SITE 9: note = RuvC_P1
  SITE 52: note = RuvC_P2
  SITE 88: note = RuvC_P3
  SITE 90: note = RuvC_P4
  SITE 93: note = RuvC_P5
  REGION 209..296: note = Tnp_domain
  SITE 217: note = Tnp_P1
  SITE 247: note = Tnp_P2
  SITE 255: note = Tnp_P3
  SITE 256: note = Tnp_P4
  SITE 268: note = Tnp_P5
MAIVTIGLDLAKLVFQVHGVDEAGQVVVRRQLRRAEVEGFFQKLPPCLVGMEACGSAHYWARRISAFGHEVRLIAPIRVKAYVQRGKKNDANDAAAIAEVITRPHMTFVPAKSTEQQGVLMLHRTRDLMVRQRTMLINALRGHLAEFGIVAAQGVRRINELIDGLGNAAIPELARIALRQIAVQIDACSQSVEVLEGQIVAWHKTNEASRNLATIPGIGPITASALAVSVPDPSLFNCGRKLAAWLGLVPRQNSTGGKDRLGRITKTGDSYLRRLLVIGATSVIRYARDKAPGKGEWLKTLLDRKSPRLASVALANKMARIAWSVLTRGEVYRETYPVPNAA

SEQ ID NO: 10906 - protein, 430 aa, unidentified
  source 1..430: note = protein_57f7216
  REGION 9..168: note = RuvC_domain
  SITE 12: note = RuvC_P1
  SITE 67: note = RuvC_P2
  SITE 107: note = RuvC_P3
  SITE 109: note = RuvC_P4
  SITE 112: note = RuvC_P5
  REGION 283..377: note = Tnp_domain
  SITE 291: note = Tnp_P1
  SITE 321: note = Tnp_P2
  SITE 329: note = Tnp_P3
  SITE 330: note = Tnp_P4
  SITE 343: note = Tnp_P5
MYNKNYISVGIDVGSAFSFMTIVAPDGSVIQKPFKITHNKPDSLEKAVSAIKKAEELHSLESRTFLESTGIYHFPLFCYLVDCGFHVSIINPIITHSANNTSIRKVKNDKVDSIGIAKLGLSGDIPVSQFPAKLVLEIRSLTRKYYDLTDERSAHINKLKGDLHTVFPQYLDIFCDVTGKTSTMILRQYGTPDKILRGHKKTMIEKISKASRKGLSKAAERYEKLCAAATAAKTFGCQIDSIYFNISLTLDLIEKLDSALDSILQRIHQLVTFNKSEKFIQQIKWLDTIKGVGFLTAVTIMCEIGDFSAFRNPKQLFAYFGLDPEVNQSGKFVGTEMHMTKRGSRIARRAVFAVALASIRTKRNGEGINPYLREYYEKKSGQKPKMVALGAVMHKVCNIIFAVLRDEKEFELRSPEEHCRQYQRPALQAA

SEQ ID NO: 10907 - protein, 338 aa, unidentified
  source 1..338: note = protein_7eed0a2
  REGION 6..148: note = RuvC_domain
  SITE 9: note = RuvC_P1
  SITE 52: note = RuvC_P2
  SITE 87: note = RuvC_P3
  SITE 89: note = RuvC_P4
  SITE 92: note = RuvC_P5
  REGION 210..301: note = Tnp_domain
  SITE 218: note = Tnp_P1
  SITE 248: note = Tnp_P2
  SITE 256: note = Tnp_P3
  SITE 257: note = Tnp_P4
  SITE 269: note = Tnp_P5
MQITTIGLDLAKNVFQVHGIDHEGKVGVRRSLRRSEVVDYFGKLPSCLVGIEACATAHHWAREIGRFGHTVRLMPPAYVKPYVKRNKNDMADAEAICGAVTRPNMRFVAVKTAAQQSVLMLHRCRALLVRQRTMLANAIRAHLAEFGIAMPQGIRTLLMALNAPKDAVNNLPELVRIALTPMTASLIELGQRIKALEIEIAREHRGNETSRRLETIPGFGVMTSTAMAATVTDPTAFKSGREFAAWLGLTPRESSSGGKQRLGGITKMGDGYLRTLLVVGATAVIRFAREEGSAKTAWIRKLMERKPAKVVAVALANKMARIAWALMARGEVYRVIPA

SEQ ID NO: 10908 - protein, 371 aa, unidentified
  source 1..371: note = protein_82c8a32
  REGION 34..174: note = RuvC_domain
  SITE 37: note = RuvC_P1
  SITE 80: note = RuvC_P2
  SITE 115: note = RuvC_P3
  SITE 117: note = RuvC_P4
  SITE 120: note = RuvC_P5
  REGION 239..325: note = Tnp_domain
  SITE 247: note = Tnp_P1
  SITE 277: note = Tnp_P2
  SITE 285: note = Tnp_P3
  SITE 286: note = Tnp_P4
  SITE 298: note = Tnp_P5
MGWPAPHPDANVGAIELKEDLRMRTKPNPDAAAYGIDIGKKVFHVVAMDAAGQPIQRAKFARETLIRFFEAADPVLIGMEACAGSQWLARKLIALGHDARIIPAKFVKAYVKSNKSDTIDAEAIAEAVTRPTMRFVQVRSDDQVDLQALHRIRDRLVRNRTGLMNQARAFCIEYGLAMRTGAGGFHSDVRRHLGNEDNDLSGAMRTLLTSLLDDLDHLERRIAELSKEIEAIAHSDETIKRLLTIPGIGPLGATALVAAAGDGRQFKKARDMAAWLGLVPAEHSSGGKQNLLGISKRGNGYVRRLLIHGARSCFLHLHRETHALGRWLSALEDRTHRNKAVVALANKLTRIAWAILTKPGENYLRTKGAAA

SEQ ID NO: 10909 - protein, 344 aa, unidentified
  source 1..344: note = protein_1cf52aa
  REGION 6..147: note = RuvC_domain
  SITE 9: note = RuvC_P1
  SITE 52: note = RuvC_P2
  SITE 87: note = RuvC_P3
  SITE 89: note = RuvC_P4
  SITE 92: note = RuvC_P5
  REGION 212..294: note = Tnp_domain
  SITE 220: note = Tnp_P1
  SITE 250: note = Tnp_P2
  SITE 258: note = Tnp_P3
  SITE 259: note = Tnp_P4
  SITE 271: note = Tnp_P5
MDIVVVGIDLGKNSCSLAGLDASGRVVLRRRMRRSSVESFVNGLGRCIVAIEACCGAHHLGRVFAAQGHEVRLMSPEYVRPYVKAQKNDELDAEAIAEAATRPTMRFVVVKSQTQSDIQALHRARERLVSERTALINHLRALLLERGIVAPQGRRKLEEELAVFADEDQIEVLSPRIRLLIEDLRAEWRALDERITAFDTEFVRMARDDEAVRRLMTIPGIGTINATALAAAVGDARTFGRGRDMAAWLGLTPRQMTTGGKPRLLGISKRGNRYLRKNLIHGARAVLPYLVERETPLGRWARGLLARAHKNVVVVALANKLARIAWAVLAHGRAYDAGCEAAAT

SEQ ID NO: 10910 - protein, 354 aa, unidentified
  source 1..354: note = protein_6e0de64
  REGION 8..161: note = RuvC_domain
  SITE 11: note = RuvC_P1
  SITE 67: note = RuvC_P2
  SITE 107: note = RuvC_P3
  SITE 109: note = RuvC_P4
  SITE 112: note = RuvC_P5
  REGION 208..295: note = Tnp_domain
  SITE 216: note = Tnp_P1
  SITE 246: note = Tnp_P2
  SITE 254: note = Tnp_P3
  SITE 255: note = Tnp_P4
  SITE 268: note = Tnp_P5
MAIIKQSVGIDISQATFTGCVCQRSEEGILTFSKVLSFSNDSKGFNQFLRWVKGIIITGPELVFLMEATGVYYENLAHHLYRIKKTVHVILPNTSKHYFSSLNIKTKTDVVDARILSQFGTERAHKLWIPPPAALLQLRNLTRYYVQLQEQKTALGNIKHSKDCSHDVQTFIIKSNQKLVLEIDKEIAKCVKEIKRLIESDSILKERIRKLSTIKGMGLITIATILAETMGFEQFGSAKQLVSYAGYDVVQRESGTSIKGKTRISKKGNRYIRNALFFPAMVACRFNPTLKEIYTRINQKKASKMIGQVAIQRKLLILIYTLWKNDTEFIQGYKQCSPSSKAETTLDSSITELL

SEQ ID NO: 10911 - protein, 438 aa, unidentified
  source 1..438: note = protein_bf88789
  REGION 46..201: note = RuvC_domain
  SITE 49: note = RuvC_P1
  SITE 97: note = RuvC_P2
  SITE 137: note = RuvC_P3
  SITE 139: note = RuvC_P4
  SITE 142: note = RuvC_P5
  REGION 308..393: note = Tnp_domain
  SITE 316: note = Tnp_P1
  SITE 346: note = Tnp_P2
  SITE 354: note = Tnp_P3
  SITE 355: note = Tnp_P4
  SITE 367: note = Tnp_P5
MRLGSLVRKVDDGERTASDSPAGQRGFFDAGEGAWVATPEQVSVWVGLDVGKESHFADVLDNDGERLFARAIGNDQGDIEALLDRAGKHGVPGLVIDQPGSIAQLVLAVAARRGTPVAYVPGLVMRRAADLYPGEAKTDRRDAYILADTARTRRKQVHWLDASSDELMAQLRVLNGFDTDLAADQTRVTNRLRDALTSISPVLERALGNRLHQAGVRDLVAVFPTLTALRAGGPDEIRETVARRSPRLASKVTEAVAKALAAQDVTVPAEAAAGRVIAELAGELDRVFTRRDALGKEIEEAFLAHPFGEILASLPGIGPRTGARILAEIGDGTGFASGAKLAAYAGLAPVTRQSGTSLNAETRSRRGNHRLKNAMFLAAFASLRDPASKAFYDRKRAEGKRHNAALICLARRRCDVILAMLRDRKPYQPNRARAAEAA

SEQ ID NO: 10912 - protein, 404 aa, unidentified
  source 1..404: note = protein_fd13abd
  REGION 4..159: note = RuvC_domain
  SITE 7: note = RuvC_P1
  SITE 59: note = RuvC_P2
  SITE 96: note = RuvC_P3
  SITE 98: note = RuvC_P4
  SITE 101: note = RuvC_P5
  REGION 267..353: note = Tnp_domain
  SITE 275: note = Tnp_P1
  SITE 306: note = Tnp_P2
  SITE 314: note = Tnp_P3
  SITE 315: note = Tnp_P4
MWYAGIDWANEHHDALVIDEQGRQIGMLRVEHSPQGMSKLNAFLEQIIGSESKEQLACIIETTHGLLIAHLLEAGWPVYPVNPRTVDRRRAASGAKTDTIDAYLLAKTGRADLVDLHRLTPDSEKIAELKLLTRDQDALIRMQTRLVNQLTACLKAYYPVALELFAKLQQKSTLLFLQTYPTPQAAMAASAEQITEVLRQAKHSNPITTATEIVARLQQAHLQADAVTTRAKSRLMLALVSQLLPLLEQIKQYDKEIHTLFLTHEDHELFASLPRAGKRLAPRLLAEIGDDRTRYQDASSLQALGGTSPVLFQSGMYSKAHRRMGCVKPLRNALHQFAWQTTQSEPWARAYYQRKRAEGKSHSVAIRALANVWVRIIFAMWSRRCHYETAIFKQAQYQHARRAA

SEQ ID NO: 10913 - protein, 388 aa, unidentified
  source 1..388: note = protein_efabd76
  REGION 45..186: note = RuvC_domain
  SITE 83: note = RuvC_P2
  SITE 121: note = RuvC_P3
  SITE 123: note = RuvC_P4
  SITE 126: note = RuvC_P5
  REGION 257..341: note = Tnp_domain
  SITE 265: note = Tnp_P1
  SITE 294: note = Tnp_P2
  SITE 302: note = Tnp_P3
  SITE 303: note = Tnp_P4
  SITE 315: note = Tnp_P5
MQVRADRPETPGAIHTDLGAIFISLELSRSTWLITSLLPGGGGKMSKHTLPAGDIGALLARFLEFKQKALARTGKSFSIIVIQEAGLDGFWIHRALENEGIESHVVDPASIATSRRRRRAKTDRIDGEALLRALLAYKRGEPRVCAMVKAPAPEEEDRRRLCRERKVLIAERVKHVNRIKGLLFSQGVFGYEPLRRDRREQLDLLSTGDGRRLPLHLKTQICRELDRLELLLEQVKAVEAERDALLIPQGVGAPEPAAMLLAIKGIGPEFAAVLWAEGLFRHFDNRRQVAAYAGLAPTPWQSGSVDREQGVSKSGNPRLRTTLIQLAWLWLRHQPQSALALWFEERVKHNGGRLKKTTIVALARKLLVALWKYVTAGVVIDGAVMKAA

SEQ ID NO: 10914 - protein, 318 aa, unidentified
  source 1..318: note = protein_e6fef17
  REGION 7..155: note = RuvC_domain
  SITE 10: note = RuvC_P1
  SITE 54: note = RuvC_P2
  SITE 94: note = RuvC_P3
  SITE 96: note = RuvC_P4
  SITE 99: note = RuvC_P5
  REGION 193..277: note = Tnp_domain
  SITE 201: note = Tnp_P1
  SITE 230: note = Tnp_P2
  SITE 238: note = Tnp_P3
  SITE 239: note = Tnp_P4
  SITE 250: note = Tnp_P5
MSEATYVGIDVSSEVLEIAVSTQPSTWQASNDSGGIEQLAGQLQALRPALVVLEATGGYEFEAACVLQAQGLAVAVVNARMARDFARAMGALGKTDALDARMLATFARVLDQHPDRARFVKPLADAQLQRLQALVLRRRQIVQTMTSERHRLRISHEAARPSIERHLAFLRQELDDSDGHIAEHVQQHQAELARVLSSVPGIGAASVALLLAELPELGRLDRRRIAALVGVAPVNRDSGKMRGQRSIWGGRASVRCALYMASLSAVRYNPVLRAYYQRLLGTGKKKKVALVATMRKLLTILNAMVRHNKQWEPALDCP

SEQ ID NO: 10915 - protein, 343 aa, unidentified
  source 1..343: note = protein_3caba02
  REGION 7..149: note = RuvC_domain
  SITE 10: note = RuvC_P1
  SITE 53: note = RuvC_P2
  SITE 88: note = RuvC_P3
  SITE 90: note = RuvC_P4
  SITE 93: note = RuvC_P5
  REGION 212..296: note = Tnp_domain
  SITE 220: note = Tnp_P1
  SITE 250: note = Tnp_P2
  SITE 258: note = Tnp_P3
  SITE 259: note = Tnp_P4
  SITE 271: note = Tnp_P5
MSEVTTIGLDIAKNVFHAHGPDAGGRALFSRKISRTRVLEFFAKQPICLVALEACGGAHHWARELTLLGHEVKLIPPAYVKPFVKRHKNDAVGSEAICEAVQRPNMRFVAIKSEEQQASALVFRTRDLLVRQRTQLINAIRGHLTEYGWVAPKGPSHVAMLSDLLDAEMGSSLPEAARPMFRTMLDLLTVLNSKISELDKEIARRAREDVIARRLMTIPGVGPITATAIAALAPPPETFTKGRDVAAWLGLAPRQLSTGGKQKLGSITKMGERTLRRLIIIGCSAVVLQASKRGAPVGSWLEQMMARKPRMLVTVALANKTARIIWALLMKQEEYKAPVAAAA

SEQ ID NO: 10916 - protein, 342 aa, unidentified
  source 1..342: note = protein_b10bb74
  REGION 6..148: note = RuvC_domain
  SITE 9: note = RuvC_P1
  SITE 52: note = RuvC_P2
  SITE 87: note = RuvC_P3
  SITE 89: note = RuvC_P4
  SITE 92: note = RuvC_P5
  REGION 211..296: note = Tnp_domain
  SITE 219: note = Tnp_P1
  SITE 249: note = Tnp_P2
  SITE 257: note = Tnp_P3
  SITE 258: note = Tnp_P4
  SITE 270: note = Tnp_P5
MKATTIGIDLAKHVFQLHGVDQHGKTVLTRKLKRDQMLSFFANLPSCLIGMEACGSAHFWANKLQGLGHTVKLMAPQFVKPYVKTNKNDAADAEAICEAVTRPTMRFVPIKSSEQLAVLALHRARQGFVKARTAQANQIRGLLAEYGHIIPQGISHISKQVPDLLEDSENGLPGTFRQLLMRLHEHLKDLDKQVHELEDTIVRWHQECVVSQKLAQLPGIGPLTASALVASIGDAKNFKNGRQLAAWLGLVPRQHSSGGKQTLLGISKRGDSYLRTLLIHGARSVLRVAERKASFAGSWLAGVMVRRNNIAAVAQANKTARIVWALLAHDREYDANYGVAAS

SEQ ID NO: 10917 - protein, 345 aa, unidentified
  source 1..345: note = protein_45774a2
  REGION 6..148: note = RuvC_domain
  SITE 9: note = RuvC_P1
  SITE 52: note = RuvC_P2
  SITE 87: note = RuvC_P3
  SITE 89: note = RuvC_P4
  SITE 92: note = RuvC_P5
  REGION 211..299: note = Tnp_domain
  SITE 219: note = Tnp_P1
  SITE 249: note = Tnp_P2
  SITE 257: note = Tnp_P3
  SITE 258: note = Tnp_P4
  SITE 270: note = Tnp_P5
MNIATVGLDLAKSVMQVHAVNSQGEIVVRKQLRRANVLRYFATLEPCVIGMEACASSHYRGRELTKLGHTVRLIAPQFVRPYVKSNKTDAADAEAICEAITRPNMRFVPLKTQAQQTVLSLHRARAGRVKSRIALANQIRGLLGEFGIVLPQGIQLLGQRAMAALSTRDDGHSEPFRALIQMLVEHLRELGSKVAELEGRIRAIRRTDAPGRLLETIPGIGPLTASALAASIGNAGSFRSGRELAAWLGLVPRQHSSGGTPRLLGISKRGDTALRTLLIHGAGAVIRMAASKPEMADSWVLKLFRRRHKNIAAGARGKECTAWAILIRNQPFQADHVPTRSSVTD

SEQ ID NO: 10918 - protein, 370 aa, unidentified
  source 1..370: note = protein_25968f8
  REGION 9..159: note = RuvC_domain
  SITE 12: note = RuvC_P1
  SITE 63: note = RuvC_P2
  SITE 99: note = RuvC_P3
  SITE 101: note = RuvC_P4
  SITE 104: note = RuvC_P5
  REGION 224..309: note = Tnp_domain
  SITE 232: note = Tnp_P1
  SITE 262: note = Tnp_P2
  SITE 270: note = Tnp_P3
  SITE 271: note = Tnp_P4
  SITE 283: note = Tnp_P5
MGHLSEAFVGIDTSKLRNAVAIAEGGRGGEVRYLGEFPATEAAMRKLVAKLAAKYRRLTFCYEAGPTGYGLYRLIKSLGHECLVVAPSLIPKKPGERVKTNRRDGLNLAKLLRAGELTAVWVPDDRHEAMRDLSRARLAAHKDLRGKRQQIISMMLRLGRIYPGKKTWGPAHMDWLMRQKLEHREQRIAFEELMEAVRQESERVARLEQAIREAVPEWSLAEVVTALQAARGIDLIAAVTLLAETGDLSRFRNPRELMGYLGIVPSERSTGDTVKRGGITKAGNGRARRILVEAAWAYRHPPRVGREKQAKVAAAPKSVREIAWKAQVRLCGRYRSLSRKGKHPAIVVTAIARELSAFIWAINREVMARR

SEQ ID NO: 10919 - protein, 424 aa, unidentified
  source 1..424: note = protein_5540bf2
  REGION 4..157: note = RuvC_domain
  SITE 7: note = RuvC_P1
  SITE 59: note = RuvC_P2
  SITE 94: note = RuvC_P3
  SITE 96: note = RuvC_P4
  SITE 99: note = RuvC_P5
  REGION 285..371: note = Tnp_domain
  SITE 292: note = Tnp_P1
  SITE 323: note = Tnp_P2
  SITE 331: note = Tnp_P3
  SITE 332: note = Tnp_P4
  SITE 344: note = Tnp_P5
MLGVGIDWAEAFHDVALGRPDDGIIDQFRIDHTVAGVERLITRCLELEPDPADVRVVLETRHGVLVEALADAGFTVLPVNPDLVARRRGPAKKKDDAEDARICCVLALDQFLELRKLIPHGDLAGELRSIARDDERAARDQRRLLNRLRADLLATFPAALAIAGDDLGSPVMLKLLVTWPTHTQLTDAGADTLEDFARTAKHGWPARFAARVTDALAAPQLPVRDYLIRAKATTIALTATQLLALRDARKSWERRMAELLLGDTRYGRSKQPRNPDPGKAVPGGDIYLSFPGLGDILAARIAGEIGDHIEQFDTPNGLQCYGGTAPVTRRSGRSELVIARRLAHNRYLGTAVHQWAFCSLKNSTWAREFYDTKIRAGKAHHNALRALANRWLEILWHCLTKNVYYDETIHIRNRQRALQPSPAA

SEQ ID NO: 10920 - protein, 410 aa, unidentified
  source 1..410: note = protein_6d881f3
  REGION 4..160: note = RuvC_domain
  SITE 7: note = RuvC_P1
  SITE 57: note = RuvC_P2
  SITE 97: note = RuvC_P3
  SITE 99: note = RuvC_P4
  SITE 102: note = RuvC_P5
  REGION 271..355: note = Tnp_domain
  SITE 277: note = Tnp_P1
  SITE 308: note = Tnp_P2
  SITE 316: note = Tnp_P3
  SITE 317: note = Tnp_P4
MIFVGDDWAEAHHDVYVCDEAGVKLAARRLPEGIEGMAKLHDLVATHAGEPGDVVVGIETDRGLWVNALVEAGYVVYAINPKAASRYRDRHTLSGAKSDPGDAKMLAELVRTDRHNHRQVAGDTALAEGIKILARAHQSLVWERTRATNRLRSSLREYFPAALDTFAELADRDTLVVLAAAATPSEATKLTPGKIRTLLRRAGRQRNVETRADTIAAGLRSDALRAPSAVEAAHGATTRSSVAILAELNTQIKTPAAELADHFEQHPDSDFYLSLPGVGVVLGARALGEFGDDPNRYADAKSRKNYAGTSPITRASGTRSVVLARYVRNDRLADALDQWAFSSITSSPGARAFYDRRRAAGDSHHKALRALGNRWVGILHGCLDHRVRYDENIAWGHRIDTDLKEIAQAA

SEQ ID NO: 10921 - protein, 290 aa, unidentified
  source 1..290: note = protein_780a77c
  REGION 7..148: note = RuvC_domain
  SITE 10: note = RuvC_P1
  SITE 53: note = RuvC_P2
  SITE 88: note = RuvC_P3
  SITE 90: note = RuvC_P4
  SITE 93: note = RuvC_P5
  REGION 211..290: note = Tnp_domain
  SITE 219: note = Tnp_P1
  SITE 249: note = Tnp_P2
  SITE 257: note = Tnp_P3
  SITE 258: note = Tnp_P4
  SITE 270: note = Tnp_P5
MKEVSIVGLDLAKRVFQVHAASADGGFVLRKKLSRVHVMAFFQRLPSCTVAMEACATAHYWAREIGKLGHEVRLLPPAYVKPFVKRQKNDAADAEAIVEAAIRPSMRFVAPKTEKQQAACMVFRTRDLFVRQRTQLINALRAHLAEHGVIAPQGIANLAALMGIVDDDNNGLKRVVVETARLYLEQIDLLSSRIGNLEKAIKSEARQSDNTARLMSMPGMGPITAMAIEAFAPTMTAFRKGRDFAAWLGLVPRQHSSGGKQVLGRTSKMGQRDIRRLLIIGAMTVIRWVP

SEQ ID NO: 10922 - protein, 366 aa, unidentified
  source 1..366: note = protein_d72d906
  REGION 10..132: note = RuvC_domain
  SITE 13: note = RuvC_P1
  SITE 61: note = RuvC_P2
  SITE 101: note = RuvC_P3
  SITE 103: note = RuvC_P4
  SITE 106: note = RuvC_P5
  REGION 292..355: note = Tnp_domain
  SITE 310: note = Tnp_P2
  SITE 318: note = Tnp_P3
  SITE 319: note = Tnp_P4
  SITE 330: note = Tnp_P5
MDIEDIDVFIGIDVGKSEHWATALSRDGRKVLDRALPNDEERLRALYKKLADHGNLLVVVDQPATIGALAVAVAQDMGITVGYLPGLSMRRIADLTPGSAKTDAKDAAVIVQAARTMPHTLRAISTSDEGRRGAEHADWLRPGPGPPGQPEPPTGSGACTPRSTQPSRRVLGPWLEHDAILEVIAAWPTPAKLKSAGKARIDARLKKHGCRRHATWAGQIVSALELQSVTVAGINAAAVVLPHLARQLIALHAQRGRCRRPGRDPGAGPPSLPGPDLHARDRGQDLRRLPGRDPGPKTFDTGAQLASYAGLAPVTRRSAHRSAASTSPSGNKRLKRAMFLSAFASLRSDPRLPGLLPAQTRPRQTP

SEQ ID NO: 10923 - protein, 358 aa, unidentified
  source 1..358: note = protein_1ea3669
  REGION 14..156: note = RuvC_domain
  SITE 17: note = RuvC_P1
  SITE 60: note = RuvC_P2
  SITE 95: note = RuvC_P3
  SITE 97: note = RuvC_P4
  SITE 100: note = RuvC_P5
  REGION 223..310: note = Tnp_domain
  SITE 231: note = Tnp_P1
  SITE 261: note = Tnp_P2
  SITE 269: note = Tnp_P3
  SITE 270: note = Tnp_P4
  SITE 282: note = Tnp_P5
MTNSSEKMASVTRIGLDLAKNVFQVHGIDAAGNVVVARKLRRGAVLGFFVQLPSCLVAMEACGSAHYWGREIAALGHEVRLIPPAHVKPYVRRNKTDAADAAAICEAAVRPGQRFVPVRSAANQAALMRHRVREQLVGQRTALLNALRGHLSEVGVIAPQGAQYAYDLKQVAATGADGNGEIVVCDEVRAALAPLTGQIDALDKEITAIDAELEKVAKTDDRARRLMTIPGVGPITATALAATVVEFGAFASGREFAGFLGLTPRQYSSGGKERSGRISKMGDRYLRKLLVVGATSVLYRAGTHKDALRRWATGLLERKGGFKYGFKLTAVALANKLARIAFAILRSDGVYDDRPVAA

SEQ ID NO: 10924 - protein, 341 aa, unidentified
  source 1..341: note = protein_ac03b22
  REGION 6..149: note = RuvC_domain
  SITE 9: note = RuvC_P1
  SITE 54: note = RuvC_P2
  SITE 89: note = RuvC_P3
  SITE 91: note = RuvC_P4
  SITE 94: note = RuvC_P5
  REGION 213..299: note = Tnp_domain
  SITE 221: note = Tnp_P1
  SITE 251: note = Tnp_P2
  SITE 259: note = Tnp_P3
  SITE 260: note = Tnp_P4
  SITE 272: note = Tnp_P5
MKLIRVGVDLAKNVYQVHGVDRSEKAVWRSKLVRADWVKALLAQIEPGCEIGMEACSGAHHWARVLQAQGYKVKLIAPQFVKPYVKSNKNDANDAEAICEAMSRPNMRFVTIKTVEQQDIQAVHRVRSSLVDQRKATANQIRGLTSEYGLVAQKELVHLRAAIPRWLEDFDNGLSERFRRLLRGLWEDMLALDRRVAELEREIEQIARHDPVAVRLQQLRGIGPITATALVATVGDASQFASGRQMAASLGLTPKQNSSGGKERLLGISKRGDTYLRCLLVHGARAVLRTAQAKTDRLSTWVTRIAITRHPNIAAVALANKTARIAWALMSKGTDYHPEPA

SEQ ID NO: 10925 - protein, 410 aa, unidentified
  source 1..410: note = protein_37c8212
  REGION 6..170: note = RuvC_domain
  SITE 9: note = RuvC_P1
  SITE 63: note = RuvC_P2
  SITE 109: note = RuvC_P3
  SITE 111: note = RuvC_P4
  SITE 114: note = RuvC_P5
  REGION 282..368: note = Tnp_domain
  SITE 289: note = Tnp_P1
  SITE 319: note = Tnp_P2
  SITE 327: note = Tnp_P3
  SITE 328: note = Tnp_P4
  SITE 341: note = Tnp_P5
MNPLYVGIDVSSKSNVAYLMKPDGSKHSNFSVPNTRDGSRQLVKRILSAITSESLTDVVIGLESTSVYGDNLVCFLREDGSLTPYNKKIHVLNPKQVNKFKLSYNDLPKNDYVDSFVIADCLRFGRINKEVYLDDYRYAALKNLTRARFFAVQNLTREKQRFMNHLFKKYSTMAQEKVFSDTFSTTALAVYESFESAEALANMDLHQLTEFIIEKGKKRFPDPDSVAKAIQKAARSSYRLPKTVNDSVNQVLSISISSMRAMESQIKAFDKAIAEQMALIPNTLTSVKGIDPVYSAGIIAEIGDINRFPTQASLAKYAGLVWSQHQSGDFEAQNTRMIHSGNRYLKYYLCEAALSLVRCDAEYRSFYHRKYKEVNKYQHKRALALTARKLVRLVFRLLKDNCLYRAPESK

SEQ ID NO: 10926 - protein, 404 aa, unidentified
  source 1..404: note = protein_74fefbf
  REGION 4..160: note = RuvC_domain
  SITE 7: note = RuvC_P1
  SITE 57: note = RuvC_P2
  SITE 97: note = RuvC_P3
  SITE 99: note = RuvC_P4
  SITE 102: note = RuvC_P5
  REGION 270..356: note = Tnp_domain
  SITE 278: note = Tnp_P1
  SITE 309: note = Tnp_P2
  SITE 317: note = Tnp_P3
  SITE 318: note = Tnp_P4
MIFVGIDWSESHHDVCVMDAQGQVLAQGRVPDGVEGLGRLHEMMAAHAEEPSEAVIGIEIDRGLLVGALVAAGHRVHAVNPLSVDRYRDRHRTSGAKSDPGDARVLADLVRTDRHLHRQVAGDTELAEAVKVLARAHQGLIWSRQRHLNQLRNVLREFYPGALQGFGTDLASAEALAVLAAAPTPALGRSLSAARAAAALKRGGRKRRVTERATEIRQWLRAPQLEAPDVLAGAYGEVVRSTVAIVAEMTGQIQALARELEERFEGHPDAEILRSLPGLGLVLGARVLAEFGDDPDRYADPKARKNYAGTSPITKASGRSKVALARFARNRRLGDALQMWAFCSLTTSAGARRYYDAHRAKGETHRRALRSLANRWVGILHGCLGHRRLYSEQIAWPTIEQAAA

SEQ ID NO: 10927 - protein, 331 aa, unidentified
  source 1..331: note = protein_6483cb0
  REGION 7..159: note = RuvC_domain
  SITE 10: note = RuvC_P1
  SITE 62: note = RuvC_P2
  SITE 100: note = RuvC_P3
  SITE 102: note = RuvC_P4
  SITE 105: note = RuvC_P5
  REGION 205..292: note = Tnp_domain
  SITE 213: note = Tnp_P1
  SITE 243: note = Tnp_P2
  SITE 251: note = Tnp_P3
  SITE 252: note = Tnp_P4
  SITE 265: note = Tnp_P5
MNYSYFVGLDVGKKSFDASLMSSDEEELCHRRFANSESGIHSLLDWVSSRVTTLDRALFCAENMGSYVTSLCLCSQQLGFSLALECPLAIKKSIGLQRGKNDRVDAFRIASYAVSRHRKLKLYKLPDKNLVQLRAWMCIRDNLVKQKVSAIKLLEITTETSVLTNLSACRTFLEEQLSMIKEKISYVEQEMEKIINSSVLLAENYELLTSIKGIGMINAIVLLCVTDNFRRFSDPRKFACYCGVAPFEHTSGTSIRGKTRTSQLANREVKVYLTRAAITAMVWDPQLKAYYKKKTGEGKHKASVINAIRAKIIARCFAVIKRRTPFVTLRA

SEQ ID NO: 10928 - protein, 343 aa, unidentified
  source 1..343: note = protein_8f6e7e9
  REGION 5..151: note = RuvC_domain
  SITE 8: note = RuvC_P1
  SITE 53: note = RuvC_P2
  SITE 91: note = RuvC_P3
  SITE 93: note = RuvC_P4
  SITE 96: note = RuvC_P5
  REGION 211..297: note = Tnp_domain
  SITE 219: note = Tnp_P1
  SITE 249: note = Tnp_P2
  SITE 257: note = Tnp_P3
  SITE 258: note = Tnp_P4
  SITE 270: note = Tnp_P5
MTEYIGLDVSMKETAVAIRREGVRVWRGKCISDPHVIAELIRKRAPTVKLVVFETGPLSVWFYHALRAEGLPVICIDARHAKAALDMATNKTDANDADGLAHLAEVGFFREVRVKGFDSMLARTLVAARTRLVHMTTELSNQIRGIMKTFGLVVPAGKGSVFEKNVRDLVSSDHDLAHIVLPLLDAWKGLRARAADLGRKLVADARQSQACRILMSIPGVGAITATSFATAIEEPGNFRKSRSVGAWIGLTTRRYQSGEVDYDGHISRRGDRHLRGLLYEAASVILTRSSVQSSLQTWGLQLRERIGFKRAAVAVARKLAVIMHTMLKTGELFNPNTGVAVTA

SEQ ID NO: 10929 - protein, 341 aa, unidentified
  source 1..341: note = protein_3ec40e4
  REGION 6..148: note = RuvC_domain
  SITE 9: note = RuvC_P1
  SITE 52: note = RuvC_P2
  SITE 87: note = RuvC_P3
  SITE 89: note = RuvC_P4
  SITE 92: note = RuvC_P5
  REGION 211..297: note = Tnp_domain
  SITE 219: note = Tnp_P1
  SITE 249: note = Tnp_P2
  SITE 257: note = Tnp_P3
  SITE 258: note = Tnp_P4
  SITE 270: note = Tnp_P5
MQVTTIGLDIAKNVFQVHGIDGDEKVVVRKQLRRGQVLRFFQELSPCLVGLEACATAHYWARELAKLGHEVRLMPARDVKAYVKRNKNDAADAEAICEAVRRPTMRFVRVKSAEQQAQLMQHRARDLLLRQRTQLINAMRAHMAELGIAAPQGREGIKQLLAIIANDEDARLPVDARASLIVLAVQLEAMHTMIGSLERRIVARHRSSPDSQRLQTIPGVGVIGATAIAATVTDPAAFQSGRDFAAWIGLVPRQDSTGGKPRLGPISKQGDRYLRRILVVGAVSILRRAKLNPERYPWVTRLLARRPFKVVAIALANKMARVAWALLARGGAYRAPQLVAA

SEQ ID NO: 10930 - protein, 407 aa, unidentified
  source 1..407: note = protein_4a366c8
  REGION 11..165: note = RuvC_domain
  SITE 14: note = RuvC_P1
  SITE 62: note = RuvC_P2
  SITE 102: note = RuvC_P3
  SITE 104: note = RuvC_P4
  SITE 107: note = RuvC_P5
  REGION 273..359: note = Tnp_domain
  SITE 281: note = Tnp_P1
  SITE 311: note = Tnp_P2
  SITE 319: note = Tnp_P3
  SITE 320: note = Tnp_P4
  SITE 332: note = Tnp_P5
MEDTTGYDVYLGLDVGKTAHHGCALLTDGTKVHDKPLPQDEAQLTALFDQLKTHGRVLLIVDQPNTIGALPVAVARATDCGVAYLPGLAMRKAADLYPGQSKTDPRDAFIIANTARTMPHTLRAVDRNDEVLSALKMLSGLDDDIARDCTRTINRLRSILVQIYPSLERVLPGDVIQRPFILELLIHYGGPTKLKKSGKNRVLTWARNHAKKNPDRLVEDIFKALDAQTVTVPGTAAAEVAIPMLATNIKSLKAQRESIAGQVEEMLDEFPLAQVLMSMPGVGIKTAANILLAVGDCSDFPDAAHLAAYAGIAPVTRRSGTSIRGEFPARSGNKRLKNALFRSAWVASNCHAASKMYYEKKRAEGKRHNAAVMCLARRRCNVIFAMLTNGEFFRELPARAAGEAVAA

SEQ ID NO: 10931 - protein, 401 aa, unidentified
  source 1..401: note = protein_cdccef3
  REGION 10..165: note = RuvC_domain
  SITE 13: note = RuvC_P1
  SITE 62: note = RuvC_P2
  SITE 102: note = RuvC_P3
  SITE 104: note = RuvC_P4
  SITE 107: note = RuvC_P5
  REGION 271..357: note = Tnp_domain
  SITE 279: note = Tnp_P1
  SITE 309: note = Tnp_P2
  SITE 317: note = Tnp_P3
  SITE 318: note = Tnp_P4
  SITE 330: note = Tnp_P5
MSTRQGRIWVGIDAGKGHHWAVALDADGETLFSTKVINDEAQILALIETARERADEIRWAVDISGRASTLLLALLVAHGQSVVYVPGRTVNRMTGAYKGEGKTDAKDARVIADQARMRPKGFAVLDTPPELVTSLRVLTNYRTDLIADRVRLINRLRDLLVGICPALERAFDYSAAKGPVVMLTEYQTPAALRRIGVKRLTTWLERRKIRSAADVAAKAVEAAQSQQIALPGEKRSAKLVCDLAHQLLALDERIKDNDREIRETFHTDDRAEIIESMPGMGPILGAEFIAIVGDLSGYRDAGSLASHAGLAPVARDSGRRTGNYHRPKRYSRRLRRVFYMAAQSAMMRPGPSRDYYLRKRGEGLLHTQALLSLARRRVDVLWAMLRDGKPFTSAPPVTQAA

SEQ ID NO: 10932 - protein, 339 aa, unidentified
  source 1..339: note = protein_487e63a
  REGION 6..148: note = RuvC_domain
  SITE 9: note = RuvC_P1
  SITE 52: note = RuvC_P2
  SITE 87: note = RuvC_P3
  SITE 89: note = RuvC_P4
  SITE 92: note = RuvC_P5
  REGION 211..296: note = Tnp_domain
  SITE 219: note = Tnp_P1
  SITE 249: note = Tnp_P2
  SITE 257: note = Tnp_P3
  SITE 258: note = Tnp_P4
  SITE 270: note = Tnp_P5
MSLSIYGIDLAKHSFSIHGEDSVGNMLIHKTITRSKVLTTFANIPPAIIGMEACGASHYWARELTKLGHTPKIMAAKYVAPFRTGAKNDLNDAVAICVAVARPSTRCIKIKSADQQAILLLHRARENWVHERTGLLNQVRAMLAEFGIIAPTGRHALQRAIPDALEDAENQLPDLSRAIIADCYDHLLTLNQRIEDQENCFNMLVSRSHNAKKIMKVAGIGPITATAVIASIGKGEQFDKGRDFAAWLGLVPSQYSTGGKPRLGRITKRGDKYLRTLLVHGARAVIASLGDKTDRLSLWCKSLVERRGFKRATVALAAKNARIIWSILRHDTDYEPIKS

SEQ ID NO: 10933 - protein, 336 aa, unidentified
  source 1..336: note = protein_0377ebc
  REGION 4..148: note = RuvC_domain
  SITE 7: note = RuvC_P1
  SITE 53: note = RuvC_P2
  SITE 88: note = RuvC_P3
  SITE 90: note = RuvC_P4
  SITE 93: note = RuvC_P5
  REGION 210..295: note = Tnp_domain
  SITE 217: note = Tnp_P1
  SITE 247: note = Tnp_P2
  SITE 255: note = Tnp_P3
  SITE 256: note = Tnp_P4
  SITE 268: note = Tnp_P5
MIHVGVDLHQRFCYMTAVDSRGRLLGAGQVRNQDQALRSYFAQFRGPVQAAVEACSFWPAFRKAVCARVQVRLVHPQRVKAIASAKLKNDRIDSATLAHLLRCDLLPAAWMADEATRELRQQVRMRATLVRQRTRLKNQVHAILHQQGLQFEGSDLFGQGGRAWLKQVSLPAAGGSAVKVYLKLIDEFTAQISTQDEELKRQWKKDARVLWLETIPGIGWYSAVLLVAEIGDILRFQDKRALANYAGLVPWLRESADKRHSGGITRVGSPWLRWIMVEAAHVAVRTSPPVKKWFERLCRRKHKNAALVAVARKLLVAVWAMLHDGVGFEEKHFALN

SEQ ID NO: 10934 - protein, 339 aa, unidentified
  source 1..339: note = protein_0aa9e93
  REGION 6..147: note = RuvC_domain
  SITE 9: note = RuvC_P1
  SITE 52: note = RuvC_P2
  SITE 87: note = RuvC_P3
  SITE 89: note = RuvC_P4
  SITE 92: note = RuvC_P5
  REGION 210..299: note = Tnp_domain
  SITE 218: note = Tnp_P1
  SITE 248: note = Tnp_P2
  SITE 256: note = Tnp_P3
  SITE 257: note = Tnp_P4
  SITE 269: note = Tnp_P5
MNSMAVGVDIAKQVFQVHYVDQETGEIVNKPIKRAKFLEHFANRGPCLIGMEACGGAHHWARQLTQMGHAVRLMPAEFVKAFNIRNKNDAADARAIWLAVQQPGKPVAVKTEMQQAMLALHRMREQLVKFRTMQINGLRGLLAEYGEVMSKGRAKLNTEILVALERLAQRLPAVLIDTLREQWNGLSKLDEQIAQIERRMREWKKQDLAVQAISEIPGVGLLTSTAAVAMMGDPKAFRSGREFAAWTGIVPKQTGSGGKVNLHGISRRGDTYLRTLLIHGARSVLAHAKEPGPWVEQMKKRRPTNVVIVALANKMARTIWAVLAHDRPYRKDYMSVKPV

SEQ ID NO: 10935 - protein, 328 aa, unidentified
  source 1..328: note = protein_61cf9a2
  REGION 4..160: note = RuvC_domain
  SITE 7: note = RuvC_P1
  SITE 60: note = RuvC_P2
  SITE 100: note = RuvC_P3
  SITE 102: note = RuvC_P4
  SITE 105: note = RuvC_P5
  REGION 200..286: note = Tnp_domain
  SITE 208: note = Tnp_P1
  SITE 237: note = Tnp_P2
  SITE 245: note = Tnp_P3
  SITE 246: note = Tnp_P4
  SITE 259: note = Tnp_P5
MIQLGIDVGKSKIDLCLRPDGSEGRQKTKTLTNGPDVAISVLEWLAKQKVGPSDVQVVMESTGTYHEYLAYGLYERSVRVVIANPARIRAFAQGMGILTKNDTVDADVLARYGAMRQPDVWQPPSPAIRELKALISRRDALVHDVGREQSRLEKLLSTRCSLLVEASVRKILQVLNNELQVVQALIDNHIDKHPELKRDMEYLTSIKGIGSAVGSTMLVVLRGNHFISAEQAASWVGVVPKEKRSGSSVRGRTRLSKNGPPEVRAKLFMAAIVAVKHNPLLKQFYERLLAAGKAKMSALGGVMRKLVHICYGVVMKQQKYDENYATAA

SEQ ID NO: 10936 - protein, 309 aa, unidentified
  source 1..309: note = protein_9cf7a27
  REGION 7..149: note = RuvC_domain
  SITE 10: note = RuvC_P1
  SITE 53: note = RuvC_P2
  SITE 88: note = RuvC_P3
  SITE 90: note = RuvC_P4
  SITE 93: note = RuvC_P5
  REGION 209..294: note = Tnp_domain
  SITE 217: note = Tnp_P1
  SITE 247: note = Tnp_P2
  SITE 255: note = Tnp_P3
  SITE 256: note = Tnp_P4
  SITE 268: note = Tnp_P5
MNTITLIGIDLGKHTFHIHCQDKSGKALLRKKFTRNKLMAFLAGCPSATVVMEACAGAHFMARRIADLGHEAKLISPQFVRPFVKSNKNDFVDAEAICKAASRPSMRFVPPRTETQQAMRALHRVRESLVRDKVKTTNQIHGFLLEFGISLPRGDAVIKRLSLVLAEHELPDYLARLLMQLHAHYHYIVEQIAGLEAELKHTITTDDTAQRLMTIPGVGPITASLLSSQLGDGQQYAKSRDFAASTGLVPRQYSTGGKNTLLGISKRGNKNLRRLLVQCARVFMQRLEIIQENWLTGSGSSLNENTPMS

SEQ ID NO: 10937 - protein, 400 aa, unidentified
  source 1..400: note = protein_d5d778e
  REGION 5..163: note = RuvC_domain
  SITE 8: note = RuvC_P1
  SITE 62: note = RuvC_P2
  SITE 102: note = RuvC_P3
  SITE 104: note = RuvC_P4
  SITE 107: note = RuvC_P5
  REGION 273..362: note = Tnp_domain
  SITE 281: note = Tnp_P1
  SITE 311: note = Tnp_P2
  SITE 319: note = Tnp_P3
  SITE 320: note = Tnp_P4
  SITE 333: note = Tnp_P5
MDPVIGLDIAKGESQVQAFLQRKEAYKQSFKFKHDLQGLHAFYQFYQEVEQVSGQPPAVIFESTGHYHEPVLQFLEGHGITYYLINPVVSYEARKTSLRKVKTDKIDAFHLGELYYKEDLEVFQKKTEQFLNLRQLTRQHSALTDSYVEIKLQFQAALDQIFPEYHGVFSDLYGSLSLNTLLQYPTASDIQNVSQEALAKEMRQFGARRSHEWFLHKASQLKGAAERNPFKSPVCQGQFISLRLYIQMLFQYQEHLSKLEEEIDALAKTFEEYELIRSIPGIGSKIAATITSETGNIDQFNHPKKLVAYAGIDPSVFESGKFKASINCITKRGSSRLRQALYTAVQCGLAKKRNKKLIAFYDRKRNEGKPHKVAVIACANKLVHWIHAMLKHQEVFVDQP

SEQ ID NO: 10938 - protein, 339 aa, unidentified
  source 1..339: note = protein_6cceed6
  REGION 6..147: note = RuvC_domain
  SITE 9: note = RuvC_P1
  SITE 52: note = RuvC_P2
  SITE 87: note = RuvC_P3
  SITE 89: note = RuvC_P4
  SITE 92: note = RuvC_P5
  REGION 211..297: note = Tnp_domain
  SITE 219: note = Tnp_P1
  SITE 249: note = Tnp_P2
  SITE 257: note = Tnp_P3
  SITE 258: note = Tnp_P4
  SITE 270: note = Tnp_P5
MKATTFGLDLAKRVFQVHWVDMETGEIGRRQLKRAQVAEFFANREASVIAMEACGSAHYWARKLAALGHEVRLIAAQFVRPFVKTNKTDAADAQAIWEAAQRPGMRFVAVKSEGQQGVLLLHRMRSQLVKMRTMQVQQLRGLLYEFGADLPQGRQRGMAQVPAELERLEQTLPAMVIDTLRGQIARIEALDRDIGEIEKKLAIGKKENKSVRRLLEIPGVGPLTATAAVATLGDAKAFKNGREFAAFLGLVPRQSGTGGRVKLLGISKRGDVYLRTLLIHGARAVVNSAKERGPWLEGLLARRPKNAAVVALANKMARTIWALLAHDRTYQKGYAAHAA

SEQ ID NO: 10939 - protein, 339 aa, unidentified
  source 1..339: note = protein_fb7ae89
  REGION 6..147: note = RuvC_domain
  SITE 9: note = RuvC_P1
  SITE 52: note = RuvC_P2
  SITE 87: note = RuvC_P3
  SITE 89: note = RuvC_P4
  SITE 92: note = RuvC_P5
  REGION 210..294: note = Tnp_domain
  SITE 218: note = Tnp_P1
  SITE 248: note = Tnp_P2
  SITE 256: note = Tnp_P3
  SITE 257: note = Tnp_P4
  SITE 269: note = Tnp_P5
MKYTPVGVDIAKYLMQIHFVDEYTGEIIDKQLRRRDFLTFFSNRDPCLIGMEACGGAHYWARELKKLGHGVHLLQAKFVKAFRLGNKNDVMDARAIWMAVQQPGKPVAIKNEEQQTILSVHRMRNQLVKFRTAQINALHGLLLEFGETVHKGRASLNKAIPEVLERLRITLSPFLISLIEEQYYRLSELDNEIDGLEKQLTEWAKQNADCQRIMKIPGVGVLIATAAIATMGDPTAFRSGREFSAYLGLVPRQTGTGGRVKLLGISKRGDTYLRTLFIHGARVATLCTRTPPLWVSELKKRRPVSVAIVGMANKLARTVWALIAHQREYEKDYVSVRPY

SEQ ID NO: 10940 - protein, 251 aa, unidentified
  source 1..251: note = protein_caa9b6f
  REGION 7..149: note = RuvC_domain
  SITE 10: note = RuvC_P1
  SITE 53: note = RuvC_P2
  SITE 88: note = RuvC_P3
  SITE 90: note = RuvC_P4
  SITE 93: note = RuvC_P5
  REGION 209..251: note = Tnp_domain
  SITE 217: note = Tnp_P1
  SITE 247: note = Tnp_P2
MQNVALIGIDLGKHSFHIHCQDKSGNALLRKKFTRTKLMQFLATCPSSVVVMEACAGAYFMARRISDIGHEAKLISPQFVRPFVKSNKNDFIDAEAICEAASRPSMCFIQPRTETQQAMRALHRVRESLIRDKVKTTNQIHGFLLEFGISLPTGDAAIKRLSLVLAEHEVAEYLSRLLMKLHAHYLYLIEQITELESELNQSIKADATAQRIMTIPGVGPMTASQLSSQLGDGKQFSCSRDVAASTGLVPR

SEQ ID NO: 10941 - protein, 341 aa, unidentified
  source 1..341: note = protein_b2b8608
  REGION 7..148: note = RuvC_domain
  SITE 10: note = RuvC_P1
  SITE 53: note = RuvC_P2
  SITE 88: note = RuvC_P3
  SITE 90: note = RuvC_P4
  SITE 93: note = RuvC_P5
  REGION 211..295: note = Tnp_domain
  SITE 219: note = Tnp_P1
  SITE 249: note = Tnp_P2
  SITE 257: note = Tnp_P3
  SITE 258: note = Tnp_P4
  SITE 270: note = Tnp_P5
MEQVSTVGLDLAKNIFQAHGADASGEVVFRKKLGRGRLLAFFAGLSPCVVAMEACAGAHYWGRELARQGHTIRLIPPIYVKPFVKRQKNDAADAEAICEAAQRPSMRFVPLKEEEQQASSVVFRARDLLVRQRTQTINALRGHLAEYGWIVPKGVPHVDRLIARVEDPAEALPTAARTILLVLVSTLRSLDQQIAVLDAEIASRAKNDPVARRLMTIPGIGPITATALVALAPSPEAFKSGRHFAAWLGLTPRQRSTGGQQKLGAITKMGERTLRRLLTIGASAVIKQAVIRGAPAGSWLSQMLERKPKMLVIVALANKNARIVWALLAKGDVYRAPVVSA

SEQ ID NO: 10942 - protein, 341 aa, unidentified
  source 1..341: note = protein_e29608c
  REGION 7..149: note = RuvC_domain
  SITE 10: note = RuvC_P1
  SITE 53: note = RuvC_P2
  SITE 88: note = RuvC_P3
  SITE 90: note = RuvC_P4
  SITE 93: note = RuvC_P5
  REGION 211..294: note = Tnp_domain
  SITE 219: note = Tnp_P1
  SITE 249: note = Tnp_P2
  SITE 257: note = Tnp_P3
  SITE 258: note = Tnp_P4
  SITE 270: note = Tnp_P5
MTDVSTIGLDLAKNIFQAHGGDAAGAVIFRRKLRRDQVLAFFAAQPPCVVAMEACPGAHYWGREISKLGHTVRLIAPAYVKPFVKRQKNDAADAEAICEAAQRPTMRFVAVKSEEKQASAVIFRTRDVLIGQRTQLINALRGHLSEFGFIAPQGPSHIQQLIDQVEDPSSRIPEAARCCLVFLIEALRRLEEQVRELDAEITARAKADDTAHRLMSVPGIGPLIATALEALAPPAETFRSGRDFAAWIGLTPLQRSTGGKERLGRTSRMGERTLRRLLIIASSAVVRWAKRKGVPSGSWLHRMLTRKPPMLVIVALANKTARIAWALMTKGGIYRAPTVVA

SEQ ID NO: 10943 - protein, 411 aa, unidentified
  source 1..411: note = protein_292007d
  REGION 5..163: note = RuvC_domain
  SITE 8: note = RuvC_P1
  SITE 62: note = RuvC_P2
  SITE 102: note = RuvC_P3
  SITE 104: note = RuvC_P4
  SITE 107: note = RuvC_P5
  REGION 273..373: note = Tnp_domain
  SITE 281: note = Tnp_P1
  SITE 311: note = Tnp_P2
  SITE 319: note = Tnp_P3
  SITE 320: note = Tnp_P4
  SITE 333: note = Tnp_P5
MNPVIGLDVAKGESQVQAFLDKKKPYKSSFKVTHTLEGLDTLHQYLREIENLTGVKPPIVLEATGHYHTPVVQYIEDRDYLIIIVNPLVSYRAKSSSLRKVKTDIIDANHLCEMYYKEDLEPYKKRGIQLLNLRNLTRQHENLTGIFVQTKLQFQAVLDQVFPEYRGVFGDLYSVVSLLTLLDYPTSNDVLEAGEETIATRIKDHCKSRSRRWADVKAKKLIDAAARNPFQETLYQSHILTLKMYINMLLEYQKHLSTFENEIDALAKELIEYKIIQSIPGIGEKIAATIISEIGEIDRFTHPKKLVAFAGIDPSIFESGRFKGNVNKITKRGSSRLRRALYLAVKCAIRDCRKKKMTQEIIPRNKRLREFYDKKREEGKPYKVAVIACANKLLQWIYALLRSNSTFQDIA

SEQ ID NO: 10944 - protein, 343 aa, unidentified
  source 1..343: note = protein_ddd98a8
  REGION 8..149: note = RuvC_domain
  SITE 11: note = RuvC_P1
  SITE 54: note = RuvC_P2
  SITE 89: note = RuvC_P3
  SITE 91: note = RuvC_P4
  SITE 94: note = RuvC_P5
  REGION 213..303: note = Tnp_domain
  SITE 221: note = Tnp_P1
  SITE 251: note = Tnp_P2
  SITE 259: note = Tnp_P3
  SITE 260: note = Tnp_P4
  SITE 272: note = Tnp_P5
MNATAKVIGLDIAKNVFVAVGRDAHGKIVLKRMLSRGDVLSTFANMPATVIGIESCAGSHYWARKLLAHGHDVKLIAAQHTRAYVSGNKNDTNDAAGIAEARSRESTKYVPINTEAQQDLQMLHRARQALMQERTAMICRIRAFACEYGQVFAVGVAKFLKGVTAWLAEIENGLSGSALATFTELKAQLDDKDARIAVYDARLTEAAKEDERAKKLMAMPGIGKLTATAVLAAVADAHHFNNGRDFAANLGLVPREHSSGGKQRLFGITKRGDKYLRTLLIHGARSALLWAGEKPDKMLRWALKLAERRSFNVAVVALANKMARVIWAILAHGREYVPVWSKA

SEQ ID NO: 10945 - protein, 344 aa, unidentified
  source 1..344: note = protein_621b708
  REGION 5..152: note = RuvC_domain
  SITE 8: note = RuvC_P1
  SITE 55: note = RuvC_P2
  SITE 92: note = RuvC_P3
  SITE 94: note = RuvC_P4
  SITE 97: note = RuvC_P5
  REGION 212..300: note = Tnp_domain
  SITE 220: note = Tnp_P1
  SITE 250: note = Tnp_P2
  SITE 258: note = Tnp_P3
  SITE 259: note = Tnp_P4
  SITE 271: note = Tnp_P5
MKYYAGLDVSLKETSVCILDETGAVFRELKAPSHPEDLIRVFEALDKPLARIGLEAGPLLQWLFSAMVEAGLPAVCIETRHAKAFLQAQINKTDRNDARGIAQMMRVNLFRPVHVKTLTSQRRRALLTARKLAQEKAIAIENDIRGILRNFGLKVGVVGTAGFEARIRELVEGIPDLACVIMPLLAVRQKLRETFTILHRQLLAITRDDVACRRLMTIPGVGPVVALAFTSTVDVPARFKNSKAVGPALGLTPRRNQSGESDRVGRISRCVDAMMRTLLYEAAHSLLTRVQKWSWLKAWAMSVAKRRGLQRAVVALARRLAVIMHRMWSDGSQFRWTRETAAVA

SEQ ID NO: 10946 - protein, 394 aa, unidentified
  source 1..394: note = protein_6ba65b8
  REGION 21..158: note = RuvC_domain
  SITE 56: note = RuvC_P2
  SITE 96: note = RuvC_P3
  SITE 98: note = RuvC_P4
  SITE 101: note = RuvC_P5
  REGION 263..350: note = Tnp_domain
  SITE 271: note = Tnp_P1
  SITE 302: note = Tnp_P2
  SITE 310: note = Tnp_P3
  SITE 311: note = Tnp_P4
  SITE 323: note = Tnp_P5
MGRDRLRQDPPPHPGHELRGRDAAVAAGRQRRTELLKLIGDVLDLADGRAVTWAMDMTGGEPALLIALLVNHGQGLVYIPGIAVNRASDSYRGQGKTDARDARVIADQARMRRDLQPIRPDDDAIVELRLLTERRVYLVTERTRTINRLKSLLTSMFPALERTLDLGTNGALQLLTGYQTPAAIRRTGQRRLTTWLRNRKVRGAESLAAKALEAAERQHTAVAGEAAIARMVLTFTKEVMALNEKVAETDKLIEGRFREHELAEVIQSLPGIGTVLGAEFLVGVGGSLDAFSSPDRLAAFAGVTPAPRDSGKISGNLHRPQRYHRRLQRVFYTSALVSIQFDPNSRKFYDRKRAEGKRHTQAVLALARRRVNVLWALIRDRRCYPVTPPVTAAA

SEQ ID NO: 10947 - protein, 340 aa, unidentified
  source 1..340: note = protein_06fd218
  REGION 1..106: note = RuvC_domain
  SITE 3: note = RuvC_P2
  SITE 43: note = RuvC_P3
  SITE 45: note = RuvC_P4
  SITE 48: note = RuvC_P5
  REGION 213..298: note = Tnp_domain
  SITE 221: note = Tnp_P1
  SITE 251: note = Tnp_P2
  SITE 259: note = Tnp_P3
  SITE 260: note = Tnp_P4
  SITE 272: note = Tnp_P5
MVDQPASIGALPLMVARDTGCKVAYLPGLSMRRIADLYPGEAKTDAKDAAVIADAARTMPHTLRALELTDEITAELTVLVGFDQDLAAEATRTSNRIRGLLTQFHPSLERVLGPRLDHQAVTWLLERYGSPTALRKAGRRRLVEVIRPKAPRMAQRLIDEVFEALDEQTVVVPGTGTLDIVIPSLARSLAAVHEQRRATEAQISALLEAHPLSKVLTSMPGIAVRTAATLLVTVGDGTSFPTAAHLASYAGLAPTTKSSGTSIHGEHSPRGGNRQLKRAMFLSAFAALHDPASRTYYDRCRARGKTHTQALLRLARQRINVLFAMLRDGTFYEPRTPRLA

SEQ ID NO: 10948 - protein, 342 aa, unidentified
  source 1..342: note = protein_f678735
  REGION 7..150: note = RuvC_domain
  SITE 10: note = RuvC_P1
  SITE 53: note = RuvC_P2
  SITE 89: note = RuvC_P3
  SITE 91: note = RuvC_P4
  SITE 94: note = RuvC_P5
  REGION 213..299: note = Tnp_domain
  SITE 221: note = Tnp_P1
  SITE 251: note = Tnp_P2
  SITE 259: note = Tnp_P3
  SITE 260: note = Tnp_P4
  SITE 272: note = Tnp_P5
MDKISIIGLDLAKGVFQVHGIDADGEVAVRRQLRRAQVLGFFARLEPCLIGMEACATSHYWAREMVALGHEVRLIPPAHVKPYVRRGRKNDANDAAAICEALQSKRITVVPVKSPEQQAGLVLHRARNLLVTQRTMLANAVRSHLAEFGTIEAQGEKGLGKLIVLALDANAPGLPAFAREGLAMLAAQLREAEAKIDALNQQIRALHQSDEASRRVATIPGIGPHIASALVTAIGHPQRFSSGRDLSAWLGLVPSQNSTGGKTALGPITKTGDRYLRSLLVLGATAMLRRRNHGFAPWLDALLGRMSARKATVALANKMARIVWAILVKGGIYQPPQVATAA

SEQ ID NO: 10949 - protein, 319 aa, unidentified
  source 1..319: note = protein_76060aa
  REGION 14..157: note = RuvC_domain
  SITE 17: note = RuvC_P1
  SITE 61: note = RuvC_P2
  SITE 101: note = RuvC_P3
  SITE 103: note = RuvC_P4
  SITE 106: note = RuvC_P5
  REGION 196..280: note = Tnp_domain
  SITE 204: note = Tnp_P1
  SITE 233: note = Tnp_P2
  SITE 241: note = Tnp_P3
  SITE 242: note = Tnp_P4
  SITE 253: note = Tnp_P5
MGTVMNQISSSVYIGIDVSGSTLDVAIHDTTEHFSVDNETAAIDQLVQRLIALGPTLIVMEATGKLELAVLRALCEAGLPAVAVNPRQVRDFAKATGKRAKTDRIDAFVIAHFAAVIKPVVRPLNDVQTEQLQALLLRRAQLIDMLVAEKARLERAHAAAKESLNDHIKWLKQQLTVADKDIDSFMRSSSAWRQKENLLRSVPGIGPGAAATLIAFMPQLGSLNRREIAALTGVAPFNCDSGKHTGKRRIHGGRAIVRRALYMACIPALRFNPVIRAFYDRLRKAGKPFKVAMTACIRKLIVTLNAMVHNSTPWNASTN

SEQ ID NO: 10950 - protein, 343 aa, unidentified
  source 1..343: note = protein_f5669b3
  REGION 6..149: note = RuvC_domain
  SITE 9: note = RuvC_P1
  SITE 54: note = RuvC_P2
  SITE 89: note = RuvC_P3
  SITE 91: note = RuvC_P4
  SITE 94: note = RuvC_P5
  REGION 213..300: note = Tnp_domain
  SITE 221: note = Tnp_P1
  SITE 251: note = Tnp_P2
  SITE 259: note = Tnp_P3
  SITE 260: note = Tnp_P4
  SITE 272: note = Tnp_P5
MKINRVGVDLAKNVFQLHGVDRSDKFVWKRKLKRMNWLKVLLKETDPSCEIGIEACAGAHHWARILMSKGYQVKIIAPQFVTPYVKSNKNDANDAEAICEAMSRPNMRFVAVKTTEQQDLQAMHRVLDELKSHRTAKGNQIRGLVAEYGLVAPRQLYALRQAIPDWLEDAENGLSDIFRQLLVGLREDLVRLDERIAEVNDAIEQIARTHPVAQRLQQLRGVGPLVSTAMIASVGAGKQFSRGRQMAASLGITPKQFSSGGKERLQGISKRGDAYLRRLLIHGARSVVSHAKHKDDRYSRWMTELAQRSHTNVAAVAVANKTARMAWAMMVNETDYDPALASR

SEQ ID NO: 10951 - protein, 374 aa, unidentified
  source 1..374: note = protein_cbeaa52
  REGION 7..147: note = RuvC_domain
  SITE 10: note = RuvC_P1
  SITE 53: note = RuvC_P2
  SITE 88: note = RuvC_P3
  SITE 90: note = RuvC_P4
  SITE 93: note = RuvC_P5
  REGION 210..297: note = Tnp_domain
  SITE 218: note = Tnp_P1
  SITE 248: note = Tnp_P2
  SITE 256: note = Tnp_P3
  SITE 257: note = Tnp_P4
  SITE 269: note = Tnp_P5
MEQLIRIGMDTSKSVFQLHGVDAAERPVLVRKLRRRAVVPFFAKLAPVRIGLEACGGSHYWARTLSGLGHEVVLIAAQHVKPYVRRGKHDAADAEATCEAMSRPRTRFVGVKSGEQQAAQMLFGVREQLVRRRTQLSNTIRGYAAEFGLVAAQGLARIEPLLARIAGDATVPALAKELFETLGEEYRAVCARYAAIDKKLLAHHRKDETGQRLAAMPGVGPVVASLLGVKVTDATAFGSGRDFAAWLGLTPKNHSTAGKNRLGVITRAGDEMLRQALVVGATAHIQQVRRGRAKASPWLAALIARKPPKLAAVALANKTARMAWKMMITGEPYRCGPSGQPDASSPPSRPLRAAYGGGLRPALTAAQHGADMPG

SEQ ID NO: 10952 - protein, 330 aa, unidentified
  source 1..330: note = protein_49bf852
  REGION 4..157: note = RuvC_domain
  SITE 7: note = RuvC_P1
  SITE 61: note = RuvC_P2
  SITE 101: note = RuvC_P3
  SITE 103: note = RuvC_P4
  SITE 106: note = RuvC_P5
  REGION 200..286: note = Tnp_domain
  SITE 208: note = Tnp_P1
  SITE 237: note = Tnp_P2
  SITE 245: note = Tnp_P3
  SITE 246: note = Tnp_P4
  SITE 259: note = Tnp_P5
MAHIGIDVSKNKLDCMWVRDLEAGKVKPKVFPNRPDQYPELLRWLQRNTGEAPETLQVYLEATGIYHEPLAYWLHEQGVRVHVLNPAQVRFHAQGMGVRNKTDRKDSMMLARYGIERAPRRWQPEPPEVRELKRLLSRLEALEEDIRREENRLEKAQFSEDTLAQASIDNVLQALREEHRRLQQQIDDHFDAHDHLKRDRALLESIPGIGRVLSASMAATLRSRAFTSARQAAAFHGLVPVLQESGTSVQRPPRLAKAGSGRLRKTLYMAAVVATRYNPDVRRQYHRLLRRGKAKMAAIGAAMRKLLHIAFGVLKSQTPYQPRNDTPCTS

SEQ ID NO: 10953 - protein, 343 aa, unidentified
  source 1..343: note = protein_7ff8bdc
  REGION 7..149: note = RuvC_domain
  SITE 10: note = RuvC_P1
  SITE 53: note = RuvC_P2
  SITE 88: note = RuvC_P3
  SITE 90: note = RuvC_P4
  SITE 93: note = RuvC_P5
  REGION 212..296: note = Tnp_domain
  SITE 220: note = Tnp_P1
  SITE 250: note = Tnp_P2
  SITE 258: note = Tnp_P3
  SITE 259: note = Tnp_P4
  SITE 271: note = Tnp_P5
MEKITTIGLDLAKSVFQVRAITESGNVAVRRLLRRSQVLDFFRHMEPCLVGIEACGSAHYWANAIGEFCHTVRLMPSAYVKPYVKRNKTDAADAEAICEAVTRPTMRFVPVKSPEEQAAGMVLKTRELLVRQRSQTANALRAHMAELGIIAATGMTSIAKLVAILHDDQDRRLPVSARAALLEMADQIERLTERIEKLDTKIVAAVKADDAARRLTTMPGGGPIIAATVRATVQDPAAFRTGRDLAAWIGIIPRSNSSGGKERVRKISNRGNKQLRTLLIVGATSILKQARRGAKLPAWVLSLMARCPYKVTAVALANKMARTIWALLVKGGTYRAPAIMATP

SEQ ID NO: 10954 - protein, 334 aa, unidentified
  source 1..334: note = protein_17bf5a0
  REGION 7..149: note = RuvC_domain
  SITE 10: note = RuvC_P1
  SITE 53: note = RuvC_P2
  SITE 88: note = RuvC_P3
  SITE 90: note = RuvC_P4
  SITE 93: note = RuvC_P5
  REGION 208..294: note = Tnp_domain
  SITE 216: note = Tnp_P1
  SITE 246: note = Tnp_P2
  SITE 254: note = Tnp_P3
  SITE 255: note = Tnp_P4
  SITE 267: note = Tnp_P5
MEKVTTLGIDLAKSVFSLHGVDEKGQVMLRRTVRRDQLVKVVAGIAPCLISMEACSGAHEWGRRFQEFGHTVRLMAPKFVVPYRKSGKNDGNDAEAICEAVSRPSMRFVPVKSAEQQALLAMHRVRQGFVVERTATINRLRGLMSEFGVVLPLRSITVRRQAATAAENLPELARRAIGDLLDQLRVLDERIGGYDREIETQAKLCEPAQRLMRIRGIGPTTALAIVATVGNAREFKNGRQFAAWIGLVPGQYSTGGKTRLGHISKRGDAYLRNLLVQGARSVLHTAAAHRDPISRWALELQPRCGYYRTLVAIANKNARIVWALLAKNESLRTV

SEQ ID NO: 10955 - protein, 309 aa, unidentified
  source 1..309: note = protein_a63a368
  REGION 8..150: note = RuvC_domain
  SITE 11: note = RuvC_P1
  SITE 54: note = RuvC_P2
  SITE 94: note = RuvC_P3
  SITE 96: note = RuvC_P4
  SITE 99: note = RuvC_P5
  REGION 190..274: note = Tnp_domain
  SITE 198: note = Tnp_P1
  SITE 227: note = Tnp_P2
  SITE 235: note = Tnp_P3
  SITE 236: note = Tnp_P4
  SITE 247: note = Tnp_P5
MKEEVVYCGIDVAKKQLDVALGQERWQTPNTREGIARVLKRIKEMRPKVHVICEASGGYEKAIVTALQGSALAVSLVPANRVRQFARAAGILAKSDIIDAAVLVRFGAAMQPASTPAQPAHIARLRELDAQRRHLSRLLSAEQNRLAQLSCAELRALSRSLISKVKKQIATVDARIAALIGQDQILCAKAQKLTSITGVGSRTAALLLAQMPELGSLNRGQAAALAGLAPFNRDSGTMRGKRCIFGGRRALRTGLYMAAVAAARHNHILAPFYQHLRAAGKPPKLALTAVMRKLLIALNSALALTLNPA

SEQ ID NO: 10956 - protein, 290 aa, unidentified
  source 1..290: note = protein_f176ab6
  REGION 22..98: note = RuvC_domain
  SITE 37: note = RuvC_P3
  SITE 39: note = RuvC_P4
  SITE 42: note = RuvC_P5
  REGION 161..247: note = Tnp_domain
  SITE 169: note = Tnp_P1
  SITE 199: note = Tnp_P2
  SITE 207: note = Tnp_P3
  SITE 208: note = Tnp_P4
  SITE 220: note = Tnp_P5
MEACSGVHYWAREFTKLGHDVRIMACKFVIPYRQNEKNDANDAEAICEAVTRPKTRFVSIKSEEEQAVLCLHRIRQGAIKDRTARINRLRGLLAEFGIIMPKGRYPAQNAIAGILEDGENNLPFIARELLDDLWQSIKGLNEEILKYDRKIHVLTNQMKDAKRLMGIPGIGEITATAVVATVNDAKHFETSRSFAAWIGLVPRQYTTGGVARLDRISKRGEKHIRTSLIHGARAVIANCKNKTDRTSMWIKDLVERRGFKRATVALAAKNARLIWALLHSEKEFQIDYIK

SEQ ID NO: 10957 - protein, 395 aa, unidentified
  source 1..395: note = protein_86de056
  REGION 7..161: note = RuvC_domain
  SITE 10: note = RuvC_P1
  SITE 58: note = RuvC_P2
  SITE 98: note = RuvC_P3
  SITE 100: note = RuvC_P4
  SITE 103: note = RuvC_P5
  REGION 268..353: note = Tnp_domain
  SITE 276: note = Tnp_P1
  SITE 306: note = Tnp_P2
  SITE 314: note = Tnp_P3
  SITE 315: note = Tnp_P4
  SITE 327: note = Tnp_P5
MSYEIFCGLDVGKATHHATGLDGDGNRLVDREIANDETALRRVFTELTEQGTVLVVVDQPSSIGALPIAVARAMGIEVAYLPGLAMRRIADLHPGNAKTDARDAYVIADAARTLPHTLRRVDLGDESLADLSVLVGHDDDLAEQATAVSNRIRGLLLQIHPAFERVLGENAAHKAVLAVLVKFGGPTGIKAAGKAKVGRVLKAGAPRMGERLTNQIFDALAEQTVVVPGTAAAEKVLPRLAEQLLGLQQQRKQVATEVEEALDAHPLSRVLTSMPGVGVRTAARILITVGDASSFPTAGHLAAYAGLAPVTRRSGSSIRGEFPSRSGNKDLKNALFLSAFAALRDPASRAYYDRKRAEGKKHNAAIICLARRRTDVLYAMLRNNQAYIPQTPQAA

SEQ ID NO: 10958 - protein, 341 aa, unidentified
  source 1..341: note = protein_0b5873f
  REGION 7..147: note = RuvC_domain
  SITE 10: note = RuvC_P1
  SITE 53: note = RuvC_P2
  SITE 88: note = RuvC_P3
  SITE 90: note = RuvC_P4
  SITE 93: note = RuvC_P5
  REGION 212..298: note = Tnp_domain
  SITE 220: note = Tnp_P1
  SITE 250: note = Tnp_P2
  SITE 258: note = Tnp_P3
  SITE 259: note = Tnp_P4
  SITE 271: note = Tnp_P5
MKNSTTISIDLAKTVFQVALFNKYGVMKSNNKMSQAKMVQFIAQHPEATICMEACGTAHYWGRRFQQSGHKVLLVPAHIAAKYRTGNKNDANDALAIYESINRPKTYFVQVKNLDQQDLASLLKLRQGYVKQRTQTANRIRGLGLEYGVKIPKGIAKIRKDLPCFLEDAENELTTSSRFILRDLLDQLLLLDGQIDESTNRLVARAKEVPVCIRLIALPGVAWIIASALYARLGDGSAYKCGRDASASVGVVPAHSGTGGNNKLLGITKRGDRCLRSLLVHGARSVVSRIKDKQDGLSCWIREQLSKNHLNKTAVAYANKLVRMAWAILKSGEEYRTPLAQ

SEQ ID NO: 10959 - protein, 323 aa, unidentified
  source 1..323: note = protein_b7148d4
  REGION 5..155: note = RuvC_domain
  SITE 8: note = RuvC_P1
  SITE 58: note = RuvC_P2
  SITE 98: note = RuvC_P3
  SITE 100: note = RuvC_P4
  SITE 103: note = RuvC_P5
  REGION 195..281: note = Tnp_domain
  SITE 203: note = Tnp_P1
  SITE 233: note = Tnp_P2
  SITE 241: note = Tnp_P3
  SITE 242: note = Tnp_P4
  SITE 254: note = Tnp_P5
MLLVVGIDVAKCSFDLAIELANGKHRTKAKLPNEQKGFQALQTWLQTHAQADSWIVMEATGVYHEALAEFVYALGYRVCVLNPAQTALYARSQLTRVKTDRSDAKLIASYGARHQEQLRPWQPDPPTLKQLKALVRRRGDLQQMLQMERNRLDVAGSAVQDSLHTHIADLQVRIAEIERAIEDHIDQDPTLRGQRELLVSIDGIADTSAALMLAELGDVARFADAAAVTAFAGLNPRLQESGKRQGQVCISRTGSPRLRAGLYMPALVAMTHNPIVRALKQRLRERGKANKQIICAAMRKLLHIAYGVLKSRTHFDPEKALAC

SEQ ID NO: 10960 - protein, 310 aa, unidentified
  source 1..310: note = protein_99ede8c
  REGION 6..149: note = RuvC_domain
  SITE 9: note = RuvC_P1
  SITE 53: note = RuvC_P2
  SITE 93: note = RuvC_P3
  SITE 95: note = RuvC_P4
  SITE 98: note = RuvC_P5
  REGION 187..271: note = Tnp_domain
  SITE 195: note = Tnp_P1
  SITE 224: note = Tnp_P2
  SITE 232: note = Tnp_P3
  SITE 233: note = Tnp_P4
  SITE 244: note = Tnp_P5
MFSYSAGIDVSKDSLEARIHLLEAGVSCSNTERDIPALIGWLMLYQVSRVLVEATGGYERKIVKAAQAAGLEVMCVNPRRAKEFSRAMGQKAKTDPIDAKSLAHYAAVLDSPSARITSPEQDKLRALVQQREHFVQQRDDDRRRLKTASCDAVKPALQSHIDYLNTAVEAIDRLIRQSANELDSEKVARLCSVKGIGLVTATSLMAYLPELGEIGGRPIAALAGLAPYNNDSGRHKGARHISGGRFSARRSLYMACWVVIRDQPEFGTRYKALRDKGKCAKVALIACMRVLLVRLNAMLRDRTEWKERTA

SEQ ID NO: 10961 - protein, 405 aa, unidentified
  source 1..405: note = protein_908cdf9
  REGION 4..161: note = RuvC_domain
  SITE 7: note = RuvC_P1
  SITE 60: note = RuvC_P2
  SITE 100: note = RuvC_P3
  SITE 102: note = RuvC_P4
  SITE 105: note = RuvC_P5
  REGION 266..353: note = Tnp_domain
  SITE 274: note = Tnp_P1
  SITE 304: note = Tnp_P2
  SITE 312: note = Tnp_P3
  SITE 313: note = Tnp_P4
  SITE 326: note = Tnp_P5
MYYCGIDIAKYKHEATVIDKTGKALLDSISFSNRAEGCEKLLILFERLSIAKDELLIGMEATGHYWLSVYGYLLENGFEVKVINPIQSEAFRKMYIRQTKNDSKDSFIIAQIMRFGQFSATSLSDEVIIAMRQLSRYRLALVDNCGDCKRRVIALLDQVFPEYDSLFSDTFGVTSKEVLAKYPTPEDMLSVSTGKLTNLLGKASHGRFGKQKAEQLKSMAAGSFGVSFAKDAFAFQIRQLIEQLNFLETQIGELEEQIAVLLKQTGSYITTIPGIGDTLGAIILSEIGDIRRFDAPGKLVAFAGLDVRVSQSGEFTGTRQKISKRGSPYLRRAIWLAASRAAFCDPALSEYYQGLRARGKHHLTAIGAVCRKLCNIIFAILSQNRPYQMLPPNDKKTSVSSFSPT

SEQ ID NO: 10962 - protein, 343 aa, unidentified
  source 1..343: note = protein_2227aa0
  REGION 6..147: note = RuvC_domain
  SITE 9: note = RuvC_P1
  SITE 52: note = RuvC_P2
  SITE 87: note = RuvC_P3
  SITE 89: note = RuvC_P4
  SITE 92: note = RuvC_P5
  REGION 210..295: note = Tnp_domain
  SITE 218: note = Tnp_P1
  SITE 248: note = Tnp_P2
  SITE 256: note = Tnp_P3
  SITE 257: note = Tnp_P4
  SITE 269: note = Tnp_P5
MKVTTIGFDLAKNVFQVHGVDERGHVVVRKQLRRDQVAVFFANLPACLVGMEACGSAHHWARKLQGIGHRVRLISPQFVKPYVKSNKTDAADAEAICEAVARPNMRFVPIKTMEQQAVLSVHRVRQGFVKARTAQANQIRGLLTEFGLVLPQGITNVMRGVPQLIDAATELPASMRQLIARLLENMKVLDRQVQELEAQIKAWHQGSELSRKLEKIPGIGPLTASALVASIADARSFKNGRQLAAWLGLVPKQDSSGGKAKLLGMSKRGDTYLRTLLIHGARSAIVAAQRKGKPNVWLSGLLARRHPNVAAVALANKNARTIWALLAHECEFRPDYLPRPATA

SEQ ID NO: 10963 - protein, 403 aa, unidentified
  source 1..403: note = protein_e216fb1
  REGION 7..163: note = RuvC_domain
  SITE 10: note = RuvC_P1
  SITE 61: note = RuvC_P2
  SITE 101: note = RuvC_P3
  SITE 103: note = RuvC_P4
  SITE 106: note = RuvC_P5
  REGION 269..357: note = Tnp_domain
  SITE 277: note = Tnp_P1
  SITE 308: note = Tnp_P2
  SITE 316: note = Tnp_P3
  SITE 317: note = Tnp_P4
  SITE 330: note = Tnp_P5
MARQLWAGVDAGKADHHCVVIDTDGQRLLSQRIANDETVLLELISAVTALADGGPVTWAIDLNHGGAALLITLLLARDQRLLYIPGRTVYHASGSYRGDGKTDAKDAAIIADQARMRRDLQPLRVGDDIAVDLRILTARRTDLVADRTRVINRLRAQLLEYFPALERAFDYSNSKAALILLTGYQTPDALRRLGAARLETWLRNHKARNASRIAATAITAAKAQHATVPGQQIAAAMVARLAKEVMALDSEIGETEALIEERFRRHRHAEIILSMPGFGIMLAAEFIAATGGDMKSFTSADRLAGVAGLAPVPRDSGRISGNLKRPRRYDRRGLLRACYLAAMIAVRLDPTSRIYYDRKRAEGKAHTQAVLALARRRVNVLWAMLRDGATYTPHDHSPTALAA

SEQ ID NO: 10964 - protein, 403 aa, unidentified
  source 1..403: note = protein_627e625
  REGION 13..167: note = RuvC_domain
  SITE 16: note = RuvC_P1
  SITE 64: note = RuvC_P2
  SITE 104: note = RuvC_P3
  SITE 106: note = RuvC_P4
  SITE 109: note = RuvC_P5
  REGION 274..358: note = Tnp_domain
  SITE 282: note = Tnp_P1
  SITE 311: note = Tnp_P2
  SITE 319: note = Tnp_P3
  SITE 320: note = Tnp_P4
  SITE 332: note = Tnp_P5
MTIERYEQVDVFIGVDVGKGEHHAVALDRSGAVLYDKALPNDEARLRTVIGSLKRHGLVLFVVDQPATIGALPIAVAQAEAVLVGYLPGLAMRRIADLHAGEAKTDARDAAIIAQAARTLPHALRSIQLADEQVAELSMLCGFDDDLVGQATATSNRIRGLLTQIHPALERVLGPHLDHPAVLDLLQRYPSPATMKAAGATRLGNRLVKLAPRMGRHLAEQIIAALSEQTVVVVGTNAAALVLPRLAEQLAGLRRQRAEIAVEVERLVEAHPLQPVLTSMPGVGVRTAARLLTEISGKDFATAGHLAAYAGLAPVTRRSGSSIRGEHPSRRGNKILKRTLFLSAFAALRDPISRAYYDRKIAQGKRHNQALIALARRRCDVLYAMLRDGTLYESRATTPAFAA

SEQ ID NO: 10965 - protein, 328 aa, unidentified
  source 1..328: note = protein_7e9eb2b
  REGION 4..156: note = RuvC_domain
  SITE 7: note = RuvC_P1
  SITE 60: note = RuvC_P2
  SITE 100: note = RuvC_P3
  SITE 102: note = RuvC_P4
  SITE 105: note = RuvC_P5
  REGION 200..286: note = Tnp_domain
  SITE 208: note = Tnp_P1
  SITE 237: note = Tnp_P2
  SITE 245: note = Tnp_P3
  SITE 246: note = Tnp_P4
  SITE 259: note = Tnp_P5
MCTLGIDVSKNKIDLCLLTAGPGGKKKHKVLTNEPAVARKVVDWLNAQKCVPESVTVVLEATGIYHENLAYGLHEAGVSVCMANPCRVREFAHGMDILNKNDAVDAFVLACYGELKSPAVWVPPSPEVRKLRALLRQRDALREDVQRTVNRLEKANSTSTPQEVIRSLERMKSWLNEELARIEKLITDHTDNDPGLKADLDLLKSIKGVKDQVGREMLALLKDGTFKSASQVAAYLGLTPVEKTSGSSVRGRPHMSKTGPSGVRAKLYVAALTGSRWNKQAKAIYERLVAKGKAKKAALGAVMRKLVHLCFGVLKTRLPWDENYVATA

SEQ ID NO: 10966 - protein, 346 aa, unidentified
  source 1..346: note = protein_8711229
  REGION 5..152: note = RuvC_domain
  SITE 8: note = RuvC_P1
  SITE 55: note = RuvC_P2
  SITE 92: note = RuvC_P3
  SITE 94: note = RuvC_P4
  SITE 97: note = RuvC_P5
  REGION 212..296: note = Tnp_domain
  SITE 220: note = Tnp_P1
  SITE 250: note = Tnp_P2
  SITE 258: note = Tnp_P3
  SITE 259: note = Tnp_P4
  SITE 271: note = Tnp_P5
MQHYAGIDVSLETSSVCVVDAQGKIVRETKVASEPEALIAWFSKHEAPMERIGLEAGPLSQWLYAAMAKAGLAVELLETRHVRTAFKIMPVKTDKKDARGIAQLMRLGWFRSVHCKSLPAQEVRAVLTARKLLQGKLHDVEMSIRGILRGFGLKVGPTTPRTYAPRVQALAEGHPTLEVITEALLKARGVLADELRGFERRVRKMARDDERARRLMTTPGIGVLVSLTYVSAIDETDRFRSSRMVGAHFGLTPKKYQSGETDYTGRISKIGDASVRTALYEAAQVILTKPVRGSDLKTWALGVAKRAGMRKAKVALARKLSVVLHRMLRDQTDFVTHKAAPIMAAA

SEQ ID NO: 10967 - protein, 392 aa, unidentified
  source 1..392: note = protein_e87016f
  REGION 4..164: note = RuvC_domain
  SITE 7: note = RuvC_P1
  SITE 62: note = RuvC_P2
  SITE 103: note = RuvC_P3
  SITE 105: note = RuvC_P4
  SITE 108: note = RuvC_P5
  REGION 267..354: note = Tnp_domain
  SITE 275: note = Tnp_P1
  SITE 305: note = Tnp_P2
  SITE 313: note = Tnp_P3
  SITE 314: note = Tnp_P4
  SITE 327: note = Tnp_P5
MLYIGIDVAKSKHDCFIIDSEGVVYTDNLRITNDRNGFNTLLETILNTLNGEPVTNAKVGLEHTGHYSINIKRFLESKGFVVTCFNPLETSAFRKASTLRKTKTDKCDAKTIATMLFSDESIPTSPPSYQIQKLKSLTRHRFRLIGYRGKLRVSFARIIDIVFPELPDFVWSVNQKSSQQLLLALPTPDAIAKCHLTRLTNLIRKNSHGRYGRDKAVSLRNLAASSIGLSDEALAFELQQTIRMIQNVQTEIDSLDRKIKSIVQELHTPLLTIPGISYTLAAIILAEIGDINNFSNPSKLQAFAGLDPSTYQSGKYTASYASMVKRGSTYLRWALLQAARLVAMRDKTFADYLAKKRSEGKHFNVAISHVSKKLLRTIFYMLKHNEVFVPQS

SEQ ID NO: 10968 - protein, 392 aa, unidentified
  source 1..392: note = protein_34b383e
  REGION 5..164: note = RuvC_domain
  SITE 8: note = RuvC_P1
  SITE 61: note = RuvC_P2
  SITE 102: note = RuvC_P3
  SITE 104: note = RuvC_P4
  SITE 107: note = RuvC_P5
  REGION 267..354: note = Tnp_domain
  SITE 275: note = Tnp_P1
  SITE 305: note = Tnp_P2
  SITE 313: note = Tnp_P3
  SITE 314: note = Tnp_P4
  SITE 327: note = Tnp_P5
MVVSVGIDVSKDKHDCFILNSEGEILSDVFTIPNSLDGFTILLQRIRDCSSSQDNIKVGLEATGHYSYNILGFLLDNGLPTYVLNPLRTNLYRKSLSLRKTKTDRVDARTIAAMLLSDAGLKPYTDTVYHNEELKSLTRYRFDKVKERAKLKSSVSRLVCILFPELEKLTPTLHMPSVYALLDEFPGAKQIAEANLTHLKAILHNASKGRYNRDKAIDIRESARASIGAVMSAKSLELRHTIRLIRELDAEIEDIEAAIQSIMNEMHSPITTIPGIGTRMGAMILAEVGDFSRFDSPDKLLAYAGMSPSTYQSGQLKNCYPHMEKRGSRYLRYALYNATKYVCLWAPTFAAYLAKKRAEGKHYNIALSHAAKKLVRLIFAMEKSRQPYCSAT

SEQ ID NO: 10969 - protein, 398 aa, unidentified
  source 1..398: note = protein_fa576db
  REGION 4..160: note = RuvC_domain
  SITE 7: note = RuvC_P1
  SITE 57: note = RuvC_P2
  SITE 97: note = RuvC_P3
  SITE 99: note = RuvC_P4
  SITE 102: note = RuvC_P5
  REGION 275..362: note = Tnp_domain
  SITE 283: note = Tnp_P1
  SITE 313: note = Tnp_P2
  SITE 321: note = Tnp_P3
  SITE 322: note = Tnp_P4
  SITE 335: note = Tnp_P5
MNAVGIDVSKGKSMVAIVQPFGVVVAEPFEVLHNAEELKELVERLKLLSGEIKVVMEYTGAYYEPIANALHNAGIFVSVVNPLLINDYGTNRVRKVKTDKKDAFKLAGFALDKWLELREYIPVDEIRKTLKIINRQYDQYNKILVMHKNNLIALLDSFFPNANTLFSSPRRESDGHEKWIDFVIKFPHIDSIAKLPLSAFKSKYQSWCKKNHYNYSEAKAAEIHAYSKTQLSSLPMTDSVIKIIIESAKLLNSTFEVLNTLRNEMDKLSSQLPEYKTVMNLYGVGKVFCSQLIAEIGDVRRLERSKSIIALAGIDPPPYQSGKFDTRSRSISKRGSPAIRKTLFQIMQIYLQKQPADEPVYQFLDKKRSEGKPYKVYMIAAAHKFLRIYYARVMQALT

SEQ ID NO: 10970 - protein, 329 aa, unidentified
  source 1..329: note = protein_5fb0e5d
  REGION 1..142: note = RuvC_domain
  SITE 40: note = RuvC_P2
  SITE 81: note = RuvC_P3
  SITE 83: note = RuvC_P4
  SITE 86: note = RuvC_P5
  REGION 204..289: note = Tnp_domain
  SITE 212: note = Tnp_P1
  SITE 242: note = Tnp_P2
  SITE 250: note = Tnp_P3
  SITE 251: note = Tnp_P4
  SITE 262: note = Tnp_P5
MAIDSSGNKIAHRRFPVNAGTFGQLMAWSQRWPERRFAVEGARGLGRGIAQQLAADGEHVVDVPSTLSARARMLATGGGRKTDAADALHVAHVALFRPDLRQVRSEDQATILRLLTERRDDLVNERTRLLNRLHVLLRDLVPGGAPIDLSAEKAAQLLRRVRPVTATDCCRRDLARDLLADLRRLDRAIKDNEHQMRDAVDASRTTLTNLPGVGIVLAAKILGHVGNIDRFPTEHHFASYTGSAPLEASSGNNTRHRLNTGGNRSLNCVLHIIATCQIRDIGPGQDYYRRKVSEGKTPAEARRALKRRLSNVIYRTMRRDQRNLLPEAA

SEQ ID NO: 10971 - protein, 258 aa, unidentified
  source 1..258: note = protein_0f479dc
  REGION 6..150: note = RuvC_domain
  SITE 9: note = RuvC_P1
  SITE 54: note = RuvC_P2
  SITE 89: note = RuvC_P3
  SITE 91: note = RuvC_P4
  SITE 94: note = RuvC_P5
  REGION 213..258: note = Tnp_domain
  SITE 221: note = Tnp_P1
  SITE 251: note = Tnp_P2
MKLTRIGVDIAKQVFQLHGTDRFERTVWRRRLSRDRWLQALREIAEPGCEIGMEACGGAHHWARQLQALGYRVKLIAPQFVKPYVKSNKNDANDAEAICEAMSRPSMRFVAVKSVAQQDLQAIHRVRASLVEQRTAKGNQIRGLVAEYGLVAPKEMSSLRHTMPTWLEDADNGLSFCFRQVLDGLWRDLRALDERIGEVDREINRIAHADPEARRLQQLRGVGPMVATALLAAVGDARQFANGRQMAASLGLTPRQHS

SEQ ID NO: 10972 - protein, 402 aa, unidentified
  source 1..402: note = protein_eef58fc
  REGION 4..161: note = RuvC_domain
  SITE 7: note = RuvC_P1
  SITE 60: note = RuvC_P2
  SITE 100: note = RuvC_P3
  SITE 102: note = RuvC_P4
  SITE 105: note = RuvC_P5
  REGION 270..357: note = Tnp_domain
  SITE 278: note = Tnp_P1
  SITE 308: note = Tnp_P2
  SITE 316: note = Tnp_P3
  SITE 317: note = Tnp_P4
  SITE 330: note = Tnp_P5
MFFIGIDIGKRNHEIALINNDGIPIGNTLRISNTKLGSEHLLAFINKHQLLPENTRIGMEATGHYWLSIYSFLNKLGFHVTAFNPIQSDVLRDFYIRKTKTDSIDAVLIAQVIRMDLPDKTVLPTEDVFRLKQLERFRYSLVDNTSDLKRKIVTCLDQVFPEYDKIFSDVFGCSSTQILLQSPLPEDLLRLDTHLLIETINLASEKRLGLSRSEKKIQKLKELATNSFGISIASDVFKLEIQTMLEQIQLLENHILRVEEEIQELVSNQQNYLTTITGIGEITAAVIMGEIGDIQRFERANQLLAFAGLDASVHQSGDFTGTRNKLSKRGSPYLRRAIWQAAFVASFKDPALSAYYQKLRNRGKSHGTAVGAVARKLVNIIFAVWTQNKPYEVRLPNNSSEN

SEQ ID NO: 10973 - protein, 347 aa, unidentified
  source 1..347: note = protein_3ea79c8
  REGION 6..147: note = RuvC_domain
  SITE 9: note = RuvC_P1
  SITE 52: note = RuvC_P2
  SITE 87: note = RuvC_P3
  SITE 89: note = RuvC_P4
  SITE 92: note = RuvC_P5
  REGION 211..296: note = Tnp_domain
  SITE 219: note = Tnp_P1
  SITE 249: note = Tnp_P2
  SITE 257: note = Tnp_P3
  SITE 258: note = Tnp_P4
  SITE 270: note = Tnp_P5
MEIHTVGIDLGKSVFHLVGVDAAGEVVVRKKFSREKLLHFTVNLRVERIGMEACPGAHFLGRALRAQGHDVRLMPAQYVKPYVMTNKNDYIDAEAIAEAVWRPKTRFVPIKTDDQLDMQSLHRAREGWVHRRTSLINQIRGLLLERGITIRKGRQHAEEALPRILEDPDRNLSWPLRMLLAQLQQELKQLQRQIEEADAVIFKAASEHEACQRLMAIPGIGPVTATAIIAAIGNGGNFEKGRSFAAWLGLVPRQYSTGGQQKLLGISKRGNCYLRCLLVHGARSVLQFKEKQSPGLSAWLDKLTTRAHHNLAVVALANKLARMAWAVLARGEAYRPLLLAVTKPEAA

SEQ ID NO: 10974 - protein, 350 aa, unidentified
  source 1..350: note = protein_508b6a3
  REGION 12..154: note = RuvC_domain
  SITE 15: note = RuvC_P1
  SITE 58: note = RuvC_P2
  SITE 93: note = RuvC_P3
  SITE 95: note = RuvC_P4
  SITE 98: note = RuvC_P5
  REGION 216..300: note = Tnp_domain
  SITE 224: note = Tnp_P1
  SITE 254: note = Tnp_P2
  SITE 262: note = Tnp_P3
  SITE 263: note = Tnp_P4
  SITE 275: note = Tnp_P5
MEKDDEMKDTMIGVDLAKSVFQLHGASMTGQVKFRKKLTRHQFRQFMAIQAPVILVMEACGSANYWAREMTGLGHEVKLIAPQYVRPFVKRQKNDMADAEAIVIAAQRPEMRFVEPKSEDQQARAVLFRARERLVHQRTELVNALRAVLYEYGNIVPQGIRQLRRIDGILDKPNSGLPVLVREECRDLMAQISEKTARIEAKTKKVKDLAEQTDMARHLQTMPGIGPMTALAIEAFAPDMTSFRRGRDFSAWLGLVPRQHSSGGKERLGRVSKAGQTDIRRLLIIGAMSRLNWMGRRSIPDGSWLAQMLSRKPRMLVAIALANKMARAVWAMLTKGEDYRDPTFAKAAVA

SEQ ID NO: 10975 - protein, 322 aa, unidentified
  source 1..322: note = protein_495e699
  REGION 8..151: note = RuvC_domain
  SITE 11: note = RuvC_P1
  SITE 52: note = RuvC_P2
  SITE 92: note = RuvC_P3
  SITE 94: note = RuvC_P4
  SITE 97: note = RuvC_P5
  REGION 191..278: note = Tnp_domain
  SITE 199: note = Tnp_P1
  SITE 229: note = Tnp_P2
  SITE 237: note = Tnp_P3
  SITE 238: note = Tnp_P4
  SITE 251: note = Tnp_P5
MNKYSETIGIDISKDVFDCYGSVQGHLQFKNTEEGFHNFLKTLTKNSIVVMEATGYYHYRLAQFLYKKNIVVSVVNPLSIKRFIQMKLAKVKTDKSDAKAICNYALINEVPIYSALTDIQSECLQLFRLLDAYLKQRTATKNKIHGEVVLGMPSKFVYRSLVRNKKQLDKEVKAIELKLLSLVKEDQQKQLTLLMSIPGIGQKTALFLIVVTDGFSKFENASQLCSYVGITPTIRESGSSVRGRARISKVGNRNLRNLLFLCSFNACKHNKACKAIYDRIVAKGKSKKLALIAVANKLLKQSFAIAKSGRPYDETYVSILPR

SEQ ID NO: 10976 - protein, 321 aa, unidentified
  source 1..321: note = protein_82f389c
  REGION 15..158: note = RuvC_domain
  SITE 18: note = RuvC_P1
  SITE 62: note = RuvC_P2
  SITE 102: note = RuvC_P3
  SITE 104: note = RuvC_P4
  SITE 107: note = RuvC_P5
  REGION 198..282: note = Tnp_domain
  SITE 206: note = Tnp_P1
  SITE 235: note = Tnp_P2
  SITE 243: note = Tnp_P3
  SITE 244: note = Tnp_P4
  SITE 255: note = Tnp_P5
MQGKVEDKSLPEVHVGVDVSKANLDIHIHPVGEQLRVSNDSAGHDRLVEVLGRFAVKLVLMEPTSRYHRDVQRHLHDAGLPVALVNPLRARLFAEAAGKLAKTDAIDAAMLALMADRFGLSASEPVSRRQEELQELVSARTAALAEQTALRNRLSVTQGSFLKSEHKRRLSSIATHIDRIEVKIEELIKADAEMTRKAKILRSIPAIGPISTQAFLSYLHELGRITNKQAAALVGLAPFARDSGGMRGKRSIRGGRAELRSTLYMAALVASRRNPDLKRFYDGLLARGKAPKLALIAVARKLVALANTLITKNRVWAPKPA

SEQ ID NO: 10977 - protein, 348 aa, unidentified
  source 1..348: note = protein_b4fdd7f
  REGION 6..150: note = RuvC_domain
  SITE 9: note = RuvC_P1
  SITE 54: note = RuvC_P2
  SITE 89: note = RuvC_P3
  SITE 91: note = RuvC_P4
  SITE 94: note = RuvC_P5
  REGION 213..300: note = Tnp_domain
  SITE 221: note = Tnp_P1
  SITE 251: note = Tnp_P2
  SITE 259: note = Tnp_P3
  SITE 260: note = Tnp_P4
  SITE 272: note = Tnp_P5
MNITRVGVDIAKSVFHVHGVDRHDHTQWQAKLKRDRWLDALCDRVAPGAEIGMEACASAHYWGRELQKRGYIVKLIAAQFVKPYVKSNKNDRVDAEAICEAMSRPGMRFVAVKTVEQQDIQAAHRIREELVGQRTAKANQIRGLVGEYGIIAPVGINKLRQALPQWLEDAENGLTDDFRALLFDLAEDLRQLDRRIANLDDRITQTVKTEPVARRLLELRGVGPLTASALAGALGDGRAFGKGRDFAASLGLTPRQHSTGGKDRLLGISKRGDSYLRKLLVHGARAVIRHAKDRDDGLSQWLNQLVARKHANVATVALANKTARIAWAIVHNESSYEPMLAASHSVSQ

SEQ ID NO: 10978 - protein, 350 aa, unidentified
  source 1..350: note = protein_2d67245
  REGION 6..147: note = RuvC_domain
  SITE 9: note = RuvC_P1
  SITE 52: note = RuvC_P2
  SITE 87: note = RuvC_P3
  SITE 89: note = RuvC_P4
  SITE 92: note = RuvC_P5
  REGION 211..296: note = Tnp_domain
  SITE 219: note = Tnp_P1
  SITE 249: note = Tnp_P2
  SITE 257: note = Tnp_P3
  SITE 258: note = Tnp_P4
  SITE 270: note = Tnp_P5
MKLHTIGIDLGKTVFHLVGLDQSGEVIVRKKFSRTQLLRFTAIVQVDLIGMEACAGSHFLGRALREQRHDVRLMPAQYVKPFVKTNKNDFIDAEAIAEAVSRPTMRFVPIKTDEQLDMQSLHRVRERWIMRRTAIVNQIRGLLLERGITVRVGRCHLDAALPNILEDGSTSLSGTLRFLLVELKQELEQLAGHIEQAEALIQRAAQQSEACRRLDAIPGIGPLTATALIAAIGNGGAFRKGREFAAWLGLVPREHSTGGKQKLLGISKRGNGYLRKLFVQGARAVLKYRDKQCSGLRHWLAELSSRSHCNVVGVALANKLARMAWAVLASGDAYRPPVLADMTGLQMAPA

SEQ ID NO: 10979 - protein, 395 aa, unidentified
  source 1..395: note = protein_b5a1577
  REGION 30..182: note = RuvC_domain
  SITE 33: note = RuvC_P1
  SITE 79: note = RuvC_P2
  SITE 119: note = RuvC_P3
  SITE 121: note = RuvC_P4
  SITE 124: note = RuvC_P5
  REGION 274..359: note = Tnp_domain
  SITE 282: note = Tnp_P1
  SITE 311: note = Tnp_P2
  SITE 319: note = Tnp_P3
  SITE 320: note = Tnp_P4
  SITE 332: note = Tnp_P5
MSAEGEAIRSNDYRKDTTVKAPSTRPAAVLGLDVGKSSHWACLIDRDGEVLDSAPVRNREAELDALFASAPAGTLVVVDQFRNIGSLAVRRARAAGLGVAYLPGLAASRAAGLFAGEAKTDERDAAVIARTALGVPDSLSGVPGRGEALEAARALSSQRDHVVACATRDKNRLRAVLLESCPALEAAVDLSDRRWLELLAGFGGAWGIARSGAEGPRAEAAGEAAAASTAPPPALVEAENRQVRFLAARISEALDEAGALEAETAALLEGDETYACLLTVPGIGPRTAAQLAVSVDIGRFPDHDHLASYCGIAPRVRSSGTSVRSVRASRRGDARLKSLLIFSCNSLVRSSGRYGEYYRACRARGMGHGRALKAVARKRLRAIYAVVRDRVPYRE

SEQ ID NO: 10980 - protein, 331 aa, unidentified
  source 1..331: note = protein_907b6d4
  REGION 5..151: note = RuvC_domain
  SITE 8: note = RuvC_P1
  SITE 55: note = RuvC_P2
  SITE 95: note = RuvC_P3
  SITE 97: note = RuvC_P4
  SITE 100: note = RuvC_P5
  REGION 196..283: note = Tnp_domain
  SITE 204: note = Tnp_P1
  SITE 234: note = Tnp_P2
  SITE 242: note = Tnp_P3
  SITE 243: note = Tnp_P4
  SITE 256: note = Tnp_P5
MSVYVGLDISAYTVDAVTRQGDKASKAEPFKQSVEGHQALCSQLKRLQPELIVMEATGIYYFDLAVTLAEAGLPVAVINPKSFRHFAELKLQTSKTDGIDAGLLAEYGQRMAPALWTPPDQHHQALRSLGRQINRLIGSRAQAKNRLHALKATRSTPALLIEDEQEGIATLDRRINRLREAALELLAEAPVLQRQYQHLQAAKGIGEASALSILAELCVLPRGLKSGQISRHAGLDVRQYQSGTSVNRPTRISKAGNVYLRSALYMPALSAVRFDPNAKAFYETLVARGKKKIQALVAVMRKYLTGLWACLKTDTSFDSSRLFQPQASQQG

SEQ ID NO: 10981 - protein, 327 aa, unidentified
  source 1..327: note = protein_a235e54
  REGION 4..154: note = RuvC_domain
  SITE 7: note = RuvC_P1
  SITE 59: note = RuvC_P2
  SITE 99: note = RuvC_P3
  SITE 101: note = RuvC_P4
  SITE 104: note = RuvC_P5
  REGION 199..285: note = Tnp_domain
  SITE 207: note = Tnp_P1
  SITE 236: note = Tnp_P2
  SITE 244: note = Tnp_P3
  SITE 245: note = Tnp_P4
  SITE 258: note = Tnp_P5
MFYLGIDVAKAKLDCCLLDMTNGKRSTKVVANSRAGLTDLLGWLGKRHTEPSHVHVALEGTGVYHEMAACGLHDAGLSVSVVNPAQVRAFATGMGVRTKNDIVDSHVLARFAMHARPMRWSPPAPEARILQALMARHEALAQDLQRERNRHEKAEITAPTALVLHSILETIEFLERHLASLQREIDDHIAAHPGLKANLMLLQSIPAVGPQVGRTLLAIMHARHFDSAEQLAAYLGLVPVQRQSGSSIQGPSRLSKAGPAKVRATLYMAAVVAKRYNPHIKALCERLAARGKSTMSILGAAMRKLVHLCFGVLKTRQPYRANYVAIA

SEQ ID NO: 10982 - protein, 394 aa, unidentified
  source 1..394: note = protein_73ff858
  REGION 4..164: note = RuvC_domain
  SITE 7: note = RuvC_P1
  SITE 59: note = RuvC_P2
  SITE 99: note = RuvC_P3
  SITE 101: note = RuvC_P4
  SITE 104: note = RuvC_P5
  REGION 267..354: note = Tnp_domain
  SITE 275: note = Tnp_P1
  SITE 305: note = Tnp_P2
  SITE 313: note = Tnp_P3
  SITE 314: note = Tnp_P4
  SITE 327: note = Tnp_P5
MILVGIDIGKNKHTFSIIEKDSGEILSPPSDFSNNQNGFLFLIKKLGSYAKSELLIGMEDTGHYHFALLKYLLDRRYTVALINPTTTDLTRKIQGGITKNDPLDSLTICDVIASNQRKKPYRITKVNRFDLYEQKQLTRHHHNLKEELNIYKNRLQKCIDVVFPEFNSLFHSKYGIVYMNILKTFSSAEAVANADIRSIRKCFEVKGQGKRISLSAEQLKLTAKSSIGIPSSAEEIQIRHLVSQIELLEQQISEIDKRIEEFSIQNNSTILSIPGISHFSGTSILAELGDVCNYTKASQIIKFAGVAPYHYESSQFTALHTAITKKGSRYLRKTLYQIILPVINNNEVFYAYYNKKLSEGKGHRCAQGHCIRKLLRIIYHLLTTGQQFTPEFLV

SEQ ID NO: 10983 - protein, 321 aa, unidentified
  source 1..321: note = protein_f739bf1
  REGION 6..148: note = RuvC_domain
  SITE 9: note = RuvC_P1
  SITE 53: note = RuvC_P2
  SITE 93: note = RuvC_P3
  SITE 95: note = RuvC_P4
  SITE 98: note = RuvC_P5
  REGION 191..275: note = Tnp_domain
  SITE 199: note = Tnp_P1
  SITE 228: note = Tnp_P2
  SITE 236: note = Tnp_P3
  SITE 237: note = Tnp_P4
  SITE 248: note = Tnp_P5
MSRILVGVDVCKDFLDAHARPTGVQKRFDNTPAGIEQLVAWVRPLAPERVIFESTGPYQKAAVGALLTADLPAVVVNARQVRDFAKGTGQLAKTDAIDAGILAHFGEVVATVVRPLPSQEILEFREICDRRGQLVRMLASEKNHRHAASGASPKVIKNIDKHIAFLQRQIDDLEERMERIVADSETFQAKDEILQSIVGIGPQVSRTLLVHLPELGTGTRRSIAALAGLAPFADDSGTSSRIRHIRGGRAKVRIALYQAAVAAIRYCTTMKRFYASLKARGKATKVALIAVARKLLVLANALLRTGISYQHPTNSVCLKNA

SEQ ID NO: 10984 - protein, 400 aa, unidentified
  source 1..400: note = protein_4241f5b
  REGION 5..163: note = RuvC_domain
  SITE 8: note = RuvC_P1
  SITE 62: note = RuvC_P2
  SITE 102: note = RuvC_P3
  SITE 104: note = RuvC_P4
  SITE 107: note = RuvC_P5
  REGION 273..362: note = Tnp_domain
  SITE 281: note = Tnp_P1
  SITE 311: note = Tnp_P2
  SITE 319: note = Tnp_P3
  SITE 320: note = Tnp_P4
  SITE 333: note = Tnp_P5
MNPVVGLDVAKGESEAQAFLDKDKPYGKSFRIQHIKEDLDTFISFLKEIERKTGVRPAVILESTGHYHTPIIQCLEESQYLYILVNPIISHQAKKTSLRKVKTDAVDAYQLCVLYYKEEFEPYKKRGLRLLNLRTLSRQYEAVTNLYIQAKLQFHTILDQVFPEYRGVFGDLFSKVSLQVLKEFPTSEDVLRTGEAKILERIVGMRIKRSEGWARERAAKLIASAERNPFQQGVYQSQLFSLDMYISMLLQYQEHLSSIEAEIDVLAEEIEECKIIQSIPGIGGKIAATIISEIGEIDRFNHPKKLVAYAGVDPSVHSSGKFTATINHITKRGSSRLRHALYMAVLCGIRSSRNKKLKEYYDRKRNEGKPSRVAMIACVNKLLHWIYAILKRNEQFLDMA

SEQ ID NO: 10985 - protein, 400 aa, unidentified
  source 1..400: note = protein_2ca77b8
  REGION 5..163: note = RuvC_domain
  SITE 8: note = RuvC_P1
  SITE 62: note = RuvC_P2
  SITE 102: note = RuvC_P3
  SITE 104: note = RuvC_P4
  SITE 107: note = RuvC_P5
  REGION 273..362: note = Tnp_domain
  SITE 281: note = Tnp_P1
  SITE 311: note = Tnp_P2
  SITE 319: note = Tnp_P3
  SITE 320: note = Tnp_P4
  SITE 333: note = Tnp_P5
MNPVIGLDISKGKRYGQVFLDKGKPMGHPFCFQHNQVGLSQLLDVVSTVQDTAGKSPVVILESTGHYHQAVIQFLEEHGILFLVVNPLISHQAKKSSLRKVKTDAVDAYRLCELYYKEEFEDHMQRGVQLLNLRHLTRQFDSLTQMYVQVKLQFQAVLDQVFPDYRGIFGDLYSKVSLLLLKQFMTPGAFQTAGVSTVTHTITCLCPRRSDHWASDKASCIMVAAANNPFPKVSYSSHLISLALFIDLLLQYQEHLSHLQSQIDALAEEVESYQIIQSIPGIGSKIAATILSEIGEIHRFNHAKKLVAFAGIDPSVYSSGKFTATTNRITKRGSKKLRHALYLAVLCGLKKTGSKRLREYYDKKREAGKPYRVALIACVNKLLHWIYALLVKQERFVDLD

SEQ ID NO: 10986 - protein, 389 aa, unidentified
  source 1..389: note = protein_7ef73af
  REGION 4..159: note = RuvC_domain
  SITE 7: note = RuvC_P1
  SITE 57: note = RuvC_P2
  SITE 98: note = RuvC_P3
  SITE 100: note = RuvC_P4
  SITE 103: note = RuvC_P5
  REGION 264..351: note = Tnp_domain
  SITE 272: note = Tnp_P1
  SITE 302: note = Tnp_P2
  SITE 310: note = Tnp_P3
  SITE 311: note = Tnp_P4
  SITE 324: note = Tnp_P5
MFYLGIDIGKNTHVASLIDDKKKVIFKAFSFSNSIDGANSLLEKLSPFIQSLEIGMEATGHYWLSIYSFLVEKNLSVHVINPIQTDGWRNGIEIRKRKTDIIDSILIADLLRYGDFLETSLSNEDYLSLRNLTRFRSYLISSVSDLKRKTIAVLDQVFPEYASSFSNIFGKSSKEILMSISTPQDFENITADKLEKVLENITMKKFAKRKIDELSSKATNSFGVKFCLDSFSLQIKLLIEQISFIESQVITVEQEISILMEKINSPITSIPGIGPITGAVILGEIGDISRFSNPSKLVAYAGLDAVISQSGEFESTSNRMSKRGSPYLRKALFQSALRAEFCDSVFSNYYQKKIFQGKHHLEATNAVARKLCHIIFAILNKNESYLSQM

SEQ ID NO: 10987 - protein, 329 aa, unidentified
  source 1..329: note = protein_e8f98ea
  REGION 6..157: note = RuvC_domain
  SITE 9: note = RuvC_P1
  SITE 60: note = RuvC_P2
  SITE 98: note = RuvC_P3
  SITE 100: note = RuvC_P4
  SITE 103: note = RuvC_P5
  REGION 203..290: note = Tnp_domain
  SITE 211: note = Tnp_P1
  SITE 241: note = Tnp_P2
  SITE 249: note = Tnp_P3
  SITE 250: note = Tnp_P4
  SITE 263: note = Tnp_P5
MKKLFIGIDISKDVFDFYGISETGETVIPSGILFNSKKGIKSFLTMVKKYTGYEPHMCMEHTGLYGYLLMTEFSSASMRFSVINPLEMKLSSGLARGKNDAVDALRIAKYALANRFDLKPFTLASREIRRLKILMAMRDGQVKIMVQQKNSLKAFKLVAADTSLAKELKEHQKLIDAHQKVIAKLEKQMLEIIRGNVQLSESYRKITKVIGVGPLTAIKCLVETENFSKFDDPRKFACHSGLAPFEYQSGSSVRKRARTSPISDKNMKAILFKAASSALQHDPQLKNYYKRKTEEGKHKLSVINAIANKLILRIFAVVKRDEPFVKLSV

SEQ ID NO: 10988 - protein, 331 aa, unidentified
  source 1..331: note = protein_d644985
  REGION 8..157: note = RuvC_domain
  SITE 11: note = RuvC_P1
  SITE 62: note = RuvC_P2
  SITE 100: note = RuvC_P3
  SITE 102: note = RuvC_P4
  SITE 105: note = RuvC_P5
  REGION 205..291: note = Tnp_domain
  SITE 212: note = Tnp_P1
  SITE 242: note = Tnp_P2
  SITE 250: note = Tnp_P3
  SITE 251: note = Tnp_P4
  SITE 264: note = Tnp_P5
MDKFTQFIGIDISKDYFDVAIYVDANSCKHNQFENTKTGVDQFMKWMKSEGCCVEETLICMEHTGIYKNILVDILLSKNCNLWVEMAYRIIRSSGIQRGKNDKIDSKRIALYAKKNQEEAKLFKASKAVLNKIQALLGQREMSIAHKTAIEVRTNEFKGFNDELYKVLSKNDKAILKALENAIKVIEEQLNTLIRENQEVSEIFDCVISVRGVGDITAMFLICYTNAFTSFEDSRQLASYCGVVPFEYTSGKSVRGKAKVHFMANKKLKKLLHLCALSAVRWDPEIRAYYERKVGEGKHKMLVLNNVRNKLVQRICSCVRNKKAYEVRQVA

SEQ ID NO: 10989 - protein, 348 aa, unidentified
  source 1..348: note = protein_265c82e
  REGION 5..163: note = RuvC_domain
  SITE 8: note = RuvC_P1
  SITE 58: note = RuvC_P2
  SITE 100: note = RuvC_P3
  SITE 102: note = RuvC_P4
  SITE 105: note = RuvC_P5
  REGION 277..347: note = Tnp_domain
  SITE 285: note = Tnp_P1
  SITE 315: note = Tnp_P2
  SITE 323: note = Tnp_P3
  SITE 324: note = Tnp_P4
  SITE 337: note = Tnp_P5
MLNAVGIDVSKGQSTISILRPAGEIVRKPFNVVHSVKELSELVSVVGSLEGDTRVVMETTGHYHEPILKAFLDAGIFVSAVNPSLIKRHDSDENPLRKVKSDPADARKIAKYTLDKWEHLHQHSAMDTTRIQLKTLNTQFHFFMQQKVSLKNNLISLLDLTYPGANALFDSPVRSDGSEKWINYVHSFWHVDCVRKIGLKAFTERYQSFCKHHGYNFQPRKPEELFNASRELVAVVPKDPVYKQIILGNIEQLNTVSKQIEEFRHKMNELASSLPEYQTVMSMYGVGPTYGPQLMAEIGDISRFNHRSAITAFAGVDPGVNQSGTMNYESNRASKHGAPRLQKLFSKS

SEQ ID NO: 10990 - protein, 341 aa, unidentified
  source 1..341: note = protein_421f995
  REGION 8..166: note = RuvC_domain
  SITE 11: note = RuvC_P1
  SITE 64: note = RuvC_P2
  SITE 102: note = RuvC_P3
  SITE 104: note = RuvC_P4
  SITE 107: note = RuvC_P5
  REGION 205..292: note = Tnp_domain
  SITE 213: note = Tnp_P1
  SITE 243: note = Tnp_P2
  SITE 251: note = Tnp_P3
  SITE 252: note = Tnp_P4
  SITE 265: note = Tnp_P5
MAKNTFYIGLDIAADDFAASIYQSPGIPVIVKAAISNNPNGFTMLISWLKEHNINQANAVICMEATGVYSESIAHCLSAKGFRVSVEHPLKVKRAFDPTGHKTDPVDSKQIAEYAYRYIDELKFLEPRQEIVEKIKQLFTAREQFTKQKVAIKNAMHAYALHIVQVELIKQAHQETLTQLEKQIAKIDKELSRFIQQNPIIAQRVNNLKSIPGCGMLLAANLIAITDNFKHIDSHNTLAAFIGIVPYKHQSGTSVHKKPRIRHFGPQYTRKLLRLAAQSMVTHNIVFRQYYLRKLAEGKAKALVLNNVSNKLLKIACAMIRDNNSYIKEHRSIHPMYLKTA

SEQ ID NO: 10991 - protein, 342 aa, unidentified
  source 1..342: note = protein_54bbf49
  REGION 7..149: note = RuvC_domain
  SITE 10: note = RuvC_P1
  SITE 53: note = RuvC_P2
  SITE 88: note = RuvC_P3
  SITE 90: note = RuvC_P4
  SITE 93: note = RuvC_P5
  REGION 212..298: note = Tnp_domain
  SITE 220: note = Tnp_P1
  SITE 250: note = Tnp_P2
  SITE 258: note = Tnp_P3
  SITE 259: note = Tnp_P4
  SITE 271: note = Tnp_P5
MSLIKVLGIDLAKYVFSIHGVDEHGKCKLRKTIKRNKLLAEVAKLPPCLIGMEACSGAHYWAREFTKLGHEVRIMAPKFVIPYRQSEKNDANDAEAICEAVTRPKTRFVSVKSEEQQAVLCLHRIRQGLIKDRTARINRLRGLLAEFGIIMPKGRYPAQNAISSILEDAENSLPILARELLNDVWQSIKGLNKEILSYDRRLYALANQMKDTKRLMTIPGIGEVTATAVIAAVNDAKHFSSSRQFAAWVGLVPRQYTTGGQVKLGRISKRGEKHIRTSLIHGARAVIANCKHKTDKTSLWVKDLIERRGFKRATVALAAKNARLIWALLHSGKEYQVNYLHG

SEQ ID NO: 10992 - protein, 340 aa, unidentified
  source 1..340: note = protein_3d280d4
  REGION 7..149: note = RuvC_domain
  SITE 10: note = RuvC_P1
  SITE 53: note = RuvC_P2
  SITE 88: note = RuvC_P3
  SITE 90: note = RuvC_P4
  SITE 93: note = RuvC_P5
  REGION 211..298: note = Tnp_domain
  SITE 219: note = Tnp_P1
  SITE 249: note = Tnp_P2
  SITE 257: note = Tnp_P3
  SITE 258: note = Tnp_P4
  SITE 270: note = Tnp_P5
MNTVTLIGIDLGKHCFHLHGQDAQGRMIFRKKLSRSQMLTQLANIPVCRIVMEACAGAHWIARRLSAMGHEAKLISPQFVKPFVQGNKNDFADAQAICEAASRPSMRFVSPRNEVQQTISATHRVREALVRDRTSATNQIHAFLLEFGISLPKGPAIIKRLPALLAEREADLPPRLVALLERLRDHHKYLDEQIKAVERELTQQLAEDERSQRLLEIPGIGPITASVLAVELGDAHQFANARQFAASIGLVPRQYSTGGKPTLLGISKRGDKNLRRLLVQGARVIMQRIQDRTDALGEWTRHMMCRRHSNVVACALANKMARIAWAILAKGTHYQSHQVV

SEQ ID NO: 10993 - protein, 258 aa, unidentified
  source 1..258: note = protein_81a81d1
  REGION 1..65: note = RuvC_domain
  SITE 5: note = RuvC_P3
  SITE 7: note = RuvC_P4
  SITE 10: note = RuvC_P5
  REGION 129..215: note = Tnp_domain
  SITE 137: note = Tnp_P1
  SITE 167: note = Tnp_P2
  SITE 175: note = Tnp_P3
  SITE 176: note = Tnp_P4
  SITE 188: note = Tnp_P5
MKGNKNDFIDAAAIAEAASRPSMRFVAVKSEDAQVIAVIHRIRDGFIKERTACMSRIGAILLEFGLSLPTGHAKMKILFQWIADQRYQTLPQSLMHELSLIHAHYLYLNEQIKIQDTKLKQLAEQHELAKLLKTVPGIGDLTATLCVADVSAASNFSNGRNMAAWLGLVPRQYSTGGKTKLLGVSKRGNKHLRTLFIHGARAVLSRLETTGKVFGQWLVDLRASKPFNVVVVALANKLARIAWAVLYHRQAFKTASQS

SEQ ID NO: 10994 - protein, 352 aa, unidentified
  source 1..352: note = protein_0e700c2
  REGION 1..106: note = RuvC_domain
  SITE 2: note = RuvC_P2
  SITE 43: note = RuvC_P3
  SITE 45: note = RuvC_P4
  SITE 48: note = RuvC_P5
  REGION 221..308: note = Tnp_domain
  SITE 229: note = Tnp_P1
  SITE 259: note = Tnp_P2
  SITE 267: note = Tnp_P3
  SITE 268: note = Tnp_P4
  SITE 281: note = Tnp_P5
MEATGKYHLLILYELKDRGYFVAVINPLKMKQYCRALNFRKAKNDKIDAKQIAEYGLMYWKDLEEHKVDEENYRVLKELNRNYQHYMDLRINQMNFIDQTIHQTFPGIKKLITHGSGDFSKDKLLDFLEKWWHKDLILEKTEEEFVEEYKTWAKEKRYHPNVNKAKSIYKLAEDSISTQPSHNSKIETNIREGINLIKQINQILNSILSQMIEISEPLEEYKEAKKFSGISEKLAVQIVAEFGDLSKFKNKKSLISFMGIDAPPYESGNFKSDQRKISKRGNAILRKVGYQAMKCMMSAKKPENEIYKYMIKKEKEGKAKKVCKFAGLNKFLRIYYARVMESKAQKQELKVA

SEQ ID NO: 10995 - protein, 344 aa, unidentified
  source 1..344: note = protein_1193a2d
  REGION 6..147: note = RuvC_domain
  SITE 9: note = RuvC_P1
  SITE 52: note = RuvC_P2
  SITE 87: note = RuvC_P3
  SITE 89: note = RuvC_P4
  SITE 92: note = RuvC_P5
  REGION 211..297: note = Tnp_domain
  SITE 219: note = Tnp_P1
  SITE 249: note = Tnp_P2
  SITE 257: note = Tnp_P3
  SITE 258: note = Tnp_P4
  SITE 270: note = Tnp_P5
MKITTIGVDLAKTVFAIHGVDARGKAVLRKSLKRHQVLAFFGNLPPCLVGMEACGSAHHWARQLTALGHTVKLMAPQFVKPYVKTNKNDSADAEAICEAVARPTMRFVPGKTAESQAILAVHRARQAFVKARTAQANQIRGLLSEFGLVIPQGLGRIAPQIPRILEDADNGLPDTMRPLIARLAAHLKELDRQVDELEAEIQAWHRQSDASRRLQKVPGIGPLTASALVASIGDATAFVNGRQFAAFLGLVPRQHSSGGKPTLLGISKRGDVYLRTLLIHGARAVIRASERKTDTDSWLKRLMGRRNKNVAAVALANKNARIVWALLAHGRDYQEGFTPVSVAA

SEQ ID NO: 10996 - protein, 391 aa, unidentified
  source 1..391: note = protein_fc4b41a
  REGION 4..163: note = RuvC_domain
  SITE 7: note = RuvC_P1
  SITE 60: note = RuvC_P2
  SITE 101: note = RuvC_P3
  SITE 103: note = RuvC_P4
  SITE 106: note = RuvC_P5
  REGION 266..353: note = Tnp_domain
  SITE 274: note = Tnp_P1
  SITE 304: note = Tnp_P2
  SITE 312: note = Tnp_P3
  SITE 313: note = Tnp_P4
  SITE 326: note = Tnp_P5
MIYVGIDVAKDKHDCFITNSDGEVLFKSFTIPNNREGFETLFQKVQSVSDDLTKVKVGLEATGHYSYNLLGFLLNKGLTTFVINPLHTNLYRKSLSLRQTKTDKVDARTIASILMSDVNLKSYSDISYHNEELKSLTRYRFDKVKERAKLKSSVSRLICILFPELEKLVPTLHMASVYALLSEFPGAKQVANAHLTRLTNLLSEASKGRYSKDTAITFRDAARTSIGSNMPAKSLELKHTIKLIKELDSEIDEIENEIKIIMDEINSPILSIPGINYRMGAMIIAEIGDFSRFDSPDKILAYAGFSPSTYQSGHLYGAYAHMEKRGSRYLRYALYNAAKYVCHWDPTFTAYLAKKRAEGKHYNVAISHAVKKLIRVIYHLEKTNQQYIKAS

SEQ ID NO: 10997 - protein, 343 aa, unidentified
  source 1..343: note = protein_48916b5
  REGION 6..149: note = RuvC_domain
  SITE 9: note = RuvC_P1
  SITE 54: note = RuvC_P2
  SITE 89: note = RuvC_P3
  SITE 91: note = RuvC_P4
  SITE 94: note = RuvC_P5
  REGION 213..299: note = Tnp_domain
  SITE 221: note = Tnp_P1
  SITE 251: note = Tnp_P2
  SITE 259: note = Tnp_P3
  SITE 260: note = Tnp_P4
  SITE 272: note = Tnp_P5
MKLSYVGVDLAKNVYQLHGVDRHGKTVWKRRLRRGQWLQALIDNVEPGCEIGMEACTGAHHWVRELQSRGYMVRLIAPQFVKPYVKSNKNDANDAEAICEAMSRPHMRFVTVKSIEQQDIQATHRVRTEIKDHRNAKANQIRGLVAEYGLAAPQTLLALRRAIPEWLEDAENGLTDYFRSLLHGLWDDLLTLEDRLKELDKEIEKLARSNEVAKRLQQLRGVGPIVATALVATVGDGAQYSKARQMAAALGLTPRQNSSGDKNRLFGISKRGDVYLRTQMIHGARAVVSQAKHRDDPLSRWVTDIAKRRHPNVAAVALANKTARMAWAMLRNDTDYDPGISAS

SEQ ID NO: 10998 - protein, 343 aa, unidentified
  source 1..343: note = protein_42f9b53
  REGION 7..149: note = RuvC_domain
  SITE 10: note = RuvC_P1
  SITE 53: note = RuvC_P2
  SITE 88: note = RuvC_P3
  SITE 90: note = RuvC_P4
  SITE 93: note = RuvC_P5
  REGION 212..296: note = Tnp_domain
  SITE 220: note = Tnp_P1
  SITE 250: note = Tnp_P2
  SITE 258: note = Tnp_P3
  SITE 259: note = Tnp_P4
  SITE 271: note = Tnp_P5
MEKITTIGLDLAKSVFQVHAVTKDGRVVIRRALRRSQLLEFFRSVEPCLVGLEACASAHHWANAIGQFGHTVRMMPPAYVKAYVKRNKTDAADAEAICEAVTRPTMRFVPIKSPEEQAAGMVLKTRELFIRQRSQTANAMRAHLAELGIVAATGMTSIAKLVAILRDDDDARLPSAARTALLEMAEQIERLTARIEALDTKIMTAVKADETARRLTSIPGVGPIIAATVRATIQDPAAFRTGRDLAAWIGITPRANSSGGKERLGRISKRGNKQLRTLLIVGATSILKQARRGVKLPAWVVSLIARRPYKVAAVALANKMARTIWALLVKGGTYQAPAIMGRA

SEQ ID NO: 10999 - protein, 388 aa, unidentified
  source 1..388: note = protein_bbdbb8b
  REGION 4..160: note = RuvC_domain
  SITE 7: note = RuvC_P1
  SITE 58: note = RuvC_P2
  SITE 99: note = RuvC_P3
  SITE 101: note = RuvC_P4
  SITE 104: note = RuvC_P5
  REGION 264..350: note = Tnp_domain
  SITE 271: note = Tnp_P1
  SITE 301: note = Tnp_P2
  SITE 309: note = Tnp_P3
  SITE 310: note = Tnp_P4
  SITE 323: note = Tnp_P5
MIYVGIDVAKDKHDCFIVNSDGEVIKDVFTFKNDLEGFKQFFSAIPDVPLDKIKVGLEATGHYSINLTNFISNHHLPLVILNPLQTNLFRKAQTLRKSKTDKIDAKLIALMLQTGNFESHTNSSYHLVELKSLTRHRSRIKENLSKYKISLIRMTDIMFPELASVVYSINQSSTYAVLRTFPSAQAIASAHLTKLTTLLHHTSRGKYGKAKALEIRQAARISIGSESRALSFELIQILHFIEYYTQEIAQIDKEIKSIMDELESPILSFPGISYGLGSVILAEVGDIRRFSSPAKLLAFAGLEPSTFESGKFVASNMKMVKRGSPYLRWALLEAARLVAMRDQTFKDYYQKKKAEGKHHYVVLSHVAKKLVRVLYHILFNNLTFQPQI

SEQ ID NO: 11000 - protein, 404 aa, unidentified
  source 1..404: note = protein_7dd8802
  REGION 4..160: note = RuvC_domain
  SITE 7: note = RuvC_P1
  SITE 57: note = RuvC_P2
  SITE 97: note = RuvC_P3
  SITE 99: note = RuvC_P4
  SITE 102: note = RuvC_P5
  REGION 270..356: note = Tnp_domain
  SITE 278: note = Tnp_P1
  SITE 309: note = Tnp_P2
  SITE 317: note = Tnp_P3
  SITE 318: note = Tnp_P4
MIFVGVDWAESHHDICVLDEAGDILGRRRIEDTLEGVRLLHELLAPHAQEPDEVIVGIEKDRGLIVTAMLGANYRVYALNPMSVARYRERHVTSGSKSDPGDAKVLADLVRTDRHNHREVAGDSEDADAIKVLARAHQNAIWARQREKNALRNALKDYYPGALNAFGTDLDDGDAVEILAIAPTPSLARALSLSKITSAFRRGGRQRNIERTATKIQQALREEQLRERPRVEAAFGKITSAHVAMIRAYSDTINELERALTEDFEQHPDAKIILSLPGLGMVLGARVLGEFGDDPNRYADAKSRRNYAGTSPVTKASGKARVVLARHSRNKRLASAADQWAFCSLTKSPGARAYYDELRARNKTHRQAIRQLANRWVGIFHACLEQNVLYDEQLAWKHRLEIAA

SEQ ID NO: 11001 - protein, 404 aa, unidentified
  source 1..404: note = protein_d32384e
  REGION 4..160: note = RuvC_domain
  SITE 7: note = RuvC_P1
  SITE 57: note = RuvC_P2
  SITE 97: note = RuvC_P3
  SITE 99: note = RuvC_P4
  SITE 102: note = RuvC_P5
  REGION 275..362: note = Tnp_domain
  SITE 283: note = Tnp_P1
  SITE 313: note = Tnp_P2
  SITE 321: note = Tnp_P3
  SITE 322: note = Tnp_P4
  SITE 335: note = Tnp_P5
MNAIGIDVSKGKSTVAVLRPYGEVVVSPFDVAHTGSDLRALADLIKKLPGETKVVMEATGNYFESIARYLHEQNIFVSVVNPVLISDFGGNTLRKPKTDKKDSVKIASYALTYWLDLKEYTSQEDLRKSLKLMNRQYQQSIKLKTMMNNNLISLLDLTFPGINKLFTSPSRESDGHEKWVDFVLEFSHCDMISKLTIKAFAKKYKKWSDKNSYHFTESSCEKIYAFAKDCVSSVSSDKAIVFSVVQAAKMLISATENCHAIQSEMNRVASKLPEYDTVMNMYGVGKAVGPQLMAEIGDPRRFHSRKAITAYFGYDSENNDSGQKTTRSNPMTKKGSGALRRTLFIIMQVLLQTKPQDNPVYDFLIKKKSEGKHYYSYINAAANKFLRIYYARVKEVLNVSEQMT

SEQ ID NO: 11002 - protein, 391 aa, unidentified
  source 1..391: note = protein_3784958
  REGION 4..163: note = RuvC_domain
  SITE 7: note = RuvC_P1
  SITE 60: note = RuvC_P2
  SITE 101: note = RuvC_P3
  SITE 103: note = RuvC_P4
  SITE 106: note = RuvC_P5
  REGION 266..353: note = Tnp_domain
  SITE 274: note = Tnp_P1
  SITE 304: note = Tnp_P2
  SITE 312: note = Tnp_P3
  SITE 313: note = Tnp_P4
  SITE 326: note = Tnp_P5
MIYAGIDIAKDKHDCFITNSDGEVLFKAFTFPNNRDGFDELYQKIISVTDDLTEVKVGLEATGHYSYNILGYLLDKGLTTFVINPLHTNLYRKSLSLRKTKTDKVDAHTIATMLMSDVNLKSYSDTSYHNEELKSLTRYRFDKVKERAKLKTSISRLVTILFPELEKHVPTLHMASVYALLSEFPSASDISSAHLTRLTNLLSVSSKGHYGKDTANLFREAARTSIGSHMPAKSLELKHTIRLIKELNSEINEIESQIKSIMDNINSPILSIPGINYRMGSMIIAEIGDFSYFDSPDKILAYAGLSPSTYQSGQLDSSYARMEKRGSKYLRYALFNATIFVCHWDPTFSAYLAKKRSEGKHYYVAISHAAKKLVRVIYRLEKSGQSYIKAA

SEQ ID NO: 11003 - protein, 307 aa, unidentified
  source 1..307: note = protein_638586d
  REGION 1..76: note = RuvC_domain
  SITE 15: note = RuvC_P3
  SITE 17: note = RuvC_P4
  SITE 20: note = RuvC_P5
  REGION 180..267: note = Tnp_domain
  SITE 188: note = Tnp_P1
  SITE 218: note = Tnp_P2
  SITE 226: note = Tnp_P3
  SITE 227: note = Tnp_P4
  SITE 240: note = Tnp_P5
MQTSHLRKANIRDAKNDNLDSLNIAKSLIVTKLNFVSKKNIECFSLKKLTRFRSNLIKQRSKAKIQLTSLLDLLFPELQYLFKSKIHSKAIYSLLKKYPSAEEIAALKDDEISNLLYASSKGHFKKEKSIELKSLAKTTVGIKDTSISLHLIQLIELIELYTKQIKDIEIKITDIVNNLDTTLLSVPGISVIACAIILGETNNFENFSSSKKLLAFAGLDPKIRQSGNFNASSCRMSKKGSPYLRYALIFTAWNIVRHSEKFNKYYSLKRSQGKSHYNALGHVAHKLVRILFTLIKKNISYQEEKLE

SEQ ID NO: 11004 - protein, 341 aa, unidentified
  source 1..341: note = protein_159bdb5
  REGION 7..149: note = RuvC_domain
  SITE 10: note = RuvC_P1
  SITE 53: note = RuvC_P2
  SITE 88: note = RuvC_P3
  SITE 90: note = RuvC_P4
  SITE 93: note = RuvC_P5
  REGION 211..295: note = Tnp_domain
  SITE 219: note = Tnp_P1
  SITE 249: note = Tnp_P2
  SITE 257: note = Tnp_P3
  SITE 258: note = Tnp_P4
  SITE 270: note = Tnp_P5
MTEVSTIGLDLAKNVFQAHGADAAGAPVFRKKLRREEVLGFFAAQPPRLVAMEACPGAHHWAREIGKLGHAVRLIAPAYVKPFVKRQKNDAADAEAICEAAQRPTMRFVAVKSETKQASAVIFRTRDVLVGQRTQLINAIRGHLSEYGLIAPQGPFHIEKLIAQIEDPASGLPQAARTCLAVLVDALRHLQEQTAALDAEIAARAKADDVTRSLMTVPGIGPLIATAIEALAPPPETFRSGRDFAAWVGLTLVQRSTGGKERLGRTSRMGERTLRRLLIIAASGVVRWAKRKGTLPDSWLGRMLARKPPMLVIVALANKNARVAWALLTKGGTYRAPAVVA

SEQ ID NO: 11005 - protein, 345 aa, unidentified
  source 1..345: note = protein_369fbce
  REGION 4..155: note = RuvC_domain
  SITE 7: note = RuvC_P1
  SITE 55: note = RuvC_P2
  SITE 95: note = RuvC_P3
  SITE 97: note = RuvC_P4
  SITE 100: note = RuvC_P5
  REGION 217..302: note = Tnp_domain
  SITE 225: note = Tnp_P1
  SITE 255: note = Tnp_P2
  SITE 263: note = Tnp_P3
  SITE 264: note = Tnp_P4
  SITE 275: note = Tnp_P5
MVILGADLHKRTHTVVAVDDRGRKLGERTVAATSDGHLELRRWARQWPERRWALEDCRHLSRRLEVDLLRSGESVCRVPPKLMAGARRSVREPGKSDPIDALAVAQAALREPDLPVATLDGPDRVLRLLGDHRDDLVAERTRHEQRLRWHLVELGVDEPRPRSLDRVAVQTSLRTILADRSEPVARFARELLGRIVDLSVTIRALEHEIEQLVRSLAGTLLALPGCGPLTAAKIVGETAGMSRFRSKEAFARHNGSAPVPVWSGSTVRHRLNRGGNRQLNLALHRIAITQMRIDARGRAYLDHRRAAGDTKTEAIRALRRRISDDVFRRLRLDEAVRSTALAAAA

SEQ ID NO: 11006 - protein, 336 aa, unidentified
  source 1..336: note = protein_4d4894a
  REGION 4..155: note = RuvC_domain
  SITE 7: note = RuvC_P1
  SITE 60: note = RuvC_P2
  SITE 100: note = RuvC_P3
  SITE 102: note = RuvC_P4
  SITE 105: note = RuvC_P5
  REGION 200..286: note = Tnp_domain
  SITE 208: note = Tnp_P1
  SITE 237: note = Tnp_P2
  SITE 245: note = Tnp_P3
  SITE 246: note = Tnp_P4
  SITE 259: note = Tnp_P5
MFQLGVDVSKKTLDLCLLCEGIKGKVKTRKLKNDFNAATAVISWLCKQHVGLKNVHIIMEATGVYHESLAYGLHKAGAIISLANPYRSREFARGMGILTKNDRVDAYMLACYGALKAPEAWIPPPDNILHLSALLRRRDALVADSIREKNRLEKCRATDTPAVITESIENMLRSLNAELKHLDALIQSHLDQHPELKRNFDLLTSIKSVGFLLGLNMLVILRCHHFETAEQAAAFLGVVPVEKNSGTSVRGWGRLSKIGPPELRAKLYLASLCGMRFNPAMKAMYERLCQRGKAKMCAIGALMRKLVHWCYGVLKTQKPFDAEYRFSDEHGACKVT

SEQ ID NO: 11007 - protein, 324 aa, unidentified
  source 1..324: note = protein_371c27f
  REGION 5..160: note = RuvC_domain
  SITE 8: note = RuvC_P1
  SITE 58: note = RuvC_P2
  SITE 98: note = RuvC_P3
  SITE 100: note = RuvC_P4
  SITE 103: note = RuvC_P5
  REGION 196..282: note = Tnp_domain
  SITE 204: note = Tnp_P1
  SITE 234: note = Tnp_P2
  SITE 242: note = Tnp_P3
  SITE 243: note = Tnp_P4
  SITE 255: note = Tnp_P5
MSTVVGIDVAKHTFDIATLQANGKHRTKAKLANDPKGFEVLLQWLNKHAEAQAWIVMEATGIYHEALAEWLYERGYQVCVLNPAQIAFYARSQLQRVKTDKVDAKLIADYGHRHQKELRAWKPEQPSIKRLKALTHRLKDLQELEQMEQNRLDVTSDAKVAASIQSVLGHIRQQIADTLKAIKQHFDDNDDLRGQRDLLKSIDGIADRTAALLLAELGDIRRFDDSRAVTAFAGLNPRLQESGKHKGHVRISRMGSALLRGGLYLPAVTSLTYNSAIRAMAERLRAKGKTGKQIVCAAMRKLLCIAYGVLKSGQPFNPQLAIAR

SEQ ID NO: 11008 - protein, 400 aa, unidentified
  source 1..400: note = protein_a14e198
  REGION 11..166: note = RuvC_domain
  SITE 14: note = RuvC_P1
  SITE 63: note = RuvC_P2
  SITE 103: note = RuvC_P3
  SITE 105: note = RuvC_P4
  SITE 108: note = RuvC_P5
  REGION 273..358: note = Tnp_domain
  SITE 281: note = Tnp_P1
  SITE 311: note = Tnp_P2
  SITE 319: note = Tnp_P3
  SITE 320: note = Tnp_P4
  SITE 332: note = Tnp_P5
MVNTEDVGVFLGLDVGKSFHHGHGLTPSGKKVFDRQLPNSEPKLRALFDKLTSKFGTVLVIVDQPASIGALPLTVARDTGCRVAYLPGLAMRRIADLYPGEAKTDARDAAVIADAARTMPHTLRTLELTDQITAELTVLVGFDQDLAAEANRTSNRIRGLLTQFHPSLERVLGPRLDHPAVTWLLERHGSPQALRKAGRRRLVETIRPKAPRMAARLIDEVFDALDEQTVIVPGTGTLDLVIPSLARSLAAVHQQRQALEDQIETLLEAHPLSQVLTSMPGVGVRTAAVLLVTVGDGTSFPTPGHLASYAGLAPATKSSGTSIHGEHAPRTGNRQLKRAMFLSAFAALHDPASRTYYDKCRTRGKTHTQALLRLARHRISVLFAMLRDGTLYQHRPPRTT

SEQ ID NO: 11009 - protein, 272 aa, unidentified
  source 1..272: note = protein_ec79357
  REGION 4..101: note = RuvC_domain
  SITE 41: note = RuvC_P3
  SITE 43: note = RuvC_P4
  SITE 46: note = RuvC_P5
  REGION 165..226: note = Tnp_domain
  SITE 173: note = Tnp_P1
  SITE 203: note = Tnp_P2
  SITE 211: note = Tnp_P3
  SITE 212: note = Tnp_P4
MPDRMEACATAHYWARELSALGHEVRLMPPSYVKAYLRRQKNDAADAEAICEAVTRPTMRFVPVKSAERQAILTLHRTRELLVRQKTTLIRAIRSHCAEFGLVVPQGARRITDLLQLVRETHPSTLPQAAVLTMQMLGAQLDALAVQIRTLERRLLAWHRENETSQRLATIPGVGIITSTALAASISDPKLFKSGREFAAFLGLVPRQNSSGGKERLGPNLQEGRWLSAQAPRGRGYVGDPACSNRCDAISWLGPGVTGASAIPRRDRSHGQ

SEQ ID NO: 11010 - protein, 342 aa, unidentified
  source 1..342: note = protein_8af870d
  REGION 6..147: note = RuvC_domain
  SITE 9: note = RuvC_P1
  SITE 52: note = RuvC_P2
  SITE 87: note = RuvC_P3
  SITE 89: note = RuvC_P4
  SITE 92: note = RuvC_P5
  REGION 210..295: note = Tnp_domain
  SITE 218: note = Tnp_P1
  SITE 248: note = Tnp_P2
  SITE 256: note = Tnp_P3
  SITE 257: note = Tnp_P4
  SITE 269: note = Tnp_P5
MKDMMIGVDLAKSVFQVHGVLQTGEVLVRKKLTRKQFVAFMANQEPCLVVFEACSGAHYWAREMEALGHEVKLIAPQYVRPFVKRQKNDAADAEAIVIAARQPEMRFVAIKTVEQQSRAALFRGRERLVHQRTEDVNALRALLYEHGYIFPVGIRSLGRMAAILEDETANLPTLIRGECKELLAQVAEKTARIVERNKKLSALASQSDRARRLQTMPGVGPITAIAVEAFGPDMSQFKTGRDFAAWLGLVPKQHSSGGKERLGRMTKAGQADIRRLLIIGAMSRLNWLGARAVAEGSWLSRMLARKPKMLVAIALANKMARQIWAMLTKHEDYKDPELAGSA

SEQ ID NO: 11011 - protein, 350 aa, unidentified
  source 1..350: note = protein_36a5830
  REGION 13..154: note = RuvC_domain
  SITE 16: note = RuvC_P1
  SITE 59: note = RuvC_P2
  SITE 94: note = RuvC_P3
  SITE 96: note = RuvC_P4
  SITE 99: note = RuvC_P5
  REGION 218..303: note = Tnp_domain
  SITE 226: note = Tnp_P1
  SITE 256: note = Tnp_P2
  SITE 264: note = Tnp_P3
  SITE 265: note = Tnp_P4
  SITE 277: note = Tnp_P5
MTIRNKPRPAAVFGIDIGKNLFHVVGLDPTGAPIQKVTFRRETLLQFFERASPTLVGMEACPGSQWLARKISALGHTVRIIPAQFVKPYVKSNKSDIIDAAAIAEAATRPTMRFVEIKTTEQVDLQALHRIRDRMIAHRTRLINQMRAFCLEYGIASHQGAGKFKVDLPKILADEGNDLTPAMRRILAMSFDELAELEGRIDGLNREIEGIAARSDTARRLMSIPGIGPLGATALLASAGSAKQFKKARDMAAWLGLVPREYSTGGKTTLLGISKRGNKYLRRMLIHGARSCVNHLDRTRDRLGNWLDGLQSRMHKNKVTVALAAKIARIAWVIMTRSGSTYDRQDPAFS

SEQ ID NO: 11012 - protein, 343 aa, unidentified
  source 1..343: note = protein_0a1ce01
  REGION 6..148: note = RuvC_domain
  SITE 9: note = RuvC_P1
  SITE 52: note = RuvC_P2
  SITE 87: note = RuvC_P3
  SITE 89: note = RuvC_P4
  SITE 92: note = RuvC_P5
  REGION 211..296: note = Tnp_domain
  SITE 219: note = Tnp_P1
  SITE 249: note = Tnp_P2
  SITE 257: note = Tnp_P3
  SITE 258: note = Tnp_P4
  SITE 270: note = Tnp_P5
MKITTAGIDLAKNLQQVYGVDERGKAVLKKQLKRSQVLSFFVNLPPCLIGMEACGSAHHWARKLQELGHTVKLMAPQFVKPYVKTNKNDVADAEAICEAVSRPNMRFVPIKNAEQQAVLALHRARQGFVRARTAQANQIRGLLGEYGIVIPQGICHISKRLPGILEDGESDLPGMFRQLLQRLGEHLKELDRQVGELELQIQLWHREHDASRKLAQIPGIGPITASALVASIGDAKSFKNGRQLAAWLGLVPRQHSTGGKSTLLGISKRGDTYLRTLLIHGARSVIRVAEGKVGYAESWLARLIGRRHPNVVAVALANKNARIVWALLKHERDYQPDYQPSAA

SEQ ID NO: 11013 - protein, 402 aa, unidentified
  source 1..402: note = protein_ef03ac5
  REGION 4..160: note = RuvC_domain
  SITE 7: note = RuvC_P1
  SITE 57: note = RuvC_P2
  SITE 97: note = RuvC_P3
  SITE 99: note = RuvC_P4
  SITE 102: note = RuvC_P5
  REGION 274..361: note = Tnp_domain
  SITE 282: note = Tnp_P1
  SITE 312: note = Tnp_P2
  SITE 320: note = Tnp_P3
  SITE 321: note = Tnp_P4
  SITE 334: note = Tnp_P5
MNSVGIDVSKGRSTVAAMRPFGEVAISPFEVSHTDSELSELARQLKSLDGETRVVMEATGNYHLPVAQALRDAGLYVSVVNAKLVHGYGNNELRRVKTDRKDAVKLANYGLDRWLSLPRYIPEENTRLLLKNCYRQYQQGCKVQTMQKNNLVSLLDTTFPNANRLFHGPVRADGSEKWVDFVAEFWHCECIRERSEKVFTTKYQRWCKKNGYNFSEEKARNIYNEACGCVGVMPKSSTARLLVEQAVSQLKATSSALAALKQEMQTLAAQLPEYPVVMGMFGVGPTLGPQLMAEIGDVRRFYSKKALVAYAGIDAPPNDSGDVTGRHKAMSKVGASSLRRTLFLVMSVYLQNSPLDEPVYQFMDRKRSEGKPYRVYMMASANKFLRIYYATVKAYLNTLEQV

SEQ ID NO: 11014 - protein, 312 aa, unidentified
  source 1..312: note = protein_01556e5
  REGION 2..112: note = RuvC_domain
  SITE 16: note = RuvC_P2
  SITE 51: note = RuvC_P3
  SITE 53: note = RuvC_P4
  SITE 56: note = RuvC_P5
  REGION 175..257: note = Tnp_domain
  SITE 183: note = Tnp_P1
  SITE 213: note = Tnp_P2
  SITE 221: note = Tnp_P3
  SITE 222: note = Tnp_P4
  SITE 234: note = Tnp_P5
MLKFFAQVPPCLIGIEACGTAHYWARQLSALGHDVRLMPPAYVKPYVKRQKNDAADAEAICEAVMRPTMRFVPVKSVEQQSAAMLHRSRALLIKQRTMLLHSIRAQLAELGISIGVGISQMARVVRELAQGERSDLPELARFVLEALANLVCDLAQRLQAIEKKLISWHYRNDLSNRLETIPGVGFVTASALSSIVPDPQVFKSGRHFAAWLGLVPRQNSSGGKTRLGRISKQGNRYIRQLLILGATSVLRYIRRDGGSGTGWIGGLLRRRPPKVAAVALANKMARIAWSIMKRGGEYEEINDLRAVQPVNC

SEQ ID NO: 11015 - protein, 344 aa, unidentified
  source 1..344: note = protein_00ff113
  REGION 9..149: note = RuvC_domain
  SITE 12: note = RuvC_P1
  SITE 55: note = RuvC_P2
  SITE 90: note = RuvC_P3
  SITE 92: note = RuvC_P4
  SITE 95: note = RuvC_P5
  REGION 213..309: note = Tnp_domain
  SITE 221: note = Tnp_P1
  SITE 251: note = Tnp_P2
  SITE 259: note = Tnp_P3
  SITE 260: note = Tnp_P4
  SITE 272: note = Tnp_P5
MAKMPIAVLGIDLGKNSCSVAGLDMNRAVVLRRKMTRETLVAFASKLPACIVAMEACCGAHFLGRTFAAQGHTVRLISPEYVQPYVKSQKTDDRDAEAIAEAATRPTMRLVTLKSEAQLDLQVLHRARDRLVTARTRLTNQLRPVLLERGVILPKRRAPLRHRLHELMAGELPIGPRVVRLLQDLPEEWANLDERINAYDDELAALTREDQQARQLATIPGIGVINATTLLAAVGDGSAFAKGRDLAAWLGLTPRQHSTGGKTKLLGISKRGNKYLRTQLIHGARAALVHFAKTPTRIGAWIRQLLIRAHPNVVVVALAAKLARIVWAVLRHGRAFEHQGYAVS

SEQ ID NO: 11016 - protein, 340 aa, unidentified
  source 1..340: note = protein_3c36848
  REGION 6..148: note = RuvC_domain
  SITE 9: note = RuvC_P1
  SITE 52: note = RuvC_P2
  SITE 87: note = RuvC_P3
  SITE 89: note = RuvC_P4
  SITE 92: note = RuvC_P5
  REGION 211..302: note = Tnp_domain
  SITE 219: note = Tnp_P1
  SITE 249: note = Tnp_P2
  SITE 257: note = Tnp_P3
  SITE 258: note = Tnp_P4
  SITE 270: note = Tnp_P5
MTLTTIGIDLAKSVFQLHGVDAHGEVLFRKKLRRNGVLDFLRDLPPCLVGLEACATAHFWAREIGALGHKVKMIPPAYVKPYVKRQKNDVADAEAICEAVTRPTMRFVPVKSAQRQGVMMLHRTRDLLMRQRTMVLNAIRGHLAEFGIITAQGPHKLAALLEAMRDEEMPGLPDIARSALSSLMAQLDNLAAEIRALERRLMAWHREDETSQRLETIPGVGLITATALSASIPDPSVFKSGRQFAAFLGLVPRQNSSGGKDRLGCISKMGDGYLRRLLVVGATSVIRRVGTNTSATGNWVRRLLERKPARVATVAMANKTARIAWAVLARGETYRAPAMV

SEQ ID NO: 11017 - protein, 323 aa, unidentified
  source 1..323: note = protein_86f89fe
  REGION 9..153: note = RuvC_domain
  SITE 12: note = RuvC_P1
  SITE 56: note = RuvC_P2
  SITE 96: note = RuvC_P3
  SITE 98: note = RuvC_P4
  SITE 101: note = RuvC_P5
  REGION 191..276: note = Tnp_domain
  SITE 199: note = Tnp_P1
  SITE 228: note = Tnp_P2
  SITE 236: note = Tnp_P3
  SITE 237: note = Tnp_P4
  SITE 248: note = Tnp_P5
MAKRITICAGIDTGKEKLDVAVDGATEQLRVDNTARGHQALVEWLKCRKVKRVGIEASGGYEQAVVAELRRKRFVVILFQPKQVRAYGTFHLLLAKNDKIDAALIAMCTAAVKTIHPAPDPRLQPFAEHLTMIDQITEDIARLKNRLESCRDKRIQGVWKVQIALLAKSKRAEFKALLAAIRTHSDLAARLDLIYSVAGCGLPTAAAVLIRMPEIGNITRERASALSGLAPYDDDSGKRSGARHIEGGRERLRWALYNAALPASSRWNPQIKALYGRLIAAGKPHKCALVACARKLLVTINAVVARGTPWVAQVPQLAKLPAA

SEQ ID NO: 11018 - protein, 389 aa, unidentified
  source 1..389: note = protein_ec0c178
  REGION 4..161: note = RuvC_domain
  SITE 7: note = RuvC_P1
  SITE 59: note = RuvC_P2
  SITE 100: note = RuvC_P3
  SITE 102: note = RuvC_P4
  SITE 105: note = RuvC_P5
  REGION 264..349: note = Tnp_domain
  SITE 271: note = Tnp_P1
  SITE 301: note = Tnp_P2
  SITE 309: note = Tnp_P3
  SITE 310: note = Tnp_P4
  SITE 322: note = Tnp_P5
MYFIGIDISKYKHDCFIVSSEGEAPFGVFSFENNKAGFEMFLDKLNSLDSFEEKRIGFESTSHYSLNLKLFLEKHNYTFMEFQPALISQYGKALTLRKTKTDAIDAQTIARWLMNIDYKPYPHSFYHNYSLKSLTRLRFSLIKQRNLYLIKLTDILDHTFPEFKPFFNDRFGVTALHILEKYGNPSKIANMRTTSYDELRRISRGKFSMQKFLKLKELAKDTVGESNHIFELELSCILRLYKEIDDEITKLEEEITVLTNELNRPTMTIPGVGVLSAAVILSEYGDVSKFKSPAQMLSFAGLEPGYYQSGQSEHTGHMVKRGSSHLRCAIMNCCLPLIQFNMVFAEFYAKKRGEGKPHRVALSHVAKKLIRVIYTLETTNQPFDADKLR

SEQ ID NO: 11019 - protein, 396 aa, unidentified
  source 1..396: note = protein_c2476c9
  REGION 4..158: note = RuvC_domain
  SITE 7: note = RuvC_P1
  SITE 59: note = RuvC_P2
  SITE 99: note = RuvC_P3
  SITE 101: note = RuvC_P4
  SITE 104: note = RuvC_P5
  REGION 264..354: note = Tnp_domain
  SITE 272: note = Tnp_P1
  SITE 302: note = Tnp_P2
  SITE 310: note = Tnp_P3
  SITE 311: note = Tnp_P4
  SITE 327: note = Tnp_P5
MTTIGIDIGGRTHAVARCRDGQARADREILRVSQSRAGFAALDTWLERQAEPVTLVTMESSGHYWMSLASHLGRHDIPVAVVNPLAAKYFARSRLSRTKSDPADARSLAEMAMRDTPPARDPLTGVELRQAARFAMTLVTEQAKVCQRLIRLVELGFPELGELFEDPTCRTARAVLRIAPTARAASRRRTSTLAAANAGPGHRRLGPARAERLQAAAADSIAVPELDAEVAFEVGLLLDQYDLLEDQIEDADRRVASLLDGETARRLRTIPGVGPAIAATLLAEIGDIARFTDFDQLLAYAGVHPAERSSGRKGANPETAWHMSKAGNSHLRAAAYRMAIVGVGHNPVIASHYARKRAAGKSKMNALGHCMRKALSLVWGVWRNGQDFDPNWGAEA

SEQ ID NO: 11020 - protein, 342 aa, unidentified
  source 1..342: note = protein_c1216b8
  REGION 1..105: note = RuvC_domain
  SITE 4: note = RuvC_P2
  SITE 44: note = RuvC_P3
  SITE 46: note = RuvC_P4
  SITE 49: note = RuvC_P5
  REGION 215..315: note = Tnp_domain
  SITE 223: note = Tnp_P1
  SITE 253: note = Tnp_P2
  SITE 261: note = Tnp_P3
  SITE 262: note = Tnp_P4
  SITE 275: note = Tnp_P5
MVLESTGHYHFPVIQFLEEQSFVYIVVNPLISHRAKSSSLRKVKTDAIDAYHLCELFYKEELEPYKKRGIQLLNLRNLTRQQESIAEVSAQTKIQLHTLLDQVFPEYRGVFGSLYSKVSLLTLLAFPTSEVVLSVSEREITEKIASLCMSRSDAWANEKAKKLREAALRNPFQNKLYQSNIFNLELLVKIVLQYQEHLSKIAVEIDALAKEIEEYYIHQSIPGIGEKIAATIISEIGEIDRFNDAKKLVAFAGVDPSVCSSGKFTASVNRITKRCSSRLRHALYMAVQSGIRDARKKKTTGEIIARNKKLREFYDKKREEGKPFRVQLLHVLISSYIGFLPY

SEQ ID NO: 11021 - protein, 320 aa, unidentified
  source 1..320: note = protein_e200d6f
  REGION 8..150: note = RuvC_domain
  SITE 11: note = RuvC_P1
  SITE 55: note = RuvC_P2
  SITE 95: note = RuvC_P3
  SITE 97: note = RuvC_P4
  SITE 100: note = RuvC_P5
  REGION 190..274: note = Tnp_domain
  SITE 198: note = Tnp_P1
  SITE 227: note = Tnp_P2
  SITE 235: note = Tnp_P3
  SITE 236: note = Tnp_P4
  SITE 247: note = Tnp_P5
MENISVWVGIDVSKATLDVYIRPIGKALKFANTELEIFNLVEQLKFYDLNLIVLEATGGLETELVIQLQAAMLPVALINPRQGRNFAKATGKLAKTDAIDAQILAHFGEAMKPQVLNIESQASRQLGELISRRRQLVEMQTAEKNRRSRARGKALADIEAHIEYLDERLKQLNQEIEQLTQNNQQWIEKVNLLKTTPGIGQVISTTLVSDLPELGQLTAKQISRLVGVAPINHDSGQHKGKRMINGGRAHVRATLYMGAVVAMRHNPVIKAFYERLVERGKSKKLALTACVHKMLVILNAMVRDNLPWRVTDNLQPIPNA

SEQ ID NO: 11022 - protein, 344 aa, unidentified
  source 1..344: note = protein_2225afa
  REGION 6..148: note = RuvC_domain
  SITE 9: note = RuvC_P1
  SITE 52: note = RuvC_P2
  SITE 87: note = RuvC_P3
  SITE 89: note = RuvC_P4
  SITE 92: note = RuvC_P5
  REGION 211..295: note = Tnp_domain
  SITE 219: note = Tnp_P1
  SITE 249: note = Tnp_P2
  SITE 257: note = Tnp_P3
  SITE 258: note = Tnp_P4
  SITE 270: note = Tnp_P5
MKVTRAGIDLAKQVFQFHGVDAEEQKVTRRQLRRHQVLAFFARLPPCLIGMEACASAHHWARLLMAQGHEVRLMAPQHVKPYVKGNKNDTNDAEAICEAVGRPNMRFVPIKSAQQQNIQALHRIRSGLVQERTAKANRIRGLLGEYGIVFSARINVLRKALPEVLEDGDNGLLPAFRSLLEGLRQDLVYLDERVSELDRSIEQLAREHADASRLMSLRGVGPITATALVAALGDGSDFKRGRDVSAWAGLVPGQHSSGGKERLLGISKRGDAYLRTLLIHGARAVIQGAKDKQDGLSRWIQSLCHRRNKNIAAVALANKTLRMAWALLRTETEYQADYAAGRPA

SEQ ID NO: 11023 - protein, 391 aa, unidentified
  source 1..391: note = protein_ea008f8
  REGION 4..163: note = RuvC_domain
  SITE 7: note = RuvC_P1
  SITE 60: note = RuvC_P2
  SITE 101: note = RuvC_P3
  SITE 103: note = RuvC_P4
  SITE 106: note = RuvC_P5
  REGION 266..353: note = Tnp_domain
  SITE 274: note = Tnp_P1
  SITE 304: note = Tnp_P2
  SITE 312: note = Tnp_P3
  SITE 313: note = Tnp_P4
  SITE 326: note = Tnp_P5
MIFVGIDIAKDKHDCFITNTDGEVLFKSFTITNNLDGFDELYQKIESVMEDVSKVKVGLEATGHYSYNLLGYLLDKGLPTYVINPLHTNLYRKSLSLRQTKTDKVDAHTIASMLMSDVNLKSYSDTSYHNEELKSLTRYRFDKVKERAKLKTSISRLVCILFPELEKLVPTLHQNSVYELLYEFPGAKHVANAHLTRLSNLIETASKGHYTKDTAINFREAARTSIGSNMPAKSLELKHTIKLIRELDAEIEEIENEIKIIMDEINSPILSIPGISYRMGAMIIAEIGDFNQFSSPDKILAFAGMSPSTYQSGQLDNCYARMEKRGSRYLRYALYNATAYVCLWDPTFKAYLAKKRSEGKHYYVALSHATKKLVRVIYQLESSGQQYINAN

SEQ ID NO: 11024 - protein, 339 aa, unidentified
  source 1..339: note = protein_15ff9ca
  REGION 6..148: note = RuvC_domain
  SITE 9: note = RuvC_P1
  SITE 52: note = RuvC_P2
  SITE 87: note = RuvC_P3
  SITE 89: note = RuvC_P4
  SITE 92: note = RuvC_P5
  REGION 211..299: note = Tnp_domain
  SITE 219: note = Tnp_P1
  SITE 249: note = Tnp_P2
  SITE 257: note = Tnp_P3
  SITE 258: note = Tnp_P4
  SITE 270: note = Tnp_P5
MQVTTIGLDLAKNVFQVHGFTDEGEVAFNQSLRRAQVLKFFVSVPPCLVGIEACGTSHYWAREIAKLGHEVRLIPPAYVKPYVKRGKSDAIDAAAICEAVTRPSMRFVAAKSREQRAILALHRVRDLIVRQRTQIVNILRGVLAEFGIVVRQGAGHAIAFAKRCLERTEDDLPDLARDVVSNLSHQLAALHRRVLWYGRQLNRAASLDARVTRLRTIPGVGPITASAIVASIGDGHQFSNGRSFAAWLGLTPLNRSSGGKERLRRISKMGDRYIRRLLVLGMTSRIKQIQQRPDQLDPWFEDILGRKPPKLAAVAMANKTARIVWAVLTREQDYQVRTA

SEQ ID NO: 11025 - protein, 389 aa, unidentified
  source 1..389: note = protein_89cf70e
  REGION 5..160: note = RuvC_domain
  SITE 8: note = RuvC_P1
  SITE 59: note = RuvC_P2
  SITE 98: note = RuvC_P3
  SITE 100: note = RuvC_P4
  SITE 103: note = RuvC_P5
  REGION 262..349: note = Tnp_domain
  SITE 270: note = Tnp_P1
  SITE 300: note = Tnp_P2
  SITE 308: note = Tnp_P3
  SITE 309: note = Tnp_P4
  SITE 322: note = Tnp_P5
MRYLIGIDVSKFKHTASVIDNDGVVYVEPFDFNNDIIGFQLFLSTVSSFTNDDYIIGMEDTGHYGDNLQRFLLSKELKVAMLNPLATNHIRLAFGKAKNDKLDSVTIGSALAMPRLYRIIKDDHFSYHEIRELTRYRLHLTKSSNIYKNRLKKLIDITFPEFDSLFSTAYSNTYLKVLHDFQSAENIASTDIRTLRKALIVDRGRCVSITAEELKSAAKQSIGHSNFAMEIEIRQTVEMIEKINSNLEAVEKKIEEFSRQLNSPILAIPGISHISAMSILAEIGDFSKYESAKQIIKLSGTNPFVYESGTYSMARTRLEKKGSKYLRATLYKTIQAVILFNPVFNQYYVKKRAEGKSHLCAQGHCVRKLLRIIYHILTTGKEFDPALLR

SEQ ID NO: 11026 - protein, 405 aa, unidentified
  source 1..405: note = protein_de67184
  REGION 4..163: note = RuvC_domain
  SITE 7: note = RuvC_P1
  SITE 60: note = RuvC_P2
  SITE 100: note = RuvC_P3
  SITE 102: note = RuvC_P4
  SITE 105: note = RuvC_P5
  REGION 271..357: note = Tnp_domain
  SITE 279: note = Tnp_P1
  SITE 310: note = Tnp_P2
  SITE 318: note = Tnp_P3
  SITE 319: note = Tnp_P4
MLFAGDDWSEDHHDVEVQDQPGRVLGRARLAEGVAGITRFHELIGRFADPDAGPDQVMIGIETDRGPWVAALIAAGYIVYAVNPRQAARYRERQSTSGAKSDAGDAHMLADMVRTDSHQLRAVAGDSSQAQAVKVVARAHQALIWERTRHVLRLRSALREFFPGALEAFDDLTAPDALELLARAPDPASAARLSIAQITAALKRARRRNTADKATRIQAALRGQQLAQPQVAAAAYAATVRAAAAVISVLNEQIAVMEAQVESHFGEHPDAEIIVSQPGLGKVLGARVLAESGDDPDRYTDASARKNYVGTSPITRASGKKKAVLARYVRNRHLADALHQQAFCALTASPGARAYYDELRGRGTSHHAALRQLASRLAGILHGCLKTGTPYDEVTAWQHRLEDAA

SEQ ID NO: 11027 - protein, 392 aa, unidentified
  source 1..392: note = protein_ef5d909
  REGION 5..163: note = RuvC_domain
  SITE 8: note = RuvC_P1
  SITE 62: note = RuvC_P2
  SITE 102: note = RuvC_P3
  SITE 104: note = RuvC_P4
  SITE 107: note = RuvC_P5
  REGION 267..356: note = Tnp_domain
  SITE 275: note = Tnp_P1
  SITE 305: note = Tnp_P2
  SITE 313: note = Tnp_P3
  SITE 314: note = Tnp_P4
  SITE 327: note = Tnp_P5
MEPVVGVDVSKGSSIVQGFVGRNEPYGKLESISHEESGFERLGELLDELKVLSGMEPVVILEATGHYHRGVVAYLMRGEYKHFVINPLQSKRARSTQLRKVKTDAADAWHLADMYYRGDVTPHRTWDELYTELQHVTRQHEFITSMYVQAKLNSRALLDQVFPAFEKVFSNSFSTTALKVLKCCLSDRAEEIEAIIQEQAGKSHSKEWIEEKTDQLRQAMLEWSNTKRSKSQSLALEEMVSLLLEFQNQLSRLEKHMEEISATLPEVELLKTIPGIGDKLAATIIAEIGDARQFTSAKQLVAYAGLDTGVYSSGKFTATSNRIMKRGSKRLRRALYLAVQCGLRRGINSRIKHYYDKKRKEGKSYKVVVIACANKLLHHIYSILNKDQPYQV

SEQ ID NO: 11028 - protein, 389 aa, unidentified
  source 1..389: note = protein_4d5c6af
  REGION 4..162: note = RuvC_domain
  SITE 7: note = RuvC_P1
  SITE 60: note = RuvC_P2
  SITE 101: note = RuvC_P3
  SITE 103: note = RuvC_P4
  SITE 106: note = RuvC_P5
  REGION 265..352: note = Tnp_domain
  SITE 273: note = Tnp_P1
  SITE 303: note = Tnp_P2
  SITE 311: note = Tnp_P3
  SITE 312: note = Tnp_P4
  SITE 325: note = Tnp_P5
MIFVGIDVAKNKHDCYIFDSSKEMIETKFSFLNSLEGFTTFKNILSSYSDDFSNIKVGIESTGHYGNNIINFIRKNSLELKIFNPLAVNLYRKAMTLRKTKTDKIDAQIIAQMLFSDDSNSYLPIDYHINELKSLARHRYRLIGHRGKYKISVTRILDIAFPELSGVVWSVHQKSSYALLLEFPTVEDISKAHLTKLTNILSKNSKGHYTKEKAKEIKVLAANSIGTSEWTIGFELQQTIRLIQNIQYEIDLLDKKIKEAVIATKTPLITIPGVSYVLASIILSEIGNVKNFSNSGKLLAFAGLEPSTHQSGNYTANVARMVKRGSKYLRWALLQAARTVSMRVPVFKEYLSLKKSQGKHHLVAMSHTAKKLLRVIFHLLKAEEIFICS

SEQ ID NO: 11029 - protein, 430 aa, unidentified
  source 1..430: note = protein_cac86de
  REGION 40..202: note = RuvC_domain
  SITE 43: note = RuvC_P1
  SITE 98: note = RuvC_P2
  SITE 139: note = RuvC_P3
  SITE 141: note = RuvC_P4
  SITE 144: note = RuvC_P5
  REGION 305..391: note = Tnp_domain
  SITE 313: note = Tnp_P1
  SITE 343: note = Tnp_P2
  SITE 351: note = Tnp_P3
  SITE 352: note = Tnp_P4
  SITE 364: note = Tnp_P5
MVMSWIQHIDWLFLIRLHRLKIHSESMCWSIERIGFMIYVGIDVASTKHDIVISNESGEVFKKAFSIKNDLEGYKKLLSEISYAKEFFNDLNVRIGLESTGHYSRNILHFLILARFEVMFINPLLTNMDRKAASVRKTKTDSIDAKAICMFLIRNQNDFKPYTLSSYHIDELKTLVKLRKSLKTQINKEMNLLHAYVIQAFPEYYKIFKKISSKASMEVLSRYASLSEFKRVRLKTLKELIRKSSQGHHGIREAQMIKELTASSIGIDSSALSFSIKQTIERILVIKDQVSGIEHEIIHHVDESKTKLLSVPGVGYTTGAIILAEIGDIHRFKTDDQLLAYAGLDPSVYQSGNFEGNYKISKRGSSILRWAIYQAAQAAVKFDSVFKAYYLKKKSEGKRHRVIIGHVTKKLLRVIRSIMKNNITYSINTH

SEQ ID NO: 11030 - protein, 349 aa, unidentified
  source 1..349: note = protein_445e795
  REGION 7..148: note = RuvC_domain
  SITE 10: note = RuvC_P1
  SITE 53: note = RuvC_P2
  SITE 88: note = RuvC_P3
  SITE 90: note = RuvC_P4
  SITE 93: note = RuvC_P5
  REGION 212..298: note = Tnp_domain
  SITE 220: note = Tnp_P1
  SITE 250: note = Tnp_P2
  SITE 258: note = Tnp_P3
  SITE 259: note = Tnp_P4
  SITE 271: note = Tnp_P5
MSEIATVGLDIAKNVFQLHGVDRSGKIVLRKALRRSQVPGFFSTLSPCLIGLEACATAHHWARTLMAFGHDVRLIPPAYVKPYLRRQKNDAADAAAICEAVTRPSMRFVPVKSPQQQSTLMLHGARDLLIGQRTALINALRGHFAELGIVAAQGARNTRQLIALIHDATSPGLPVTARVALQPLAAMLVEIEAQIAKLDKAILAAHRSDPVSMRLASIPGIGPIVASCLSASVPDPSLFHGSREFAAYLGLVPRQPSTGGKPRLGSISKMGNRHLRKLLVVGAHAALYSLKSGKTRTPLADWARSLLVKKPFKVVAIALANKIARIAWAVMARSTAYEPGNKGAAAPAV

SEQ ID NO: 11031 - protein, 381 aa, unidentified
  source 1..381: note = protein_34095b6
  REGION 4..159: note = RuvC_domain
  SITE 7: note = RuvC_P1
  SITE 57: note = RuvC_P2
  SITE 98: note = RuvC_P3
  SITE 100: note = RuvC_P4
  SITE 103: note = RuvC_P5
  REGION 255..341: note = Tnp_domain
  SITE 263: note = Tnp_P1
  SITE 293: note = Tnp_P2
  SITE 301: note = Tnp_P3
  SITE 302: note = Tnp_P4
  SITE 314: note = Tnp_P5
MLYVGIDVAKNKHDFTVLDGTGKQVLKTITFTNRKQGFELLHNTLKQLGQDCLIAMEDTGHYALNLLKFLHEKAYQVYTYNPLLIKEFTKSISLRKTKTDKKDARVIALKLVTDPNRELFKHDDKQEELKILTRHVSRLKRHQTDWKVQYTKCLDILFPEFHQAVTKHSDYSYELLKAFPAPEKMIEAGFEKLMDIKRLTVKHAQDILELASNTIGTTSLAREFELVQIIENIQHYEKLIKQANHKIDELMAEINSVIVSVPGISNRLGSVILAEIRNINTFNTPAQLQAFAGLEPSIYQSGQIDTKGKMVKRGSTHLRWALLQAAIKVARYSPAFKAYFRTKLAQGKHYNVAMSHVAKKLIRVLFYLLKNHIAFEESKVR

SEQ ID NO: 11032 - protein, 418 aa, unidentified
  source 1..418: note = protein_acfcbff
  REGION 21..177: note = RuvC_domain
  SITE 24: note = RuvC_P1
  SITE 74: note = RuvC_P2
  SITE 114: note = RuvC_P3
  SITE 116: note = RuvC_P4
  SITE 119: note = RuvC_P5
  REGION 291..377: note = Tnp_domain
  SITE 299: note = Tnp_P1
  SITE 329: note = Tnp_P2
  SITE 337: note = Tnp_P3
  SITE 338: note = Tnp_P4
  SITE 351: note = Tnp_P5
MSKADLTIGKIQNKENTMNAVGIDVSKNKSTIAILRPFGEIVAKPFDVKHTSSDITYLISQLKSLNGDTRIVMEHTGRYYEPMAQWLSDAGLFVSAINPKLIKDFGNNTLRKVKTDKADAIKIARYTLDNWCELKPYNNTDELRRQLKNMNRQFDFYMKQKTAMKNNLIALLDETFPGINTFFDSPARNDGSQKWVDFVTIFWHVDCVRRHSISSFSERYQSWCKKKKYNFQSQKPNDIYEFSHDLIATLSKDNVTKLLIQQAVDQLNIASKNVESLRLLMNQTAAKLPEYPIVLDMAGVGTTLGPQLIAEIGDVSRFSHKGALTAYAGVDPGANQSGDYEQQSVRTSKRGAPQLRKTLFLIMDSLMKLAPPDDPVYGFMMKKRAQGKDYYVYMTAGANKFLRIYYGRVNEYLSSLTS

SEQ ID NO: 11033 - protein, 354 aa, unidentified
  source 1..354: note = protein_8d768d6
  REGION 21..163: note = RuvC_domain
  SITE 24: note = RuvC_P1
  SITE 67: note = RuvC_P2
  SITE 102: note = RuvC_P3
  SITE 104: note = RuvC_P4
  SITE 107: note = RuvC_P5
  REGION 225..311: note = Tnp_domain
  SITE 233: note = Tnp_P1
  SITE 263: note = Tnp_P2
  SITE 271: note = Tnp_P3
  SITE 272: note = Tnp_P4
  SITE 284: note = Tnp_P5
MLVLSSTNKGMGATHMEITTLGIDIAKSVFQLHGVDAAGQVVLKKRLRRNQVLEFMAQLPRCLVGIEACGTSHHWAREIAALGHEVRLIPPAYVKPYVKRQKNDMADAEAICEAVTRPNMHFVPIKTPEQQGVLILHRTRKMLSRQRTMILNAFRSHLAEFGIVAPKGPYHVMQLAKALREGEHDLPEVARRALIGFADQLAALAAEIKSLDRQLRAWHADNPVSQRLQTIPGIGVITATALAASIPDASVFKSGRHFAAFLGIVPRQNSTGGKDRLGRISKMGDPYLRTLLVNGATAVIRRIEQAEGRTAIWIRRLLDRKPARVASVAIANKTARIAWAVMLREEDYRAPAMG

SEQ ID NO: 11034 - protein, 404 aa, unidentified
  source 1..404: note = protein_2ab6efb
  REGION 4..162: note = RuvC_domain
  SITE 7: note = RuvC_P1
  SITE 60: note = RuvC_P2
  SITE 101: note = RuvC_P3
  SITE 103: note = RuvC_P4
  SITE 106: note = RuvC_P5
  REGION 275..361: note = Tnp_domain
  SITE 283: note = Tnp_P1
  SITE 313: note = Tnp_P2
  SITE 321: note = Tnp_P3
  SITE 322: note = Tnp_P4
  SITE 334: note = Tnp_P5
MYYVGIDVAKEKHYVCILDDTNEFAVKPFWIYSDVLGLRELLNRLADISLNNDDFIIGVESTGAFSENLYEYITDAHYKVILLNSYQTAKYRDFSTMRKIKNDAIDAYVIAELLFSNKYKESHISSDDYHSLKVLGRLKRSLDDKIKTIKREVSTVMATVNPEITLVFKNIFTKTALQIIKAYPTAVDLSKATPKKLTRLFRHIQGNNFNDEKAKYLIELAKSSIYAGRANESRALMIRTNIKILELLSQEKLEIEAQINALIESGISKELDAPIENLKSIPGVADKTIAAILGECGDLRRFSSAKALIGYLGLYPTQYQSGNSLSVGRLAKRGIPIAKHALYMAAVSSVLHNDELRKIFRDKVSAGKSKKEALIIISKKLATIMYSIFKYNTPYNAKRVLVSK

SEQ ID NO: 11035 - protein, 423 aa, unidentified
  source 1..423: note = protein_f96f4c2
  REGION 21..177: note = RuvC_domain
  SITE 24: note = RuvC_P1
  SITE 74: note = RuvC_P2
  SITE 114: note = RuvC_P3
  SITE 116: note = RuvC_P4
  SITE 119: note = RuvC_P5
  REGION 291..378: note = Tnp_domain
  SITE 299: note = Tnp_P1
  SITE 329: note = Tnp_P2
  SITE 337: note = Tnp_P3
  SITE 338: note = Tnp_P4
  SITE 351: note = Tnp_P5
MLDTMHIQCWGGTLFMMYNAVGIDASKGKSTVSIIRPAGVVVKRPYDVMHTASGLNDLISYIQSLEGETKAVVECTGRYHEPVLKVFSEANIFISAVNPKLIKGQNDNTLRHVKSDPADSRKIARYALDNWAELRQYSSMDTTREQLKTLNAQFDFFMKQKVAAKANLISLLDNTYPGVNKLFKSPAREDGSEKWVDFAYSFWHVDCVRKIGLKAFTERYKSFCKKHKYNFRTGKAQELFELSQELVAVFPKDKTYKMIIQQSILQLNLASEHLEKLRKEMDDLASTLPEYETVMSMYGVGKTYGPQLIAELGDITRFTHREAITAYAGVDPGVDESGQRKRKSNAASKCGPSRLRKTLFQLMSTILQNKPANDPVYQFLDRKRSEGKNYYVYMTAGANKFLRIYYGKVKAHYRELEAQSQEQ

SEQ ID NO: 11036 - protein, 399 aa, unidentified
  source 1..399: note = protein_ebc66bc
  REGION 4..160: note = RuvC_domain
  SITE 7: note = RuvC_P1
  SITE 57: note = RuvC_P2
  SITE 97: note = RuvC_P3
  SITE 99: note = RuvC_P4
  SITE 102: note = RuvC_P5
  REGION 274..362: note = Tnp_domain
  SITE 282: note = Tnp_P1
  SITE 312: note = Tnp_P2
  SITE 320: note = Tnp_P3
  SITE 321: note = Tnp_P4
  SITE 334: note = Tnp_P5
MVSVGIDVSKGKSTVCMIKPYGEIIVGPMEVTHIESELKDLVKVINGLNDDVKVVMEATGIYHLPVLTYLKESRLFVSVINPYQMKQYRSQGLRKVKTDKADSIAIANYGIEHWYALKDFVASEDKYNELSILSRQYRHYMRLHVASLQELTHVLDYAMPGIKNQFNSWNPENGKDKLADFVEKYWHYDNICKKSERQFVESYLNWARKKGYHPNQNKAAKIYSMAKDGIPTLPADQTTKMLVIQAVEVLRRVDETLSTILSRMQEIAKTLPEYSVVRSMGGVGDILAPKLIADIGDVRRFHNSKALIAYAGIDPPPYESGQFIGTNRSMTKRGSSAIRKTGYELMRVLKTHTEPKDGAVYRYILKKEAEGKPKKVAKMAGLNKFLRIYYARVMEIYND

SEQ ID NO: 11037 - protein, 340 aa, unidentified
  source 1..340: note = protein_b40a76d
  REGION 6..148: note = RuvC_domain
  SITE 9: note = RuvC_P1
  SITE 52: note = RuvC_P2
  SITE 87: note = RuvC_P3
  SITE 89: note = RuvC_P4
  SITE 92: note = RuvC_P5
  REGION 211..297: note = Tnp_domain
  SITE 219: note = Tnp_P1
  SITE 249: note = Tnp_P2
  SITE 257: note = Tnp_P3
  SITE 258: note = Tnp_P4
  SITE 270: note = Tnp_P5
MKITTIGLDLAKSVIQVHGVNEHGKVGLKKTLKRDQVLPYFANMAPCLIGMEACGSAHYWARKLQTLGHTVKLMAPQFVKPYVKTNKNDAADAEAICEAVTRPTMRFVALKNGEQQAILSLHRARQGFVKARTAQANQIRGLLSEYGIVMAQGMSHIAKRLPDILENSESDLPGIFRQLLQRLGEHLKELDRQVGELEVQIRTWHQQNEMSKKLEKIPGIGPITASALVASIGDAKSFKNGRQLAAWLGLVPRQHSSGGKPTLLGISKRGDSYLRTLLILGAQSALRVAARKLDHACSWLAKLMARRHQNVAAVALANKNARIVWALLAHNREYRTDLAV

SEQ ID NO: 11038 - protein, 342 aa, unidentified
  source 1..342: note = protein_516523e
  REGION 11..153: note = RuvC_domain
  SITE 14: note = RuvC_P1
  SITE 57: note = RuvC_P2
  SITE 92: note = RuvC_P3
  SITE 94: note = RuvC_P4
  SITE 97: note = RuvC_P5
  REGION 216..303: note = Tnp_domain
  SITE 224: note = Tnp_P1
  SITE 254: note = Tnp_P2
  SITE 262: note = Tnp_P3
  SITE 263: note = Tnp_P4
  SITE 275: note = Tnp_P5
MGEDRMKITTIGLDIAKRFFHVVCCNKEGSLIKKKMLSRAQVLTFFQLQPTCLVALEACATSHYWAREIKKCGHEVKLIPPQHVKAFLIGNKNDYNDALAITVAAKQPHIKSVGIKSIEQQDNQAQHKARELAVRQRTALCNQIRGLIAEYGIVLSQGVNNVRKNIVLMLDEETTQLSGAFKVILTQLQKQLNSLDECIDVFGKTITESVKNNAICQRLLTIPGFGPMVSSGYFNEIGNGANYRKGRDVSASLGIVPRQHSSGGKDTLLGISKRGNSYLRCLLIQGAKAVVSRAGTKTDKLSQWINRIVQTRGHNRACVAYANKMARMAWAITVSGEEYSAV

SEQ ID NO: 11039 - protein, 330 aa, unidentified
  source 1..330: note = protein_b4ec7fb
  REGION 8..159: note = RuvC_domain
  SITE 11: note = RuvC_P1
  SITE 58: note = RuvC_P2
  SITE 96: note = RuvC_P3
  SITE 98: note = RuvC_P4
  SITE 101: note = RuvC_P5
  REGION 201..288: note = Tnp_domain
  SITE 209: note = Tnp_P1
  SITE 239: note = Tnp_P2
  SITE 247: note = Tnp_P3
  SITE 248: note = Tnp_P4
  SITE 261: note = Tnp_P5
MKNVREVVGIDVSKNTLDATLYHIKQHAVFTNDDKGYAQLLSWVSDQLEVSSYFFIFENTGNYSLKLSVFLSSKDLVYVEESPMRIKRSTGLTREKTDKLDSYMIARYGWMYREELEPSKIKPKEFQELGRLLSLRDQLVRDRSGLKSTLKEQKHLLSSPSTDSCCKLLERSIKHIDKQVQHIERRMKELLETDDSLQTNYNLLRSVKGVGLILSCQLLYHTSNFVKFNNWRSFSSYCGIAPFEYSSGSSIRRRKQSHYIGDRKMKTLLSMAAVSAIQSDQELRNYYHRKLEEGKHKMIALNNVRNKILARSFAVIKRGTPFVNIAATNY

SEQ ID NO: 11040 - protein, 337 aa, unidentified
  source 1..337: note = protein_c97c2b2
  REGION 7..149: note = RuvC_domain
  SITE 10: note = RuvC_P1
  SITE 53: note = RuvC_P2
  SITE 88: note = RuvC_P3
  SITE 90: note = RuvC_P4
  SITE 93: note = RuvC_P5
  REGION 209..294: note = Tnp_domain
  SITE 217: note = Tnp_P1
  SITE 247: note = Tnp_P2
  SITE 255: note = Tnp_P3
  SITE 256: note = Tnp_P4
  SITE 268: note = Tnp_P5
MNEITTMGVDLAKSVFQLHGIDAEGRVVLRKQLRRGQMLEFFKRLPGCLIGMEACGGAHYWARELATFGHEVRLMQPSYVKGYVKRGKTDKADAEAICEAVSRPSMRFVPVKSEDTQALLMIHKTREFLVRQQTQVVNAIRAHLGELGIVVPKGIHNAERLIAACGKAELPAAARKALNLLADQMVDTRKKLDELTADVRASASANEEAGRLQTIPGIGPITASALIATLPDISDFKSGRDLSAWLGLTPKPHSSGGKDRLGRISKMGNRYLRRLLYLGAMARVSARRRGEPDDDWLWNIIQRKKPKQAAIALANRMARTVYALMKNATEYQAARPA

SEQ ID NO: 11041 - protein, 329 aa, unidentified
  source 1..329: note = protein_8a0604c
  REGION 9..153: note = RuvC_domain
  SITE 12: note = RuvC_P1
  SITE 58: note = RuvC_P2
  SITE 98: note = RuvC_P3
  SITE 100: note = RuvC_P4
  SITE 103: note = RuvC_P5
  REGION 197..283: note = Tnp_domain
  SITE 205: note = Tnp_P1
  SITE 235: note = Tnp_P2
  SITE 243: note = Tnp_P3
  SITE 244: note = Tnp_P4
  SITE 256: note = Tnp_P5
MSKISKKVIGVDVGAKFLTVSFNDFENRDQVFNIENTQRSILSFLKKLRIEDYCFVIEATGNYSSRILHLSLVQGFESSLINCMSVKHFARMKNIISKTDAEDAKLIRLYGEMFKPDIYTSKSVDIEHLDQELKLLNDLEEEKRRYGVKLKSLRYNAQINPNTEKHYERRLQQLEKEIKEVISRLPGLQDEEFKETKALLQSVSGIGEKTSLQLMTATSGFKNFNSAKSLSKYFGLAPRIYQSGKKSYSPGKCRTSKNHIRGLLYVCSWTAIKHNKQCKEFYERLLSQGKPKKLALIAVCNKLLRICFGVVKNKINYQPDYQKNFKILT

SEQ ID NO: 11042 - protein, 335 aa, unidentified
  source 1..335: note = protein_44317ea
  REGION 6..146: note = RuvC_domain
  SITE 9: note = RuvC_P1
  SITE 51: note = RuvC_P2
  SITE 86: note = RuvC_P3
  SITE 88: note = RuvC_P4
  SITE 91: note = RuvC_P5
  REGION 210..296: note = Tnp_domain
  SITE 218: note = Tnp_P1
  SITE 248: note = Tnp_P2
  SITE 256: note = Tnp_P3
  SITE 257: note = Tnp_P4
  SITE 269: note = Tnp_P5
MEPTTIAIDLAKRVFQIHFVDPDGTIHSKVLKRAQMLPFFANRPASHVVMEACGSAHHWARVLARLGHDVRLIAAQFVRPFVKSNKNDAADAAAIWEAAQRPGMRFVAVKTEDQQAMLAMHRIRQQLVRIRVMQVNQLRGLLYEFGVVLPQGRRASVDAAKAALASLADELPAMLLDSLQDQLSRLRALDEQIARIEQRILNWRRNDDACLRISEIPGVGVLTATAAVSVIGQARTFRSGREFAAYLGLVPRQNGSGGKIKLSGISKRGDVYLRTLLIHGARSVISSSKHLPERLRQMLSRRPTNVVAVALANKMARTIWALLAYGRTYEAAPSQ

SEQ ID NO: 11043 - protein, 358 aa, unidentified
  source 1..358: note = protein_bb3d6c4
  REGION 7..147: note = RuvC_domain
  SITE 10: note = RuvC_P1
  SITE 53: note = RuvC_P2
  SITE 88: note = RuvC_P3
  SITE 90: note = RuvC_P4
  SITE 93: note = RuvC_P5
  REGION 210..295: note = Tnp_domain
  SITE 218: note = Tnp_P1
  SITE 248: note = Tnp_P2
  SITE 256: note = Tnp_P3
  SITE 257: note = Tnp_P4
  SITE 269: note = Tnp_P5
MEQISRIGMDTSKHFFQLHGVNAAEEPILRKTLRRKEMVEFFEALAPTKVAIEACGSSHHWARLLQSFGHEVKLIPPQFVKPYVKRNKNDAADAEALCEAMSRPTMRFIPVKTAERQAALMLVGVRERLVHNRTQLSNAIRGYAAEFGLTTAKGLSRIDQLLERIATDETLPALARELFGLLGKEYAQLQVQLEKIEARLMAWHRADACSQRLAQIPGIGPIGGSMLVMKTPAPETFRSGRHFAAWLGLTPKDHSTAGKSRLGGITRAGDEALRSVLVVGSTSVLHRVRQRGTGSPWLIDLLKRKPPKLAAVALANKNARIAWKLMVRGERYRTNPTPAAKPNTGFNPPRRALQAQSC

SEQ ID NO: 11044 - protein, 340 aa, unidentified
  source 1..340: note = protein_2b4241a
  REGION 6..147: note = RuvC_domain
  SITE 9: note = RuvC_P1
  SITE 52: note = RuvC_P2
  SITE 87: note = RuvC_P3
  SITE 89: note = RuvC_P4
  SITE 92: note = RuvC_P5
  REGION 211..297: note = Tnp_domain
  SITE 219: note = Tnp_P1
  SITE 249: note = Tnp_P2
  SITE 257: note = Tnp_P3
  SITE 258: note = Tnp_P4
  SITE 270: note = Tnp_P5
MKITTIGIDLAKNVFQLHGVDAQGKTVLRKQLKREQMAAFFVNLPSCLLGMEACGSAHYWARKLQALGHTVKLMAPQFVKPYVKTNKNDAADAQAICEAVTRPSMRFVPIKNVEQQAVLALHRVRQGMVKARTAQGNQIRGLLSEFGLIIPVGIAHLSGRVPALLEQTGDQLPAVFRQLVQRMLDHLQELDRQVGELEVQIQMWHRSNALSRRLEQIPGIGPITASALIASIGDAKNFANGRQLAAWLGLVPRQHSTGGKSNLLGISKRGDSYLHTLLIHGARAVIRHAERRVNAYGWLKNLLARRHKNVAAVALANKNARTVWALLVHDRQYRVDYAGA

SEQ ID NO: 11045 - protein, 346 aa, unidentified
  source 1..346: note = protein_c6cdb79
  REGION 7..150: note = RuvC_domain
  SITE 10: note = RuvC_P1
  SITE 54: note = RuvC_P2
  SITE 89: note = RuvC_P3
  SITE 91: note = RuvC_P4
  SITE 94: note = RuvC_P5
  REGION 213..301: note = Tnp_domain
  SITE 221: note = Tnp_P1
  SITE 251: note = Tnp_P2
  SITE 259: note = Tnp_P3
  SITE 260: note = Tnp_P4
  SITE 273: note = Tnp_P5
MEENLILAIDLAKNSFQVCYMRINGEVLMNKAISRTSLIRLLTGKKKFSLVVMEACGGAHYWARLAKKNNYEVKVIPPRAVKGLQLKQKTDKNDAYAIGVAALLPHISSCSQMSEEEQGLQCLDRARSLQIAQRTALSNQMRGFLMEFGIVLPKGITPLAKRIPEILEDAENGLPDCLRQVLASQSDLLAMYTEQIEYYDGLITEHVSQNKICKKLSKLEGVGPIVALGLMVRLGNGKEFVRSRDASACIGLTPKQHSTGGKERIGHISKSCADKRLRSLLYQGAMSIVYKVTLRAPTTEKERWLKSMIERRGKKIAAIALANKTVRTAVALIKSDSEYHPLAIQA

SEQ ID NO: 11046 - protein, 402 aa, unidentified
  source 1..402: note = protein_8596d48
  REGION 4..160: note = RuvC_domain
  SITE 7: note = RuvC_P1
  SITE 57: note = RuvC_P2
  SITE 97: note = RuvC_P3
  SITE 99: note = RuvC_P4
  SITE 102: note = RuvC_P5
  REGION 274..361: note = Tnp_domain
  SITE 282: note = Tnp_P1
  SITE 312: note = Tnp_P2
  SITE 320: note = Tnp_P3
  SITE 321: note = Tnp_P4
  SITE 334: note = Tnp_P5
MNCVGIDVSKGKSMIAVMRPFGEVVISPFEVQHTASELSELAKLLKSLDGETRVVMESTGNYHTPVAWLLHDAGFYVSVVNAMLVHDYGNNSLRRAKTDKKDAVKLANYGLDHWLTLPRYVPEEDTRLLLKNCYRQYQQYSKVQTMLKNNLISLLDAVFPEVNRLFNSSHRADGSEKWVDFVSTFWHCRCVSTLSLKSFSARYLKWCRKHGYYFSQEKAFEIHSKAQSCISVMPRNETTKLLVQQAIAQLKATSAALAALKQEMQSLAAALPEYPVVMEMFGVGSTLGPQLMAEIGDVRRFHSKKALVAFAGIDAPPCQSGKMDIHSRSISKRGSAALRRTLFLVMGIYLQSAPLDEPVYQFMDKKRSEGKPYKVYMMASANKFLRIYYASVTAYLNTLARI

SEQ ID NO: 11047 - protein, 398 aa, unidentified
  source 1..398: note = protein_9a4b259
  REGION 6..162: note = RuvC_domain
  SITE 9: note = RuvC_P1
  SITE 60: note = RuvC_P2
  SITE 100: note = RuvC_P3
  SITE 102: note = RuvC_P4
  SITE 105: note = RuvC_P5
  REGION 267..354: note = Tnp_domain
  SITE 275: note = Tnp_P1
  SITE 306: note = Tnp_P2
  SITE 314: note = Tnp_P3
  SITE 315: note = Tnp_P4
  SITE 327: note = Tnp_P5
MSRIWAGTDCGKTHHHCLVLDSEGDTLLSRRVANDEPELLKLIGDVLDLADGGRTTWALDMTGGEPGLLIALLVNHGQELVYIPGIAVNRATDSYRGQGKTDARDARVIADQARMRRDLQPIRAGDEATIELRLLTDHRVDLVADRTRTTNRLKALLNSMFPALERDLDLGNVGPLVLLAGYQTPAAIRRAGSRRLTAWLRNRKVCNAAALAEKVVEAADRQHTAVVGEKAIAKMVHTLAKEVMALNEKIAETDKLIEGRFRDHELAEVIESLPGIGTILGAEFLTAVGGSLDAFPTANRLAAFAGVAPAPRDSGQVSGNDHRPTRYHRRLQRVFYISALVSVQRDPNSRKFYDRKRAEGKRHVQALLALARRRVNVLWALIRDRRCYQVTPPATAAA

SEQ ID NO: 11048 - protein, 345 aa, unidentified
  source 1..345: note = protein_887fda6
  REGION 6..147: note = RuvC_domain
  SITE 9: note = RuvC_P1
  SITE 52: note = RuvC_P2
  SITE 87: note = RuvC_P3
  SITE 89: note = RuvC_P4
  SITE 92: note = RuvC_P5
  REGION 211..335: note = Tnp_domain
  SITE 219: note = Tnp_P1
  SITE 249: note = Tnp_P2
  SITE 257: note = Tnp_P3
  SITE 258: note = Tnp_P4
  SITE 270: note = Tnp_P5
MQLHTIGIDLGKTVFHLVGLNPRGEVVVRKKFSRKQLLLFTANLQVELIGMEACGGSHFLGRALREQGHEVRLMPAQYVKPYVKTNKSDYIDAEAIAEAVGRPKMRFVPIKSDDQLDLQSLHRVRERWVMRRTAVINQIRGLLLERGITLRKGRRHIDAALPGILEDASSQLSGAVRVLLVQLKLELDHLQTRIDEVDAMINKAAGESEVCRRLVSIPGIGPVTATAIIAAIGNGAAFKKGRGFSAWLGIVPGEYTTGGKQKLLGISKRGNSYLRRLFVQGARAVLQQSAKQSSGLSAWLAQLTTRAHNNVVAVALANKLARMAWAVLAKNEPYRPPIAVGAATA

SEQ ID NO: 11049 - protein, 341 aa, unidentified
  source 1..341: note = protein_b3141fc
  REGION 7..149: note = RuvC_domain
  SITE 10: note = RuvC_P1
  SITE 53: note = RuvC_P2
  SITE 88: note = RuvC_P3
  SITE 90: note = RuvC_P4
  SITE 93: note = RuvC_P5
  REGION 209..296: note = Tnp_domain
  SITE 217: note = Tnp_P1
  SITE 247: note = Tnp_P2
  SITE 255: note = Tnp_P3
  SITE 256: note = Tnp_P4
  SITE 268: note = Tnp_P5
MQQVTLIGIDLGKSVFHVHGQDQHGKEQLRKKFSRKQLMEFFATLQPCTVVMEACAGAHYMARKLIGFGHSAKLISPQFVRPFVKTNKNDYVDAEAICEAASRPSMRFVTPKNESQQTLSALHRVRESLVHDRTKACNQIHAFLLEFGISLPIGHAAIRRLPSTLAEHELPPRLVAVLERLHIHFKYLDEQIDAIEEDLATQLADDDLGQRLLTIPGVGPITASVLASEMGDGKQYHCGRDFAAAIGLVPRQYSTGGRNNLMGISKRGDKNLRRLLVQCARTYMLRVEGKTGQLAEWVRSLLTRRHSNVVACALANKLARMAWAIAAHHSTFDTKRSLMKT

SEQ ID NO: 11050 - protein, 337 aa, unidentified
  source 1..337: note = protein_3af3211
  REGION 6..148: note = RuvC_domain
  SITE 9: note = RuvC_P1
  SITE 52: note = RuvC_P2
  SITE 87: note = RuvC_P3
  SITE 89: note = RuvC_P4
  SITE 92: note = RuvC_P5
  REGION 211..296: note = Tnp_domain
  SITE 219: note = Tnp_P1
  SITE 249: note = Tnp_P2
  SITE 257: note = Tnp_P3
  SITE 258: note = Tnp_P4
  SITE 270: note = Tnp_P5
MKLTIIGMDIAKQVFQLHALDPQSGQVERFKLKRAQVLEFFAKRAPSIVVMEACGSAHDWARRLQALGHEAKLISARSVRPFVLRNKTDAADARAICTAAQQPEARFVAVKSEAQQTVLAIHRVRAQLMKFRIMQTNALRGLLYEFGEVLPESYRAFSKAFPAALTRAAERLPAMLIDSLREQWARAQDTDREMAVLERRLANLFRHNPDCQKVADIPGVGLLTATATVAAIGDVRTFKSGREFAAWLGLVPRQSGTGGRVRQMGLSKRGDTYLRTLLMHGARSVIIQGKRSPWVDGLLKRRPFNVAVAAVANKLARTIWAVLARPDKYQASPRATA

SEQ ID NO: 11051 - protein, 410 aa, unidentified
  source 1..410: note = protein_c2303ec
  REGION 10..165: note = RuvC_domain
  SITE 13: note = RuvC_P1
  SITE 62: note = RuvC_P2
  SITE 102: note = RuvC_P3
  SITE 104: note = RuvC_P4
  SITE 107: note = RuvC_P5
  REGION 273..358: note = Tnp_domain
  SITE 281: note = Tnp_P1
  SITE 311: note = Tnp_P2
  SITE 319: note = Tnp_P3
  SITE 320: note = Tnp_P4
  SITE 331: note = Tnp_P5
MSLVGAEYFVGIDWAATNHAVCVLDSSGRRVTGFGVEHTAAGFTGLIRRLAKLGEPGGVPVAIERPDGRLVDALLAAGYPVVAVKPNAIKTWREGEVISGAKSDPGDAHVIAEYLRLRAHRLRAATPLSEDTRALRLVSRTRSDLVAARVAAGNQLAALLDTAWPGAKEIFAEVTSAISLAFLHRYPTPDHAAHLGEKRMAAFCIKHGYSGRRSPAELLTRLRAAPAGVSGAVVSDALRDAVLALIAVLTALNTAIKDLDRSNAAHLHAHPDGKVFTSFPRAGLVNAAQIRAELAEPDAYSGPDAIAALAGLVPVTRASGKHHAVSFRWACNKRLRVALTTFADNSRHSSPWAAGIYRRAIAGGKDHPHAIRILARAWVRVIWRCWNNGQPYDPARHGGAARQLNPPTAA

SEQ ID NO: 11052 - protein, 276 aa, unidentified
  source 1..276: note = protein_b62ad69
  REGION 6..148: note = RuvC_domain
  SITE 9: note = RuvC_P1
  SITE 52: note = RuvC_P2
  SITE 87: note = RuvC_P3
  SITE 89: note = RuvC_P4
  SITE 92: note = RuvC_P5
  REGION 211..276: note = Tnp_domain
  SITE 219: note = Tnp_P1
  SITE 249: note = Tnp_P2
  SITE 257: note = Tnp_P3
  SITE 258: note = Tnp_P4
  SITE 270: note = Tnp_P5
MKITTIGLDIAKLVFHAVAVNKAGKLVRKKMLKRKEVLGFFAKLEPCLVAIEACGGAHYWNREITALGHQVKLIPPQYVIPYRQENKNDYNDALAIVEAAQRPNMRFVPAKSIEQQDVQMLHRVRERLTQQTTALVNQVRGMLAEYGIVLAKGKTAFRSQLPDILEDGENALTAKGRAIFHGLYNEFVELVNRLKGCEKQVLQENADNPICQRLGTVLGVGPVTATAFYAAVGEGKAFHNGRHFSAWCGLVPRQHSSGGKDNLQGISKRGNAYLRT

SEQ ID NO: 11053 - protein, 321 aa, unidentified
  source 1..321: note = protein_fc994b8
  REGION 6..153: note = RuvC_domain
  SITE 9: note = RuvC_P1
  SITE 58: note = RuvC_P2
  SITE 98: note = RuvC_P3
  SITE 100: note = RuvC_P4
  SITE 103: note = RuvC_P5
  REGION 193..281: note = Tnp_domain
  SITE 201: note = Tnp_P1
  SITE 231: note = Tnp_P2
  SITE 239: note = Tnp_P3
  SITE 240: note = Tnp_P4
  SITE 253: note = Tnp_P5
MSRFYLGIDVAKAKLDCALRLPNGKFRAKVIPNSLEGFTAFSTWLAAQKADSVHVCMEATGTYWEDIAQYLATAGLTVSVVNPAQIKAYSASRLTRSKTDTVDAKLIADFCAERQPLAWQAHSEAEVALRALVLRLDALQTMRTQESNRLLVAREAVRKDIQQHLDWLDTAINQLIEAINDHIDHHPDLKQQRELLDSIPGIGERTSAIILAFYADTSRFANSRQAAAFAGLDPRQYESGSSIKGKPRLSKVGHAFLRKALYMPAMVTLYKTAWGKQFRSRLAGAGKPNKLIIGAMMRKLIHVAFGVLKSAKPFNSAMHLA

SEQ ID NO: 11054 - protein, 313 aa, unidentified
  source 1..313: note = protein_ed35449
  REGION 9..122: note = RuvC_domain
  SITE 26: note = RuvC_P2
  SITE 61: note = RuvC_P3
  SITE 63: note = RuvC_P4
  SITE 66: note = RuvC_P5
  REGION 185..272: note = Tnp_domain
  SITE 193: note = Tnp_P1
  SITE 223: note = Tnp_P2
  SITE 231: note = Tnp_P3
  SITE 232: note = Tnp_P4
  SITE 244: note = Tnp_P5
MIRQRLTRGRMLRFFAKLPPCLVGIEACATWHYWARELVGLGHDVKLMPAQYVKPYVKRGKNDAADAEAICEAVTRPTMRFVGIKSPEQQSAMMLHRVRLILNRQRTQLSNAMRAHLAEFGIAVPIGRNGLEQLLDVIADPTDERVPADARFCLEMLAAELRIVKEQILENDRRILASARETELGRRLMEIPGVGPLLASAIVATVPDPAIFRSGRNLAAWIGLVPRQNSSGGKERLGGITKAGHQYLRQMLIVGAMAVVRFAERNGAKRLWPVQLLARRKAKVAAVALANKNARMIWAMMASGERYREPLAA

SEQ ID NO: 11055 - protein, 311 aa, unidentified
  source 1..311: note = protein_6addbf0
  REGION 6..170: note = RuvC_domain
  SITE 9: note = RuvC_P1
  SITE 52: note = RuvC_P2
  SITE 92: note = RuvC_P3
  SITE 94: note = RuvC_P4
  SITE 97: note = RuvC_P5
  REGION 188..272: note = Tnp_domain
  SITE 196: note = Tnp_P1
  SITE 225: note = Tnp_P2
  SITE 233: note = Tnp_P3
  SITE 234: note = Tnp_P4
  SITE 245: note = Tnp_P5
MTNDTIGVDISKDHLDSYRMSDGASRRFTNDRTGHKAFIAWAARLDIRVVYEPTGAYHRAFERRLADEGLPLVKVNPCRARRFAEATGKLAKTDRLDAAMLARMGALLELEARPVRSPILNDLKDLHMAREALVKNRTAAKNRAKNLTLPILKRHNAEQLRQIERQIAAIEVEIMALIKNEPDLAQRFAILVSIPGIAAITAFALLIEMPELGTLGNGQAASLAGLAPVARQSGQWTGRAFIRGGRAGVRRALYMPTLVAMRFNPDLKAKYEHLVAVGKPPKKAIAALMRKMILLANALLRDGRKWTPSLP

SEQ ID NO: 11056 - protein, 394 aa, unidentified
  source 1..394: note = protein_fa70fb3
  REGION 4..164: note = RuvC_domain
  SITE 7: note = RuvC_P1
  SITE 59: note = RuvC_P2
  SITE 99: note = RuvC_P3
  SITE 101: note = RuvC_P4
  SITE 104: note = RuvC_P5
  REGION 267..354: note = Tnp_domain
  SITE 275: note = Tnp_P1
  SITE 305: note = Tnp_P2
  SITE 313: note = Tnp_P3
  SITE 314: note = Tnp_P4
  SITE 327: note = Tnp_P5
MFLVGIDIGKLSHMFCILDASNNEVIVKPVSFKNDKLGFDFLMNQLKSYPKDHLLIGMEDTGHYHFTLLKFLLDSGFSVALINPVTTDLTRKIQLSSTKDDDLDTLTICDVLASNQRRKGYRISKIDSFDLYEQKRLTREHHDLKEQLNVYTNKLQKCIDIVFPEFNSLFRSKYGSVYMNVLKTFGSADSIAHADIRNIRKCFEANRKGRRISLTPEELKEAARNSIGFPSKAEVIELRHLIDIIELINVQISEVDKKIEEFSVQNNSPILTIPGISHFSGTSILAELGDLRNYSKASQVIKFAGVSPSKYKSSQYEAQHTAITKKGSRYLRKTLYQVILPVIRYNPVFNAFYRHKLSQGKGHRCAQGHCVRKLLRIIYHLVTTDQSFDPKLLR

SEQ ID NO: 11057 - protein, 326 aa, unidentified
  source 1..326: note = protein_c8fb896
  REGION 7..150: note = RuvC_domain
  SITE 10: note = RuvC_P1
  SITE 55: note = RuvC_P2
  SITE 93: note = RuvC_P3
  SITE 95: note = RuvC_P4
  SITE 98: note = RuvC_P5
  REGION 198..285: note = Tnp_domain
  SITE 206: note = Tnp_P1
  SITE 236: note = Tnp_P2
  SITE 244: note = Tnp_P3
  SITE 245: note = Tnp_P4
  SITE 258: note = Tnp_P5
MKKRIFIGIDISSLTLDACVLIDKSKESLVIKNEVKEIKALLKKFSKYELVIGMENTGRYNWPLFEVLADSTHLVYVINPLHLKKSLGLVRGKNDRIEALRIAQFIEKNHEELKPWTCPSESIRKLKVLLTERNFRIKCKRQLICQKRDYSKMKKLKLESSLSKMNKEMMDHFDKQIKLIEKQIEEIIQMDEELNQQAKLIKTVPGVGKVLSWTMLAKTEGFKTIVEPRKMACYSGVVPFDNQSGTSIRGKNRVSSLADKNIKSILHLAAMSAIRLNNDLGKYYQRKIAQGKNKMSVINAVRNKIIHRIFAVIKSQTPYKIHLELS

SEQ ID NO: 11058 - protein, 328 aa, unidentified
  source 1..328: note = protein_e429fae
  REGION 4..160: note = RuvC_domain
  SITE 7: note = RuvC_P1
  SITE 60: note = RuvC_P2
  SITE 100: note = RuvC_P3
  SITE 102: note = RuvC_P4
  SITE 105: note = RuvC_P5
  REGION 200..286: note = Tnp_domain
  SITE 208: note = Tnp_P1
  SITE 237: note = Tnp_P2
  SITE 245: note = Tnp_P3
  SITE 246: note = Tnp_P4
  SITE 259: note = Tnp_P5
MIQLGIDVGKSKIDLCLKPDAPDGRKKTKVLLNGPDVAVTVLEWLTRQKVSHSEVQVVMEPTGTYHEHLAYGLHDRAVRVVIANPARVRSFAQGMGILTKNDTVDADVLARYGAMRQPDVWQPPSLAIRELKALLSRRDALVQDVNRENNRLEKLLSTCGSARVELSVRKILQALNGELEAVQALIDDHIDNHPDLKRDMEYLTSIKGVGTAVGSTMLAVLRGNHFRSAEQAAAWLGVVPKEKRSGSSVRGRTRLSKCGPPSVRAKLYMAAMVAAKHNPHLKAFYDRLVSAGKARRSALGGVMRKLVHICFGVLMKQQRYDENYAVAA

SEQ ID NO: 11059 - protein, 277 aa, unidentified
  source 1..277: note = protein_2783a28
  REGION 1..49: note = RuvC_domain
  REGION 153..240: note = Tnp_domain
  SITE 161: note = Tnp_P1
  SITE 191: note = Tnp_P2
  SITE 199: note = Tnp_P3
  SITE 200: note = Tnp_P4
  SITE 213: note = Tnp_P5
MIQDHLRFVSFYDLDLLDLKTLGRFRQKTIKQRTRLKIQLTSYVDEAFPELQYFFKSGLHQKSVYALLKEAPTPEAITSMHMTHLAHLLTVTSHGHFDKRTAQQLRALAQKSVGVSDSAISIQITQTISQIELLDSQLKNVDSEMIEIVKFHDSVIMTIPGIGYINGGMILGEIGDIHRFSSPGKLLAYAGLAPPVYQSGKFQAKRTRMSKRGSKVFRYALMNAAHNVVKNNATFEAYYEAKKSEGRSHYNALGHCAGKLVRIIWKMLTDEVEFNLD

SEQ ID NO: 11060 - protein, 348 aa, unidentified
  source 1..348: note = protein_463975c
  REGION 9..169: note = RuvC_domain
  SITE 12: note = RuvC_P1
  SITE 68: note = RuvC_P2
  SITE 108: note = RuvC_P3
  SITE 110: note = RuvC_P4
  SITE 113: note = RuvC_P5
  REGION 209..295: note = Tnp_domain
  SITE 217: note = Tnp_P1
  SITE 247: note = Tnp_P2
  SITE 255: note = Tnp_P3
  SITE 256: note = Tnp_P4
  SITE 269: note = Tnp_P5
MAKILKQVAGIDVAQKELVVSLGRMDDSIEPDIYAFKTFANKPSGFSALEVWIKKHTDKQVKVRFVMEATGVYHEKLAYHLSGLGYEVSIVLPNKINNYAKSLETKTVTDKTASQAICQFGLEKKISLWQPPKKIFRDLKQLTRERNQIIAERTVAKNQLHAENAEAFPNERSIARLHQRIRLFNEQEKEIKADLAEIIKKDKELVEKINNISTIPGVGKLTAIITMAETNGFNLIKSKKQIESYAGFDVKEKQSGSSVKGKSKISKRGNRHLRKAMYMPALAAIRHDDRFKAVFIRLVSKHGIKMKAAVAVQRKLLGLIYIVWKTDIKYDPKFLNKVTENEKVVINS

SEQ ID NO: 11061 - protein, 343 aa, unidentified
  source 1..343: note = protein_e9a0dde
  REGION 18..166: note = RuvC_domain
  SITE 21: note = RuvC_P1
  SITE 68: note = RuvC_P2
  SITE 108: note = RuvC_P3
  SITE 110: note = RuvC_P4
  SITE 113: note = RuvC_P5
  REGION 209..296: note = Tnp_domain
  SITE 217: note = Tnp_P1
  SITE 247: note = Tnp_P2
  SITE 255: note = Tnp_P3
  SITE 256: note = Tnp_P4
  SITE 269: note = Tnp_P5
MKNIRPKITPLPKEPLFAGVDVGAEELVLVIRKDGKPFDPQKFTNTPAGRARLVKKLVKLTGIKVCLEATGIYHFDLSIALHDAGVALMVVNPKASHNFAKVLMKNSKTDAVDADTLAEYAARMDFVAWTRPSNGKLALRSFSRRIGAPTGQKAACKNHLHALAATQETPKAVLRDAKLAITQLEKRIGQLTAAALALVALHPELGRTLQLLVGIKGIAETSAIALMGELLLLPPNLSHREWVKFAGLDPKAFDSGKSVHKKSRISKAGNRHIRSALYMPALSAKQHDPHVKAYFDHLVANGKKPLQGVCAVMRKLLHAIHGMLKYDKPFDNTRFYTIPVSAG

SEQ ID NO: 11062 - protein, 424 aa, unidentified
  source 1..424: note = protein_80a0650
  REGION 4..157: note = RuvC_domain
  SITE 7: note = RuvC_P1
  SITE 59: note = RuvC_P2
  SITE 94: note = RuvC_P3
  SITE 96: note = RuvC_P4
  SITE 99: note = RuvC_P5
  REGION 287..373: note = Tnp_domain
  SITE 294: note = Tnp_P1
  SITE 325: note = Tnp_P2
  SITE 333: note = Tnp_P3
  SITE 334: note = Tnp_P4
  SITE 346: note = Tnp_P5
MLGVGIDWAEEFHLVALGKPGEGVIDIRRVEHTPAAVQALLAHIATLEPDPAEVRVVIETRHGLLVERLTDAGFTILPVNPDLIARRRGPARKKDDAEDARLACLLALDRYATLRPLLPHGQLAGELRAIARDDERAARDQRRLANRLRQDLIATFPAALAIAGDDLGAPTILKLLERWPTAQTLGGAARHELLAFAQAAHHGWPDRLADRVQAALATDHFTPRDYLVRAKADTIRLAATQLLAITAQRRVWERRMGELLLGAPRYGRAKQPRADPDQLGQAFPGGKVYLSFPGLGDRLAARIAGEIGDHPEQYGSPNALQCYAGKAPVTRRSGKSELVVACRLACNRYLAAAVQQWAFCSLRESGWAREFYDTQRARGKTHHAALRALGNRWLEVLWHCLRKGVLYDEATHVANRNRALGKAA

SEQ ID NO: 11063 - protein, 346 aa, unidentified
  source 1..346: note = protein_6f32523
  REGION 6..147: note = RuvC_domain
  SITE 9: note = RuvC_P1
  SITE 52: note = RuvC_P2
  SITE 87: note = RuvC_P3
  SITE 89: note = RuvC_P4
  SITE 92: note = RuvC_P5
  REGION 212..301: note = Tnp_domain
  SITE 220: note = Tnp_P1
  SITE 250: note = Tnp_P2
  SITE 258: note = Tnp_P3
  SITE 259: note = Tnp_P4
  SITE 271: note = Tnp_P5
MNVTTYGVDLAKLVFQVHWLEPQTGEVQRKKLSRAQFAEFFARRAAGIVAVEACGSAHHWGRRLREWGHEVRLIPTQFVRPFVKSNKTDSADAQAIWEAAQRPEMRFAAVKSEQQQAVLGLHRLRTQLVKVRTMHANQIRGLLYEFGVVLPQGWQTLLKQAGPMLADQKFSDVPELIREGLREQLQGMRELTARIDQLERSIRSYHQQDEQCRRIQAIPGVGPLISTAVLASVADARTFRSGREFAAYLGLVPRQSGTGGRVKLLGISKRGDGYIRNLLVLGARSVLYHANRTGRTPQPWLQALRSRRPTNVVVVALANKMARIIWALLAHGRSYDSGWRRTLPGT

SEQ ID NO: 11064 - protein, 398 aa, unidentified
  source 1..398: note = protein_41712e1
  REGION 6..162: note = RuvC_domain
  SITE 9: note = RuvC_P1
  SITE 60: note = RuvC_P2
  SITE 100: note = RuvC_P3
  SITE 102: note = RuvC_P4
  SITE 105: note = RuvC_P5
  REGION 267..354: note = Tnp_domain
  SITE 275: note = Tnp_P1
  SITE 306: note = Tnp_P2
  SITE 314: note = Tnp_P3
  SITE 315: note = Tnp_P4
  SITE 327: note = Tnp_P5
MSRIWAGIDSGKGHHHGLALDAGGKTLLSRRVANDEPELLKLIGDVLDLADGRQVTWAIDMTGGEPALLLALLINHGQEVLYIPGRLVNRASDGYRGEGKTDARDAYVIADQARMRRDLRPIRPGDEAAIELKLLTGRRADLVEDRTRVVNRLRGTLLSMFPALERALDVTNTGPLRLLTGYQAPAAIRRAGTARLTKWLANRKVRNARALAETAVEAAERQHTAVPGEKTTAKLVHTLAEEVMALNEQISEMDKLIEGRFREHELADIVQSVPGIGTVLGAEFLAAIGGSLDDFGSPDALAAFAGVAPAPRDSGKVSGNLHRPLNYHRRLQRVFYTSALVSVRYDPNSRKFYDRKRAEGKKHVQAVLALARRRVNVLWALIRDRRCYQVTPSATAAV

SEQ ID NO: 11065 - protein, 389 aa, unidentified
  source 1..389: note = protein_5d56d9e
  REGION 4..163: note = RuvC_domain
  SITE 7: note = RuvC_P1
  SITE 60: note = RuvC_P2
  SITE 101: note = RuvC_P3
  SITE 103: note = RuvC_P4
  SITE 106: note = RuvC_P5
  REGION 267..353: note = Tnp_domain
  SITE 274: note = Tnp_P1
  SITE 304: note = Tnp_P2
  SITE 312: note = Tnp_P3
  SITE 313: note = Tnp_P4
  SITE 326: note = Tnp_P5
MLCVGIDVAKRKHDCCIIDSDALKTVESFTFPNSREGFDMLLSKIFELGIPKDKIRVGLEATGHYSSNLAHFISEHDLPLNIFNPLLTNRYKQGFSLRKTKTDKVDACAIAQMIVSGKASQTYSPLLYHNEELKSLSRYRSQTIQKCSKLKISVSRLVTILFPELEGLTSSIHLASIYALLKAYPGHEQIAHCSMKRLTRLLSDASQGRFDKSKALEIHQAACRSIGTVSLSASMELVHAITDIEVLKQHVAEIDEKIKEMVDQEESSIIDIPGIGYTLCASILGEIGDFKRFPDVDKLLAYAGMSPSKYESGGFHSNHNKMEKRGSPYLRKTLFVAARLVAQNVPKFKEYLEKKLSEHKPYKVALSHVAKKLIRLIYRLGVSRCPYLA

SEQ ID NO: 11066 - protein, 342 aa, unidentified
  source 1..342: note = protein_77f89a0
  REGION 6..148: note = RuvC_domain
  SITE 9: note = RuvC_P1
  SITE 52: note = RuvC_P2
  SITE 87: note = RuvC_P3
  SITE 89: note = RuvC_P4
  SITE 92: note = RuvC_P5
  REGION 211..297: note = Tnp_domain
  SITE 219: note = Tnp_P1
  SITE 249: note = Tnp_P2
  SITE 257: note = Tnp_P3
  SITE 258: note = Tnp_P4
  SITE 270: note = Tnp_P5
MQITTIGLDIAKNVFQVHGIDAGEKVIVRKQLRRSQVLAFFEALPPCLVGMEACASSHCWARELTKLGHQVRLMPAKDVKAYVKRNKNDAADAEAICEAVRRPTMRFVQIKSVEQQGRLMLHRARDLLMRQRTQLINALRAHMAELGIVAAQEREGVKELLRIIASEQDARLPVDAHASLIVLAAGLQALQTMIGSIERRIIAHLHSNEASKRLRSIPGIGIVGATAIAATVPDPKVFRSGRDFAAWIGIVPRQDSTGGKQKLGPISKQGDQYLRRILVVGAHAVLKRARHQPEKYPWITQLLARKPYRVVAVAVANKMARVAWALLAKGGTYRAPALAAAA

SEQ ID NO: 11067 - protein, 412 aa, unidentified
  source 1..412: note = protein_bc406f2
  REGION 5..167: note = RuvC_domain
  SITE 8: note = RuvC_P1
  SITE 64: note = RuvC_P2
  SITE 109: note = RuvC_P3
  SITE 111: note = RuvC_P4
  SITE 114: note = RuvC_P5
  REGION 285..372: note = Tnp_domain
  SITE 293: note = Tnp_P1
  SITE 323: note = Tnp_P2
  SITE 331: note = Tnp_P3
  SITE 332: note = Tnp_P4
  SITE 345: note = Tnp_P5
MKLFIGIDVSSKDLQVAITDSENYQKPLLNQSFSNDLIGANEVKKIILQLAKQNSYDKVIIGMEATSIYSFHPAYFFANDEDLQKINLETDVINPKNTKRFHDVYEENKNDPTDAYYIAEYLRFGKYHVTIARQEEYLALQRLTRARYEITSSLTRAKQHFIETLYYRVNKLVTVDKDNIKTSIFGATMLSIVTDSKTIDEIAEMPIEDLIDYLQTKGRGRFSDPETLAKAIRKAVRGSYRLGKVMKDSIDAVLSVYYAEIKTNQKLIKNLDKAITDIVQTLPEERILQSIPGIGSVYSAGIIAEIGSIDRFDTEAQLAKYAGLAWRQKQSSNFDSEHKPMTKNGNHYLRYYLVEAANLIRQRDPVFRKYYQKKYDEAFYSPHKRACVLCARKLTRTIFTLLKNGQIYQTPR

SEQ ID NO: 11068 - protein, 330 aa, unidentified
  source 1..330: note = protein_4882dc5
  REGION 8..154: note = RuvC_domain
  SITE 11: note = RuvC_P1
  SITE 59: note = RuvC_P2
  SITE 97: note = RuvC_P3
  SITE 99: note = RuvC_P4
  SITE 102: note = RuvC_P5
  REGION 202..289: note = Tnp_domain
  SITE 210: note = Tnp_P1
  SITE 240: note = Tnp_P2
  SITE 248: note = Tnp_P3
  SITE 249: note = Tnp_P4
  SITE 262: note = Tnp_P5
MKSWNVILGVDVSKLTLDICCAERNLHIKIDNCSKGFTILKKWCRTNEIDLNQTLMVMEYTGGYEYRFMQFCESLSISYSRIPGLEIKQSMGMTRGKSDQADAFRIGQYGEEKSKRLKPSKPLDNNILKLKQLLSFRKRLVREKAGLESTVKERGHMYSMKKADTVTHIAQSKIKADKKYIIEVEQEIMKVIKGDESMLLTYRIITSIKGIGPVNAWMTIAYTENFTSFTDARKYAVYVGVIPFEHTSGTSIKGRKQVSHLAHKGLKNELNQAAKTAIAHDPELKAYAERKLENKCYPLVLNNVKFKLILRMFSLVKRGELYAQNYKRAA

SEQ ID NO: 11069 - protein, 411 aa, unidentified
  source 1..411: note = protein_80cd103
  REGION 5..163: note = RuvC_domain
  SITE 8: note = RuvC_P1
  SITE 62: note = RuvC_P2
  SITE 102: note = RuvC_P3
  SITE 104: note = RuvC_P4
  SITE 107: note = RuvC_P5
  REGION 273..373: note = Tnp_domain
  SITE 281: note = Tnp_P1
  SITE 311: note = Tnp_P2
  SITE 319: note = Tnp_P3
  SITE 320: note = Tnp_P4
  SITE 333: note = Tnp_P5
MNPVVGLDIAKGESQVQAFLDKGKPYKHSFKIIHDLEGLDHFLQFLVEIEKLTRVKPSIVLESTGHYQTPIVQFLDEHQYVYIVVNPLIAYRAKSSSLRKVKTDAIDAYHLCELYYKEELEPYKKRGIQLLNLRHLTRQHESLSGISSQTKLQFHAILDQVFPEYRGIFGDLYSKVSLLTLLEFPTSEAVIHAGEAQVADKIASLCISRSEKWAREKASALMAAASRNPFQRNLYQSLIFTLQMSVEMILQYQKHLSKLEKQIDALAKEIEEYGIIQTIPGIGEKIAATIISEIGEIDRFNHPKKLVAFAGVDPEVFESGKFKATITKITKRGSSQLRHALYMAVRCAIRDSRKKKQGDEIIPRNKRLREYYDKKRNEGKPFRVAVIACVNKLLHWIYAILKNRTAFQDLT

SEQ ID NO: 11070 - protein, 305 aa, unidentified
  source 1..305: note = protein_75d1fa5
  REGION 5..152: note = RuvC_domain
  SITE 8: note = RuvC_P1
  SITE 52: note = RuvC_P2
  SITE 92: note = RuvC_P3
  SITE 94: note = RuvC_P4
  SITE 97: note = RuvC_P5
  REGION 186..270: note = Tnp_domain
  SITE 194: note = Tnp_P1
  SITE 223: note = Tnp_P2
  SITE 231: note = Tnp_P3
  SITE 232: note = Tnp_P4
  SITE 243: note = Tnp_P5
MISWVGIDISKSNLVVWVKPQSEGFDVSNTSEGFLELIRRLSQFEVSLILLEATGGYERNAMAALQGANFKVLRVNPRRARSFAVAMGKNAKTDAIDAAVLADFAEVLNASSSKVISPEREALRELVQQREHFVQQRDDNKRRLQQAQLPAVIALIKGHIHFLQTQIRQLDKAINQSMHELDAEKAQRLISVKGIGTVATASLLVYLPELGELDRREVAALAGIAPLNDDSGNHSGKRHIYGGRARVRRALYMSCWVVIRHQPDFKARYEGLRERGKSAKVALIACMRVLLIRLNAMLRDGTEWR

SEQ ID NO: 11071 - protein, 338 aa, unidentified
  source 1..338: note = protein_f3a4fc4
  REGION 6..148: note = RuvC_domain
  SITE 9: note = RuvC_P1
  SITE 52: note = RuvC_P2
  SITE 87: note = RuvC_P3
  SITE 89: note = RuvC_P4
  SITE 92: note = RuvC_P5
  REGION 211..297: note = Tnp_domain
  SITE 219: note = Tnp_P1
  SITE 249: note = Tnp_P2
  SITE 257: note = Tnp_P3
  SITE 258: note = Tnp_P4
  SITE 270: note = Tnp_P5
MKITTVGLDIAKSIFHSFAINHIGRLIRKKQLKRKQLLAYFAKLEPSIVVMEACGGANYWAREFIKQGHQVKLIAPQYVKPFVKGNKNDYNDAQAIAEASQRASMRFVPIKSVEQQDLQNVHRQRERVKKERTALANQIRGLLAEYGIVIKKGISAIRNELPSIIEDAENDLTVMSRALFNELLEEFHAMGDLLEHCDTKIKIANKNNDICTRLGDVLGIGDITSNALYAAAGDGKNFVNGRHFSAWVGLVPGQHSTGGKPRLLGISKRGNSYLRTLLIHGARAVLRHSEKKNDRFSLWAQALLKRRGQNKACVAVANKLARMAWVIMAKGETYRPAM

SEQ ID NO: 11072 - protein, 341 aa, unidentified
  source 1..341: note = protein_38641a8
  REGION 7..148: note = RuvC_domain
  SITE 10: note = RuvC_P1
  SITE 53: note = RuvC_P2
  SITE 88: note = RuvC_P3
  SITE 90: note = RuvC_P4
  SITE 93: note = RuvC_P5
  REGION 209..295: note = Tnp_domain
  SITE 217: note = Tnp_P1
  SITE 247: note = Tnp_P2
  SITE 255: note = Tnp_P3
  SITE 256: note = Tnp_P4
  SITE 268: note = Tnp_P5
MSESALIGIDLGKHSFHLHGQDKSGREVFRKKCSRPQMMHFFGNLPSCVVVMEACAGAHFVARQLTAMGHTAKLISPQFVRPFVKGNKNDFVDAEAICEAASRPSMRFVTPKTEAQQTLSVLHRMRESLVHDRTKTANQMHGFLLEFGVGLPKGLAIMRRLASALAERELPVRLTVLLQRLHDHFVYLDEQIKALDKELAGQLAGDDLGSRLLSLPCVGPITASLLAVEMGDGQQYRCSRDFAASVGLVPRQYSTGGKANLLGISKRGDKHLRQLLVQCARVYMQRLEHQKGALADWVRSLLSRRHSNVVACALANKLARIAWAIAAHHTQYEAGPDALNA

SEQ ID NO: 11073 - protein, 339 aa, unidentified
  source 1..339: note = protein_4176d3c
  REGION 6..147: note = RuvC_domain
  SITE 9: note = RuvC_P1
  SITE 52: note = RuvC_P2
  SITE 87: note = RuvC_P3
  SITE 89: note = RuvC_P4
  SITE 92: note = RuvC_P5
  REGION 210..297: note = Tnp_domain
  SITE 218: note = Tnp_P1
  SITE 248: note = Tnp_P2
  SITE 256: note = Tnp_P3
  SITE 257: note = Tnp_P4
  SITE 269: note = Tnp_P5
MKITPVGVDIAKAVFQVHYIDTESGEIVNRSIKRAAFLEHFANREPCMIGMEACGGAQHWARQLTKLGHHVKLMPAKFVKAFNVRNKNDAADAQAIWLAVQQPGKPVAVKTEAQQAVLALHRMRQQLVKFRTMQINSLRGLLTEYGEVMGKGRTALDKAIPAVLARVADRLPAVLIDTLREQWNGLRKLDDQVREIERRLRQWMKEDKAVKAIAAIPGVGVLTATAAVATMGDVTAFRSGREFAAWIGLVPKQTGSGGKVTLQGISKRGDTYLRTLLIHGARSVLAHAKEPSPWVEQIRTRRPPNVVTVALANKTARMIWAILAHDRPYQREYTSPKPA

SEQ ID NO: 11074 - protein, 323 aa, unidentified
  source 1..323: note = protein_e91a5d1
  REGION 8..150: note = RuvC_domain
  SITE 11: note = RuvC_P1
  SITE 52: note = RuvC_P2
  SITE 92: note = RuvC_P3
  SITE 94: note = RuvC_P4
  SITE 97: note = RuvC_P5
  REGION 191..278: note = Tnp_domain
  SITE 199: note = Tnp_P1
  SITE 229: note = Tnp_P2
  SITE 237: note = Tnp_P3
  SITE 238: note = Tnp_P4
  SITE 251: note = Tnp_P5
MNKDRIYFGIDISKDVFDVMDSNGNYFQFENNHIGFKNFAKLLSQNSHCVMEATGYYHYKLAYYLLENNIMVSVENPLSVKRYIQMRLSKIKTDKSDAKMICLYAQHVDLKSWEGQTKSQIECLQITRLLSLYFKQTTALKNKIHGEDVLGNPSSFVVRSLKRSLKHKQKEIKSLEQRLTEIVKQDHQELLTRLESIPGLGRKTSLMLIVLTDGFERFKSASELCSYSGLTPIIRQSGTSVKGRSRISKMGNRKLRNLLFMCSFTACKNNKACKALYDRIVAKGKSKKLALIAVCNKLLKQAFAIAKSGLIYDETYRSTLVKN

SEQ ID NO: 11075 - protein, 350 aa, unidentified
  source 1..350: note = protein_ea9373f
  REGION 6..147: note = RuvC_domain
  SITE 9: note = RuvC_P1
  SITE 52: note = RuvC_P2
  SITE 87: note = RuvC_P3
  SITE 89: note = RuvC_P4
  SITE 92: note = RuvC_P5
  REGION 211..296: note = Tnp_domain
  SITE 219: note = Tnp_P1
  SITE 249: note = Tnp_P2
  SITE 257: note = Tnp_P3
  SITE 258: note = Tnp_P4
  SITE 270: note = Tnp_P5
MELLTLGIDLGKTSFHLVGLGLRGNIVVRKRLSRAQLLRFTSNLRVELIGMEACGGAHFLGRALQQQGHKVRLMPAQYVKPFVKTNKNDFIDAAAIAEAVARPTMRFVPIKTDDQLDIQSLHRIRERWVMRRTAVVNQIRGLLLERGITLRKGRQHVDAALPEILADASTTLSGCFRTLLAQLKLELDQLASRIAEADCALEQTSRENEACQRLIAIPGIGPVTATALIAAIGNGAAFSKGREFSAWVGLVPREDSTGGKQRLLGISKRSNSYLRRLFVQGARAVMMHRTKQASGLALWLEDLAVHKHHNVAIVALANKLARIALAVLARGEIYHPPVLAIAISAEHACR

SEQ ID NO: 11076 - protein, 343 aa, unidentified
  source 1..343: note = protein_8eb65da
  REGION 7..149: note = RuvC_domain
  SITE 10: note = RuvC_P1
  SITE 53: note = RuvC_P2
  SITE 88: note = RuvC_P3
  SITE 90: note = RuvC_P4
  SITE 93: note = RuvC_P5
  REGION 211..302: note = Tnp_domain
  SITE 219: note = Tnp_P1
  SITE 249: note = Tnp_P2
  SITE 257: note = Tnp_P3
  SITE 258: note = Tnp_P4
  SITE 270: note = Tnp_P5
MTKISTIGLDLAKNVFQVHGIDASGTVVVRRQLKRAAVEKFFAGLPPCLVGMEACGSAHHWARVIRRHGHEVRLMPPAYVKPYVKRNKNDGRDAEGVCEAVSRPTMRFVAVKSVEQQATLAVHSTRALLVRQRTMAANALRAALSEVGIVAAQGYEGLRELMTRLEEPSEEIPENMRCALLLLAKHWQALDADERVLERQIGKAARGDRDARRLMEVPSVGPIIASTVLAKVPDAKVFRSGRDFAAWIGLTGKDHGTGGKHRPGRISKQGDRMLRALLISGASAHLRQQKRRGVTDPWLRDLLARRPYKVVMVAFAAKTARILWAMLSKGEAYRDRASAPAAA

SEQ ID NO: 11077 - protein, 329 aa, unidentified
  source 1..329: note = protein_bd3d9fa
  REGION 4..158: note = RuvC_domain
  SITE 7: note = RuvC_P1
  SITE 60: note = RuvC_P2
  SITE 100: note = RuvC_P3
  SITE 102: note = RuvC_P4
  SITE 105: note = RuvC_P5
  REGION 200..286: note = Tnp_domain
  SITE 208: note = Tnp_P1
  SITE 237: note = Tnp_P2
  SITE 245: note = Tnp_P3
  SITE 246: note = Tnp_P4
  SITE 259: note = Tnp_P5
MYYVGIDISKRFIDVCLLVDGIKGKRKTKVLPNGTNSTESLAQWLALQKCEPVQAHIIIESTGIYHEHLTYGLHQAGILVSVINPHRIREFAKGMGILTKTDKVDAYVLACYGCLKQPDGWSPPSEEVRKLKALLQHRDNLLNDKQRIENRLNTLKSTRSPEEILGSLESIEKNLKDELARIERLIADHIDKYPGLKNDLKLLKSISGIGEQIGWNMLAIIRSNNFRSAEQVASYLGVIPVERRSGSSVRGRARLSKIGPPGIRAKLYMGAIAAISHNHHVKAQYERLLLKGKSKMLAIGAAMRKLVHLCYGVLHTQQPYDKNYGMMPH

SEQ ID NO: 11078 - protein, 345 aa, unidentified
  source 1..345: note = protein_8bc08de
  REGION 5..152: note = RuvC_domain
  SITE 8: note = RuvC_P1
  SITE 55: note = RuvC_P2
  SITE 92: note = RuvC_P3
  SITE 94: note = RuvC_P4
  SITE 97: note = RuvC_P5
  REGION 212..300: note = Tnp_domain
  SITE 220: note = Tnp_P1
  SITE 250: note = Tnp_P2
  SITE 258: note = Tnp_P3
  SITE 259: note = Tnp_P4
  SITE 271: note = Tnp_P5
MKHYAGLDVSVKETSVCIMDEAGTVCREVKVPSHPQDLVRVLKDPAWRIERIGLEAGPLSQWLFSGLADAGLPAICIETRHTKAVLKAQVNKSDRNDARGIAQMMRVNLFRPVHVKTLASQKRRALLTARKLLQEKAIAIENDIRGLLRNFGLKVGAAGVIKFEERVRELVEGMPDLAEIMASLLDARQKLREQVRKLHRKLLSIVREDKVCRRLMTVPGVGPVVSLAFTAAIDDPARFKSSKAVRPALGLTPVLNQSDESCRVGRISQCGDGMMRTLLYEAAQVMLTRTIKWSWLKAWAMNVAKRRGRQKAIVALARRLAVIMHRIWCDGTEFHWTRENAPALP

SEQ ID NO: 11079 - protein, 342 aa, unidentified
  source 1..342: note = protein_3e8ad33
  REGION 6..147: note = RuvC_domain
  SITE 9: note = RuvC_P1
  SITE 52: note = RuvC_P2
  SITE 87: note = RuvC_P3
  SITE 89: note = RuvC_P4
  SITE 92: note = RuvC_P5
  REGION 211..295: note = Tnp_domain
  SITE 219: note = Tnp_P1
  SITE 249: note = Tnp_P2
  SITE 257: note = Tnp_P3
  SITE 258: note = Tnp_P4
  SITE 270: note = Tnp_P5
MSIVILGIDLGKNSCSIVGLDANGAVIVRRRMRRDGVIAFAAKLRPCTMAMEACCGAHHMGRALAELGHEVRLMSPEYVRPYVKAQKNDDRDAEAIAEAATRPTMRFVELKSEEQLDVQTLHRVRDRLVGDRTSLTNQIRSLLLERGHVVAQSHARLRLLLAELLNCEAGSLSPRMVFLLGDMRARWEELDRRIGAFDAEFAAMARTDDRARRLTSIPGIGALNATALVAAVGDAATFDKGRDLAAWLGLVPRQASTGGRPKLLGITKRGSRYLRKMLIQGARSAMPSLAKSDTAVGAWLRGLLARAHPNVAVVALAAKMARTVWALLRHGQTYNSAPRATI

SEQ ID NO: 11080 - protein, 386 aa, unidentified
  source 1..386: note = protein_9e2a7b5
  REGION 5..158: note = RuvC_domain
  SITE 8: note = RuvC_P1
  SITE 56: note = RuvC_P2
  SITE 97: note = RuvC_P3
  SITE 99: note = RuvC_P4
  SITE 102: note = RuvC_P5
  REGION 220..305: note = Tnp_domain
  SITE 228: note = Tnp_P1
  SITE 258: note = Tnp_P2
  SITE 266: note = Tnp_P3
  SITE 267: note = Tnp_P4
  SITE 278: note = Tnp_P5
MTVIIGMDPHKRSATIEVIDDRGDKVGSGKFGTDQPGYAEMLAAGRRFADRVWAVEGCNGVGRHIAHRLVHDGETVLDVPAKLSAQVRVFATGNGRKTDPVDAHSVALAALHAPNLVRVHVDPELVVMSMLVDRRDELGRARTQTVNRLHRLLLELFPGGAKKFLSATQARALIATIKPRDIVGKTRRRLTVELITELEAIDKKIKVADKDLRGLVTARGSTLLDLHGIGPAGAARLLADVGDIHRFANRDRFASWNGTAPLDASSGEQQRHRLSRAGNRRINRTLHIMGVVQLRNPTPGRTYFDTKKAAGKTSMEAMRALKRRLSNVVYARMLADQNRREAAGPGGQSGTTLQSSATGLTPDTGPSDKPQPRPAINQPTLATTTP

SEQ ID NO: 11081 - protein, 360 aa, unidentified
  source 1..360: note = protein_787101e
  REGION 13..160: note = RuvC_domain
  SITE 16: note = RuvC_P1
  SITE 65: note = RuvC_P2
  SITE 101: note = RuvC_P3
  SITE 103: note = RuvC_P4
  SITE 106: note = RuvC_P5
  REGION 235..316: note = Tnp_domain
  SITE 238: note = Tnp_P1
  SITE 269: note = Tnp_P2
  SITE 277: note = Tnp_P3
  SITE 278: note = Tnp_P4
  SITE 289: note = Tnp_P5
MPTIADTDLPVTGGVDTHAEVHVAGMAGQAGRVLGTTEFPATAAGYAAALAWMRGHGELVKAGVEGTGSYGAGLARYLAAHGIEVAEVIRPNRQARRRRGKSDPADAVAAALAALNGEASGQPKSGDGAVESIRALQVARRGAVKARTQAGNQLRDLIITAPQVLREKLAALPAPKRVKLAARFRPGDLTSPAEAAKAAMATVARRHQALTAEIAQLDTALETLLGHAAPAGFPARTGMGAKSAASLLVTAGDNPGRLRTEASFAALCGASPADASSGKQRRHLLNRGGDRQANSAPWRIVFTRMATDPRTQAYLARRTAEGKTTREIIRCLKRYVAREIYKALTHSGNPANINHLKEIP

SEQ ID NO: 11082 - protein, 345 aa, unidentified
  source 1..345: note = protein_decd46b
  REGION 7..147: note = RuvC_domain
  SITE 10: note = RuvC_P1
  SITE 53: note = RuvC_P2
  SITE 88: note = RuvC_P3
  SITE 90: note = RuvC_P4
  SITE 93: note = RuvC_P5
  REGION 210..296: note = Tnp_domain
  SITE 218: note = Tnp_P1
  SITE 248: note = Tnp_P2
  SITE 256: note = Tnp_P3
  SITE 257: note = Tnp_P4
  SITE 269: note = Tnp_P5
MEKITRIGVDTSKHVFQLHGVNSDEKPVLRKKMRRKEMIDFFRICSPTVIAIEACGGSHHWARLLTSLGHEVKLIAPQLVKPYVKRSKNDAADAEALCEAMSRPTMRFVPVKSVDEQAVLMLVGVRDRLIRNRTQLANAIRGYAAEFGISAAKGLAHVPLLLERIKADETVPELARELFASQAEEYARLEEKIADVDAKLKAWQRNDERSKRLNTVPGIGPIGAALLIMKTPAPELFQSGRQFAAWIGLTPKDHSTGGKLRLGCITRAGDEALRAALVVGATSVIQHARRTGKASVWLTELLKRKPSKLAAIALANKMARIAWKIMVSSETYNAKSASAVMADVA

SEQ ID NO: 11083 - protein, 411 aa, unidentified
  source 1..411: note = protein_052c4e3
  REGION 5..164: note = RuvC_domain
  SITE 8: note = RuvC_P1
  SITE 61: note = RuvC_P2
  SITE 101: note = RuvC_P3
  SITE 103: note = RuvC_P4
  SITE 106: note = RuvC_P5
  REGION 272..358: note = Tnp_domain
  SITE 280: note = Tnp_P1
  SITE 311: note = Tnp_P2
  SITE 319: note = Tnp_P3
  SITE 320: note = Tnp_P4
MRLFVGDDWAEDHHDVELMDAAGRVLAKRRLPEGAAGMARLHELVGQQLGEDADDAEVVIGIETDRGPWVAALVAAGYTVFAVNPLQASRYRERHGVSGAKSDGADAHMLTDMVRTDSHQLRAVAGDSADAEGIKVLARTHKTLIWERTRHIQRLRHQLREYFPAALEAFEDLAAADTLELLGKAPDPARARKLTRAQVSAALKRARRRDIAGKTTAVLAALRGEQLGQPPAVTAAYTVTVRSLIAVITVLNEQVKALQGQVEENFGRHPDAEIYRSQPGMGAILGARVLGEFGDDPHRYADGKARKNYAATSPITRASGKKKVVAARYIHNDRLVDALNAQAFASLNASPGARALYDELRARGIEHNDALRRLANRLVGILHGCLKTRTLYDEATAWSHRENLPQSSVAA

SEQ ID NO: 11084 - protein, 354 aa, unidentified
  source 1..354: note = protein_ffc04f4
  REGION 16..163: note = RuvC_domain
  SITE 19: note = RuvC_P1
  SITE 66: note = RuvC_P2
  SITE 103: note = RuvC_P3
  SITE 105: note = RuvC_P4
  SITE 108: note = RuvC_P5
  REGION 223..316: note = Tnp_domain
  SITE 231: note = Tnp_P1
  SITE 261: note = Tnp_P2
  SITE 269: note = Tnp_P3
  SITE 270: note = Tnp_P4
  SITE 282: note = Tnp_P5
MACPKHQRGMMMDHYAGIDVSLELSSICVVDATGRIMREAKVASEPEALITWLRGLDLELARVGLEAGPLSQWLYAAMREAGLPVELLETRHVRDAFKAMAVKTDRKDARGIAQLMRLGWFRPVHCKSAPAQETRVLLSARKVLQTKRIDVEMSLRGLLRGFGLKVGPTTARNFAGRIRELVEYHPCLTAVAEALLAAREVLGVQLAGLEKRLRDAARTDDRAQLLMTTPGVGVIVALTFVSAVDDPGRFRSSKAVGAHFGLTPRKYQYGETDVTGRISKAGDAGVRTALYEAANTILTRAVKGSALKSWAARIAARTGMKKAKVALARKLAVVLHRMLADGKPFVADRAALAA

SEQ ID NO: 11085 - protein, 385 aa, unidentified
  source 1..385: note = protein_c478a65
  REGION 40..183: note = RuvC_domain
  SITE 79: note = RuvC_P2
  SITE 117: note = RuvC_P3
  SITE 119: note = RuvC_P4
  SITE 122: note = RuvC_P5
  REGION 255..341: note = Tnp_domain
  SITE 262: note = Tnp_P1
  SITE 291: note = Tnp_P2
  SITE 299: note = Tnp_P3
  SITE 300: note = Tnp_P4
  SITE 312: note = Tnp_P5
MQRNDMSRSLVAFDQNSTVVAVVELSLSTWLVAGVVPGLKRQPLKKLSADADKLVALLERWRDEAIKAGQVINRMVVAFEAGRDGFWLARLLRDRGIEAYVIHASSIAVSREHRRAKSDRIDTQRLMRSLLGWLRGEAEHCRMAAIPTLAQEDAKRPNREHECLVADRTRLVNRMKAALIRLGIRNFNIKLRKAAEGLAALRTPEGEPLPPNTLAELGRELERLALIRAQIRAIEQARLQRLKAAPQQATHPMILMLAKVMGVGVETADMLVHEVLSRPLRDHRAVGRYAGLTGSPDESGSSRREQGLAKAGNARVRRGMLQLAWRWLMHQKDSALTQWYRSRTADGRKDTRKTMIVALARKLLIALWRYVTTGEVPQGVVLKAA

SEQ ID NO: 11086 - protein, 352 aa, unidentified
  source 1..352: note = protein_87b07e9
  REGION 4..159: note = RuvC_domain
  SITE 7: note = RuvC_P1
  SITE 59: note = RuvC_P2
  SITE 100: note = RuvC_P3
  SITE 102: note = RuvC_P4
  SITE 105: note = RuvC_P5
  REGION 222..307: note = Tnp_domain
  SITE 230: note = Tnp_P1
  SITE 260: note = Tnp_P2
  SITE 268: note = Tnp_P3
  SITE 269: note = Tnp_P4
  SITE 280: note = Tnp_P5
MVTVRIDPHKHVHVAVAVDAGGRQISKPMIVNNDTLLITALVKWIRSIAGDMPVTWAIEDGRGFARRLADGLLLAGHEVVWVPSRLTAAHRKLHAATGAKSDPVDAAAAAHAAIATPGLDRHRIDERVRELRVLVDYRADLIKRRTMVINQLKAQLHVWLNHTPGDLARPKGLASLTALLEPAPLGTHVRKALADMITEIADLNQRVRDLDGTIRELVTPLAPALLEITGISHISAAVLIAEIGDITRFSSSAKLARYTGCAPIPVYSSDKERHRLHRGGNRRLNSVLYTAAIVQKRWHPDAQALLARHEPTKGSRGARRILQRHLIDVIHRAMTTDQASWKHHITRYEHTA

SEQ ID NO: 11087 - protein, 309 aa, unidentified
  source 1..309: note = protein_b89d8b9
  REGION 8..81: note = RuvC_domain
  SITE 20: note = RuvC_P3
  SITE 22: note = RuvC_P4
  SITE 25: note = RuvC_P5
  REGION 185..272: note = Tnp_domain
  SITE 193: note = Tnp_P1
  SITE 223: note = Tnp_P2
  SITE 231: note = Tnp_P3
  SITE 232: note = Tnp_P4
  SITE 245: note = Tnp_P5
MSHQPTSDFIYAKNNIRKTKTDKVDTFVIAKTLMMHDHRFLTVEDIDLMHLKNLGRFRQKLVKNRTRLKIQLTSYMDQVFPELQYFFKSGLHQKACYQLLKEAPTPDAIASMHMTHLSALLLKASHGHFKKEHAKALRVLARESVGSSDRSLSIQITHAIEQIELLDSQLKTVESEMQSIMLSLDSLIMTIPGIGFVNGGMILGEIGNIKRFSNASKVLAYAGLDPSVYQSGNFVAKRTRMSKRGSKTLRYALINAANNVVRNNDTFKAYYDTKRAEGRNHYNTLGHCAGKLVRVIYKMLTDEVEFNLD

SEQ ID NO: 11088 - protein, 407 aa, unidentified
  source 1..407: note = protein_ff18819
  REGION 4..163: note = RuvC_domain
  SITE 7: note = RuvC_P1
  SITE 60: note = RuvC_P2
  SITE 100: note = RuvC_P3
  SITE 102: note = RuvC_P4
  SITE 105: note = RuvC_P5
  REGION 270..356: note = Tnp_domain
  SITE 278: note = Tnp_P1
  SITE 309: note = Tnp_P2
  SITE 317: note = Tnp_P3
  SITE 318: note = Tnp_P4
MLLVGDDWAEDHHDVELQNEAGRRLARARLPEGVAGVARLHELIGEHLAADADPGQVAVGIETDRGGWVQALIAAGYTVYAINPRQVARYRERHGTSGAKSDAGDAHTLADMVRTDRHQLRAVAGDSAQAQAVKVVARAHQTLIWERHRHMLRLRTALREFFPAALEAFADLTAPDALELLARAPDPVSAARLSRPQISAALKRARRQAEDKAAAIQGALRTVHLAQPPAVAAAYAATVRSLVSMITAFNAQIAAMEEQVTACFGQARDAEIYLSQPGLGQVLAARALGEFGDDPYRYATARNRKNYAATSPITRASGKKKTVLARFIHNDRLVDALHQQAFCALTASPGARAYYDQLRRRGQGHHAALRQLSNRLAGILHGCLKTGTLYHEHTAWAHHRQDQQTAA

SEQ ID NO: 11089 - protein, 339 aa, unidentified
  source 1..339: note = protein_f9c7e40
  REGION 7..149: note = RuvC_domain
  SITE 10: note = RuvC_P1
  SITE 53: note = RuvC_P2
  SITE 88: note = RuvC_P3
  SITE 90: note = RuvC_P4
  SITE 93: note = RuvC_P5
  REGION 207..292: note = Tnp_domain
  SITE 215: note = Tnp_P1
  SITE 245: note = Tnp_P2
  SITE 253: note = Tnp_P3
  SITE 254: note = Tnp_P4
  SITE 266: note = Tnp_P5
MDQPTTIGLDLAKSVFQVHGADTEGAVVCRRQLRRSQVLVFFARLGPCLVGIEACAGAHHWARELAGLGHEVRLMPPAYVKPYVKRGKTDAVDAEAICEAVTRPTMRFVPVKSADRQAALLDHKARDFLVRQRTQIVNAIRAQLCEFGIVVAKGIHNVDRLVDAARDVPDPARPALDMLAHQLCDTQARIEEVTARISEMQAEDALARRLATVPGVGTISSSAFAATTPDVAPFRSARDYAAWLGLTPQAHSSGGKERLGRISKAGNRHLRRLLYLGAMAQIGVRRGRREVASGQAPDWLDRMLARKPVKVVAIALANRMARTVWALIRRGDSYRTTAA

SEQ ID NO: 11090 - protein, 396 aa, unidentified
  source 1..396: note = protein_f716172
  REGION 15..160: note = RuvC_domain
  SITE 57: note = RuvC_P2
  SITE 97: note = RuvC_P3
  SITE 99: note = RuvC_P4
  SITE 102: note = RuvC_P5
  REGION 267..351: note = Tnp_domain
  SITE 275: note = Tnp_P1
  SITE 304: note = Tnp_P2
  SITE 312: note = Tnp_P3
  SITE 313: note = Tnp_P4
  SITE 325: note = Tnp_P5
MSRCSSASTSERLLTTPVAIDRAGKKLLDKPLPQDEAKLRALIQKVSGHGQILVIVDQPATIGALPLAVARDMGVMVGYLPGLAMRRIADLHPGEAKTDARDAAIIAEAARTMPRTLRSIVLADEQAAELTMLCGFDDDLVKQITATSNRIRGLLTQIHPALERVIGPRLEHPAMPALLKRYPSPTTIRKAGKSRVETLLRKHAPRKGEAWVEAIFEALGEQTVTVAGTDAAAIVLRQLATQLAQLRTARGEIFEQVEALVEAHPLCDLLTSMPAVGVRTAARIITEVIGKHFETAGHLASYAGLTPVTWRSGTSIRGDHPSRKGNKNLKRALFLSAFAALKVPISRAYYDRKIAQHKKHNQALIALARRRCNVLFAMLRDGTFYSAPTPELTTAA

SEQ ID NO: 11091 - protein, 343 aa, unidentified
  source 1..343: note = protein_29a982c
  REGION 5..152: note = RuvC_domain
  SITE 8: note = RuvC_P1
  SITE 55: note = RuvC_P2
  SITE 92: note = RuvC_P3
  SITE 94: note = RuvC_P4
  SITE 97: note = RuvC_P5
  REGION 212..300: note = Tnp_domain
  SITE 220: note = Tnp_P1
  SITE 250: note = Tnp_P2
  SITE 258: note = Tnp_P3
  SITE 259: note = Tnp_P4
  SITE 271: note = Tnp_P5
MDHFAGLDVSVKETSVCIVDGTGKIVREVKVASEPDALLAVLINPSYRFKRIGLEAGPLAQWLYSALAEAGLPVICVETRHMRAVLKAQINKTDRNDARGIAQMMRAGLYRPVHVKTLRSQKLRMLLTHRKLLQSKAIAIENDLRGTLRNFGLKVGMVGMARFETRIKELVENLPDLAVLVESLLVVRRVLREQLAILHRRLLAIVREDDVCRRLMTIPGVGPVVTLTYRVTVDVPARFRNSKAVGAVFGLTCSKYQSGEINRTGAISKCGDEMMRMMLYEAAQVMLTRTNKWSWLKAWAMKIARHRGMKKAIVALARRLAVIMHRIWVDGTEFQWTREVAAA

SEQ ID NO: 11092 - protein, 315 aa, unidentified
  source 1..315: note = protein_b27decf
  REGION 9..154: note = RuvC_domain
  SITE 12: note = RuvC_P1
  SITE 56: note = RuvC_P2
  SITE 96: note = RuvC_P3
  SITE 98: note = RuvC_P4
  SITE 101: note = RuvC_P5
  REGION 192..276: note = Tnp_domain
  SITE 200: note = Tnp_P1
  SITE 229: note = Tnp_P2
  SITE 237: note = Tnp_P3
  SITE 238: note = Tnp_P4
  SITE 249: note = Tnp_P5
MDEALAVFVGIDVSKDRLDVHLRPSGEAFFVSRDGRGLDELTARLAACPVALVVIEATGGFETTVTAALAGAGLPLCVVNPRQIRDFARAMGRLAKTDALDAEVIALFAERIRPQARAVPAPEATRLAELVARRRQIIEMIGMEANRARRMPDKRLAKGLARHIAFLEKELSEIDRTIGDGIKNSPAWRETETLLKSVPGIGDVTARTLIAEVPELGSIDRQKLAALVGVAPMNRDSGMMRGHRTIVGGRTCVRNTLYMAALAAIRHNGVFKTFYDRLTTRGRPKKVAIVAVIRKLLTTLNAIVRDNTPWRTQNP

SEQ ID NO: 11093 - protein, 334 aa, unidentified
  source 1..334: note = protein_9efe97b
  REGION 6..147: note = RuvC_domain
  SITE 9: note = RuvC_P1
  SITE 51: note = RuvC_P2
  SITE 86: note = RuvC_P3
  SITE 88: note = RuvC_P4
  SITE 91: note = RuvC_P5
  REGION 208..300: note = Tnp_domain
  SITE 216: note = Tnp_P1
  SITE 246: note = Tnp_P2
  SITE 254: note = Tnp_P3
  SITE 255: note = Tnp_P4
  SITE 267: note = Tnp_P5
MTFELLAIDLGKSSFHLHSIASDGAILSRKVSRSKLAETVNALAPKTIAMEACASAHHWGRQFKDNGREVLLINPRFVKPFVRGSKNDAVDAAAIYEAATRPTMRFVPVKSITQQDVQSLHRVRERMIIQRTSLINHARGLLAEYGIVLPQGAWRFVSQAPAAVESADLSDLGRELFLELLDQLTDVNDRIAKIDRKISEICRDREDCRRLSELPGVGPIIATALVASVEDGRHFKSGRELAAWIGLVPRQYSTGGKPRLGGIGRRANHYLRRQMIHGARAVISRLASHDDRRSQWLKELVSRRGYNKAIVALANKTARIAWALLTRQERNAAQ

SEQ ID NO: 11094 - protein, 402 aa, unidentified
  source 1..402: note = protein_98ea1b6
  REGION 7..162: note = RuvC_domain
  SITE 10: note = RuvC_P1
  SITE 59: note = RuvC_P2
  SITE 99: note = RuvC_P3
  SITE 101: note = RuvC_P4
  SITE 104: note = RuvC_P5
  REGION 270..356: note = Tnp_domain
  SITE 278: note = Tnp_P1
  SITE 308: note = Tnp_P2
  SITE 316: note = Tnp_P3
  SITE 317: note = Tnp_P4
  SITE 329: note = Tnp_P5
MAYDCVIGMDVGKYFHHACVLDPQDRQVLSKRINQHEGSLRKLFGTYLADNASVLVVVDQPNNIGRLTVAVAQAMGADVRYLPGLAMRQLSRIHVGNSKTDVRDAYVIAHADLNLPDALRSVDRVEEVFLQLKVLNGIDEDLARAYTRLINQMRSALVGTYPAFEHVLHGQMIHRKWILHLLAKYGGPTKIRRIGKARLAAFARGHRARNPEPVIDAMLAAIHSQTVSIAGAEYAELGVAMSAKDALAKLEHRKEIEAQVLELIQDIPQTEILLSMPGIGPRSAAQILMTVGDMSDFPDAAHLASYAGLSPRTNQSGTSIMSNSPNRAGNKKLKNALWQSSCASIRFHERSRQFYERKRKEGKRHNAAVVALARRRLNVLFAMMRSGELYRDISTVQEAAAA

SEQ ID NO: 11095 - protein, 312 aa, unidentified
  source 1..312: note = protein_4f24618
  REGION 6..153: note = RuvC_domain
  SITE 9: note = RuvC_P1
  SITE 53: note = RuvC_P2
  SITE 92: note = RuvC_P3
  SITE 94: note = RuvC_P4
  SITE 97: note = RuvC_P5
  REGION 188..272: note = Tnp_domain
  SITE 196: note = Tnp_P1
  SITE 225: note = Tnp_P2
  SITE 233: note = Tnp_P3
  SITE 234: note = Tnp_P4
  SITE 245: note = Tnp_P5
MTDDTIGIDISKATLDAYRLGDGALAQFNNNRAGFTSLQRWLKNQNIARLVYEPTGPYHRAFEVAMAERFPLVKVNPLQARRFAQAQGVRAKTDKVDARMLAVMGQTFSLKPQIATPDIQRDLKELHMARQALIKDRTRALNRQKTLTLPILKRQAKARITQLNTQLSQVSDTINQMLQSTQKTARALDIICSIPGLSKVSAAALLIEMPELGTLKEKQVASLAGLAPMTRQSGRWSGKAFIQGGRKHLRDALYMPAVVAARHNPDMKRFYDRLINAGKPSKVAFTAIMRKLILLANTLIKQDRMWAKSTLD

SEQ ID NO: 11096 - protein, 351 aa, unidentified
  source 1..351: note = protein_d397af1
  REGION 13..153: note = RuvC_domain
  SITE 16: note = RuvC_P1
  SITE 59: note = RuvC_P2
  SITE 94: note = RuvC_P3
  SITE 96: note = RuvC_P4
  SITE 99: note = RuvC_P5
  REGION 218..305: note = Tnp_domain
  SITE 226: note = Tnp_P1
  SITE 256: note = Tnp_P2
  SITE 264: note = Tnp_P3
  SITE 265: note = Tnp_P4
  SITE 277: note = Tnp_P5
MSRQPTATIVATIGIDIGKNTFHLVGFDQRGNVVLQLKTSRQQLERRLANVPRCLIGMEACSGAHHIGRQLEALGHDVRLIPAQYVKPFLKGHKNDYRDAEAIAEAVQRPTMRFVTIKTPEQMDLLALHRVRARLVRLRTGGINQIRGLLIERGITVRQGPAPLRKALSDILSCNSGRLSPRMVRLIVDLTEDWRRLDDRIATVSADIEALAEQDGPCQRLMTVPGIGPIISSAVVAAIGNGTGFRQGRDFGAWLGLVPKQESTGDRTILGKISKRGNKYLRTLFVQAAHVILARRPSAAMRGLWPWIEQASKRLHRNMLAIALANKLARIAWAVLAHGREYQPRIMPHAA

SEQ ID NO: 11097 - protein, 334 aa, unidentified
  source 1..334: note = protein_9fa9afb
  REGION 7..149: note = RuvC_domain
  SITE 10: note = RuvC_P1
  SITE 53: note = RuvC_P2
  SITE 88: note = RuvC_P3
  SITE 90: note = RuvC_P4
  SITE 93: note = RuvC_P5
  REGION 209..299: note = Tnp_domain
  SITE 217: note = Tnp_P1
  SITE 247: note = Tnp_P2
  SITE 255: note = Tnp_P3
  SITE 256: note = Tnp_P4
  SITE 268: note = Tnp_P5
MENIALIGIDLGKNSFHIHCQDRRGKAVYRKKFTRPKLIEFLATCPATTIAMEACGGSHFMARKLEGLGHSPKLISPQFVRPFVKSNKNDFVDAEAICEAASRPSMRFVQPRTESQQAMRALHRVRESLVQDKVKTTNQMHAFLLEFGISVPRGAAVISRLSTLLEDSSLPLYLSQLLLKLQQHYHYLVEQIKDLESQLKRKLDEDEVGQRLLSIPCVGTLTASTISTEIGDGKQYASSRDFAAATGLVPRQYSTGGRTTLLGISKRGNKKIRTLLVQCARVFIQKLEHQSGKLADWVRELLCRKSNFVVTCALANKLARIAWALTARQQTYEA

SEQ ID NO: 11098 - protein, 323 aa, unidentified
  source 1..323: note = protein_1cbf0c4
  REGION 8..150: note = RuvC_domain
  SITE 11: note = RuvC_P1
  SITE 52: note = RuvC_P2
  SITE 92: note = RuvC_P3
  SITE 94: note = RuvC_P4
  SITE 97: note = RuvC_P5
  REGION 191..278: note = Tnp_domain
  SITE 199: note = Tnp_P1
  SITE 229: note = Tnp_P2
  SITE 237: note = Tnp_P3
  SITE 238: note = Tnp_P4
  SITE 251: note = Tnp_P5
MNKGIKYFGLDISHLVFDVTDSDGNYYQFKNNEFDFKKFTKLLNTESHCVMEATGYYHYQLAYHLLESGIKVSVENPLAVKRFIQMKLSKIKTDKSDSKLICEYAGQVELKLWQGNSKTEIECLQIVRALSVYTKQSTMLKNKLHGEAVLGNPSKAVVSSLNRSLKQVKKELETLEAKLLILVKQVHQDVLTRLKTIPGIGNKTAVMLVVLTDGFDRFTSGSELCNYAGLTPIVRQSGSSVSGRPRISKIGNQKLRNLLFMCSFNACKYNKACRDLYERLVAKGKSKKLALIAVCNKLLKQAFAIAKSGLIYDDTYRSVLVKN

SEQ ID NO: 11099 - protein, 414 aa, unidentified
  source 1..414: note = protein_98a5194
  REGION 4..161: note = RuvC_domain
  SITE 7: note = RuvC_P1
  SITE 57: note = RuvC_P2
  SITE 98: note = RuvC_P3
  SITE 100: note = RuvC_P4
  SITE 103: note = RuvC_P5
  REGION 275..362: note = Tnp_domain
  SITE 283: note = Tnp_P1
  SITE 313: note = Tnp_P2
  SITE 321: note = Tnp_P3
  SITE 322: note = Tnp_P4
  SITE 335: note = Tnp_P5
MFAVGVDVSHGRSTVAVLGAKRKVVMKPFEVPHTVDGFASLAEKLNGLDGEVRIVMEHTGRYYESFAMSMYRAGFFVSAVNPLAIRDYQEGISVRKVKTDKADALKIAQFAIDKWEILPQYTPMDTIRYNLKTLHRQFQLSSKTRTALNNNLIALLEQSYPGANRYFDSPVRPDGTQKWVDFVDTFWHVDCVAGVSQNAFVERYRKWCKRHGYHFSEQKAIEIHTDARRKFPLVPKTDTCKLLVKEAVAQLNAISRTVETYRTEMNRLAAQLPEYDTVMAMTGVGKSMGPQLMAEIGDLRCFAHSKSLVGFAGTDPIKDDSGDKISGSNRSSKRGSPYLRKTLFVIMTILLQLQPQDDPVYQFLDKKRSEGKKYYVYMTAGMTKFLRIYYGRVRDCLREKGLWDNPASQEVNPG

SEQ ID NO: 11100 - protein, 279 aa, unidentified
  source 1..279: note = protein_6fad233
  REGION 3..84: note = RuvC_domain
  SITE 23: note = RuvC_P3
  SITE 25: note = RuvC_P4
  SITE 28: note = RuvC_P5
  REGION 147..236: note = Tnp_domain
  SITE 155: note = Tnp_P1
  SITE 185: note = Tnp_P2
  SITE 193: note = Tnp_P3
  SITE 194: note = Tnp_P4
  SITE 207: note = Tnp_P5
MLFGHEVKVISARTVKPFQTKQKTDRNDALAIAIAASQEHIHGARVQSAEEQALQSLERARHLAKTHQIAQSNQIRGLLGEFGIIVPPSLSQLRKHIPFILEDAENSLPQSFRETLNYLWQHLLQQIEHVAILERQLEGAVKYDTTCQKLMKLEGVGPIGALGLAVRLGQGENFTNGREASANIGLTPKQHSSGGKERIGHISKRHADKRLRSTLFQGALSVITQVSKRPARTSKERWLQALVERRGKKIAAVAFANKTVRTAYAILKNDTEYQPISLA

SEQ ID NO: 11101 - protein, 275 aa, unidentified
  source 1..275: note = protein_2c973c6
  REGION 1..107: note = RuvC_domain
  SITE 4: note = RuvC_P2
  SITE 44: note = RuvC_P3
  SITE 46: note = RuvC_P4
  SITE 49: note = RuvC_P5
  REGION 214..274: note = Tnp_domain
  SITE 222: note = Tnp_P1
  SITE 251: note = Tnp_P2
  SITE 259: note = Tnp_P3
  SITE 260: note = Tnp_P4
MVVDQPKTIGALVIAVAQDLGIDVAYLPGLTMRRVADLHPGQAKTDARDAFIIAETARTMAHTLRGITVTEENIAELSMLCGFDDDLAAQITQARNRLRGFLTQIHPALERVLGPRLGHPAVVALLTRYSSPARLRTAGRAHVRVLLKKHAPRLAEKLTEEIFTALSEQTVTVAGTSAAEKIIGRLADQLSQLATQRAEIEAEILTVVDAHPLTQVLTSMPGVGVRTAARILTEVVGKDFATAGHLASYAGIAPVTRRSGTSIRGESPSGGATRS

SEQ ID NO: 11102 - protein, 423 aa, unidentified
  source 1..423: note = protein_331332c
  REGION 6..168: note = RuvC_domain
  SITE 9: note = RuvC_P1
  SITE 63: note = RuvC_P2
  SITE 109: note = RuvC_P3
  SITE 111: note = RuvC_P4
  SITE 114: note = RuvC_P5
  REGION 289..378: note = Tnp_domain
  SITE 297: note = Tnp_P1
  SITE 327: note = Tnp_P2
  SITE 335: note = Tnp_P3
  SITE 336: note = Tnp_P4
  SITE 349: note = Tnp_P5
MNTLFVGIDVSTKNNQVCAVNLNQDVFFNLSFPNNPDGCDLLITTVLAFVDKEKFDSIIIVTESTSIYDYHVCAYLSSQLSIVGTSIIIYSVNAKSIANYKKSYIEMEKTDPRDAFLIADFARVDRCKNLRPFKAAQHIALKRLTRERYHLAEQLTREKNYILNNIYLKVSGLMTLPHKDLPFSDNFSASNTKFLTDYTSPFDLAERPLDEIIEYFKSTSQNRCDDYGKIASLFDKAIRSSYRLDKTAYDPITISITASINLIQCIESQIKMVDKAIEKEMKGLYPNGYQSLMSITGIGPVFAAGILSEIGDISYFKSDASLAKYAGFHWKKNDSGNFTADEKHSANSCNKYLKYYITQATQMSVMLGFDYTTSFYHKKYNEASTHKHRRALVLTSRKLVRLIYVLLRDSKLYVSVSHDTVIE

SEQ ID NO: 11103 - protein, 330 aa, unidentified
  source 1..330: note = protein_7a932f7
  REGION 7..155: note = RuvC_domain
  SITE 10: note = RuvC_P1
  SITE 58: note = RuvC_P2
  SITE 99: note = RuvC_P3
  SITE 101: note = RuvC_P4
  SITE 104: note = RuvC_P5
  REGION 204..291: note = Tnp_domain
  SITE 212: note = Tnp_P1
  SITE 242: note = Tnp_P2
  SITE 250: note = Tnp_P3
  SITE 251: note = Tnp_P4
  SITE 264: note = Tnp_P5
MNYSHFVGLDVGKKSFDACLVSLDKELSHHTFPNTPGGIEELLHRVKQHGVEVETALFCAENMGSHVIDLCLSSYQFHFPLALECPLTIKRSIGLQRGKNDRIDARRIVRYACLHYRKLRLYQLPDKDLVRLRNWMVIRDNLVKQKVSSRKLLELPRETSGLADLVTAMTFLEKQLSLVKEKISYVEQEMEKIISSNIALLTNYQLLTSIKGIGPINAIVLLCVTGNFHRFSDPRKFACYCGVAPFEHSSGTSIRGKTKTSNLANREVKVYLTRAAITAISWDPQIKAYYKRKTGEGKHKASVINAVRAKIIARCFAVIKRKTPFVTLRA

SEQ ID NO: 11104 - protein, 339 aa, unidentified
  source 1..339: note = protein_54c73b0
  REGION 6..147: note = RuvC_domain
  SITE 9: note = RuvC_P1
  SITE 52: note = RuvC_P2
  SITE 87: note = RuvC_P3
  SITE 89: note = RuvC_P4
  SITE 92: note = RuvC_P5
  REGION 210..298: note = Tnp_domain
  SITE 218: note = Tnp_P1
  SITE 248: note = Tnp_P2
  SITE 256: note = Tnp_P3
  SITE 257: note = Tnp_P4
  SITE 269: note = Tnp_P5
MKYTPVGVDIAKHLIQVHFINEHTGEVVDKQLRSKDFLTFFSNREPCLIGMEACGGSLHWARELKKLGHEVRLLQARFVKAFVMGNKNDVMDARAIWMAVQQLSKEIAVKTEEQQSVLALHRSRRQLVKFRTAQINALHGTLLEFGETLHKGRAAMDRELPAALERMKTKLPPYLITVLEDQYTRLSELDMLIDDLEKQLNSVARQSETCKRLMEIPGVGPLIATAAVATMGKASAFKSGREFAACVGLVPKQTGSGGKVRMLGISKRGDTYLRTLFIHGARSAALLTKEPDPWITELKKRRPTGVAIVAMANKLARTVWAIVAHDRKYDKNHVSIRPY

SEQ ID NO: 11105 - protein, 340 aa, unidentified
  source 1..340: note = protein_329a7cb
  REGION 7..149: note = RuvC_domain
  SITE 10: note = RuvC_P1
  SITE 53: note = RuvC_P2
  SITE 88: note = RuvC_P3
  SITE 90: note = RuvC_P4
  SITE 93: note = RuvC_P5
  REGION 211..299: note = Tnp_domain
  SITE 219: note = Tnp_P1
  SITE 249: note = Tnp_P2
  SITE 257: note = Tnp_P3
  SITE 258: note = Tnp_P4
  SITE 270: note = Tnp_P5
MNTMTLLGIDIGKHSFHLHGQDTQGHQVLRKKMTRGQLLRSLGQLPTCTVVMESCGGAHWLAREIGALGHEVKLIAPQYVKPFVKGNKNDFIDAEAICEAASRPTMRFCPIKTAEQQTLSALHRVRGSLIEHRTAATNQIHGFLLEFGISLPIGVTALHRMPALLDDPQHPVPLRLKGLVMRLYYQIQQLTDEIKDIESDLKQQLKEDDAGQRLQSIPGIGPITASAVLADVGDVSRYRSGRDFAASLGLVPGQYSTGGKTVLLGISKRGDKHIRQLLVQGARAIMQHIDKREDALGPWVQDLLRRRHSNIVACALANKLARIVWAVLAKGGQYDPHPNA

SEQ ID NO: 11106 - protein, 342 aa, unidentified
  source 1..342: note = protein_227ec4d
  REGION 7..148: note = RuvC_domain
  SITE 10: note = RuvC_P1
  SITE 53: note = RuvC_P2
  SITE 88: note = RuvC_P3
  SITE 90: note = RuvC_P4
  SITE 93: note = RuvC_P5
  REGION 211..295: note = Tnp_domain
  SITE 219: note = Tnp_P1
  SITE 249: note = Tnp_P2
  SITE 257: note = Tnp_P3
  SITE 258: note = Tnp_P4
  SITE 270: note = Tnp_P5
MDGVSIVGLDLAKRVFQAHGACSNGHVIFRKKLSRSQLVAFLARQPRCIVAMEACASAHFWGRAIRDLGHEVRLIPPIYVKPFVKRQKNDAADAEAIAEAAVRPNMRFVEVKSQRQQAGAIVFRTRDLLVRQRTQLINALRGHLAEHGVVAPQGVTNVRILEAAIEEAETSLDLLIIETARLYLTQIASLSEQIVTLEKVLQQEAGKAATTARLLTVPGIGHVTAMAIEAFAPPMETFRRGRDFAAWLGLVPIQRSTGGKQVLGRTSKMGQRDIRRLLITGAMTIVRWASRKAPPEGSWLSRMLERKPRMLVAIALANKMARSVWAMLTKDEDYRNPVAVAA

SEQ ID NO: 11107 - protein, 406 aa, unidentified
  source 1..406: note = protein_cb458f6
  REGION 4..162: note = RuvC_domain
  SITE 7: note = RuvC_P1
  SITE 60: note = RuvC_P2
  SITE 101: note = RuvC_P3
  SITE 103: note = RuvC_P4
  SITE 106: note = RuvC_P5
  REGION 275..361: note = Tnp_domain
  SITE 283: note = Tnp_P1
  SITE 313: note = Tnp_P2
  SITE 321: note = Tnp_P3
  SITE 322: note = Tnp_P4
  SITE 334: note = Tnp_P5
MYYVGIDVAKEKHYVCILDEDTQIVSKPFWIYSDVLGLKELIKRLSDLSLNCDDFIIGVESTGAFSENIYEFLSDLDFKVILLNSYQTSKYRDFSTMKKVKNDSIDAYIIAELLSSGKYKQSHISSDDYHTLKVLGRLKKSLDDKIKTIKREISTVIATVNPEITHVFKNIFTKTALVIIKEYPTSVDLKKTTLKRLLKLFRGIKGNNFSEVKAMQLIDLANSSIYNGRAQDARSLMIKTNIKILELLCQEKENIENQINTLIEENQDDDFSSSIKNLKTIPGVADKTISAILGECGDLKRFDSVKSFIGYLGLYPTQYQSGNSLSVGRLAQRGIPIAKHALYMSAVSSVLHNDELRKIFRDKVSAGKSKKEALIIIAKKIAAIIYSIFKYNQPYNPNRVLVPYRK

SEQ ID NO: 11108 - protein, 415 aa, unidentified
  source 1..415: note = protein_1ef014a
  REGION 19..176: note = RuvC_domain
  SITE 22: note = RuvC_P1
  SITE 75: note = RuvC_P2
  SITE 115: note = RuvC_P3
  SITE 117: note = RuvC_P4
  SITE 120: note = RuvC_P5
  REGION 283..370: note = Tnp_domain
  SITE 291: note = Tnp_P1
  SITE 321: note = Tnp_P2
  SITE 329: note = Tnp_P3
  SITE 330: note = Tnp_P4
  SITE 342: note = Tnp_P5
MAEASTTEVLDPSAFTYVVGIDIGSETCCFTVLTPQKQVVVKPTDLANAASGFAYLQERIARLGVAPEQVVVGLEATSRYGENLFQFLQRQGYHLCLLHPRQTHEFAKQRGLRAKTDRLDASTIARVLLSGEARVGYVPDEQIASYRELVRLHTQLSDELARDKNEIQGLLVVLFPEFTQVFADPCRLTATAVLQAYPSAKAIRSAGVDAIAAILRATAPRNYGRDTAQRLVDLAERSISSDLAVEARSLSLQIWCDQLHHTAAHLAQIEEQIAQLLSHDRSAKGLQGVPEFGSKTVAVLRAELGEVVRFHRLDQVVAYVGMDIEIKQSGKWQGKAKLSKRGSGLVRRMLYMAAMRCIWLPGSAFGIYYHRLLARGVEKMTALMAVMRKMLVIAAYLLRTGEDYDPTRVATGPAG

SEQ ID NO: 11109 - protein, 392 aa, unidentified
  source 1..392: note = protein_1c83ea4
  REGION 4..163: note = RuvC_domain
  SITE 7: note = RuvC_P1
  SITE 60: note = RuvC_P2
  SITE 101: note = RuvC_P3
  SITE 103: note = RuvC_P4
  SITE 106: note = RuvC_P5
  REGION 267..354: note = Tnp_domain
  SITE 275: note = Tnp_P1
  SITE 305: note = Tnp_P2
  SITE 313: note = Tnp_P3
  SITE 314: note = Tnp_P4
  SITE 327: note = Tnp_P5
MIFVGIDVAKDKHDCFITNSDGEVLFHSFSITNNLSGFTELYQNILSVMNDVDKVKVGLEATGHYSYNLLGYLLDKGFPTYIINPLHTNLYRKSLSLRQTKTDKVDARTIASMLMSDVNLKSYSDTSYHNEELKSLTRYRFDKVKERSALKVSISRLVCILFPELEELVPTLHMASVYTLLSEFPGASYVASAHLTKLTNLLSKASKGHYGKDTAVLFRETARSSIGSVMPAKSLELKHTIKLIQELTSEIDEIETAIKQIMDEEIQSPILTIPGISYRMGAMIIAEIGDFNRFDSADKILAYAGMSPSTYQSGQLDNCHSHMEKRGSRYLRYALYNATKYVCHWDKTFGAYLEKKCSEGKHYNVALSHAAKKLVRTIFALERSGQPYKASV

SEQ ID NO: 11110 - protein, 386 aa, unidentified
  source 1..386: note = protein_c3dc0ad
  REGION 11..165: note = RuvC_domain
  SITE 14: note = RuvC_P1
  SITE 62: note = RuvC_P2
  SITE 102: note = RuvC_P3
  SITE 104: note = RuvC_P4
  SITE 107: note = RuvC_P5
  REGION 273..352: note = Tnp_domain
  SITE 281: note = Tnp_P1
  SITE 311: note = Tnp_P2
  SITE 319: note = Tnp_P3
  SITE 320: note = Tnp_P4
  SITE 332: note = Tnp_P5
MSQELSIDIFLGLDVGKSEHHACALDRDGNKVFDKPLPQLESELASVFHQLQEHGTVLVVVDQPNTIGALPIAVARACGCEVGYLPGLAMRKAADLYPGRAKTDKRDAFIIADTARTMPHTLRAVDRSNEVLSALKMLSGFDDNIARDCTRTVNRLRSILTQIYPSLERVFAGSTLTRTPVLDLLIHYKGPQGLKRAGYHRVLNWMIKHTRKDPTPLVDEIFAALKAQTVTVPGSDAAELVIPQLAANIKALKEQRNTIAEQVEGMLDDFPLCEVLMSIPGVGIKTAAQILLAIGDGSDFDSAGHLAAYAGIAPVTRRSGSSIRGEFPARSGNKRLKTLCSIPHSRLFAATNHHASTTNVNEPKANATTQQLSAWHDADATSSTRY

SEQ ID NO: 11111 - protein, 374 aa, unidentified
  source 1..374: note = protein_30f233b
  REGION 34..176: note = RuvC_domain
  SITE 79: note = RuvC_P2
  SITE 116: note = RuvC_P3
  SITE 118: note = RuvC_P4
  SITE 121: note = RuvC_P5
  REGION 236..324: note = Tnp_domain
  SITE 244: note = Tnp_P1
  SITE 274: note = Tnp_P2
  SITE 282: note = Tnp_P3
  SITE 283: note = Tnp_P4
  SITE 295: note = Tnp_P5
MLRFELMIKRGLREQPQASGKEAQHETLRWIGRVGKETSICIVDETGKICRELKVTSHPEDLAQALIDPAWQLARVGLEAGPLSQWLFDGLWRAGLPAICIETRHAKAFLRAQVNKSDRNDARGIAQMVRVGLYRPVHVKTIESQNRRALLSARKLLQAKAIAIENDIRGLLRNFGLKVGAVGAIKFEDRIRELAERMPELGEIVACLLAARRKLRQEFTRLSGKLLSIVRDDAVCRRLMTIPGVGAVTALAFKSTIDIPARFKNSKAVGPALGLTPVLNQSGESCRVGHISLAGDAMLRTLLYEAAQVLLTRVKKWSWLKAWAMNVARRRGLKRAVVALGRRLAVIMHRMWSDETEFCWSRQDGLGPAQRCAI

SEQ ID NO: 11112 - protein, 389 aa, unidentified
  source 1..389: note = protein_1813a6e
  REGION 7..160: note = RuvC_domain
  SITE 10: note = RuvC_P1
  SITE 58: note = RuvC_P2
  SITE 99: note = RuvC_P3
  SITE 101: note = RuvC_P4
  SITE 104: note = RuvC_P5
  REGION 222..307: note = Tnp_domain
  SITE 230: note = Tnp_P1
  SITE 260: note = Tnp_P2
  SITE 268: note = Tnp_P3
  SITE 269: note = Tnp_P4
  SITE 280: note = Tnp_P5
MLVTVIIGMDPHKRSATIEIINHTGKVLSKGQYGTDNAGYTAMMATATQFRDRVWAIEGCNGVGRHLAHRLVHDDEIVVDVPAKLSAQVRVFATGNGRKTDPVDAHAVALAALRSPNLRRVQVDSDLVALGMLADRRDELGRARTDTVNRLHRLLLELLPGGAKKFLSAMQARKLVATVKPRDPAGKVCRRLAVEVIEDLERIDRKIKAADRELRELVGERSPILLELNGIGPSGAARLLADVGDIHRFSDRGRFASWNGTAPLDASSGEQKRHRLSRAGNRRINRVLHTMAIVQLRNPSSGRTYYDGKKAAGKTSMEAMRALKRRLSNVVYTAMLADQRHRETASPGGQSGATADSSATGATPKPVLRTSHSPDLPKPSLTPDPPSTP

SEQ ID NO: 11113 - protein, 401 aa, unidentified
  source 1..401: note = protein_3f79023
  REGION 8..164: note = RuvC_domain
  SITE 11: note = RuvC_P1
  SITE 60: note = RuvC_P2
  SITE 101: note = RuvC_P3
  SITE 103: note = RuvC_P4
  SITE 106: note = RuvC_P5
  REGION 270..356: note = Tnp_domain
  SITE 278: note = Tnp_P1
  SITE 308: note = Tnp_P2
  SITE 316: note = Tnp_P3
  SITE 317: note = Tnp_P4
  SITE 329: note = Tnp_P5
MATGQLWAGVDVGKEHHWVCVVDDAGVVVVSRKLANDEGQIRALVTEVDGLSDQVPWTVDLTTVYAALLLAVLAEAGKSVRYLTGRAVWQASTVYRGGEAKTDAKDARVIADQSRMRGDDLPVLHPDDDLVTELRMLTAHRADLVADRTRTINRLRQQLIAVCPALERAAQLSADRGWVVLLSRYQRPKAIRQSGVSRLTKTLTDAGVRNAAAIAAAAVTAAKTQTVRLPGEEVAAQLVADLAREVIALDDRIKTTDADIEDRFRRHPLAEVITSMPGMGFRLGAEFLAAVGDPTLIASADHLAAWAGLAPVPKDSGKRTGRLHTPQRYSRRLRRVMYMSALTAIRCDPTSRTYYQRKRDEGKRPIPATICLARRRTNVLYALIRDNRTWQPDSPPIKIAA

SEQ ID NO: 11114 - protein, 334 aa, unidentified
  source 1..334: note = protein_174074f
  REGION 9..146: note = RuvC_domain
  SITE 51: note = RuvC_P2
  SITE 86: note = RuvC_P3
  SITE 88: note = RuvC_P4
  SITE 91: note = RuvC_P5
  REGION 210..284: note = Tnp_domain
  SITE 218: note = Tnp_P1
  SITE 248: note = Tnp_P2
  SITE 256: note = Tnp_P3
  SITE 257: note = Tnp_P4
  SITE 268: note = Tnp_P5
MLRFSTLPSGKNSFHLMGLDTRGAIVLRQKLSRGQVEQRLANMPTCLIGMEACVGANHLSRQLLALGHDVKLMPAQFVKPLSKSHKNDFRDAEAIAEAVQRPTMHFVSIKTLERLDLQAPHRVRSRLVSQRTAVINQIRTFLLERGIAVRQGLRSPRQALPDILANRTDVFTPRIARLIEGLVQDWHHLDERIDAVTEEIEALVAADEACQRLMSLPGVGPIIASAMVAAIGNGTAFSRGREFGARFRLVPKQTSTGDRTILRPPVEARQQLSALLTGSGRPCAPALARQVAPAQFWELADGRLYAPASQWARGGSGQQAGADCLERAEPEPHL

SEQ ID NO: 11115 - protein, 317 aa, unidentified
  source 1..317: note = protein_bb8e313
  REGION 9..152: note = RuvC_domain
  SITE 12: note = RuvC_P1
  SITE 56: note = RuvC_P2
  SITE 96: note = RuvC_P3
  SITE 98: note = RuvC_P4
  SITE 101: note = RuvC_P5
  REGION 191..276: note = Tnp_domain
  SITE 199: note = Tnp_P1
  SITE 228: note = Tnp_P2
  SITE 236: note = Tnp_P3
  SITE 237: note = Tnp_P4
  SITE 248: note = Tnp_P5
MEKTSMIVAGIDTAKDKLDVAICGQTQRLQVANSMRGWKQLRLELTKAGVERVGIEATGGYERGVVRHLQAAGFLVLVLQPIQVRAFARMHRQRAKNDALDAALIAACATAIEPHEIGADQRLTALADGLTFVEQIEEDIARFKTRLEHIAEPRLKRMVLADIARLKVRRLAQLRLIAKQLRDHHDLAARLDLVISVPGIGERTALALIIRMPELGRINREQASALAGLAPFDDDSGKYKGQRHIAGGRGRLRRSLYAAALPAAFRWNKALINLYSRLTAAGKAHNVAMVACARKLLIYANTVVARGTPWRENVIQT

SEQ ID NO: 11116 - protein, 287 aa, unidentified
  source 1..287: note = protein_bdbdd45
  REGION 7..149: note = RuvC_domain
  SITE 10: note = RuvC_P1
  SITE 53: note = RuvC_P2
  SITE 88: note = RuvC_P3
  SITE 90: note = RuvC_P4
  SITE 93: note = RuvC_P5
  REGION 211..267: note = Tnp_domain
  SITE 218: note = Tnp_P1
  SITE 248: note = Tnp_P2
  SITE 256: note = Tnp_P3
  SITE 257: note = Tnp_P4
MEEITTIGVDIAKNVFQLHGINAEGQVVLRKALRRGQMQPFFEALSPCLIGMEACATAHHWARTLIASGHDVRLIPPNYIKPYLRRQKNDAADAAAICEAVTRPSMRFVPVKTEDQQATLMLHSARELLISQRTALINALRGHFAELGIVAPQGARNVRQLIAILEDERYSPQAVRTALAPLATVLIEIEGQITKLDKALLAAHRNNDVSIRLATVPGIGPVIATCLSASVSEPKLFEGGREFAAWLGLVPRQHSTGGKPRLVPFPKWATGTCVNSSWSGRTQPSTG

SEQ ID NO: 11117 - protein, 343 aa, unidentified
  source 1..343: note = protein_8ca6fe4
  REGION 6..148: note = RuvC_domain
  SITE 9: note = RuvC_P1
  SITE 52: note = RuvC_P2
  SITE 87: note = RuvC_P3
  SITE 89: note = RuvC_P4
  SITE 92: note = RuvC_P5
  REGION 211..297: note = Tnp_domain
  SITE 219: note = Tnp_P1
  SITE 249: note = Tnp_P2
  SITE 257: note = Tnp_P3
  SITE 258: note = Tnp_P4
  SITE 270: note = Tnp_P5
MTISVLGIDIAKNTFQLHGADSAGNSILRKRLPRNKLAAFVANLPQCQVVMESCGGANYWARVFQSSGHSVKLISPQFVKPFVKTNKNDANDAQAIVEAASRPSMHFVPIKRVEQQDIQSIHRVRNRIVKNRAALINEIRGLCSEYGIIVAPGAAKVKRSLCSIITDETNELTQSSRECMSDLYGELVENEVRLTNLNKKIRQICHQNETCRRLLKIPGVGELTATAIVAAVPNANEFKNGRHMSAWLSLVPRQSSSGDKQVLLGISKRGDRYLRTLLIHGARAALSHYKKTETGYGRWLVERKATLSFNKAAVALANKNARIIWSLLNTSEEFNSNIQMAAA

SEQ ID NO: 11118 - protein, 391 aa, unidentified
  source 1..391: note = protein_2a0a7d5
  REGION 4..163: note = RuvC_domain
  SITE 7: note = RuvC_P1
  SITE 60: note = RuvC_P2
  SITE 101: note = RuvC_P3
  SITE 103: note = RuvC_P4
  SITE 106: note = RuvC_P5
  REGION 266..353: note = Tnp_domain
  SITE 274: note = Tnp_P1
  SITE 304: note = Tnp_P2
  SITE 312: note = Tnp_P3
  SITE 313: note = Tnp_P4
  SITE 326: note = Tnp_P5
MIYAGIDVAKDKHDCFITNSDGKVLFQAFTIPNNRDGFDELYQKITAVTDDLNKVKVGLEATGHYSYNILGYLLDKGLATFVFNPLHTNLYRKSLSLRKTKTDKVDAHTIATMLMSDVNLKSYSDTSYHNEELKSLTRYRFDKVKERAKLKSSVSRLVCILFPELEKLVPTLHMASVYALLSEFPGASFVAFSHLTRLANLLSESSKGRYGKDTAIMFREAAKASIGSHMPAKSLELKHTIKLIRELDAEIEEIETEIKTIMDEINSPILTIPGISYRMGAMILAEIGDFSRFDSPDRILAYAGMSPSTYQSGQLDNCYAHMEKRGSRYLRYALYNATKYVCHWDKSFAAYLAKKRAEGKHYNVALSHASKKLVRLIFAMEKSGQAYNKAA

SEQ ID NO: 11119 - protein, 400 aa, unidentified
  source 1..400: note = protein_cc52644
  REGION 10..164: note = RuvC_domain
  SITE 13: note = RuvC_P1
  SITE 62: note = RuvC_P2
  SITE 102: note = RuvC_P3
  SITE 104: note = RuvC_P4
  SITE 107: note = RuvC_P5
  REGION 270..356: note = Tnp_domain
  SITE 278: note = Tnp_P1
  SITE 308: note = Tnp_P2
  SITE 316: note = Tnp_P3
  SITE 317: note = Tnp_P4
  SITE 329: note = Tnp_P5
MSTSHARIWVGIDAGKGHHWAVAVDTGGETLFSTKVINDEAQILALIDTAREKAGEVRWAVDISGRASALLLALLIAHGQQVVYVPGRTVNRMTGAYRGEGKTDAKDALVIADQARMRRDFTPIQTPPELVSTLQLLTAYRRDLIADRVRLINRMRDLLVGICPALERAFDYSAAKGPVIMLTEYQTPAALRRIGVKRLTTWLERRKVRSAGTVAAKAVEAAQFQMAALPGEGRAAKLVRDLAHQLLALDERIKDNDREIRETFRTDDRAGIIESLPGMGPILGAEFVAITGDLSGYRDAGRLASHAGLAPVPRDSGRRTGNYHRPQRYNRRLRWLFYMSAQTAMMRPGPSRDYYLKKRGEGLVHAQALLSLARRRVDVLWAMLRDKRLFTSAPPATQTA

SEQ ID NO: 11120 - protein, 485 aa, unidentified
  source 1..485: note = protein_63145dc
  REGION 6..171: note = RuvC_domain
  SITE 9: note = RuvC_P1
  SITE 64: note = RuvC_P2
  SITE 109: note = RuvC_P3
  SITE 111: note = RuvC_P4
  SITE 114: note = RuvC_P5
  REGION 271..357: note = Tnp_domain
  SITE 279: note = Tnp_P1
  SITE 309: note = Tnp_P2
  SITE 317: note = Tnp_P3
  SITE 318: note = Tnp_P4
  SITE 330: note = Tnp_P5
MTTVYLGLDVSKGYADFVAMNEAGSELGGWGRFDDTRAGHDQVQGRVAAVLARAPETQVVVGVESTGGYERNWLGLCHRLRRAGWALTAYRLNPLVVKRYHERQLHRTVTDRVSAAGIAAYLRAGRRRQDQLWVAGELEGALTLYRTVRRLVRLQADLQNQLQALLSRCHPELVACLRGGLRQWVLALLRQYPTAAALAQADPAVVARIPYVTPAAAARLVAAAAASVADQTDPATGRAVMVLVDEIAHLRLQVRRLQTELAEQLRADPGVQIIDSIPGFGIWSAICLRLELGDIHRFPRPAELVAFAGLDPQHHQSGDTTINRGISHRGQAGVRAILYPVVRAAIRCNPAVGALYTRLRARGKTDAQAVVAGMRKLLHLVFACWVQGVAFDPSRWEQVAGKAQEMAQRAGMALTPAVAVPLATSLAAPVSKREAKRRKAAHSPQGPCGVVPQKRPEFERPPSAPIIPIRTPSCQGDHAPDFSSC

SEQ ID NO: 11121 - protein, 348 aa, unidentified
  source 1..348: note = protein_ec881c7
  REGION 7..149: note = RuvC_domain
  SITE 10: note = RuvC_P1
  SITE 53: note = RuvC_P2
  SITE 88: note = RuvC_P3
  SITE 90: note = RuvC_P4
  SITE 93: note = RuvC_P5
  REGION 212..300: note = Tnp_domain
  SITE 220: note = Tnp_P1
  SITE 250: note = Tnp_P2
  SITE 258: note = Tnp_P3
  SITE 259: note = Tnp_P4
  SITE 271: note = Tnp_P5
MSDIIRIGMDTSKTVFQLHGVDVSEQPVLRKKLRRRQVLDFFAVLPPAQVGLEACGSSHHWARELRKLGHEVALIPPQYVKPYVQRSKSDAADAEAICEAMSRPKLAKSFVAVKSAEQQAEQMLAKLRTQFLGRRTQLSNSIRGFAAEFGLVAPKGLFQINRLVNQIRADETLPELALDMFETLLRDYTRVDEEIAGLNAKLQELHRNSEVSQRLAGIPGIGPVGATLLAIKVSDAHAFRSGRDFSAWLGLTPKNHSTAGKNRLGVITRAGDEMLRATLVAGASAVLLQVRRGRMKTLWPWLDKLCAHKPHKLAAVALANKLARIAWKLMVSGETYRPLSVRHEPASV

SEQ ID NO: 11122 - protein, 402 aa, unidentified
  source 1..402: note = protein_3c8a225
  REGION 12..166: note = RuvC_domain
  SITE 15: note = RuvC_P1
  SITE 64: note = RuvC_P2
  SITE 104: note = RuvC_P3
  SITE 106: note = RuvC_P4
  SITE 109: note = RuvC_P5
  REGION 272..358: note = Tnp_domain
  SITE 280: note = Tnp_P1
  SITE 310: note = Tnp_P2
  SITE 318: note = Tnp_P3
  SITE 319: note = Tnp_P4
  SITE 331: note = Tnp_P5
MDLSTSHKRVWVGIDAGKGHHWAVGIDADGETLFSTKVINDEAQILTLISTARERADEVRWAVDISGRASTLLVALLVAHGQQVVYVPGRTVNRMTGAYRGEGKTDAKDARVIADQARMRRDFAPLGTTPELVSTLQLLTNHRADLIADRVRLINRLRDLLVGICPALERAFDYSAAKGPVVMLTEYQTPAVLRRIGVKRLTTWLERRKVRGADTVAAKAVEAAQAQQVALPGEKRAAKLVCDLAHQLLALDERIKDNDREIREAFRSDDRAEIIESMPGMGPVLGAEFVAIVGDLSGYRDAGRLASHAGLAPVARDSGRRTGNYHRPKRYNRRLRHIFYMAAQTAMMRPGPSRDYYLKKRAEGLLHTQALLSLARRRVDVLWAMLRDGRLFTSAPPVTQAA

SEQ ID NO: 11123 - protein, 388 aa, unidentified
  source 1..388: note = protein_d7e7f4f
  REGION 4..160: note = RuvC_domain
  SITE 7: note = RuvC_P1
  SITE 58: note = RuvC_P2
  SITE 98: note = RuvC_P3
  SITE 100: note = RuvC_P4
  SITE 103: note = RuvC_P5
  REGION 264..351: note = Tnp_domain
  SITE 272: note = Tnp_P1
  SITE 302: note = Tnp_P2
  SITE 310: note = Tnp_P3
  SITE 311: note = Tnp_P4
  SITE 324: note = Tnp_P5
MIYVGIDIAKLNHFAAAISSDGEILIEPFKFTNDYDGFYLLLSKLAPLDQNSIIIGLESTAHYGDNLVRFLIGKDFKVCVLNPIQTSSMRKNNVRKTKTDKVDTFVIAKTLMMQDSLRFLTLDDLDYIELKELGRFRQKLVKQRTRLKIQLTSYVDQVFPELQYFFKSGLHQNSVYALLKEAPTPTAIASVHMTHLAHLLEVASHGHFGKEKARELRVLAQKSVGVNDSSLSIQITHTIEQIELLDSQLFHTELEMANLVTCLHSVIMTIPGIGFINGGMILGEIGDIHRFSEPKKLLAFAGLDPSVHQSGNFQAQRTRMSKRGSRILRYALINAAHNVVKNNATFKAYYDAKKAEGRTHYNTLGHCAGKLVRVIWKMLTDEVEFNLE

SEQ ID NO: 11124 - protein, 334 aa, unidentified
  source 1..334: note = protein_6f0520f
  REGION 7..149: note = RuvC_domain
  SITE 10: note = RuvC_P1
  SITE 53: note = RuvC_P2
  SITE 88: note = RuvC_P3
  SITE 90: note = RuvC_P4
  SITE 93: note = RuvC_P5
  REGION 208..294: note = Tnp_domain
  SITE 216: note = Tnp_P1
  SITE 246: note = Tnp_P2
  SITE 254: note = Tnp_P3
  SITE 255: note = Tnp_P4
  SITE 267: note = Tnp_P5
MEQITTVGIDLAKNVFSLHGRDASGKTVYRRTVRRDRLVETVASLSPCLIGMEACSGAHEWGRRFEQHGHTVKLMAPKFVAPYRKSDKNDGNDAEAVCEAVTRPNMRFVPVKSTEQQALLALHRVRQGFVVERTAVINRLRGLLSEFGVVLPLRSVTVRRQAAQAAEALPEMARGAISDLLAQLRLLDERVDAYDAQIHAQARLSEPARRLMQIRGIGATTAVAIVATVGNAREFQNGRQFAAWIGLVPSQYSTGGKPRLGHISKRGDAYLRNLLVQGARSVLQSAPMHQDRLSRWALELQARRGYYRTLVAIANKNARIVWALLARNDTIRMN

SEQ ID NO: 11125 - protein, 316 aa, unidentified
  source 1..316: note = protein_56d75c1
  REGION 8..155: note = RuvC_domain
  SITE 11: note = RuvC_P1
  SITE 55: note = RuvC_P2
  SITE 95: note = RuvC_P3
  SITE 97: note = RuvC_P4
  SITE 100: note = RuvC_P5
  REGION 190..274: note = Tnp_domain
  SITE 198: note = Tnp_P1
  SITE 227: note = Tnp_P2
  SITE 235: note = Tnp_P3
  SITE 236: note = Tnp_P4
  SITE 247: note = Tnp_P5
MQTPLVFVGVDVSKARLDVAVRPSGELSSVTYDANGITTVLAQLRQVRPALIVMEATGGLEQPLLRALLDAALPVIVVNPRQVRDFAKAPGQLAKTDTLDAQVLARFAEVIRPALRVIPDAPTQELAALLARRRQVLAMQQAEQNRLDRAFDRVRKRIAAHVHWLSDERARLDEELDDMIQRSPVWRAREELLQSVPGIGPVMSRTVLAELPELGLLNRKQMAALVGVATFNRDSGRLRGHRTIWGGRASVRTVLYMATLVATRWNPVIRPFYQRLRAAGKAPKVALVAAMRKLLTLLNAMVHDGTPWRPVAAPDV

SEQ ID NO: 11126 - protein, 346 aa, unidentified
  source 1..346: note = protein_f24179f
  REGION 7..148: note = RuvC_domain
  SITE 10: note = RuvC_P1
  SITE 53: note = RuvC_P2
  SITE 88: note = RuvC_P3
  SITE 90: note = RuvC_P4
  SITE 93: note = RuvC_P5
  REGION 212..301: note = Tnp_domain
  SITE 220: note = Tnp_P1
  SITE 250: note = Tnp_P2
  SITE 258: note = Tnp_P3
  SITE 259: note = Tnp_P4
  SITE 272: note = Tnp_P5
MRYSTTVGVDLAKNVIQVSVVSCRGKERLNRSLTRRKFAEFLAKQEPALVAFEACATSHYWARAAQRYGHVAGIIPAKAVAPFRQGHKTDSNDALAVAEAARRPNIKEAPMKTVEQQGLQAIQRSRDLLVQESTALSNHLRGLLMEFGVVIPKGLASLRRELPEILEDGDNEVPDMYRPTLHRLYVRFLELREDIEMMDKQVKVLVKQHPACKRLTALEGVGPISAVLLYASLGTGEAFSGSREFAAYLGLTPRQFSSGGKTNIVGLSKKIGNCRLRSVLIQGARSYVHKLKEPKTSKDRWLMEVIERSGHGKAAVALANKNVRTAWAMLTQGTDYQRRPQLKVAA

SEQ ID NO: 11127 - protein, 339 aa, unidentified
  source 1..339: note = protein_b98026d
  REGION 6..147: note = RuvC_domain
  SITE 9: note = RuvC_P1
  SITE 52: note = RuvC_P2
  SITE 87: note = RuvC_P3
  SITE 89: note = RuvC_P4
  SITE 92: note = RuvC_P5
  REGION 211..298: note = Tnp_domain
  SITE 219: note = Tnp_P1
  SITE 249: note = Tnp_P2
  SITE 257: note = Tnp_P3
  SITE 258: note = Tnp_P4
  SITE 270: note = Tnp_P5
MQVTTIGLDLAKNIFQVHGITKDDEVAFNRPLRRAQLLSFFSKLEPCLIGMEACSSAHHWARELTKFGHDVRLIPPIYVKPYVKRGKSDAIDAEAICEAVTRPTMRFVAIKTVEQQSLLSVHRARSLLVRQRTQLINGLRGMVAEFGVYIARGLARVISFSEDIMAGEVLDLPDIANDVIHNLCEQLTALHTRLRWYEERLKQIAKEDARVRLLRTIPGVGAVTASAIIASIGDGHQFSNGREFAAWLGLTPANKSSGGKEKLGHITKMGDQYLRSLLVVGMTSLVRQTKSHPERASKWLISLLERKPARLATVAMANKTARIVWTVLTRNQPYTPHKA

SEQ ID NO: 11128 - protein, 342 aa, unidentified
  source 1..342: note = protein_42ac1f5
  REGION 6..147: note = RuvC_domain
  SITE 9: note = RuvC_P1
  SITE 52: note = RuvC_P2
  SITE 87: note = RuvC_P3
  SITE 89: note = RuvC_P4
  SITE 92: note = RuvC_P5
  REGION 210..294: note = Tnp_domain
  SITE 218: note = Tnp_P1
  SITE 248: note = Tnp_P2
  SITE 256: note = Tnp_P3
  SITE 257: note = Tnp_P4
  SITE 269: note = Tnp_P5
MKDTMIGVDLSKSVFQLHGTSMTGELKFRKKLSRQGFVRFMESHDPAVVVMEACGGANFWARELAGLGHDVKLVAPQYVRPFVKRQKNDAADAEAIVIAAQRPEMRFVEPKTEEQQARAVVFRARERLLYQRTELVNVVRSILYEHGLTFPTGFEQIGRIEATLRDPATVLSDIVRTECLDLIEQIAEKTTRINTKTQMARELAKDAETARRLQTMPGLGPITALAIETFAPPMETFKCGRSFAAWLGIVPRQHSSGGKARLGRISKAGQADIRRLLITGAMTRLNWLGRKRIQPGSWLAKMLDRKPRLLVAIALANKMARAIWAMLTKKEDYRDPAQVAIA

SEQ ID NO: 11129 - protein, 408 aa, unidentified
  source 1..408: note = protein_dc6f28a
  REGION 6..169: note = RuvC_domain
  SITE 9: note = RuvC_P1
  SITE 63: note = RuvC_P2
  SITE 109: note = RuvC_P3
  SITE 111: note = RuvC_P4
  SITE 114: note = RuvC_P5
  REGION 281..367: note = Tnp_domain
  SITE 288: note = Tnp_P1
  SITE 318: note = Tnp_P2
  SITE 326: note = Tnp_P3
  SITE 327: note = Tnp_P4
  SITE 340: note = Tnp_P5
MNPLFVGIDVSSRNNVAYLMKPDGSKYSSFSVQNNLGGAKLLSERIVSALGSMQLSDVVIGLEATSIYGDSLVYALREDGRLGKFQRKIHVLNPKQVRKFKEAYPDLPKNDWVDAFVIADHLRFGRIAREVYMDDYRYKALQTLTRARFEVIQNLTREKQRFANYLFLKCSGMAQDKDIANSSSTTIALMERFETVDDLANSDLEELTAFVTETGRGRFADPAATAKAVRAAAKGSYRLPKTVNDTVNQAMSVSIASMRALKEQVKVLDKAIEQQFEIIPNTLTSIPGIGKVYSAGIIAEIGDIHRFDSQASVAKFAGLVWHKNQSGEFEAEHSRMIKSGNRYLRYYLLEAANSVRRCDSEFRRYYDLKFKEVNKYQHKRALALTARKLVRLVFRLLKDNRLYIPPES

SEQ ID NO: 11130 - protein, 340 aa, unidentified
  source 1..340: note = protein_9f10d06
  REGION 7..149: note = RuvC_domain
  SITE 10: note = RuvC_P1
  SITE 53: note = RuvC_P2
  SITE 88: note = RuvC_P3
  SITE 90: note = RuvC_P4
  SITE 93: note = RuvC_P5
  REGION 209..295: note = Tnp_domain
  SITE 217: note = Tnp_P1
  SITE 247: note = Tnp_P2
  SITE 255: note = Tnp_P3
  SITE 256: note = Tnp_P4
  SITE 268: note = Tnp_P5
MSEVALIGIDLGKHVFHLHAQDRGGHELWRKKVTRKQLLLLMSNFPPCTLVMEACAGSHCLARELQALGHDAKLIAPQYVKPFVKGNKNDFVDAEAICEAASRPAMHYVTPKTEAQQTLAALHRVREGLVRERTATVNRIHGILLEFGISLRVGMRVIERLPVTLAEHTLPPRLVQVLDRLHAHFKYLDDQVKQVESELSQQLKEDDNAQRLLAIPGIGAITASLLAAELGDAKHFRSGRDFSASIGLVPRQYSTGGRPILLGISKRGDKTMRCLLIQCARAVMTRLHRRTDALGDWIRKMLVRRHSNVVACALANKLARIAWALLYRRSDYRIQVAATT

SEQ ID NO: 11131 - protein, 333 aa, unidentified
  source 1..333: note = protein_e23d31b
  REGION 4..152: note = RuvC_domain
  SITE 7: note = RuvC_P1
  SITE 55: note = RuvC_P2
  SITE 96: note = RuvC_P3
  SITE 98: note = RuvC_P4
  SITE 101: note = RuvC_P5
  REGION 197..284: note = Tnp_domain
  SITE 205: note = Tnp_P1
  SITE 235: note = Tnp_P2
  SITE 243: note = Tnp_P3
  SITE 244: note = Tnp_P4
  SITE 257: note = Tnp_P5
MNHVGIDVSHEENVVVISVNGKARKAITFENTASGHNALIGALAKLKGETRVCLEATGIYHFDLAIALSRAANIEVMVINPKVAHNFAKVLLNRSKTDAVDAETLAIYCERMPFELWQRPADENIALKAIARRIAALNKLLTQTKNQLHALKATQETPAGVIGHIEELIETLTRQIQAHREDALELIGQHEALANAFALITSVKGIAQASGIQILAELMILPQNMTAKQWVAYAGLDPRHFESGSSVAKKPRISKAGNKFIRQALYMPALVAAHREPNIQGYYAHLIVDNGLKKMQAICAVMRKLLHAIHGMLKTNKEFDGTCFYKLPVEANS

SEQ ID NO: 11132 - protein, 371 aa, unidentified
  source 1..371: note = protein_9a5b5c5
  REGION 33..175: note = RuvC_domain
  SITE 36: note = RuvC_P1
  SITE 79: note = RuvC_P2
  SITE 114: note = RuvC_P3
  SITE 116: note = RuvC_P4
  SITE 119: note = RuvC_P5
  REGION 238..324: note = Tnp_domain
  SITE 246: note = Tnp_P1
  SITE 276: note = Tnp_P2
  SITE 284: note = Tnp_P3
  SITE 285: note = Tnp_P4
  SITE 297: note = Tnp_P5
MDAPTRRGINVPKWKCHQPLEPKGASTMKITTVGIDLAKNVFQVHGVDEHGKAVLKKQLRRDQVAAFFVNLPPCLIGMEACGSAHHWARKLEGMGHTVRLIAPQFVKPYVKTNKNDAADAEAICEAVGRPNMRFVPVKNVEQQAVLALHRVRQAFVRARTAQANQIRGLLGEFGIVIPQGIGYIANRVPELIEDGANDLPGAFRLLVQRLLDHLKDLDRQVEELEAKIQAWHRGSDLSRKLAEVPGIGPITASALVASIGDAKNFDSGRQVAAWLGLVPKQHSSGGKAGLLGMSKRGDTYLRTLLIHGARSVIYRVGQKAEACGWIAGVVNRRNKNIAAVALANKNARIVWALLAHGRNFDAGYVRQATTV

SEQ ID NO: 11133 - protein, 277 aa, unidentified
  source 1..277: note = protein_d0a0390
  REGION 2..77: note = RuvC_domain
  SITE 17: note = RuvC_P3
  SITE 19: note = RuvC_P4
  SITE 22: note = RuvC_P5
  REGION 141..226: note = Tnp_domain
  SITE 149: note = Tnp_P1
  SITE 179: note = Tnp_P2
  SITE 187: note = Tnp_P3
  SITE 188: note = Tnp_P4
  SITE 200: note = Tnp_P5
MRLMSAQYVKPFVKTNKNDFIDAEAIAEAVSRPTMRFVPIKTDEQLDMQSLHRVRERWIMRRTAVVNQIRGLLLERGITIRTGRCHLDRVLPNLLEDNATPISGALRFLLAELKQELEQLAAHIEQAETLIHRAAQESEVCQRLDAIPGIGPLTATALVAAIGNGGAFRKGRPFAAWVGLVPREYSTGGKQTLRGISKRGNSYLRKLFVQGARAVLQFRDKQCPGLKHWLAELASRSHYNVVGVALANKLARMAWTVLASGNVYRPPDLAGLQMTAV

SEQ ID NO: 11134 - protein, 375 aa, unidentified
  source 1..375: note = protein_73ef0b3
  REGION 9..158: note = RuvC_domain
  SITE 12: note = RuvC_P1
  SITE 62: note = RuvC_P2
  SITE 98: note = RuvC_P3
  SITE 100: note = RuvC_P4
  SITE 103: note = RuvC_P5
  REGION 223..310: note = Tnp_domain
  SITE 231: note = Tnp_P1
  SITE 261: note = Tnp_P2
  SITE 269: note = Tnp_P3
  SITE 270: note = Tnp_P4
  SITE 282: note = Tnp_P5
MDQYITKYLGLDVHKETIAVAIARAGRSEPIYYGEIPNNAGAIRKLVKKVVSNGERVSFCYEAGPCGYDVYRQLIELGQKCDVVAPSLIPKKSGDRVKTDRRDAIALTRLYRAGELTPVWVPDKEQEAIRDLVRAREDMKSMEGHAKQRLGAFLLRHGKRFTGRCKWTQAYFRWLEGITFEMPAQQIVLQEYVDAVKHIKGRVEALEEEMRQAMQGWSLAPVVTGLMALRGVELLTAMTVAAELGDISRFTSAPQIMAHLGLVPSEHSSGNRQQRGGITKTGNGHVRRVLIEASWCYRSPARKTAQIQRRAEKTSETVQAIAWKAQKRLCKRYWYLVNKGKRPVEACAAVARELSGFIWAIGCEVMGKPYVCATA

SEQ ID NO: 11135 - protein, 284 aa, unidentified
  source 1..284: note = protein_b4b544c
  REGION 1..48: note = RuvC_domain
  REGION 153..240: note = Tnp_domain
  SITE 161: note = Tnp_P1
  SITE 192: note = Tnp_P2
  SITE 200: note = Tnp_P3
  SITE 201: note = Tnp_P4
  SITE 213: note = Tnp_P5
MRKDLGLLRPGDEIAVDLRTLTARRLDLVNDRTRQTNRQWAQLLEFFPALERALNLRRRARLFSSPATRCRPAIRRSGATRIGTWLRNRKVKNAAALAETAVEAARAQHTVLPGETLAAAMVARIAKGVLALDEEIAELDALIQARFNEHRHATVIRSLPGMGTLLSVEFIAATGGDLDAFGTADRLASFAGLSPVPRDSGRVSGNMRRPRRYHRGLLRAFYLSAMASLRTCSASQAYYGRKRNEGKGHKQALLALARRRANVLWAMLRDGECHEALPTVTAPA

SEQ ID NO: 11136 - protein, 400 aa, unidentified
  source 1..400: note = protein_ce43f1c
  REGION 11..166: note = RuvC_domain
  SITE 14: note = RuvC_P1
  SITE 63: note = RuvC_P2
  SITE 103: note = RuvC_P3
  SITE 105: note = RuvC_P4
  SITE 108: note = RuvC_P5
  REGION 273..358: note = Tnp_domain
  SITE 281: note = Tnp_P1
  SITE 311: note = Tnp_P2
  SITE 319: note = Tnp_P3
  SITE 320: note = Tnp_P4
  SITE 332: note = Tnp_P5
MSDEPGIDVYLGLDVGKGDHHAAAVNQAGKKVFDKPLPNSEPRLRERFDKLQAKHGTVLVVVDQPATIGALPLAVARDAGCQVAYLPGLTMRRIADLYPGEAKTDARDAFIIADAARAMPHTLRTIDLADETVAELAMIVGFDDDLAGESTRIANRLRGLLTQIHPSLERVLGPRIQHPAVLKLLDQFGSPAQIRKAGRRRLVTLIRPRAPRMAERLIEDIFTALDEQTVVVPGTDAAALIVPSLASSLQSVLDQRKLLAARIEELLDAHPLSQVLISMPGIGIRTAARILIDVGDGSGFATAGHLAAYAGLAPVTRNSGSSIRGEHPSRRGNKQLKRAFYLAAFASLSQPESRAYYDRKRREGKHHVAALIALARRRIDVLFAMLRDGTFYQPPTPATA

SEQ ID NO: 11137 - protein, 339 aa, unidentified
  source 1..339: note = protein_6b690d9
  REGION 6..147: note = RuvC_domain
  SITE 9: note = RuvC_P1
  SITE 52: note = RuvC_P2
  SITE 87: note = RuvC_P3
  SITE 89: note = RuvC_P4
  SITE 92: note = RuvC_P5
  REGION 209..296: note = Tnp_domain
  SITE 217: note = Tnp_P1
  SITE 247: note = Tnp_P2
  SITE 255: note = Tnp_P3
  SITE 256: note = Tnp_P4
  SITE 268: note = Tnp_P5
MKPSMIGLDLAKSVFQVHGVDESGRVVVRRQLRRSQVEGFFARLEPAVVGMEACGGAHHWARTLQGLGHEVRLMPAAYVKPYLKRNKTDGRDAEAICEAMQRPTMRFVTVKRVAQQAVLALHRTRALLVRQRTMAANALRAAFAEFGVVAAPGVKGLRALVARLPAPAAVPAEAGPALAALARHWEALTTDIEALETRIVQATRADEAARRLIEVPGIGPISASAILAAVPDARQFRSGRGFAAWLGLTPRQNNSGGKRRAGGISKQGERHIRSLLIIGASAHLRQERRRGVKDPWLAGLLARRPVKVAAVARAAKTARIVWALLARGERYRASAPLAA

SEQ ID NO: 11138 - protein, 313 aa, unidentified
  source 1..313: note = protein_b822688
  REGION 1..76: note = RuvC_domain
  SITE 13: note = RuvC_P3
  SITE 15: note = RuvC_P4
  SITE 18: note = RuvC_P5
  REGION 183..268: note = Tnp_domain
  SITE 191: note = Tnp_P1
  SITE 220: note = Tnp_P2
  SITE 228: note = Tnp_P3
  SITE 229: note = Tnp_P4
  SITE 241: note = Tnp_P5
MRRVADLHPGQAKTDARDAYIIAETARTMPHTLRGITVAEEQIAELSMLCGFDDDLAAQLTQVRNRLRGLLTQIHPALERVLGPRLAHPAVVDLLGRYPTPAGLKRAGRGHVRARLKKLAPRMAARLTDEIFRALAEQTTIVTGTHAAEHIIGRLAAQLQQLTQQRSDVEAEILLVVDAHPLTEVLTSMPGVGVRTAARILTEVVGKDFKSAAHLASYAGIAPVTRQSGTSIRGESPSRRGNKVLKRVLFLSAFASIKGDPVSRAYYDRKRAEGKRHNQAIIALARRRSDVLFAMLRDGTFYESRPTQLATAA

SEQ ID NO: 11139 - protein, 397 aa, unidentified
  source 1..397: note = protein_b73753b
  REGION 4..160: note = RuvC_domain
  SITE 7: note = RuvC_P1
  SITE 57: note = RuvC_P2
  SITE 97: note = RuvC_P3
  SITE 99: note = RuvC_P4
  SITE 102: note = RuvC_P5
  REGION 274..361: note = Tnp_domain
  SITE 282: note = Tnp_P1
  SITE 312: note = Tnp_P2
  SITE 320: note = Tnp_P3
  SITE 321: note = Tnp_P4
  SITE 334: note = Tnp_P5
MIAVGIDISKGKSMVAILNHDGSVRAQPYEMHHSKPELDALIKYIKTVDDHPVVLMEATGHYHYPVLNAFLRADIAPSLINPYLMKKYGDNELRKAKTDKKDALRIAHYALEKWYSLIPYSPMDQKYEDLRFLSSQYRQRIAMVTKSKNQLINLLDEAMPGITNILALKSRTPEKCMLLQFIKRFHSFDYINEIGKTRFMNSYATLARKVGERNAAAKSLSIYELSRSSITTRSNNDYMAAALDQCVDILSGAQCAADDIILQMQNIAETIPEYKVLRSMHGVGDRLGPVILAEIGDVRRFHSGKALNAYAGNDAPPYQSGQFESRNRHISKRGNSALRKACFEVMQALKLTKPQDDPVYLFLLKKEQEGKPYNVAKMAAVNKFLRIYYARAMELYK

SEQ ID NO: 11140 - protein, 347 aa, unidentified
  source 1..347: note = protein_8f43510
  REGION 9..150: note = RuvC_domain
  SITE 12: note = RuvC_P1
  SITE 55: note = RuvC_P2
  SITE 90: note = RuvC_P3
  SITE 92: note = RuvC_P4
  SITE 95: note = RuvC_P5
  REGION 214..298: note = Tnp_domain
  SITE 222: note = Tnp_P1
  SITE 252: note = Tnp_P2
  SITE 260: note = Tnp_P3
  SITE 261: note = Tnp_P4
  SITE 273: note = Tnp_P5
MTQAQIYIYGIDLGKNWFHLVAMDRMGHVLTKQKLTRSQLKQFISTTPPCRVAFEACPGSQYWGRLFQQAGFEPKIIPAQFVKPYLKSNKNDFNDATAIAEAGSRGTMRCVPLKSHEQLALQATHRVRQRFIIERTATVNQMRALLLGYGLTVPAGRKVFERAPPAILEDAENGLPDFIRALVLRLRERWQQLDIQIDEMSLMLGQASSASSLCQKVSTVPSIGPIVSTALIAAIGNGSQFKKARDLSAWLGLVPRQYSAGGKSLLGGISKRGNNYLRQMVIQGAKALKIHMKRDKSLLGEWVARLEVGHHHHVVLIALANKIMRICWKVLTSGRDYRPYPNASTTV

SEQ ID NO: 11141 - protein, 411 aa, unidentified
  source 1..411: note = protein_88d7cb6
  REGION 5..163: note = RuvC_domain
  SITE 8: note = RuvC_P1
  SITE 62: note = RuvC_P2
  SITE 102: note = RuvC_P3
  SITE 104: note = RuvC_P4
  SITE 107: note = RuvC_P5
  REGION 273..373: note = Tnp_domain
  SITE 281: note = Tnp_P1
  SITE 311: note = Tnp_P2
  SITE 319: note = Tnp_P3
  SITE 320: note = Tnp_P4
  SITE 333: note = Tnp_P5
MNPVIGLDVAKGESQVQAYLERKKPYKKSFKVEHDLDGLASLLDFIKEVEDISGERPPLVMESTGHYHTPVVQYFEDKGYLIIIVNPLISYKAKSSSLRKVKTDIIDANHLCELNYKEDLEPYKRRGIQIGNLRHLTRQHDNITGMFVQTKLQFQAVLDQIFPEFCKVFSDLYSDVSLKILHTFPTSEYILKTTTDVLTTKIKEFCNSRSLQWANKKAEELMAAAAQNPFQKILYSSLALSLEMYINMIFEYKKHLSILENEIDALAKSIEESKIIRSIPGIGEKIAATIVSEIGEIERFNHPKKLVAFAGLDPSVFESGTFKGTYNRITKRGSSRLRQALFMAVKCAIRDCRKQKTTDEILPRNKKLRAFYDKKREEGKPLRVAVIACANKLLHWIYAILKNKTTFQDLA

SEQ ID NO: 11142 - protein, 332 aa, unidentified
  source 1..332: note = protein_be6dcf4
  REGION 1..139: note = RuvC_domain
  SITE 43: note = RuvC_P2
  SITE 78: note = RuvC_P3
  SITE 80: note = RuvC_P4
  SITE 83: note = RuvC_P5
  REGION 202..286: note = Tnp_domain
  SITE 209: note = Tnp_P1
  SITE 239: note = Tnp_P2
  SITE 247: note = Tnp_P3
  SITE 248: note = Tnp_P4
  SITE 260: note = Tnp_P5
MAKNVFQVHGAAADGSVVYRKKLSRPQFARFMADQPPCLVAMEACASAHHWAREMARHGHEVRLIAPHYVKPFLKRQKNDAADAEAIVEAALRPTMRFVEPKSADQQARAVAFRTREQLVKQRTEAVNALRSHLYEFGHIAPEGIGYLPRLAKVVVDLSTDLPELARDICRMLLDQIAQLTGRIDALKARIAAISQEADLPRQLQTMPGVGPITALAVETFAPPMEQFRRGRDFAAWLGLVPRQHSSGGKQKLGKTSKMGQRDIRRLLVIGATAVIRWAARRGAPKGSWLARMLERKPIPVVAVALANKMARGIWAMLTRGESYRGPVLIGA

SEQ ID NO: 11143 - protein, 407 aa, unidentified
  source 1..407: note = protein_07c1001
  REGION 6..159: note = RuvC_domain
  SITE 9: note = RuvC_P1
  SITE 57: note = RuvC_P2
  SITE 98: note = RuvC_P3
  SITE 100: note = RuvC_P4
  SITE 103: note = RuvC_P5
  REGION 221..306: note = Tnp_domain
  SITE 229: note = Tnp_P1
  SITE 259: note = Tnp_P2
  SITE 267: note = Tnp_P3
  SITE 268: note = Tnp_P4
  SITE 279: note = Tnp_P5
MTKVFIGVDPHKLSATIEVVDRHEKLLGTGRFRTDQAGYAAMRTYTKNWPERVWAVEGANGAGRPLAQRLLEDGEHVVDVPAKLAARVRLFDTGHNRKTDARDAHSIAIVAVRTTSLRVLRADGELEALRMLCDRREELTRLRVQTVNRLQRLLAELVPGQAKKDLTALQAKAILATVRPRDIAGKTRRRIAAEELADLVAVEAKMKKATAELKILVKARGSRLMNLHGVGPVVAARTLADVGDIARFADRNRFASWTGTAPLDASSGEQNRHRLSRAGNRRMNHMIHIAAVSQIRLDTEGRAYYRRKLAAGKTKLEALRCLKRRISDAIYRQMLADADRAASTSAAETVGTGPGGHCGATHESSAVDLPPHIDTSDQPLPGPAKPTLQPHQPARKTPHSRTPQTTG

SEQ ID NO: 11144 - protein, 371 aa, unidentified
  source 1..371: note = protein_464b5bf
  REGION 2..155: note = RuvC_domain
  SITE 52: note = RuvC_P2
  SITE 92: note = RuvC_P3
  SITE 94: note = RuvC_P4
  SITE 97: note = RuvC_P5
  REGION 250..322: note = Tnp_domain
  SITE 275: note = Tnp_P2
  SITE 283: note = Tnp_P3
  SITE 284: note = Tnp_P4
MEDHHDVEVMDASERRLAKARLPEGVTGMARLHALVGEHAGDAADEVEVLVGIETDRGPWVQALLAAGYTVFAINPLQASHYRARHAVSGAKSDAADAHALADMVRTDSHQLRPVAGDTAAVEAVKVVTRTHKTLIWERTRHTQRLRHALRDYFPAALAAFDDLDAADTLELLAKAPTPAEAARLTVSQISAALRHAHHRDVPTKAAAIQAALRAEHLDQPDVVTAAYAASVRALIAVLAVLNEQVKTLQGQVAEHFGDDPDRYTTAKARKNYAGTSPITRASGRKKTVSARFVHNDRLVDALITQAFSSLQASPGARAYYDRQRERGANHNAALRQLANRLVGILHGCLKTATPYDEATAWPRHAEQLAA

SEQ ID NO: 11145 - protein, 439 aa, unidentified
  source 1..439: note = protein_f8d5cc2
  REGION 37..200: note = RuvC_domain
  SITE 40: note = RuvC_P1
  SITE 94: note = RuvC_P2
  SITE 140: note = RuvC_P3
  SITE 142: note = RuvC_P4
  SITE 145: note = RuvC_P5
  REGION 312..398: note = Tnp_domain
  SITE 319: note = Tnp_P1
  SITE 349: note = Tnp_P2
  SITE 357: note = Tnp_P3
  SITE 358: note = Tnp_P4
  SITE 371: note = Tnp_P5
MILIREVADAPVIMGISKPADLKSPCGEVKIMNPLFVGIDVSSKSNVAYLMKPDGSKHSSFSVQNNLGGAKLLSERIVSALGSMQLSDVVIGLEATSIYGDSLVYALREDGSLGRFQRKIHVLNPKQVRKFKEAYPDLPKNDWVDAFVIADHLRFGRIAKEVYMDDYRYQALRTLTRARFDVIQSLTREKQRFANYLFLKCSGIAQNKDIQNTSATTIALMERFETVDELANADLNELTAFISEAGRGRFADPDATAKTVQAAAKGSYRLPRTVNDTVNQAMAVSIASMRAMKEQVKVLDKAIEQQFEIIPNTLTSIPGIGKVYSAGIIAEIGDVHRFESQASVAKFAGLVWHKHQSGDFEAEHSQMIKSGNRYLRYYLLEAANSVRRCDSEFRRYYDLKFKEVNKYQHKRALALTARKLVRLVFRLLKDNRLYIPPEG

SEQ ID NO: 11146 - protein, 320 aa, unidentified
  source 1..320: note = protein_9394f9f
  REGION 8..150: note = RuvC_domain
  SITE 11: note = RuvC_P1
  SITE 55: note = RuvC_P2
  SITE 95: note = RuvC_P3
  SITE 97: note = RuvC_P4
  SITE 100: note = RuvC_P5
  REGION 190..274: note = Tnp_domain
  SITE 198: note = Tnp_P1
  SITE 227: note = Tnp_P2
  SITE 235: note = Tnp_P3
  SITE 236: note = Tnp_P4
  SITE 247: note = Tnp_P5
MENISQWVGIDVSKAALDVYIRPLGKALKVANTEVEISHLVEQLKSYDLNLIVLEATGGLETELIIQLQAALLPVALINPRMGRDFAKATGRLAKTDAIDAQILAQFGEAMKPQVLPIQSEEARQLGELISRRRQLVEIQTAEKNRRSRSRGKALADIEAHIEYLEGRLKQLNQEIEQLTQKNQQWINKVNFLKTTPGIGQVISTTLVSDLPELGQLTAKQISRLVGVAPINHDSGQHKGKRMINGGRAHVRATLYMGAVVAMRHNPVIKAFYERLVERGKSKKLALTACVHKMLVILNAMVRDNLPWCISDNKKTIVNS

SEQ ID NO: 11147 - protein, 346 aa, unidentified
  source 1..346: note = protein_ec0132e
  REGION 17..178: note = RuvC_domain
  SITE 20: note = RuvC_P1
  SITE 77: note = RuvC_P2
  SITE 117: note = RuvC_P3
  SITE 119: note = RuvC_P4
  SITE 122: note = RuvC_P5
  REGION 219..305: note = Tnp_domain
  SITE 227: note = Tnp_P1
  SITE 257: note = Tnp_P2
  SITE 265: note = Tnp_P3
  SITE 266: note = Tnp_P4
  SITE 278: note = Tnp_P5
MKPNSQMTLDKYFRQCVGIDISKDKFTACLYMYDIASDVGCHTESIDFTNTRTGFNQMVKWSRREAQKGFPLTYLMEPTGSYYEPLAYHLNKIGQTVYVVLPNKARKFCEYEGIKTKTDAMDARCLALLGCANRKLRPWEPPKPIYRELRQLTRLRASLVKMQTQLRNHIEAVDHMESASKEVRKSYEKLLDTIDKQLEKNEQAIATKVAQDKELEARIKRIATAKGIRTGTVTCIVAETQGFYLINNRKQLTSFAGLDVVAKQSGKDDPKHKISKKGNAYIRAALYMPALSAAYCNRQMNQTYMNICDRHPDTKMIGVTAIMRKMLLLVYSLWKSGEEYDETRDS

SEQ ID NO: 11148 - protein, 403 aa, unidentified
  source 1..403: note = protein_ce2a95f
  REGION 4..162: note = RuvC_domain
  SITE 7: note = RuvC_P1
  SITE 57: note = RuvC_P2
  SITE 99: note = RuvC_P3
  SITE 101: note = RuvC_P4
  SITE 104: note = RuvC_P5
  REGION 276..363: note = Tnp_domain
  SITE 284: note = Tnp_P1
  SITE 314: note = Tnp_P2
  SITE 322: note = Tnp_P3
  SITE 323: note = Tnp_P4
  SITE 336: note = Tnp_P5
MNAVGIDVSKGKSMVAILRPGGSIVSKPFVVRHLSGELQSFIQQIKSLEDETRIVMEHTGRYYEPIARELSEAGLFVSAINPKLICDFQDEDNPLRKVKSDKADAVKIARYALDRWQKLKQYGSMDEIRNQLKTMNRQFAFYMKHKTAMKNNLIGILDLTYPGVNAYFDSPAREDGSQKWVDFSTTYWHVNCVCKMSLNAFVEHYRKWCSRMKYNFSRSKAEEIYGTAKELVPVLPKDETTKLIIKQAIDQLNTASQTVERLRSLMNETAAKLPEYPVVMAMKGVGSSLGPQLMAEIGDVTRFTHKAAITAFAGVDPGVNQSGDYEQKSVHASKRGSPTLRKTLFQVMDVLIKTKPQNDPVYLFMDKKRAQGKPYYVYMTAGANKFLRIYYGRVKEYLSSLPQ

SEQ ID NO: 11149 - protein, 389 aa, unidentified
  source 1..389: note = protein_6f6589c
  REGION 6..162: note = RuvC_domain
  SITE 9: note = RuvC_P1
  SITE 62: note = RuvC_P2
  SITE 102: note = RuvC_P3
  SITE 104: note = RuvC_P4
  SITE 107: note = RuvC_P5
  REGION 264..351: note = Tnp_domain
  SITE 272: note = Tnp_P1
  SITE 302: note = Tnp_P2
  SITE 310: note = Tnp_P3
  SITE 311: note = Tnp_P4
  SITE 324: note = Tnp_P5
MSKLFCGIDVAKFEHVASIYDPSTGEMILDSLHFDNNDKGFKTLLSSLSKLNKRCEILIGFESTGHYHQVLFNFLTSKKYKCFLINPYMTSKFRSISLRDAKNDDIDSRAIAKFLSFEYKSLIEQEFLSSELKELVNQRHFLIIESSKMKIKLKSYLDRTFPELESIVDINTAAIRAILKEYPTANSISEARIDKLKNLAKKASKGKYSLSKVEAVKEAAKTSIGIHSLSIGLNIIQCIETLELKERQIDRIEKEIKEHPTVLDSPLHQLIGINDIEIGYIMSAIISITRFSSPEKIVAYAGLDPKVRQSGTWKANTTRMSKRGNKLLRYALIWTAFNMTRRPGPMKNYFALKKSQGKSHYNALGHCATKLCRYIFWILNHPDSNFEYQ

SEQ ID NO: 11150 - protein, 429 aa, unidentified
  source 1..429: note = protein_84f759a
  REGION 15..165: note = RuvC_domain
  SITE 18: note = RuvC_P1
  SITE 67: note = RuvC_P2
  SITE 105: note = RuvC_P3
  SITE 107: note = RuvC_P4
  SITE 110: note = RuvC_P5
  REGION 227..313: note = Tnp_domain
  SITE 235: note = Tnp_P1
  SITE 266: note = Tnp_P2
  SITE 274: note = Tnp_P3
  SITE 275: note = Tnp_P4
  SITE 286: note = Tnp_P5
MRTESTPGARGPVFCGVDTHADSHWLCVLDWRGRKVLSRQFPADAAGYEALAGAIAAAGEPACVAMEGTSSYGAGLTRHLASLGMPVREALSPARTQRRRPGQGKCDEADAERAARAAMSGSGLGTPKSQDGWVDGVRCMLAARSGAVKARTSAINTARSLLTTAPEGLRSRFRGMGGPRLMEELPSVRAEGALGAALGALADLWAAARDAALDMELAIEASLEENCPALLAMYGCGPVSAAKLAVAAGDNPGRLRSEASFAAICGACPIPASSGKTVRHRLNRGGDRQANSALHEIARQRVMRDPETAEYAERARGRGKSDREVMRCLKRYVAREAYRALMRPHEIRRPEDASELVAARRAAKVSQVRAASILGTSEKYISMLERGQRELKPIRRAYEAWVEAGLPLDWDRQAFEAERKMDSKKHLAK

SEQ ID NO: 11151 - protein, 344 aa, unidentified
  source 1..344: note = protein_c5d999f
  REGION 6..148: note = RuvC_domain
  SITE 9: note = RuvC_P1
  SITE 52: note = RuvC_P2
  SITE 87: note = RuvC_P3
  SITE 89: note = RuvC_P4
  SITE 92: note = RuvC_P5
  REGION 211..297: note = Tnp_domain
  SITE 219: note = Tnp_P1
  SITE 249: note = Tnp_P2
  SITE 257: note = Tnp_P3
  SITE 258: note = Tnp_P4
  SITE 270: note = Tnp_P5
MKITTIGLDLAKSVFQVHGVDANGEVVVRKSLRRSQMLPFFAKLPACLVGIEACGTSHHWARELIKLGHEVRLMPPAYVKPYVKRGKTDAADAEAVCEAVTRPTMRFVPVKSPEQQAALSMHRTRDLLVKQRTQLINMIRGLLAEFGIDIPKGVERALLMARQIVDGKAPDVPIEAAKIVGALSQQALDTHVRLREIDRDLLVWLRGSDVARRLTTIPGIGPIGATALAASVTDPHQFRSGRQFAAWLGLTPLQKSSGGKERLGRISKMGDKYLRKLLVVGMTSLVHRARHNPKTVDPRLVDLLARKPTRVATVAMANKTARTIWAIMARGETYRTGHRPALAA

SEQ ID NO: 11152 - protein, 343 aa, unidentified
  source 1..343: note = protein_f2cedca
  REGION 6..147: note = RuvC_domain
  SITE 9: note = RuvC_P1
  SITE 52: note = RuvC_P2
  SITE 87: note = RuvC_P3
  SITE 89: note = RuvC_P4
  SITE 92: note = RuvC_P5
  REGION 211..295: note = Tnp_domain
  SITE 219: note = Tnp_P1
  SITE 249: note = Tnp_P2
  SITE 257: note = Tnp_P3
  SITE 258: note = Tnp_P4
  SITE 270: note = Tnp_P5
MNIMILGIDLGKNSCSAVGVDATGAVVTRRTMRRETLIDYVAKLPICVVAMEACCGAHHLGRLFARQGHEVRLMSPEYVRPYIKAQKNDDRDAEGIAEAASRPTMRFVDLKSEEQLDIQTLHRARSRLVTERTNLINQLRAILLERGVIFPVGRRKLEFGVDSMLAGSNEVLSSRLCQLVGELRAEWKELDTKIAALNTEFIQLARGDAAMCRLTSIPGIGVLNATALVAAVGDASSFAKARDLGAWLGLVPRQYSTGGKPRLLGISKLGNTYLRTLLIHGARAALPSLSTSNTPLGRWLKAMIERRVHRNAVVVALANKLARMAWAALRKETAFDRSYPVAA

SEQ ID NO: 11153 - protein, 342 aa, unidentified
  source 1..342: note = protein_8b309a2
  REGION 6..148: note = RuvC_domain
  SITE 9: note = RuvC_P1
  SITE 52: note = RuvC_P2
  SITE 87: note = RuvC_P3
  SITE 89: note = RuvC_P4
  SITE 92: note = RuvC_P5
  REGION 210..292: note = Tnp_domain
  SITE 218: note = Tnp_P1
  SITE 248: note = Tnp_P2
  SITE 256: note = Tnp_P3
  SITE 257: note = Tnp_P4
  SITE 269: note = Tnp_P5
MKDTMIGVDLAKRVFQVHGATMRGEVQFRRKLTREQFRAFMAAQAPAVVVFEACPSGSYWAREMAALGHEVRLVAPQYVRPFVKRQKNDAADAEAIVVAAQRPEMRFVAPKTADQQARAVLFRCRERLVHQRTELVNALRTTLYEYGHTVPQGIAHIRRIVAILDASDADLPELVRDECRDLLAQIDEKTARIDERTRRIRTLSAGTDTARRLQTMPGIGPLTALAVEAFAPEMTQFHRGRDFASWLGLVPRQHSSGGKERLGRVSKAGQADIRRLLIIGAMARLTPLGRRSIPEGSWLARMLARKPRMLVAIALANKMARAIWAMMTKKEDYHDPARAAAA

SEQ ID NO: 11154 - protein, 356 aa, unidentified
  source 1..356: note = protein_1be89bd
  REGION 9..154: note = RuvC_domain
  SITE 12: note = RuvC_P1
  SITE 58: note = RuvC_P2
  SITE 94: note = RuvC_P3
  SITE 96: note = RuvC_P4
  SITE 99: note = RuvC_P5
  REGION 219..305: note = Tnp_domain
  SITE 227: note = Tnp_P1
  SITE 257: note = Tnp_P2
  SITE 265: note = Tnp_P3
  SITE 266: note = Tnp_P4
  SITE 278: note = Tnp_P5
MTASYDYHIGVDYHKSYSHLVVQDSGGKTLRSGRVKNDRQSLGSFLERYRENSHAVVEATRNWMVIYDWLDDICDDVVLAHPLKVKAIADAKIKTDKIDATVLAHLLRADLVPEAWAPSERSRDLRVALRERMFYVRLRTMTKNRIVTVFDRYPEQTAQLKTLGDLFGKAGRIQLSQVNVSEIDRIQIDRGLAFIGAINERIKQSEATIRAMTKANPNVRLLKTIPGIGEFFARLIDAEIDDIARFRNPKKLAAYAGLVPSTYSSGGKTYHGKTIKQGNKWLRWAFVEAVTPAIASDPQLRAQYEHLKIRGTNKARVAMARKLLTIAFQILRDQRAYEPRGESIITEGASMKSRLS

SEQ ID NO: 11155 - protein, 342 aa, unidentified
  source 1..342: note = protein_a8043ca
  REGION 7..146: note = RuvC_domain
  SITE 10: note = RuvC_P1
  SITE 53: note = RuvC_P2
  SITE 88: note = RuvC_P3
  SITE 90: note = RuvC_P4
  REGION 208..294: note = Tnp_domain
  SITE 216: note = Tnp_P1
  SITE 246: note = Tnp_P2
  SITE 254: note = Tnp_P3
  SITE 255: note = Tnp_P4
  SITE 267: note = Tnp_P5
MDKIIRVGIDTSKNVFQLHGVNIAEKPVLRKKLRRKEMVDFFTKCPPTVIAIEACGASHHWARLLTSLGHEVKLIAPQLAKPYVKRNKNDAAEALCEAMSRPTMRFVPVKTADQQASLMLVNMRERAVAEQTRLVNTIRGHAAEFGLIAAQGISHIPQLLERIMVDENIPALARDLFASLAQEFAQLHERVKELEAKLMTIYRGNECCRRLSKIPGVGPIGAVLLVMKAPSPELFASGRQFAAWMGLTPKDHSTAGEVRLGVITRAGDEALRKTLVVGATAVLQQVRAGRGRNASLWLDQLLKRKVPKLVAVALANKIARIAWKMMVSGEAYRQTAQPASVA

SEQ ID NO: 11156 - protein, 399 aa, unidentified
  source 1..399: note = protein_1caaaac
  REGION 6..162: note = RuvC_domain
  SITE 9: note = RuvC_P1
  SITE 60: note = RuvC_P2
  SITE 100: note = RuvC_P3
  SITE 102: note = RuvC_P4
  SITE 105: note = RuvC_P5
  REGION 267..354: note = Tnp_domain
  SITE 275: note = Tnp_P1
  SITE 306: note = Tnp_P2
  SITE 314: note = Tnp_P3
  SITE 315: note = Tnp_P4
  SITE 327: note = Tnp_P5
MSRIWAGIDCGKTHHHCVTMDADGKTLLSRRVANDEPELLQLLGDVLDTADGREVTWALDMTGGEPGLLIAVLINHMQELLYIPGRMVNRASDAYRGEGKTDARDAKIIADQARMRRDLRPIRPGDEATIELALLTSRRIDLVAERTRAINRLRSVLTSMFPALERAVELTNAGPLVLLTGYQTPAALRRIGISRLTTWLRNRKVRGAENLAKAAVEAAERQHTAVAGEKVIAQMVHTLAKEVMALNEKTAETEKLIEGRFREHELAEIVLSMPGMGPKLGAEFLVAVGGSLDAFSTADRLAAFGGVAPAPHDSGKTSGNLRRPQRYHRRLQHVFYTSALVSSWSDPNSKRFYDRKRAEGKSHIQAVLALARRRVNVLWALIRDRRCYQVAPPPVTAAA

SEQ ID NO: 11157 - protein, 344 aa, unidentified
  source 1..344: note = protein_6dadef7
  REGION 1..141: note = RuvC_domain
  SITE 39: note = RuvC_P2
  SITE 80: note = RuvC_P3
  SITE 82: note = RuvC_P4
  SITE 85: note = RuvC_P5
  REGION 203..288: note = Tnp_domain
  SITE 211: note = Tnp_P1
  SITE 241: note = Tnp_P2
  SITE 249: note = Tnp_P3
  SITE 250: note = Tnp_P4
  SITE 261: note = Tnp_P5
MLDDAECLVGELRVNADRWQRDRLLRFAAPFEPRTWAVEAAGGLGALLAQQLVAAGECVVDVLPTLSARVRLLDSGRTDKSDPHDARSAAIVALRHAPLRPIRPVDHSAVLRLLANRHHDLTASRTRTICRLHALLCLLIPGGSSGRLSAQRAGKVLRGLRPIELVDIERKRIAHELLADVRRIDDQVETLAKRTAVAVSASGTTVTDVYGIGPIGAAINIGHTADVTRFPSAGHYARYNATAPLEASSGPRVRHRLNPRGNRQLNHALHVAAITQVSHDTPGRVYFDRKITEGKTRKEALRALKRRISDAVYRQLVADTRPWLEGPGRTDGNDSKASVTGSAP

SEQ ID NO: 11158 - protein, 323 aa, unidentified
  source 1..323: note = protein_417c1fd
  REGION 5..154: note = RuvC_domain
  SITE 8: note = RuvC_P1
  SITE 58: note = RuvC_P2
  SITE 98: note = RuvC_P3
  SITE 100: note = RuvC_P4
  SITE 103: note = RuvC_P5
  REGION 195..281: note = Tnp_domain
  SITE 203: note = Tnp_P1
  SITE 233: note = Tnp_P2
  SITE 241: note = Tnp_P3
  SITE 242: note = Tnp_P4
  SITE 254: note = Tnp_P5
MSSVVGIDIAKGSFDIAIPQSNGKFRTKANLSNNPQGFQTLHAWLAKHATADAWIVMEATGVYHQALAESVYSLGYRVCVVNPACICSYAKSLLQRVKTDKVDAKLIALYAQRHTDQLKAWQPQAPAQRRLQALVRRLEDLKGIEQMEHNRLDVSDVSVQASIRSVIQHLEQEIAATLKAIKDHINDDPDLRNQRDLLVSINGISDKTAALLLAELGNPLRFRDSRAVVAFAGLNPRLQESGKHKGHVRISKMGPSSLRAGLYMPAVVAMTHNPAVKALSERLKAKGKSGKQIVCAAMRKLLNIAYGVLKSGKPFDAQLAIAH

SEQ ID NO: 11159 - protein, 416 aa, unidentified
  source 1..416: note = protein_84bd0c3
  REGION 18..170: note = RuvC_domain
  SITE 21: note = RuvC_P1
  SITE 69: note = RuvC_P2
  SITE 107: note = RuvC_P3
  SITE 109: note = RuvC_P4
  SITE 112: note = RuvC_P5
  REGION 276..362: note = Tnp_domain
  SITE 284: note = Tnp_P1
  SITE 315: note = Tnp_P2
  SITE 323: note = Tnp_P3
  SITE 324: note = Tnp_P4
  SITE 335: note = Tnp_P5
MKSASNTLPDQAPQDLTAGLDWARDDHAVSIVNDRGREIARHTIEHTAAGLIELVAVLTRAGCQEVAIERPDGPVVDALLGAGVTVVVISPNQVKNLRGRYGSAGNKDDRFDAYVLADTLRTDRSRLRPLVPDAPETVALRRIVRARRDLVAHRVALANQLRAHLRLVFPGAVGLFRQIDSLITLAFLTRFPTQDKADWLTPTRLGRWLSSVGYSGRTDPAALHAHLTAAPRGAAGDQTAYTAITASSVALLTAMVTQIKALEAQISAQLDAHADQHIFTSLPRSGRVRAARLLAEIGDCRAKFPTPEALICLAGVAPSTRQSGKIRVVAFRWACDKQLRDAVCDFAGDSIKANPWAADLYRRARARGHDHPHAVRVLARAWLTVIWHCWQDGVRYDPAEHRALQRLLNQDQKRAA

SEQ ID NO: 11160 - protein, 404 aa, unidentified
  source 1..404: note = protein_326e288
  REGION 6..162: note = RuvC_domain
  SITE 9: note = RuvC_P1
  SITE 58: note = RuvC_P2
  SITE 99: note = RuvC_P3
  SITE 101: note = RuvC_P4
  SITE 104: note = RuvC_P5
  REGION 270..356: note = Tnp_domain
  SITE 278: note = Tnp_P1
  SITE 309: note = Tnp_P2
  SITE 317: note = Tnp_P3
  SITE 318: note = Tnp_P4
MGQVFVGHDWAEEHHDIDIRDGEGRSLGRARLSEGVEGVARFHALVGALVEHPSAVVVATETDRGLFVGSLVAAGYQVYAVNPMSVARYRERHSTSGAKSDPGDAAVLAELARTDRHHHRRVAGDSDLAEAIKVLARAHQSLIWTRQRQLNQLRSTLREYYPAALELGDLHGPDALGVLTVAPTPSLGRRLSRTRIGSAIARAGRQRRVEQRAAEIQAVLRTDQLSPPAVIGEAMGASVSALVAVVGEFNTQIARLEEQLSERFDQHPDAKVVRSLPGLGTILGARVLAEFGDDPNRYDSAKSRKNYAGTSPITKASGKSRVVLARYARNRRLADACYLWAFAAITASPEARSFYDARRAAGDTHNRALRALANRLVGLLHGCLRHDTLYDAHAAWDHRHQRAA

SEQ ID NO: 11161 - protein, 343 aa, unidentified
  source 1..343: note = protein_317cf93
  REGION 6..149: note = RuvC_domain
  SITE 9: note = RuvC_P1
  SITE 54: note = RuvC_P2
  SITE 89: note = RuvC_P3
  SITE 91: note = RuvC_P4
  SITE 94: note = RuvC_P5
  REGION 213..300: note = Tnp_domain
  SITE 221: note = Tnp_P1
  SITE 251: note = Tnp_P2
  SITE 259: note = Tnp_P3
  SITE 260: note = Tnp_P4
  SITE 272: note = Tnp_P5
MNLSRVGVDLAKNVYQLHGVDRHGKTSWKRRLRRGQWLQALLDKTDPGCEVGMEACTGAHHWARELQSRGYTVRLIAPQFVKPYVKSNKNDANDAEAICEAMSRPNMRFVTVKSVEQQDIQATHRVRSEIKDQRNAKANQIRGLVAEYGLVAPTTLLALRHAIPCWLEDADNGLTDYFRSLLHGLWGDLVALHDRMTELDKQIKTLADSNEVTQRLQQLRGVGPLVATALVATVGTGEQYKKGRQMAAALGLTPRQSSSGDKQRLLGISKRGDVYLRTMLIHGARAVVSQAKHREDRLSQWVTSISKRSHPNVAAVALANKTARMAWAMLRNDANYDPDFAFG

SEQ ID NO: 11162 - protein, 315 aa, unidentified
  source 1..315: note = protein_9ab8861
  REGION 9..151: note = RuvC_domain
  SITE 12: note = RuvC_P1
  SITE 56: note = RuvC_P2
  SITE 96: note = RuvC_P3
  SITE 98: note = RuvC_P4
  SITE 101: note = RuvC_P5
  REGION 192..276: note = Tnp_domain
  SITE 200: note = Tnp_P1
  SITE 229: note = Tnp_P2
  SITE 237: note = Tnp_P3
  SITE 238: note = Tnp_P4
  SITE 249: note = Tnp_P5
MAGSIAPSVGVDIAKDTLEVHLHPAGEGRRFANSAKGCAALIAWLGGFAIARVAFEPTGADHHAFERRLAEAGLPLVKVNPRQARRFAAAIGRHAKTDAVDAAMLARFAALLEPPVRPVVSATLDAMKELHVARRALVKDRVAAHNRNHVHRAPLLKRQARARLRQIERQIAAVDAALRAELTADPALQARFDILMSIPGVGEATALAMLVEMPELGALAHTGAASLAGLAPMARDSGQHRGKRFIRGGRAHLRKALYMPALVAVRFDAVMKARYQALLAAGKPPKVALVAIMRKLLILANALLRDGRTWTPRPA

SEQ ID NO: 11163 - protein, 346 aa, unidentified
  source 1..346: note = protein_1664818
  REGION 7..147: note = RuvC_domain
  SITE 10: note = RuvC_P1
  SITE 53: note = RuvC_P2
  SITE 88: note = RuvC_P3
  SITE 90: note = RuvC_P4
  SITE 93: note = RuvC_P5
  REGION 210..299: note = Tnp_domain
  SITE 218: note = Tnp_P1
  SITE 248: note = Tnp_P2
  SITE 256: note = Tnp_P3
  SITE 257: note = Tnp_P4
  SITE 269: note = Tnp_P5
MEHLIRVGIDTSKHVYQLHGVNAAEKPILRKKLRRTEMMAFFEKLPPTVIAIEACGASHHLARLLTSYGHEVKLIAPQLVKPYVKRGKNDAADAEALCEAMSRPTMRFVPIKTSEQQAALMLVGVRDRLIRTRTQLVNAIRGYAAEFGLIAAQGKCRIVPLLDRIAVDPTVPALARTLFAAQAKEYSRLQDQIEEVEAELAAWHRANECSRRLAEIPGVGPIGASLLMMKTPAPELFASGRQFAAWMGLTPKDHSTGGKVRLGIITRAGDELLRSVLVAGATALLRHVRAGKGNNANAWLLELLKRKPPKLVAVAVANKIARIAWKLMVTGERYRANSIPLREVAA

SEQ ID NO: 11164 - protein, 343 aa, unidentified
  source 1..343: note = protein_78f461b
  REGION 5..151: note = RuvC_domain
  SITE 8: note = RuvC_P1
  SITE 53: note = RuvC_P2
  SITE 91: note = RuvC_P3
  SITE 93: note = RuvC_P4
  SITE 96: note = RuvC_P5
  REGION 211..298: note = Tnp_domain
  SITE 219: note = Tnp_P1
  SITE 249: note = Tnp_P2
  SITE 257: note = Tnp_P3
  SITE 258: note = Tnp_P4
  SITE 270: note = Tnp_P5
MDQYIGLDVSLKDTAISIRQDGKRIWRGKCPSDPKLLAQMIRKHAPHARRVVFETGPLSTWFYHALTAEGVPAICIEARHAQKVLDETLNKTDANDADGLAQLAEAGFYKAVRVKAVDSMLTRTLVATRNQLLRISTQLSNQIRGLMKTFGLIVPKGTGRVFDGNVRELLDGNDGLARIILPLLEAWRDIRKRGADLDHQLLAAARQSQETKLLMTIPGIGAVTAVSYIAAIEDPENFKTSRSVGAWLGLTTRRYQSGEVDYDGHISRRGDNHLRGLLYEAATVILTRTGARNESTLKNWGLKLRQRLGFKRAAVAVARKLAVIMHSMLKTGEVFNGLAGATA

SEQ ID NO: 11165 - protein, 311 aa, unidentified
  source 1..311: note = protein_d2cecf5
  REGION 6..147: note = RuvC_domain
  SITE 9: note = RuvC_P1
  SITE 53: note = RuvC_P2
  SITE 92: note = RuvC_P3
  SITE 94: note = RuvC_P4
  SITE 97: note = RuvC_P5
  REGION 188..272: note = Tnp_domain
  SITE 196: note = Tnp_P1
  SITE 225: note = Tnp_P2
  SITE 233: note = Tnp_P3
  SITE 234: note = Tnp_P4
  SITE 245: note = Tnp_P5
MTEHTIGVDISKSHLDVFHLEGKAAQRFENTPGGLRALRKWLGSRPLARVVYEPTGPYHRLFEDTLSGKLPLVKVNPLQARRFAEACGTRAKTDALDARGLARMGAALALEPDAVISQNTRVLRDLQVARTALIKERTRLRNRGHVQTNAVLKRQTKTRLTLVEKQTAELDNEIAKLIDANENTARQRDILRSIPGLGQIATAAILTFLPEIGTLDRRQVGSLAGLVPYNRDSGQWKGKSFISGGRKPLRDALYMPALVAMRFNPDLKAKYSALRAAGKPAKVAIVAVMRKLIETANALVKADRDWVKKTA

SEQ ID NO: 11166 - protein, 343 aa, unidentified
  source 1..343: note = protein_ad46335
  REGION 7..148: note = RuvC_domain
  SITE 10: note = RuvC_P1
  SITE 53: note = RuvC_P2
  SITE 88: note = RuvC_P3
  SITE 90: note = RuvC_P4
  SITE 93: note = RuvC_P5
  REGION 211..294: note = Tnp_domain
  SITE 219: note = Tnp_P1
  SITE 249: note = Tnp_P2
  SITE 257: note = Tnp_P3
  SITE 258: note = Tnp_P4
  SITE 270: note = Tnp_P5
MNDIKVLGIDLGKDICSVVGLDDAGQVLLRRRMRRDSVLKLAAGLPACVMSMEACCGAHHLGRQLREQGHDVRLMSPEYVRPYVKAQKNDDRDAEAIAEAATRPTMRFVDLKTDEQLDMQSLHRARDRLIGERTTLINQLRAVLLERGIVIAKGRRKLEIQLDRLLAGEIAISGRIRILIEDMRNEWRALDERIGAFDVEFANLARTDASMRLLATIPGIGPLNATALVASVGRAETFNRGRDLAAWLGLVPRQMTTGGKPQLLGITKRGNGYLRRMLIHGARAALPSLARGKTLMGEWLRGLLSRAHMNTAVVALAAKMARIIWAVLRSGRPFDLKATSSTA

SEQ ID NO: 11167 - protein, 341 aa, unidentified
  source 1..341: note = protein_bfb53a9
  REGION 7..149: note = RuvC_domain
  SITE 10: note = RuvC_P1
  SITE 53: note = RuvC_P2
  SITE 88: note = RuvC_P3
  SITE 90: note = RuvC_P4
  SITE 93: note = RuvC_P5
  REGION 210..295: note = Tnp_domain
  SITE 218: note = Tnp_P1
  SITE 248: note = Tnp_P2
  SITE 256: note = Tnp_P3
  SITE 257: note = Tnp_P4
  SITE 269: note = Tnp_P5
MNEIGIIGLDLAKQVFQIHGASPDGRVVLRKKLGRGRMLEFFAKLPCCIVAMEACASAHYWGREIGKLGHEVRLINPSYVKPFVKRQKNDAADAEAIAEAASRPTMRFVPIKSAEKQASSMTFKVRDLLVRQRTQTINALRGHLMEYGLVAAQGMQNVPRLRQLIETHPDMPEIARSLSFGLLQHIESLTDKINVVEQDLRTRARQDEVASRLTTIPGIGAICATAMEALAPSAAAFSKGRDFAAWIGLTPKQNSSGGKERLGKTSKMGQRDLRRLLIIGATTVVRWARRRGAPAGTWLARMLLTKPPKLIAVALANKLARIAWALMARGGVYEAPAPGSA

SEQ ID NO: 11168 - protein, 342 aa, unidentified
  source 1..342: note = protein_c6213e1
  REGION 7..149: note = RuvC_domain
  SITE 10: note = RuvC_P1
  SITE 53: note = RuvC_P2
  SITE 88: note = RuvC_P3
  SITE 90: note = RuvC_P4
  SITE 93: note = RuvC_P5
  REGION 212..300: note = Tnp_domain
  SITE 220: note = Tnp_P1
  SITE 250: note = Tnp_P2
  SITE 258: note = Tnp_P3
  SITE 259: note = Tnp_P4
  SITE 271: note = Tnp_P5
MSKITTVGMDLAKNVFHVVCCDARGKMLRKRMLRRGQVLAYFAKLERVLVGMEACAGAHYWARELEALGHEVKLIPPQYVKPYVRGNKHDYNDALAIAEAVVRPEMRFVPVKTPEQQDIQALQRLRERCIADRTALSNQIRGLLGEYGIVLPQGVHTLRRRLPLILEDAENGLSDLFRRLLAESYRRLQALESHIEFFTKELENYSRQNEAVRRLEAIPGYGPVVAPVFYSQIGDGRAWRRGRDVSASLGVVPRQYSSGGKERLQGISKRGDGYLRSLLIHGARSVVRAAEGKDDRLSRWVNRIRAERGYNKAVVAMANKMARIGWAILRNNTEYQPDYRPV

SEQ ID NO: 11169 - protein, 424 aa, unidentified
  source 1..424: note = protein_f204c53
  REGION 9..157: note = RuvC_domain
  SITE 12: note = RuvC_P1
  SITE 63: note = RuvC_P2
  SITE 97: note = RuvC_P3
  SITE 99: note = RuvC_P4
  SITE 102: note = RuvC_P5
  REGION 259..347: note = Tnp_domain
  SITE 267: note = Tnp_P1
  SITE 298: note = Tnp_P2
  SITE 306: note = Tnp_P3
  SITE 307: note = Tnp_P4
  SITE 318: note = Tnp_P5
MKVTYPTCCGVDVHKSFLVATIIKTTNGFEPSYQKKRFSTFNNSILQFKNWLLENNCFDVCMESTGKYWIPVFNLLEDNINVTIANPKWVKAVKGNKDDTKDSKWIGDLFRLGLVRGSYIPCKKIRILREYTRYRYKLVSCRSSEKNRYQNALTVCNVALDSVVSDIFGKSSTSIIDYLLQHSGTSINHEEIASKLLKRLKSKEDAVIESIEGYQMTDSQKYRMRLIRAHMDYITAEINDVDSMIKTMISSDPDYENAVQLLCTIPGVNHDSAVTIISEIGIDMSQFCTSKRLCCWAGLTPGSNESGGKKKSVRITRAGIYLKPALVQCAHAAVKSDKSPYYKKKYESLAKRRGKKRAIIAIARMILTAIYQMLSTGETWNPSDLYKIDMPQALVDKQKAKAIKQAKKLLQQEGILPLDEPIAS

SEQ ID NO: 11170 - protein, 343 aa, unidentified
  source 1..343: note = protein_7b63e51
  REGION 7..149: note = RuvC_domain
  SITE 10: note = RuvC_P1
  SITE 53: note = RuvC_P2
  SITE 88: note = RuvC_P3
  SITE 90: note = RuvC_P4
  SITE 93: note = RuvC_P5
  REGION 212..303: note = Tnp_domain
  SITE 220: note = Tnp_P1
  SITE 250: note = Tnp_P2
  SITE 258: note = Tnp_P3
  SITE 259: note = Tnp_P4
  SITE 271: note = Tnp_P5
MQTVTTIGFDIAKSVFQVHGVDAAGQVVVRRQLKRRQVMAFFEKLPPCLVGIEACASSHYWSRQLQALGHGVRLMPPAYVRPYVKRQKNDRADAEAICEAVTRANMRFVPTKTPEQQSGLMLHRARHLFIRQQTSVINAIRAHLAEFGITAPVGRRGVEDLLRVVADPSDKRVPEVVRACLGALGNQLLNLKKQILNFDRMIMAWHRSNQTSKRLNCIPGVGPLLATALVASVADPKTFRSGRNFSAWIGLVPKQHSSGGREKLSSISKQGDRYLRSLFVAGAFAVIRYAKIHGTKHRPWLTALLTRRPTKVAAIALANKLARMAWAMMATGARYNYPASLKV

SEQ ID NO: 11171 - protein, 412 aa, unidentified
  source 1..412: note = protein_a3e37fa
  REGION 5..165: note = RuvC_domain
  SITE 8: note = RuvC_P1
  SITE 62: note = RuvC_P2
  SITE 102: note = RuvC_P3
  SITE 104: note = RuvC_P4
  SITE 107: note = RuvC_P5
  REGION 273..359: note = Tnp_domain
  SITE 281: note = Tnp_P1
  SITE 312: note = Tnp_P2
  SITE 320: note = Tnp_P3
  SITE 321: note = Tnp_P4
MRLFAGDDWAEDHHDVEVMDQAGKVLARKRLPEGAAGMAQLHALIGQFVPEDDTDGTEVVIGIETDRGPWVAALIAAGYTVYPVNPLQASRYRERHGVSGARSDAGDAHMLADMVRTDSRQLRSAAGDSPEAAGIKVLARTHKTMIWERTRAVQRLRHQLREYFPAALEAFDGLDAADTLELLGRAPEPARAARLTRAQVSAALKRARRRNIKDKTDAILAALRSEQLGQPEALTLAYAATVRSLIAVITVLNEQVKALQGQVEEHFGRHPDAEIYPSQPGIGKVLGARVLGELGDGPARYRDGKARRNYAATSPLTRASGKKKVVAARFIHNDRLVDALNAWAFSSLNASPGARAYYDELRARGIEHNDALRRLANRLVGILHGCLKTRTLYDEAIAWGHRQNLPQSSVAA

SEQ ID NO: 11172 - protein, 415 aa, unidentified
  source 1..415: note = protein_ce3bb86
  REGION 21..177: note = RuvC_domain
  SITE 24: note = RuvC_P1
  SITE 73: note = RuvC_P2
  SITE 114: note = RuvC_P3
  SITE 116: note = RuvC_P4
  SITE 119: note = RuvC_P5
  REGION 283..369: note = Tnp_domain
  SITE 291: note = Tnp_P1
  SITE 321: note = Tnp_P2
  SITE 329: note = Tnp_P3
  SITE 330: note = Tnp_P4
  SITE 342: note = Tnp_P5
MGILLADKRKEVSMTAAQFWAGVDVGKEVHWVCVVDDTGAVVLSRKLDNDEQCIRALIGEIDALGEQVSWTVDLTTVYATLLLTVLADAGKSVRYLAGRAVWQASVTYRGGEAKTDAKDARVIADQSRMRGTDLPVLHPDDDLITELRMLTAHRADLVADRTRTINRLRQQLVAVCPALERVAQLTQDRGWVVLLSRYQRPKAIRQSGITRLTKILTDAGVRNAHTIAEAAVVAAKTQTMRLPGEEVAAGLVAELAQGVIALDDRIKTTDADIEGRFRNHPLAEVITSMPGIGFRLGAEFLAVVGDPALIGSADQLAAWAGLAPVARDSGKRTGRLHTPKRYSRRLRRVMYMSALTAIRCDSASRAYYQRKRDQGKRPIPATICLARRRTNVLYALIRDNRTWQPSSPPIARTAA

SEQ ID NO: 11173 - protein, 408 aa, unidentified
  source 1..408: note = protein_07cad29
  REGION 4..163: note = RuvC_domain
  SITE 7: note = RuvC_P1
  SITE 60: note = RuvC_P2
  SITE 100: note = RuvC_P3
  SITE 102: note = RuvC_P4
  SITE 105: note = RuvC_P5
  REGION 273..359: note = Tnp_domain
  SITE 281: note = Tnp_P1
  SITE 312: note = Tnp_P2
  SITE 320: note = Tnp_P3
  SITE 321: note = Tnp_P4
MLLIGDDWAEDHHDVEIQDEAGRKLAAARLPEGVEGIAKLHELVAKHGGGDLDAAEVVVGIETDRGSWVQALIASGYRVYAINPRQVARFKERYASSGAKSDKGDAHALADMVRIDRAQLRPVAGDSAQAQAVKVVARAHQTLIWERTRTFQRLRSMLREYFPAALNAYAGLALTSTDALELLIKAPTPAAGAKLTRTQITGVLARARRRDRDTKAAAIQTALRQRQLGLPEPVTAAYAATATAHAHLIIALNAQIAAIEEQVKAHFRTHPDAEIYLSMPGIAEITGARVLAEFGDDPTRYASAKARKNYAGTSPITRASGKSHTVQARYVRNNRLADALQTQAFSALRASPGARRYYDKQRARETGYNPALRQLGNRLVGILHGCLKTRTLYDEATAWSHHTQSHAA

SEQ ID NO: 11174 - protein, 391 aa, unidentified
  source 1..391: note = protein_0660fbf
  REGION 1..148: note = RuvC_domain
  SITE 45: note = RuvC_P2
  SITE 85: note = RuvC_P3
  SITE 87: note = RuvC_P4
  SITE 90: note = RuvC_P5
  REGION 256..342: note = Tnp_domain
  SITE 264: note = Tnp_P1
  SITE 295: note = Tnp_P2
  SITE 303: note = Tnp_P3
  SITE 304: note = Tnp_P4
MDATGRTLARARLPEGVAGIARLHAMIGAQLGDDVEDAAGLVKVGIETDRGLWVAALVAAGYEVFAVNPLQAARYRDRLGVSGAKSDAADAHMLADMVRTDAHQLRPVAADSAEAEAVKVVARMHKTLIWERTRATQRPRHALRDYFPAALVAFDDLDAADALELLAKAPDPDHAARLSLAQISAALKRARRRDIPTKAAAIQAALRSEQLRQPAVVTTAYAASVRALIAVLSTLNEQVSALQGQVEAHFGQHPDAEIILSQPGLGAVLGARVLAEFGDAKQRYASAKARKNYAATSPVTRASGKRKVVAARFVHNDRLIDALMTQAFAALRVSPGARAYYDRQRARGATYNAALRQLANRLVGILHGCLRTGRLYDEATAWSHHLTEAAA

SEQ ID NO: 11175 - protein, 421 aa, unidentified
  source 1..421: note = protein_20c3430
  REGION 19..171: note = RuvC_domain
  SITE 22: note = RuvC_P1
  SITE 70: note = RuvC_P2
  SITE 108: note = RuvC_P3
  SITE 110: note = RuvC_P4
  SITE 113: note = RuvC_P5
  REGION 278..364: note = Tnp_domain
  SITE 286: note = Tnp_P1
  SITE 317: note = Tnp_P2
  SITE 325: note = Tnp_P3
  SITE 326: note = Tnp_P4
  SITE 337: note = Tnp_P5
MQSATSTTLPETPLNDVTAGIDWAVDDHAACIVDGRGREIARVMVEHTTTGLRDLVIFLAKHGVDEVAIERPDGPIIDVLLEAELTVVVISPNQVKNLRGRYGSAGNKDDRFDAFVLADTLRTDRARLRRLEPDTQATTALRRACRTRKDLVAHRVAAANQLRAHLSIVFPGAVGLFADLDSEISLAFIARFDTQERADWLSPARLGKWLASVGYSGRTDPAMLHAHLTQAPRGLTGPAATAEAGSTHAMIALLTTLVEQIKILGRQIGDQLDAHADGHIFTSLPRSGRVRAARLLAEIGDCRAKYPTPESLACLAGVAPSTRQSGKMRVVGFRWACDKQLRDAVTDFAGGSRHANLWAADLYDRSRARGHDHAHAVRILARAWLYVIWHCWQDNAAYDPDKHHALQRVLTIRRATQNQAA

SEQ ID NO: 11176 - protein, 339 aa, unidentified
  source 1..339: note = protein_0835f97
  REGION 6..148: note = RuvC_domain
  SITE 9: note = RuvC_P1
  SITE 52: note = RuvC_P2
  SITE 87: note = RuvC_P3
  SITE 89: note = RuvC_P4
  SITE 92: note = RuvC_P5
  REGION 211..299: note = Tnp_domain
  SITE 219: note = Tnp_P1
  SITE 249: note = Tnp_P2
  SITE 257: note = Tnp_P3
  SITE 258: note = Tnp_P4
  SITE 270: note = Tnp_P5
MTVKTVGLDLAKDVFQVHCVSATGRKIINKKIKRAKLISFFETLPRCVVGMEACGSSHHWARELSRLGHDVRLMPAAYVKPYVKRGKTDAADAEAICEAVRRPTMRFVEIKSEDQQAVLAIHRARDLVVRQRTQVVNMIRSILREFGHILPTGIEAASKFAREHGTEEQLGMPEIADGILGVMCHQLNGLNARVDGLTKLIEQHAWLDADARRLMRMPGIGPITASAVVATIGDAKQFETGRDLAAWLGLTPLNKSSGGRERLGRITKKGDRYIRKLLIIGMTSRALMAKNSPEKADTWTAKLLDQKPFRLATVAMANKSARIIWAILTKGEEYRQPIA

SEQ ID NO: 11177 - protein, 403 aa, unidentified
  source 1..403: note = protein_a8f7be6
  REGION 4..161: note = RuvC_domain
  SITE 7: note = RuvC_P1
  SITE 60: note = RuvC_P2
  SITE 100: note = RuvC_P3
  SITE 102: note = RuvC_P4
  SITE 105: note = RuvC_P5
  REGION 266..353: note = Tnp_domain
  SITE 274: note = Tnp_P1
  SITE 304: note = Tnp_P2
  SITE 312: note = Tnp_P3
  SITE 313: note = Tnp_P4
  SITE 326: note = Tnp_P5
MFYCGIDIAKYKHEAAVIDESGNAMLDSISFANSKDGCEKLLALFQRLDVSREDLLIGMEATGHYWMSVYGYLLEHGFEAKVINPIQSEAFRKMYIRQTKNDRKDSFIIAQIMRFGQFSSTGLSEETIVAMRQLSRYRLALVDACGDCKRRVIALLDQVFPEYDALFSDTFGVASKEVLANYPTPEDLLNVSTRKLSALLEKASRGRLGKEKAEQLKDAAANSFGLSFAKDAFAFQIRQLIEQLEFLEGQIAELEEQISFLLKQTGSYITTIPGIGDTLGAIILSEIGDIHRFDAPNKLVAFAGLDVRVTQSGEFTGTRQKISKRGSPYLRRAIWLAASRAAFCDPILSAYYQSLRARGKHHLTAIGAVSRKLCNTIYTILKDNRPWQPVPPRDKKVSNNTEQ

SEQ ID NO: 11178 - protein, 403 aa, unidentified
  source 1..403: note = protein_596165a
  REGION 4..160: note = RuvC_domain
  SITE 7: note = RuvC_P1
  SITE 59: note = RuvC_P2
  SITE 99: note = RuvC_P3
  SITE 101: note = RuvC_P4
  SITE 104: note = RuvC_P5
  REGION 273..360: note = Tnp_domain
  SITE 281: note = Tnp_P1
  SITE 312: note = Tnp_P2
  SITE 320: note = Tnp_P3
  SITE 321: note = Tnp_P4
  SITE 333: note = Tnp_P5
MFTLGIDVSKKSSRYVLLNPEGRKVKSFSLDNSYEAFQDLLERFKELSIPKEDLLVGLEASGAFWENLYSHLKENGFSVVLLNPYHTNKFREALAKKAKTDDIDALIIAQLLRTGEYVQSQVAEELIQSLRELTKLRYELVKERKNYQRQVFSVLAVVFPEHEKTALKNPFSVASLAIFQAFPTAQDLAQAKAKQIEKIVRSIKGNNFDLKEIETLLQTAKRSIYAGRARKARGTSLRILLRHVENLSSSIEELENEIKQILSPRQSEDSFPGENLLTIPGVGEKTVAAVLSYLGTNGANFSTSTKAVGYIGFFPKIHQSGQSQWDNVISKRGPTLLRWALYMAAVACLRHNPEMKSLYHKKLSQGKTEKQALICVAKKLLQIMLSMLKSGQPYNPSRVYVTC

SEQ ID NO: 11179 - protein, 352 aa, unidentified
  source 1..352: note = protein_c6f1619
  REGION 4..159: note = RuvC_domain
  SITE 7: note = RuvC_P1
  SITE 59: note = RuvC_P2
  SITE 100: note = RuvC_P3
  SITE 102: note = RuvC_P4
  SITE 105: note = RuvC_P5
  REGION 222..307: note = Tnp_domain
  SITE 230: note = Tnp_P1
  SITE 260: note = Tnp_P2
  SITE 268: note = Tnp_P3
  SITE 269: note = Tnp_P4
  SITE 280: note = Tnp_P5
MVTVGIDPHKRVHVAVAVDAAGSRIGKPLTVKNDATLITALLKWIRSITDDTNLTWAIEDGHGFARRLADGLLLAGHEVVWVPTRLTAAHRKLHAATGSKSDLVDAIAAAHAAIASPGLDRHRIDERVRELRVLVDYRADIIKRRTMAINQLKSHIHVWLDHTPGDLARNKPLAAVTALVNAAQLGTHVRQVLTDMIAEIAELNRRIHDLDTTVRDLVGPLAPNLLDIVGISHTSAAVLIAEIGDITRFPNSAKLARYTGCAPVPVYSSDNERHRLHRGGNRRLNSVLYTAAIVQKRFHPNAQALLARHETTKGTRGARRILQRHLVDVVHRAMTADQVTWQHPITRYQPAA

SEQ ID NO: 11180 - protein, 387 aa, unidentified
  source 1..387: note = protein_1662f3c
  REGION 4..159: note = RuvC_domain
  SITE 7: note = RuvC_P1
  SITE 57: note = RuvC_P2
  SITE 98: note = RuvC_P3
  SITE 100: note = RuvC_P4
  SITE 103: note = RuvC_P5
  REGION 263..347: note = Tnp_domain
  SITE 269: note = Tnp_P1
  SITE 299: note = Tnp_P2
  SITE 307: note = Tnp_P3
  SITE 308: note = Tnp_P4
  SITE 320: note = Tnp_P5
MYFVGIDISKFKHDCAVIDDLGDVVTPSWSFRNDCEGFSLLADLLTNLGEDIKIGFESTGHYGQNLKLFLESNNFTFMEFNPILISRFVSSKSLRKTKTDSIDALLIAQYLMTVECKPYPASFYHMDKLKSLTRFRDSLVRQRSRQLVELTNVLDKVFPEFKPFFKHRFSVTALYILSNYTMPEKIANMNARSYEIIRKLSRGKFTMSAFIQLKTLAKNTVGQSDDYLLQEIDVLLELYNQLDSKIQEIEEQVVACIRGINPPMLSIPGIGALSAAIILSEYGDFSKYDNPAKLLSFAGLDPGYFQSGQSEHTGHMVKHGSSHLRYALMNCCLPLTSNEPVFAEYYAKKRAEGKPHCVAMSHVAKKLLRVIYTLQTTNVTYDPNLIR

SEQ ID NO: 11181 - protein, 346 aa, unidentified
  source 1..346: note = protein_9d6f933
  REGION 13..155: note = RuvC_domain
  SITE 16: note = RuvC_P1
  SITE 59: note = RuvC_P2
  SITE 94: note = RuvC_P3
  SITE 96: note = RuvC_P4
  SITE 99: note = RuvC_P5
  REGION 218..305: note = Tnp_domain
  SITE 226: note = Tnp_P1
  SITE 256: note = Tnp_P2
  SITE 264: note = Tnp_P3
  SITE 265: note = Tnp_P4
  SITE 277: note = Tnp_P5
MTYNNPKGVVAVLGIDLAKKSFQLHGVDGHGKVVLMKKLRRNKLRAFVAQLPICLIGVEACGGANYWKRTFERYGHSVKMMAPQFVKPYVKSNKNDVIDAEAICEAVQRPSMRFVPSKSIAQQDIQSIHRIRSQVVARRTAQANQIRGLLMEYGIIIPKGIANVRKEIPGILEEADNELTMLFRTLLNDLYEEMVHLEERIEKLENELKTVCRENSHCQRLLTIPGIGLLSATALVAAIGDISVFKNGRELAAWLGLVPRQQSTGGKPTLLGISKRGDTYLRTLLIHGGRSIVRVAEKYQDKRNQWVGKLEKRRGNNIAAVAVANKNVRIAWVLMSKQTNFQVSMI

SEQ ID NO: 11182 - protein, 339 aa, unidentified
  source 1..339: note = protein_8fa025f
  REGION 7..148: note = RuvC_domain
  SITE 10: note = RuvC_P1
  SITE 53: note = RuvC_P2
  SITE 88: note = RuvC_P3
  SITE 90: note = RuvC_P4
  SITE 93: note = RuvC_P5
  REGION 207..292: note = Tnp_domain
  SITE 215: note = Tnp_P1
  SITE 245: note = Tnp_P2
  SITE 253: note = Tnp_P3
  SITE 254: note = Tnp_P4
  SITE 266: note = Tnp_P5
MTTPAIIGIDLGKRTFHLHAQNRHGKPLLRKALSRQKLLPHLAQQPACLVVMESCAGCHYWARQIQALGHDVRLVPPQYVKPFVKTNKNDFVDAEAICEAASRPTMRFAVIKSEDQQLLSALHRSRQGLVAERTAVMNRLHGFLLEFGVALPVGHAAIRRLDTYLEHLPTAFVALVRRLQAHYHTLCDEIAALEEEVEQLTRRDDAARRLMTIPGIGPITASAIVGTAGDASHYRSGREFAASLGLVPRQYATGGKPRLLGISKRGDGHLRRLLVQGARAVMQRQNQRNDRLGDWLRELGCRRHSNVVACALANKMARIAWAILAKGGEFRPSPGATLA

SEQ ID NO: 11183 - protein, 402 aa, unidentified
  source 1..402: note = protein_6778e13
  REGION 4..160: note = RuvC_domain
  SITE 7: note = RuvC_P1
  SITE 57: note = RuvC_P2
  SITE 97: note = RuvC_P3
  SITE 99: note = RuvC_P4
  SITE 102: note = RuvC_P5
  REGION 274..361: note = Tnp_domain
  SITE 282: note = Tnp_P1
  SITE 312: note = Tnp_P2
  SITE 320: note = Tnp_P3
  SITE 321: note = Tnp_P4
  SITE 334: note = Tnp_P5
MNAVGIDVSKGRSTVAVVKPFGETVAKPFEVRHTKSGMNDLVNYLNTLDGECRVVLEHTGRYYEPMVRWLSGAGLFVSAVNPKLIKNFDNNSLRRVKTDKADAKKIARYALDKWPELRQYTAMDKIRTQLKLMNRQMSFYQKQQTAYKNNLIALVDETYPGANKFFTSPKRPDGSEKWIDFIEKFWHVDCVCNISLSSFTDKYQKWCKKHGYNFQPDKPKEIRDASLELIAILPKDDMTKMFIHQAVEQLNAISKAVEELRQQMDSLASKLPEYPVVMSMFGVGTTLGPQLIAEIGDVHKFTKRSQLTAFAGVDPGVNESGDYAQKSVHTTKHGSPYLRKTLYLIMDVLIKLQPEDDPVYRFMVKKRDEGKPYYVYMTAGANKFLRIYFGKVKEYLSSLPLE

SEQ ID NO: 11184 - protein, 406 aa, unidentified
  source 1..406: note = protein_e5e6d6a
  REGION 4..159: note = RuvC_domain
  SITE 7: note = RuvC_P1
  SITE 59: note = RuvC_P2
  SITE 96: note = RuvC_P3
  SITE 98: note = RuvC_P4
  SITE 101: note = RuvC_P5
  REGION 267..353: note = Tnp_domain
  SITE 275: note = Tnp_P1
  SITE 306: note = Tnp_P2
  SITE 314: note = Tnp_P3
  SITE 315: note = Tnp_P4
MKFCGIDWANDHHDALSIDEDGHQLGSIRVAHSPEGLSQLDSYLERIAGPGGKDQLACIVETTQGLLIAHLLEQGWAVYPVNPRTVERRRAPSGAKTDTIDAYLLAKTGRADFADLRRLNPDSEQIQELKTLTRDQDGLIQMQTRLVNQLTACLKAYYPVALEVFGKLQQPSTLAFLRAYPTLQAARAASVEELATLLKQARYPGARQKAQLIVTHLQQPALQATEVTTRTKARLMLALLDQLEPLLKQIAEYDKEIERLFLSHADSELFQALPGAGARLAPRLLAELGDDRSRYESASSLQALAGTSPVLFQSGTYQKAHRRLGCIKPWRNALHQFAWQSTHQEAWAKEYYQRKRAEGKSHTVAVRALANVWARILYAVWKTKEPYHTATFEAARRAHALRQPAA

SEQ ID NO: 11185 - protein, 338 aa, unidentified
  source 1..338: note = protein_b68efc9
  REGION 7..148: note = RuvC_domain
  SITE 10: note = RuvC_P1
  SITE 53: note = RuvC_P2
  SITE 88: note = RuvC_P3
  SITE 90: note = RuvC_P4
  SITE 93: note = RuvC_P5
  REGION 212..299: note = Tnp_domain
  SITE 220: note = Tnp_P1
  SITE 250: note = Tnp_P2
  SITE 258: note = Tnp_P3
  SITE 259: note = Tnp_P4
  SITE 271: note = Tnp_P5
MNKLTRIGLDLAKNVFHLVAFDAQGKEIKKKMLRRSQVLSDFAQLPPCLVGMEACASAHYWAREMELLGHTVRLIPPQHVKPYLRGNKNDYNDARAIAEAVTRPGIHFVAIKTPQQQDIQALHRQRQGAIADRTALCNRLRGLLGERGLVFPKGLSALRRRLPAILEDADNGLSDTCRRLLARDYQRLQELDDHIDAYTQELRLHSQQSDACQRLQSIPGFGPIVASVFHSQVGDGRAYRRGRDVAASIGLVPKQHSSGGKNVLLGISKRGDRYLRSLLVHGARAVVIQAAHKDDRLSRWINKLRAERGYNKATVALANKMARIGWAVLANNTVYRTA

SEQ ID NO: 11186 - protein, 398 aa, unidentified
  source 1..398: note = protein_0ea2bdd
  REGION 10..164: note = RuvC_domain
  SITE 13: note = RuvC_P1
  SITE 61: note = RuvC_P2
  SITE 101: note = RuvC_P3
  SITE 103: note = RuvC_P4
  SITE 106: note = RuvC_P5
  REGION 271..356: note = Tnp_domain
  SITE 279: note = Tnp_P1
  SITE 308: note = Tnp_P2
  SITE 316: note = Tnp_P3
  SITE 317: note = Tnp_P4
  SITE 329: note = Tnp_P5
MKTDDIQIFLGLDVGKTDHWGCAVTAGGTKIWNKTLPNDEAKLTKVYQDLSAQGAVLVVVDQPATIGALAVAVAQHLGITVAYLPGLTMRRIADMYPGTAKTDEKDAFIIADAARTMPHTLRSLQVSDEEEAALGMLTGFDLDLSRQITQTSNRIRGLFTQIHPCLERVVGPWLEHDAVLEVLAAWPTPAALKHAGKARIDAKLTKHGARRHTAWAGAILDAVDEQTVVVVGTEAAGLVVPHLARQLIALHAQRADVATHLEAMVEAHPLCPVLTSMPGVAVRTTAVFIAETSGKTFDSAAALASYAGLAPVTRQSGTSIKSERVSHSGNKRLKRALFLSAFASIRFDPASRAYYDQKRAQGKRHNQALIALAHRRLTVLFAMIRDGSLYDAPAVEAA

SEQ ID NO: 11187 - protein, 401 aa, unidentified
  source 1..401: note = protein_df176d1
  REGION 4..160: note = RuvC_domain
  SITE 7: note = RuvC_P1
  SITE 57: note = RuvC_P2
  SITE 97: note = RuvC_P3
  SITE 99: note = RuvC_P4
  SITE 102: note = RuvC_P5
  REGION 275..363: note = Tnp_domain
  SITE 283: note = Tnp_P1
  SITE 313: note = Tnp_P2
  SITE 321: note = Tnp_P3
  SITE 322: note = Tnp_P4
  SITE 335: note = Tnp_P5
MISVGIDVSKGKSTVCILKPYGEIVSRPFEVKHLESDLESLAQMILRLDGEVKVTMEATGIYHLPVLNYLQEQGIFVAVINPFEMKEYACRGIRRVKTDRQDAITISNYGIDNWFRLENHKGSDETYAELKLLGRQYCHYMELHVKALLELTHMLDYTMPGIKGKIHSWNEGNGKDKLSDFVERYWHFDNIVSMKKDEFVEDYIKWAKENKYHQNRSKALEIYELASDGIATLSANTPSTKMLVLEAVRVLREIDNTLMKIITRMKELAKTLPEYETVRAMGGVGDVLAPKLIAEIGDVRRFHNGKALIAYAGIDAPPYQSGQFTGTNRKISKRGSKLLRKIGYETMRVLKTHKEPEDAAVYRFILKKEAEGKSKKQAKIAGLNKFLRIYYARVSEVYKSI

SEQ ID NO: 11188 - protein, 414 aa, unidentified
  source 1..414: note = protein_0becb8d
  REGION 10..157: note = RuvC_domain
  SITE 13: note = RuvC_P1
  SITE 62: note = RuvC_P2
  SITE 98: note = RuvC_P3
  SITE 100: note = RuvC_P4
  SITE 103: note = RuvC_P5
  REGION 227..313: note = Tnp_domain
  SITE 235: note = Tnp_P1
  SITE 266: note = Tnp_P2
  SITE 274: note = Tnp_P3
  SITE 275: note = Tnp_P4
  SITE 286: note = Tnp_P5
MAKNDRIVVGGVDTHKDVHVAAVVDEIGRILGTSAFPTTARGLAELHAWMRSFGDVARVGVEGTGAYGAGLARHLGGEGVEVVEVNRPNRQMRRRRGKSDTVDAEAAARAALNGEATVAPKAQVGVVESIRVHRVAFVSARSHRTQVALQIRDLIVTAPPELRAVLGPLATEERVARCARFRLMGDPADPSVGVKSALRSLARRHEALTIEMAELEATLDRLTAVANPALRGAKGVGTDVAAILLTAAGDNPGRLRHEAAFAAMCGVSPIQASSGKTQRHRLNRSGNRQANHALWRIVNVRLTCDPASKAYLERRTAEGKSRREIVRCLKRYVAREIFRLLVVPEAVPDGADLRTARIARGLSQTPVATALDTSVNAISRLERSRIFDTELARRYESFLASISENEPHAVPAAA

SEQ ID NO: 11189 - protein, 397 aa, unidentified
  source 1..397: note = protein_9527fd7
  REGION 5..158: note = RuvC_domain
  SITE 8: note = RuvC_P1
  SITE 59: note = RuvC_P2
  SITE 99: note = RuvC_P3
  SITE 101: note = RuvC_P4
  SITE 104: note = RuvC_P5
  REGION 264..354: note = Tnp_domain
  SITE 272: note = Tnp_P1
  SITE 302: note = Tnp_P2
  SITE 310: note = Tnp_P3
  SITE 311: note = Tnp_P4
  SITE 327: note = Tnp_P5
MSAVVGIDVGAYKHAAAVSRSGEREAERGVFRLSADRAGFDELDRWLERHGPVERVVLESSGHYYWPLASHLHRRGYGVAVVNPLQAKYFAKSRLQRSKSDPADARTLAALGMSEEPRIKDPLLGAEAKEAARFWGGLVKEQAQVRQKLLRLVEIGFPELKECFEDPLCETALAVLREAPTARAAARKRVSTLAETTRPGGRRRLGESKARRLHELAEKTIAPPELDAQMSFEVGMLIQQFDLLDKQIEIAEQRVADVLDSELARRLQTIPGVGPALAATFIAEIGDIWRFDDFDQLASYAGVHPKEQSSGTKGQNPETSWHMAKTGNSYLRSAAYKMAVVGTQHNPLIRAHYLRKRAQGKSAMNAIGHSMSKALAIVWGVWRSGLDFDPTLGGPRT

SEQ ID NO: 11190 - protein, 311 aa, unidentified
  source 1..311: note = protein_04e1b4f
  REGION 24..122: note = RuvC_domain
  SITE 57: note = RuvC_P3
  SITE 59: note = RuvC_P4
  SITE 62: note = RuvC_P5
  REGION 184..267: note = Tnp_domain
  SITE 192: note = Tnp_P1
  SITE 222: note = Tnp_P2
  SITE 230: note = Tnp_P3
  SITE 231: note = Tnp_P4
  SITE 243: note = Tnp_P5
MVRKQLRRSQVLPFFEGLSPCLVGIEACASAHHWGRQLMAVVHEVRLMAPAYVKRGKTDAADAEAIAEAIAEAVTRPTMRFVAVKTEAQPAILMLHKTRDLLVRQRTMLINALRGHLGEFGMVSAQGSAGVQAALRSLILEQERLPELAQAALRGLAGQLETLRAEIERLEHQILAWHRQDATSRRLATIPGIGPITASALAASAPDPALFRSGRQFAAWLGLAPRAHSSGGKKRQAGISKMGDGYLRRLLVVGATAVLRMARQRGVGGAWIQGLLERKKPKAAAVALANKTARIAWVLMARQEVYKPAAA

SEQ ID NO: 11191 - protein, 389 aa, unidentified
  source 1..389: note = protein_cd6a9ec
  REGION 6..161: note = RuvC_domain
  SITE 9: note = RuvC_P1
  SITE 60: note = RuvC_P2
  SITE 100: note = RuvC_P3
  SITE 102: note = RuvC_P4
  SITE 105: note = RuvC_P5
  REGION 265..352: note = Tnp_domain
  SITE 273: note = Tnp_P1
  SITE 303: note = Tnp_P2
  SITE 311: note = Tnp_P3
  SITE 312: note = Tnp_P4
  SITE 325: note = Tnp_P5
MYSYFVGIDIAKNTHWASCLSSDGEIILEPFSFSNDNSGFQKFISKLESLDKTKILIGLESTAHYGENIISYLFNLDYNIGLINPIQTANLRRSNIRKTKNDKVDTKIIIKALTLGNYSLITSRDINNLKLKGLCRSRRNLVTMRSKAKIQLVSYLDQIFPELAQFFKGNLHLNVSYQLLKEYSSPKQISSLHLPKLSNILHDNSHGRYNKQDAIRLRELAKNSVGIDNPSLSLQIKHSILQIELYNEQIAEVEALYKQILDEMNTPILSIPGMSYNQAAVIIGCIGDINRFEHSCQLLAYAGLDPSVIQSGNFQARSTRMSKRGSGMLRYSLVYSAHNVVKNNKTFRDYYELKRSQGKSHYCALGHVAHKLVRIIFKMLKDNVAFNLD

SEQ ID NO: 11192 - protein, 344 aa, unidentified
  source 1..344: note = protein_cc4f8b3
  REGION 6..148: note = RuvC_domain
  SITE 9: note = RuvC_P1
  SITE 52: note = RuvC_P2
  SITE 87: note = RuvC_P3
  SITE 89: note = RuvC_P4
  SITE 92: note = RuvC_P5
  REGION 211..297: note = Tnp_domain
  SITE 219: note = Tnp_P1
  SITE 249: note = Tnp_P2
  SITE 257: note = Tnp_P3
  SITE 258: note = Tnp_P4
  SITE 270: note = Tnp_P5
MTVHVCGIDIGKTVFHLVGLSKEGHVVQKKRFSRKQLLTYMVNAPACLVGIEACPGAHFLARALLAQGHNVKLMPAEYVRPFVKSNKNDYVDAEAIAEAVQRPTMRFVPIKNETQLDLQALHRVRDRWVGRKTAVINQLRGFLLEHGITVVTGPAHLKRQIPSILEDADNLLSPRMRTLLLELRDEWVKLEEQIDAVNRELAEVANKDDGCRRLLTIPGIGPLTATALTAAIGNGAAFRKSRDLAAWLGLVPRQHSTGGKARLLGISKRGNPYLRRLFVHGGRAVLARVKRERHQFGGWLDRLEARSPRNVAIVAMANKIARMAWAILTSGQSYRASADVIAIT

SEQ ID NO: 11193 - protein, 391 aa, unidentified
  source 1..391: note = protein_ce21be3
  REGION 9..162: note = RuvC_domain
  SITE 12: note = RuvC_P1
  SITE 60: note = RuvC_P2
  SITE 101: note = RuvC_P3
  SITE 103: note = RuvC_P4
  SITE 106: note = RuvC_P5
  REGION 225..309: note = Tnp_domain
  SITE 232: note = Tnp_P1
  SITE 262: note = Tnp_P2
  SITE 270: note = Tnp_P3
  SITE 271: note = Tnp_P4
  SITE 282: note = Tnp_P5
MGVARRVVIGMDPHKRSVTVEVMEADEQIVGHDRFGTDVAGFAELVGFAGQWADRVWAIEGCEGIGRHVAQRLLAAGEQVVDVPAKLSARMRMFATGQGRKTDDTDAHSIALVGVRISGLQPVVSDDQLEMLRLLVDRRRRIGQEHVTKICQLHQLLLELVPGGAKKDLSAAQARKILAGVRPGDEVGKLRKRIALELVVDLERIYLRKKQANKELVTLLKTTGTGLVELHGIGPTGAARLLVEVGDITRFPNRGHFASWTGTAPIDVSSGDRQHHRLSRGGNRQINMVLHMMAVVQLRNHTEGRAYYDRKVAAGKSHNEAMRCLKRRLSDIVYRALLDDYVTAKATGPGGHRGTTHQSSVAGSHPHTSTSDKPLPGPVTTKPTTTLPKAS

SEQ ID NO: 11194 - protein, 416 aa, unidentified
  source 1..416: note = protein_fc9e7ae
  REGION 21..173: note = RuvC_domain
  SITE 24: note = RuvC_P1
  SITE 72: note = RuvC_P2
  SITE 110: note = RuvC_P3
  SITE 112: note = RuvC_P4
  SITE 115: note = RuvC_P5
  REGION 280..366: note = Tnp_domain
  SITE 288: note = Tnp_P1
  SITE 319: note = Tnp_P2
  SITE 327: note = Tnp_P3
  SITE 328: note = Tnp_P4
MLPHWAISEEADRHDPTVRSGGVDWAIDAHAVCVVDAEGRAVDELDLGHTAGGLVERCRRVHRAGARRVAIERPDGPVVEALLSIGLEVVVVSSRSVKALRERYGTSGNKSDRSDAYVLADCLRTDGNRGQSLEPDSAATVTLRAPGRARKDLVETRVAVANPLRAHVRVVFPGAVGLFAEIDSPISLRFLARFPSAARAAWLSEKRPASWLRANGYCGRKPAVVLYARLVEAPAGVDGEEGDARGSIDLGHVAVLTAPRGEIDELNARLEELLDAHPDAVIIRSLPRSASVRAATLITEIGDRRARFTDAGSLARLAGVAPSTRTSGRHRSVTFRFSSNKKLRDAICDFAGDSWRGNARAAQRYRELRAAGRSHPHAERILARGWTLIIWRCWQDRTPYDPARHGAHQRLEPVAA

SEQ ID NO: 11195 - protein, 424 aa, unidentified
  source 1..424: note = protein_26f33eb
  REGION 4..157: note = RuvC_domain
  SITE 7: note = RuvC_P1
  SITE 59: note = RuvC_P2
  SITE 94: note = RuvC_P3
  SITE 96: note = RuvC_P4
  SITE 99: note = RuvC_P5
  REGION 285..371: note = Tnp_domain
  SITE 292: note = Tnp_P1
  SITE 323: note = Tnp_P2
  SITE 331: note = Tnp_P3
  SITE 332: note = Tnp_P4
  SITE 344: note = Tnp_P5
MLGAGIDWAESFHDVALGRPGEGVIEQFRIDHTAAGVNRLVARCLELETDPADVRVVLETRHGLLVETLADAGFTVLPVNPDVVARRRGPAKKKDDAEDARICCLLALDQFLELRKLIPHGELAGELRTIARDDERAARDERRLLNRLRADLLATFPAALAIAGGNLGSPVMLKLLSRWPGHDELAAADPHDIAAFARAASHGWPDRFAARVADALAADRLPVKDYLARAKTGTIALTATQLLAIRDQRRAWERRMAELLLGTARRGHATQAKEPDPGKAVPGGDIYLSFPGLGDRLAARIAGEIGDDITQFATPNGLQCYGGTAPVTRRSGRSEFVVARRLAHNHYLGAAVHQWAFCSLSRSAWAREFYDGKIAAGKSHHSALRALANRWLEILWHCLVKRIRYDETIHIRNRQQAHQHPSAA

SEQ ID NO: 11196 - protein, 338 aa, unidentified
  source 1..338: note = protein_7f93d63
  REGION 6..152: note = RuvC_domain
  SITE 9: note = RuvC_P1
  SITE 53: note = RuvC_P2
  SITE 91: note = RuvC_P3
  SITE 93: note = RuvC_P4
  SITE 96: note = RuvC_P5
  REGION 211..297: note = Tnp_domain
  SITE 219: note = Tnp_P1
  SITE 249: note = Tnp_P2
  SITE 257: note = Tnp_P3
  SITE 258: note = Tnp_P4
  SITE 270: note = Tnp_P5
MSIVAVGIDLAKNVFAVHGVGASGKPELVKPDVKRKKLLELIASLPPCLIGMEACSGAHYWAREFQKFGHTVRIMAPKFVAPYRLGGKHAKNDAADAAAICEAVTRPQMRFVPIKTLDQQSHLFIHRAHQGYVAERTALINRARGLLSELGIVLPQAYKAFKQGVHQVLEDLPGYCNQVIGDMLSEIAHLDERIDQDAKLIAKLAKDDAQSRRLMQLCGVGPTTATAIVASIGNGHDFKNGRQFSAWLGLVPCQNSSGGKTKLGRITKAGDSYLRSLLVLGARSLLLKAPNKTDPVSRWALQLKERTGYGKAVVAIAAKNARMCWAALNLGEGFRVPA

SEQ ID NO: 11197 - protein, 406 aa, unidentified
  source 1..406: note = protein_8898485
  REGION 4..163: note = RuvC_domain
  SITE 7: note = RuvC_P1
  SITE 60: note = RuvC_P2
  SITE 100: note = RuvC_P3
  SITE 102: note = RuvC_P4
  SITE 105: note = RuvC_P5
  REGION 271..357: note = Tnp_domain
  SITE 279: note = Tnp_P1
  SITE 310: note = Tnp_P2
  SITE 318: note = Tnp_P3
  SITE 319: note = Tnp_P4
MLFVGDDWAEDHHDVEVQDEDGKVVKRVRLPEGMAGITRLHDLVGRFVAEDADPSDVLVCIEVDRGPWVRALVAAGYRVFGVDPKQAARHREILGSSGAKSDKGDAHALADMIRTRRNQLRQVAGDSEIAEAVKVVTRAHQTLLWERTRHMLRLRVALRDYFPAALAAYKPLGLTSEAVLRLLAKAPTPETAAKLTINQISATLKGRRDIGAKAAAIQDVLRGEHLGQAPLVTGAYASTVKALAAVITVLNSEIKTLEGEVEAHFGRHPDAEVILSQPGIGVVLGARVLAEFGDAEGRYVSARARKNYAGTSPITRQFGKTKIVQARFVHNDRLVDALHLQASCALLHDPEVRAYYDQLKARDVSHNAALRQVGNRLVGILHGCLKTHTTYDQATAWSHRNHDLAA

SEQ ID NO: 11198 - protein, 344 aa, unidentified
  source 1..344: note = protein_9012747
  REGION 5..158: note = RuvC_domain
  SITE 8: note = RuvC_P1
  SITE 57: note = RuvC_P2
  SITE 97: note = RuvC_P3
  SITE 99: note = RuvC_P4
  SITE 102: note = RuvC_P5
  REGION 220..305: note = Tnp_domain
  SITE 228: note = Tnp_P1
  SITE 258: note = Tnp_P2
  SITE 266: note = Tnp_P3
  SITE 267: note = Tnp_P4
  SITE 278: note = Tnp_P5
MEVAIGVDPAKGSLAVAAVDPLGRVLDAREFSNDPGGHRALLGWIRERGPNRVIGIECSLSYGASVSRHLLGAGEDVREVPTTLTARERRRRHAQGKSDLVDSVAIARIVASGEVLSSAHRVEALTDLRALVDYRDQLVRARTQVANRAHADLVNIRPGYEREVPNLRAKRHQAKARSRLRGDRSVRAELVRRRLGELSRLEGEIVAMDRRIEAMVRKVRTTLTEIPGVGSLIAAKILGEVGDPSRVRSKAAFAVLSGTAPLSASSGQTHRHRLNRGGNRQLNWALHYIALVQCRIFPEAQAYMARQRETGKTHKEAMRCLKRQLSNVVYRHLLADARGVELAA

SEQ ID NO: 11199 - protein, 376 aa, unidentified
  source 1..376: note = protein_472c41c
  REGION 9..163: note = RuvC_domain
  SITE 12: note = RuvC_P1
  SITE 60: note = RuvC_P2
  SITE 100: note = RuvC_P3
  SITE 102: note = RuvC_P4
  SITE 105: note = RuvC_P5
  REGION 270..353: note = Tnp_domain
  SITE 278: note = Tnp_P1
  SITE 308: note = Tnp_P2
  SITE 316: note = Tnp_P3
  SITE 317: note = Tnp_P4
  SITE 329: note = Tnp_P5
MSDGYGVYLGLDVGKEGHHAVGLSPDGKRLHDAALPNTEARLRQLFDKLARHGRVLVVVDQPASIGALPVAVARAAGHQVAYLPGLAMRRIADLHPGAAKTDARDAFVIADAARTLPHTLRRVDVGDETLAELEVLVGFDDDLAGEATRVSNRIRGLLTQIHPALERVLGPKVHHKAVLELLSRCGGPVGLRKAGRRKLVSIAAVHAPRMGERLVEQIMTALDEQTVTVPGTAAAETILPRLADSLRDVLRQRDQVAGEVERILDAHPLASVLTSMPGIGVRTAARILLEVGDGTAFPTPGHLAAYAGLAPVTRRSGSSIRGEHPPRGGNKNLKRAFFLAAFAALICLARRRCDVLFAMLRDKIPYQPRPTSPVPA

SEQ ID NO: 11200 - protein, 355 aa, unidentified
  source 1..355: note = protein_49cdbaa
  REGION 7..149: note = RuvC_domain
  SITE 10: note = RuvC_P1
  SITE 53: note = RuvC_P2
  SITE 88: note = RuvC_P3
  SITE 90: note = RuvC_P4
  SITE 93: note = RuvC_P5
  REGION 213..298: note = Tnp_domain
  SITE 221: note = Tnp_P1
  SITE 251: note = Tnp_P2
  SITE 259: note = Tnp_P3
  SITE 260: note = Tnp_P4
  SITE 272: note = Tnp_P5
MSEVSIIGLDIAKHVFHAHGADERGRVIFSKRIGRGKLLDFFAAQPSCTVALEACGGAHHWARQLTQLGHDVRLIPPAYVKAFVKRQKNDAIDAEAICEAAQRPSMRFVAVKSEEQQAAGLVFRTRDLLVRQRTQLINAIRGHLTEYGWIAPKGPSHVAMLADLIEEDEMANALPEAAHAMFRLMLDLLAGLNGKIADLDKEIARRAREDEVSRRLMTVPGIGPISATAIAALAPPVETFAKGRDFAAWLGLTPLQRSTGGKQKLGATSKMGERTLRRLLIIGSSAVVQQASKRGAPKGSWLEQMLARKPRMLVTVALANKMARIVWALLVKQENYRAPVAAKDVILADLRSSEV

SEQ ID NO: 11201 - protein, 344 aa, unidentified
  source 1..344: note = protein_582d8b4
  REGION 5..152: note = RuvC_domain
  SITE 8: note = RuvC_P1
  SITE 55: note = RuvC_P2
  SITE 92: note = RuvC_P3
  SITE 94: note = RuvC_P4
  SITE 97: note = RuvC_P5
  REGION 212..300: note = Tnp_domain
  SITE 220: note = Tnp_P1
  SITE 250: note = Tnp_P2
  SITE 258: note = Tnp_P3
  SITE 259: note = Tnp_P4
  SITE 271: note = Tnp_P5
MDYFAGLDVSVKETSVCILDDAGRIVKEVKVASEPQALLKVLGNPTYHFKRIGLEAGPLSQWLFSALADAELPVICVETRHMQAVLKAQINKTDRNDARGIAQMMRVGMYRPVHVKTLRSQKLRMLLTHRKLLQSKAIDMENDLRGTLRNFGLKVGLVGAARFEARIRELVEGLPDLAVLVEPLLVVRQVLRQQLAVLHRRMLAVVRDDEVCRRLMTTPGVGPLVALTYRTTVDVPARFQKSKSVGAVFGLTCSRYQSGEIDWSGRISRCGDEMMRVMLYEAAQTLLTRSTRWSWLKAWAIQVARRRGKKKAIVALARRLAVILHRIWVDGTEFRWTREAGPAA

SEQ ID NO: 11202 - protein, 337 aa, unidentified
  source 1..337: note = protein_bb917ca
  REGION 6..148: note = RuvC_domain
  SITE 9: note = RuvC_P1
  SITE 52: note = RuvC_P2
  SITE 87: note = RuvC_P3
  SITE 89: note = RuvC_P4
  SITE 92: note = RuvC_P5
  REGION 211..297: note = Tnp_domain
  SITE 219: note = Tnp_P1
  SITE 249: note = Tnp_P2
  SITE 257: note = Tnp_P3
  SITE 258: note = Tnp_P4
  SITE 270: note = Tnp_P5
MNKITIGLDIAKNIFHLVWLSNSGKVLKKKKLKRTNMKEYFCNLEPAIVVMEACGSSNYWAQSIQNYGHEVKVIAPQYVVPYRKGNKNDFNDAEAIAEASQRVNMRFVPIKSVEQQDIQLLHRIRERRIKCRTALVNQTRGLLAEYGISLSQGVNQVRKSIPDILEDASNMLTPLSRRYIASLYDELIEVDKLITDLDSEIKALSHQIEQCQKLETMTGIGPIIATALYSAIGDGKTFKSGRHMAAWLGLVAKQHTTGDNPKLKGISKRGNTYLRTQLINGARAALVKSGSKADKVSLWANNLRERLPFNKAVVALANKMARMAWAMTVKQERYKFV

SEQ ID NO: 11203 - protein, 391 aa, unidentified
  source 1..391: note = protein_d0475b1
  REGION 4..163: note = RuvC_domain
  SITE 7: note = RuvC_P1
  SITE 60: note = RuvC_P2
  SITE 101: note = RuvC_P3
  SITE 103: note = RuvC_P4
  SITE 106: note = RuvC_P5
  REGION 267..353: note = Tnp_domain
  SITE 274: note = Tnp_P1
  SITE 304: note = Tnp_P2
  SITE 312: note = Tnp_P3
  SITE 313: note = Tnp_P4
  SITE 326: note = Tnp_P5
MVCVGIDVAKDKHDCCILDSDGTIRADCITIPNNMDGFKQLLQTIRDCTKRSDKIKVGLEATGHYSYNILGFLLDNDLAVYVMNPLHTNLYRKSLSLRKTKTDRVDARTIATMLLSDVDLKSYTDTAYHNEELKSLTRYRFDKVRERAKLKQSVSRLVTILFPELEKLVPSLHIASVYALLSEYPGAKQISEIHLTKLTNLLVTASKGRYGKDKAIQIRDAARTSIGSVMPAKSLELKHTIKLIRELTSEIDEIEVSIQKIMDELNPPILSIPGVGIQSAAMILAEIGDFSNFESPDKVLAYAGCSPSTYQSGKLTNCYAHMEKRGSRYLRYALYNATKYVCYWNPVFAEYLAKKRAEGKHYNVALSHATKKLVRLIYALQKSGKAYLTAA

SEQ ID NO: 11204 - protein, 357 aa, unidentified
  source 1..357: note = protein_e850189
  REGION 16..164: note = RuvC_domain
  SITE 19: note = RuvC_P1
  SITE 68: note = RuvC_P2
  SITE 104: note = RuvC_P3
  SITE 106: note = RuvC_P4
  SITE 109: note = RuvC_P5
  REGION 235..320: note = Tnp_domain
  SITE 242: note = Tnp_P1
  SITE 273: note = Tnp_P2
  SITE 281: note = Tnp_P3
  SITE 282: note = Tnp_P4
  SITE 293: note = Tnp_P5
MPPITPDVASIIEVTGGVDTHLDTHTAAVLDPIGRVLGTQQFPATAAGYAALLAWMRGFGRLQRAGIEGTGAYGTGLARRLRDERVAVIEVDRPDRKTRRFQGKSDPIDAIQAAKTALAHERTSIPKQRDGSVEALRNLRVARRSAVDQRADAQRQIKTLIVTAPDDLRAQLRGLAVKQLISTCANLRPDRTDAATPGTAAKIALRSLARRHQQLAVEIADLDELLEPLVAAINPTLVAVNGVGADTAGQLLVTAGENHGRLTSEAAFAMLCGVAPIPASSGKTNRHRLNRGGDRQANKALYRVVLCRPRWDPRTRAYMERRTKDGLSKKEIIRCLKRYVAREIYQLITTNDLELAA

SEQ ID NO: 11205 - protein, 309 aa, unidentified
  source 1..309: note = protein_d572118
  REGION 7..149: note = RuvC_domain
  SITE 10: note = RuvC_P1
  SITE 53: note = RuvC_P2
  SITE 88: note = RuvC_P3
  SITE 90: note = RuvC_P4
  SITE 93: note = RuvC_P5
  REGION 211..295: note = Tnp_domain
  SITE 219: note = Tnp_P1
  SITE 249: note = Tnp_P2
  SITE 257: note = Tnp_P3
  SITE 258: note = Tnp_P4
  SITE 270: note = Tnp_P5
MEKVSIVGLDIAKSSFHAHGAAANGSKVFSKALPRGRVLEFFGQIEPCTIALEACAGAHHWSRELSRLGHDVRLIAPQYVKPYVKRQKNDANDAEAIAEAASRPTMRFVTTKTTEQQGQSMVLKTRDLLTGQRTQAINALRGHLAEHGIVAPKGPQHLPRLEKAVAENGERLPPEVTGLCQIFFDLIAGLSARIDALTRQLRQIARQDDVARRLMTMPGIGPVTAVSIAVLAAPPEMFSKGRDFAAWIGLAPRQHSTGGKTRLGKISKMGQRDLRRLLIIGAMSAIQAAQKRGGAPDGSWLARMLARKP

SEQ ID NO: 11206 - protein, 340 aa, unidentified
  source 1..340: note = protein_bfc508d
  REGION 7..149: note = RuvC_domain
  SITE 10: note = RuvC_P1
  SITE 53: note = RuvC_P2
  SITE 88: note = RuvC_P3
  SITE 90: note = RuvC_P4
  SITE 93: note = RuvC_P5
  REGION 211..296: note = Tnp_domain
  SITE 219: note = Tnp_P1
  SITE 249: note = Tnp_P2
  SITE 257: note = Tnp_P3
  SITE 258: note = Tnp_P4
  SITE 270: note = Tnp_P5
MGEVSTVGVDLAKSVFQVHGADASGTVVFRKKLRRDQVLPFFSTLPRCAVAMEACASAHYWARELAAVGHDTKLIPPAYVKPFVKRQKNDMADAEAICEAAQRPTMRFVQGKSAQAQASAVVFRTRDLLVRQRTQLINALRGHLTEFGHIVRQGVGHVGKLIEIVGDPASDVPAEARPVLVVIAQSLLALQAQIAVLDREIASRAKADPVAKRLMTIPGVGPVTATALVALAPAASTFRRGRDFAAWLGLVPRQHSSGGKERLGRTTKMGERSLRRLLILGASSATKVAAREPDKAGACLASMLARKPRMLVTVAFANKMARIVWALMAHGGSYRAPATA

SEQ ID NO: 11207 - protein, 400 aa, unidentified
  source 1..400: note = protein_8c3b76d
  REGION 10..164: note = RuvC_domain
  SITE 13: note = RuvC_P1
  SITE 62: note = RuvC_P2
  SITE 102: note = RuvC_P3
  SITE 104: note = RuvC_P4
  SITE 107: note = RuvC_P5
  REGION 270..356: note = Tnp_domain
  SITE 278: note = Tnp_P1
  SITE 308: note = Tnp_P2
  SITE 316: note = Tnp_P3
  SITE 317: note = Tnp_P4
  SITE 329: note = Tnp_P5
MSRAHARIWVGIDAGKGHHWAVAVNADGETLFSTKVLNDEAQILTLIDTAREKADEVRWAVDISGRASALLLALLIAHGQQVVYVPGRTVNRMTGAYRGEGKTDAKDALVIADQARMRRDFAPIGTPPELVSTLQLLTGYRRDLIADRVRLINRLRDLLVGICPALERAFDYSASKGPVVMLTEYQTPAALRRIGVKRLTTWLERRKVRSADTVAAKAVEAAQSQTTALPGEARAAKLVRDLAHQLLALDERIKDNDQEIRETFRTDDRAEIIESLPGMGPILGAEFVAIVGDLSGYRDAGRLASHAGLAPVPRDSGRRTGNYHRPKRYNRRLRWLFYMSAQSAMMRPGPSRDYYLKKRAEGLIHTQALLALARRRVNVLWAMLRDKRLFTSVPPVTQAA

SEQ ID NO: 11208 - protein, 288 aa, unidentified
  source 1..288: note = protein_9d3cda6
  REGION 4..155: note = RuvC_domain
  SITE 7: note = RuvC_P1
  SITE 60: note = RuvC_P2
  SITE 100: note = RuvC_P3
  SITE 102: note = RuvC_P4
  SITE 105: note = RuvC_P5
  REGION 200..286: note = Tnp_domain
  SITE 208: note = Tnp_P1
  SITE 237: note = Tnp_P2
  SITE 245: note = Tnp_P3
  SITE 246: note = Tnp_P4
  SITE 259: note = Tnp_P5
MFQLGIDVSKNTLDLCLLREGVKGRVKTRRLKNDVNAASSVITWLGKQQCAPADVHIIMEATGVYHEPLAYGLYKAGAKVSLANPHRSREFARGMDILTKNDQIDAYMLACYGALKEPEPWVPPPESIRYLSALLRRRDALVTDRSREKNRLEKCRATDIPPVIAESIENVLRNLSAEIERLDELLLTHLNQHPELKKDFDLLTSIKSVGFQLGLNMLVILRGHRFDTAGQLAAFLGVVPVEKSSGTSIRGKPKLSKNGPPEIRAKLYLASMCGLRFNPVMKAMYERL

SEQ ID NO: 11209 - protein, 438 aa, unidentified
  source 1..438: note = protein_004eae7
  REGION 44..197: note = RuvC_domain
  SITE 47: note = RuvC_P1
  SITE 94: note = RuvC_P2
  SITE 134: note = RuvC_P3
  SITE 136: note = RuvC_P4
  SITE 139: note = RuvC_P5
  REGION 307..396: note = Tnp_domain
  SITE 315: note = Tnp_P1
  SITE 345: note = Tnp_P2
  SITE 353: note = Tnp_P3
  SITE 354: note = Tnp_P4
  SITE 366: note = Tnp_P5
MATSFVLANSLKVDWSERPRFENLITKILVRVLQKGSVTMRKIIGIDVSKSTAKLSVAIDAKTVYEGDITLDMIGFTSLKAIIDSYGGAEVVFEATGVYSRRLERYLLDESITYHILNPLVAKKRLDDGSRTRKNDVRDARGLAITEFAKHPKPFKPRFYDPVYRELMDISRYYDQQTEDLKRTKNRIHRLIQLSFPGIEEELDLRKPSALHTLTLFSHPAELTGLSFENIKTQILDMHLKGVGAVRSSNLARALWRSRARSYPAVSGNSFVVQAVKHETQKALKLLSEREETVQAMISLAEKTPEYVILLSIPNIAENTAVRLIAELGDIRRFETRAKLNSFIGLDLREIQSGDYTAQRKITKHGDAHTRKLLYWTVINMVSSGAQPSHIRDFYAKRQATASRRKPLLVACMDRLLKTIHYLVNTNQLYSYELACSR

SEQ ID NO: 11210 - protein, 420 aa, unidentified
  source 1..420: note = protein_9635e41
  REGION 13..161: note = RuvC_domain
  SITE 16: note = RuvC_P1
  SITE 67: note = RuvC_P2
  SITE 101: note = RuvC_P3
  SITE 103: note = RuvC_P4
  SITE 106: note = RuvC_P5
  REGION 256..345: note = Tnp_domain
  SITE 264: note = Tnp_P1
  SITE 296: note = Tnp_P2
  SITE 304: note = Tnp_P3
  SITE 305: note = Tnp_P4
  SITE 316: note = Tnp_P5
MAGTVDIVYPVCCGMDVHKNFLVACIATTDERGHTTHEMRRFSTFTGDLRRLSDWLLANRCCDVCMESSGKYWIPVFNTLENTCNVCLTHPKYVKAIKGKKTDKKDAKWISELFKCDLVRSSFIPPPDIRQLRDLCRYYVKLTGMCRSEKNRAQNCLTMCNFKLDDVFSDIFGKSAARVLDAVIENGNSDFDVAPLINGKCKATVEEIRAALDGELNPSQTEKLNLIRKHMENLNNLKISLEKLILRLASKYQAQIDLLLTVPGIKEPLTAIRILAEIGVDMSVFETSKQLCSWAGLTPQNQESAGKKKTTRIGRAGEYLKPLLVQIALAIVKSDKCPELKNKFQALKKRRGGKKAVIAIARKLLSAIWIILSKKESYNPELYRIADKTPIKRDLTPEQAFALLRKQGYSICDWELTLIT

SEQ ID NO: 11211 - protein, 391 aa, unidentified
  source 1..391: note = protein_a6d8f8c
  REGION 4..163: note = RuvC_domain
  SITE 7: note = RuvC_P1
  SITE 60: note = RuvC_P2
  SITE 101: note = RuvC_P3
  SITE 103: note = RuvC_P4
  SITE 106: note = RuvC_P5
  REGION 266..353: note = Tnp_domain
  SITE 274: note = Tnp_P1
  SITE 304: note = Tnp_P2
  SITE 312: note = Tnp_P3
  SITE 313: note = Tnp_P4
  SITE 326: note = Tnp_P5
MIYIGIDVAKDKHDCFITNSDGEILFNPFTISNNREGFETLFQRIKSVAEDFSKIKVGLEATGHYSYNLLGFLLDKGLPTYVINPLHTNLYRKSLSLRKTKTDKVDAHTIATMLMSDVNLKSYSDISYHNEELKSLTRYRFDKVKERAKLKSSVSRLVTILFPELEQLVPAIHMASIYALLSEFPSASAIAHSHLTRLTHLLSTASKGHYGKDTAILFREAARTSIGSHMPAKSLELKHTIKLIQEITSEIDEIEADIKSIMDSIHSPILTIPGISYRMGAMIIAEIGDFSRFDAPDKILAYAGMSPSTYQSGQLESSYSHMEKRGSRYLRYALYNATKYVCHWDTTFATYLEKKRTEGKHYNVALSHATKKLVRVIFQLEKSGQDYIKSA

SEQ ID NO: 11212 - protein, 322 aa, unidentified
  source 1..322: note = protein_3b878bc
  REGION 9..157: note = RuvC_domain
  SITE 12: note = RuvC_P1
  SITE 56: note = RuvC_P2
  SITE 96: note = RuvC_P3
  SITE 98: note = RuvC_P4
  SITE 101: note = RuvC_P5
  REGION 195..279: note = Tnp_domain
  SITE 203: note = Tnp_P1
  SITE 232: note = Tnp_P2
  SITE 240: note = Tnp_P3
  SITE 241: note = Tnp_P4
  SITE 252: note = Tnp_P5
MSQPNPLCVGIDVSKATLDIAASCDIAQFTVSNDSDGFDAIIAELRKHSVVLVLMEATGGLEATVACSLQAEGFDVTVINPRQARDFARAMGYLAKTDRIDAKVLAQMAEVINRHPERERFIRTLPNAERQVLAAMVVRRRQLITMLVAERNRLYTAHPHNRKSINIIIKALEDELARIDEDMNNHIRNHFKDLAARLSSIKGVGTMTVAALLAELPELGSLSRRAISALVGVAPINRDSGTMRGRRTIFGGRDGVRTALYMAALVATRFNSVIKAFYMRLLAAGKAKKVALVACMRKLLTILNAMLRKNEEWNESYHHVSP

SEQ ID NO: 11213 - protein, 341 aa, unidentified
  source 1..341: note = protein_277ee4e
  REGION 7..149: note = RuvC_domain
  SITE 10: note = RuvC_P1
  SITE 53: note = RuvC_P2
  SITE 88: note = RuvC_P3
  SITE 90: note = RuvC_P4
  SITE 93: note = RuvC_P5
  REGION 209..294: note = Tnp_domain
  SITE 217: note = Tnp_P1
  SITE 247: note = Tnp_P2
  SITE 255: note = Tnp_P3
  SITE 256: note = Tnp_P4
  SITE 268: note = Tnp_P5
MQNVTLVGIDLGKHSFHVHGQDRTGKAVFRKKLSRKQLLEFFATFHGCTVVMEACAGAHWMARKLRDFGHAVKLISPQFVRPFVKSNKNDFVDAEAICEAASRPSMRFVTPKTESQQTLSALHRVRQALVRDRVCTTNQMHGFLLEFGISLPVGHAVVKRLSLVLAEHQLPPRLVAILERLHAHFKYLTEQIGDIEKELQRQLSDDALGQRLLTIPGVGPITASLLASELGDGKQYRCSRDFAAAVGLVPRQYSTGGRSTLLGISKRGDKNIRHLLVQCARAFMLRLDKHSGPMADWTRAMLARRHSCVVACALASKLARIAWAIVSHNTVFEEQVTASVA

SEQ ID NO: 11214 - protein, 305 aa, unidentified
  source 1..305: note = protein_e6d80d0
  REGION 1..132: note = RuvC_domain
  SITE 33: note = RuvC_P2
  SITE 71: note = RuvC_P3
  SITE 73: note = RuvC_P4
  SITE 76: note = RuvC_P5
  REGION 176..263: note = Tnp_domain
  SITE 184: note = Tnp_P1
  SITE 214: note = Tnp_P2
  SITE 222: note = Tnp_P3
  SITE 223: note = Tnp_P4
  SITE 236: note = Tnp_P5
MQIENDRKAVMKLMGQWSKRHGVEVGKSLIRLEATGHYTLMMLNLIVGQQWHAWLAHPNDIQQSMGIKRVKNDKVDALRIAQYARTFHEKARLFTAQNLKLDRLKHLITRRNHLVRSRARHRTHITDLNRYMDRQLRTEFDRIDKRQIKLEDQLVAHVDALILAEIKADPQTERQYDLLRTIPGVGPQLAAYLVACTDGFARFNTPRQLSCHAGVAPFERSSGSSVRGRTQVSHQADKSLKTLLHMSALVSVREPGELRQYFERKRAEGKKPILVVNAVRNKLVHRVCAVIRNNRPYERRPITTT

SEQ ID NO: 11215 - protein, 399 aa, unidentified
  source 1..399: note = protein_4444dc2
  REGION 11..165: note = RuvC_domain
  SITE 14: note = RuvC_P1
  SITE 62: note = RuvC_P2
  SITE 102: note = RuvC_P3
  SITE 104: note = RuvC_P4
  SITE 107: note = RuvC_P5
  REGION 272..357: note = Tnp_domain
  SITE 280: note = Tnp_P1
  SITE 310: note = Tnp_P2
  SITE 318: note = Tnp_P3
  SITE 319: note = Tnp_P4
  SITE 331: note = Tnp_P5
MITTDQIAVYIGLDVGKQEHHACALNPSGDRLHDKPLPQDETRLRELFTQLATHGPVLVVVDQPASIGALPIAVARETGAHVAYLPGLAMRRIADLHPGNAKTDARDAYVIAEAARTMPHALRRVDTGDEALADLQVIIGFDDDLAGEVTRVSNRIRGLLTQIHPALERAIGPRITHPAALALLTRYGGPTGLAKAGRRGITTTTKKHAPRSWQRITQNVLDALGQQTVTVPGTTAAELVLPQLATQLGSLLEQRKAVAAQVEEMLDAHPLSPVLMSMPGVGVRTAARILLEVGDGSSFPTPGHLAAYAGLAPVTRRSGTSIRGEHPSRAGNKHLKRAFFLSAFAALSDPTSRAYYDRKRAQGKKHNAALICLARRRCDVLHAMLRNGTTYQPPVATAA

SEQ ID NO: 11216 - protein, 320 aa, unidentified
  source 1..320: note = protein_d83ae5f
  REGION 10..149: note = RuvC_domain
  SITE 13: note = RuvC_P1
  SITE 55: note = RuvC_P2
  SITE 95: note = RuvC_P3
  SITE 97: note = RuvC_P4
  SITE 100: note = RuvC_P5
  REGION 191..274: note = Tnp_domain
  SITE 198: note = Tnp_P1
  SITE 227: note = Tnp_P2
  SITE 235: note = Tnp_P3
  SITE 236: note = Tnp_P4
  SITE 248: note = Tnp_P5
MTILTSPTVIGIDVAKAEIVAYREDMQTTQHINNDRETLGRWLKALPAQSSIALEATSIYHLDTVELAHEMGHRVYVVDAYRLSHYRESIGQRAKTDPCDARLLARYLSSEQDRLRLWSPPPQAYKVLKSLLHRRAELINVRVGMTLSWSGEPLLKDELARQLKSFKQAEQAIQKLLHKVSKKAGITENIKRCKAIEGIGELTAMGLATAFMRGHFANGDAFIAFLGMDLRAKDSGKKNSPRHLSKKGDTELRRLAHNAAMAACRSATWKPYYESYLVRGLAKTQALVILARKLCRVAFALMKNQSEYQPNLRLQGSPAT

SEQ ID NO: 11217 - protein, 343 aa, unidentified
  source 1..343: note = protein_9e15db0
  REGION 6..147: note = RuvC_domain
  SITE 9: note = RuvC_P1
  SITE 52: note = RuvC_P2
  SITE 87: note = RuvC_P3
  SITE 89: note = RuvC_P4
  SITE 92: note = RuvC_P5
  REGION 211..297: note = Tnp_domain
  SITE 219: note = Tnp_P1
  SITE 249: note = Tnp_P2
  SITE 257: note = Tnp_P3
  SITE 258: note = Tnp_P4
  SITE 270: note = Tnp_P5
MTISILGIDIAKNTFQLHGADNTGKAVMKKRLPRHKLAAYAATLPACTIVMESCGGANYWARVFQRSGHTVRLISPQFVKPFVKTNKNDANDALAIVEAASRPSMSFVPIKQVEQQDIQSIHRIRTRVVKSRTALINEIRGLCLEYGLILTAGAAKVKPSLCAAISNCDNELTTSSRESMQDLYEELVDVEIRLKKLDSKVRQLCRQSESCQRILKEPGVGELTATAIVAAVPEPREFRNGRHMSAWLGLVPRQSSSGDKQVLLGISKRGDRYLRTLLIHGARAVLSHRKVLDSNYDRWVANKKATLSHNKAAVALANKSARIIWSMLNTGEEFNYGVQKTAA

SEQ ID NO: 11218 - protein, 397 aa, unidentified
  source 1..397: note = protein_952582e
  REGION 4..160: note = RuvC_domain
  SITE 7: note = RuvC_P1
  SITE 57: note = RuvC_P2
  SITE 97: note = RuvC_P3
  SITE 99: note = RuvC_P4
  SITE 102: note = RuvC_P5
  REGION 274..361: note = Tnp_domain
  SITE 282: note = Tnp_P1
  SITE 312: note = Tnp_P2
  SITE 320: note = Tnp_P3
  SITE 321: note = Tnp_P4
  SITE 334: note = Tnp_P5
MIAVGVDVSKSKSMVAILSSDGEILAEPFEVYHANDSLDNLINNLHAINDDIKIVMEATGHYHLPILKKFLDANLFVSVMNPYLMKKYGDNQIRKVKTDRKDAMRMATYALEKSYALVPYTSLDQKYLDLKFLSRQYNQRVSTRVKNRVYLGNLLDETMPGIENILMSKTTKPENNMLYNFIIKFQSFDTIKNMGEKKFLNSYTRLADKNGCRNYKMKALKIYELATNSVTTRGTDTFTTIAMQQCLNVLIQAETASNEILLQMQSLAQTLPEYSIVRAMNGVGDRLAPQLIAEIGDVRRFKSGKALNAYAGNDAPPFQSGQFESQNRHISKRGAPALRKACYEVMQCLKMHKPQDDPVYQFMIKKEEEGKPLNVAKMAAVNKFLRIYYAKVMELYR

SEQ ID NO: 11219 - protein, 311 aa, unidentified
  source 1..311: note = protein_ce80fc6
  REGION 5..147: note = RuvC_domain
  SITE 8: note = RuvC_P1
  SITE 52: note = RuvC_P2
  SITE 92: note = RuvC_P3
  SITE 94: note = RuvC_P4
  SITE 97: note = RuvC_P5
  REGION 188..272: note = Tnp_domain
  SITE 196: note = Tnp_P1
  SITE 225: note = Tnp_P2
  SITE 233: note = Tnp_P3
  SITE 234: note = Tnp_P4
  SITE 245: note = Tnp_P5
MNNTIGIDISKDTLDVYRLTDGQHRQFLNGKAGHTQLLKWIKLRPGQLVIFEATGAYHRQLERALGSQSVPFVKVNPKQARRFAQASGKLAKTDRVDCEMLAKMGAVLQLVPQPPFAESLYDLKELLSARRALIKDRTAAKARKATVSNALVKQQLEKRLRQIESDIEKIDALMLELARQDQHMGERLDILFSIPGIGMITALMILVDMPEIGTLGNKQVASLAEVAPMSQSSGKWQGKARIQGGRPNLRNAIFMPALVAIRFNPDLKANYNHLVAAGKEKKVAITAVMRKLLVLANALLRDQRKWAEKVT

SEQ ID NO: 11220 - protein, 408 aa, unidentified
  source 1..408: note = protein_1fac60b
  REGION 5..161: note = RuvC_domain
  SITE 8: note = RuvC_P1
  SITE 58: note = RuvC_P2
  SITE 98: note = RuvC_P3
  SITE 100: note = RuvC_P4
  SITE 103: note = RuvC_P5
  REGION 275..362: note = Tnp_domain
  SITE 283: note = Tnp_P1
  SITE 313: note = Tnp_P2
  SITE 321: note = Tnp_P3
  SITE 322: note = Tnp_P4
  SITE 335: note = Tnp_P5
MYNAVGIDASKLKSTITIIQPAGVVIRKPFDVLHTSDELNTLVTYLKSLVGETRAVIECTGRYHEPVVKSLSEAGIFISAVNPKLIKGQKQNTLRNVKSDPADARKIAKYALDNWAELREYSSMDTTREQLKTLNSQFTFFMKQKVAAKTNLISLLDNTYPGVNKLFDSPTRDDGSEKWVDYAYSFWHVDCVRKIGLKAFTERYEAFCKKHHYNYQKNKPALLFEESKQLVAVFPKEKSYKLLIQQSIQQLRLASEHIEIIRKEMNELASTLPEYETVMSMYGVGETYGPQLIAEIGDVSRFTHREAITAFAGVDPGVNESGQFKQRSNRASKNGSTRLRKTLFQVMSTYLQNKPVNEPVYQFLDRKRAEGKPYLVYMTAGANKFLRIYYGKVKECLRNLEQSQIEES

SEQ ID NO: 11221 - protein, 387 aa, unidentified
  source 1..387: note = protein_22dd421
  REGION 12..164: note = RuvC_domain
  SITE 15: note = RuvC_P1
  SITE 61: note = RuvC_P2
  SITE 101: note = RuvC_P3
  SITE 103: note = RuvC_P4
  SITE 106: note = RuvC_P5
  REGION 266..351: note = Tnp_domain
  SITE 274: note = Tnp_P1
  SITE 303: note = Tnp_P2
  SITE 311: note = Tnp_P3
  SITE 312: note = Tnp_P4
  SITE 324: note = Tnp_P5
MGGKIRPRGDVLGLDVGKSSHWACLVARDGEVAANGPVPNTEADLDALFAQVGGDTLVVVDQVRNIGSLAISRARLAGLEVAYLPGTAAHGAARLFAGDAKTDERDAMVIAKTALGIPDALLPAPREDDGLRAARSMAAQRDYMVASSTRDKNRLRSVLLESCPAFEALCDLSDPSWLKMLEKLGGPWGIADAGKAAMGAVTRGADRASMDAAWRAITTSTRPAECVVRAENPQVKMLARRISESVAEARSLDGLIAEALSGDATYECLLTVPGIGPRTASELVIGIDISEFPDHDHLASYCGVAPRNRRSGTSISSVSASRQGNKRLKNLLIFSCNSLVRSRSRFGEYYRACRGRGMCHGEALKAVARKRVKVIYAIMRDKVPYAA

SEQ ID NO: 11222 - protein, 302 aa, unidentified
  source 1..302: note = protein_7ad44a4
  REGION 4..157: note = RuvC_domain
  SITE 7: note = RuvC_P1
  SITE 55: note = RuvC_P2
  SITE 96: note = RuvC_P3
  SITE 98: note = RuvC_P4
  SITE 101: note = RuvC_P5
  REGION 219..302: note = Tnp_domain
  SITE 227: note = Tnp_P1
  SITE 257: note = Tnp_P2
  SITE 265: note = Tnp_P3
  SITE 266: note = Tnp_P4
  SITE 277: note = Tnp_P5
MVLIGIDPHKASHTAVVIDRDEQELARVTVRASRGQVSELLAFAAPFTDRRWAIESAGGLGFLLAQQLVRAGEDVVDVPATLAAKARLLGSGRGSKNDPNDALSTAVAALRDPRLRAVVVEDPVMVLRLLADRHQDLTSLRTQAVCRLHALLAALTPGGVQKRLSATAAAVFLARVHPDSVTGVTRRQMAADLVADIRRLDKAIADIKARTAVAVTASGTTVTDLYGVGPVIAALLIGHSGDVRRFPNPGTYASYNGTAPIEASSGPKVRHRLNPRGNRQLNHAMHMIAVTQIRGDNPGRDY

SEQ ID NO: 11223 - protein, 353 aa, unidentified
  source 1..353: note = protein_470aea5
  REGION 2..112: note = RuvC_domain
  SITE 9: note = RuvC_P2
  SITE 49: note = RuvC_P3
  SITE 51: note = RuvC_P4
  SITE 54: note = RuvC_P5
  REGION 226..313: note = Tnp_domain
  SITE 234: note = Tnp_P1
  SITE 264: note = Tnp_P2
  SITE 272: note = Tnp_P3
  SITE 273: note = Tnp_P4
  SITE 286: note = Tnp_P5
MANLVLSWNNTGRYYEPLVRELSKADLFVSAINPKLIKDFGDNYLRKVKSDKADAVKIARYTLDSWTELRQYSLMDEIRNQLKTMNRQFDFYMKHKTAMKNNLISILDQTYPGANTYFDSPAREDGSQKWVDFSATYWHVDCVRKLSLNAFIDHYQKWCKRRKYNFSRSKAVEIYEASKELVSILPKDDLTKLIIKQAVEQLNTASQTVEQLRTMMNEAASKLPEYPVVMAMKGVGKSLGPQLMAEIGDVSRFTHKGAITAFAGVDPGVNESGSYEQKSVPASKRGSSTLRKTLFQVMDVLIKTKPQDDPVYLFMDKKRAQGKPYYVYMTAGANKFLRIYYGRVKEYLSSLPE

SEQ ID NO: 11224 - protein, 342 aa, unidentified
  source 1..342: note = protein_597bede
  REGION 6..148: note = RuvC_domain
  SITE 9: note = RuvC_P1
  SITE 52: note = RuvC_P2
  SITE 87: note = RuvC_P3
  SITE 89: note = RuvC_P4
  SITE 92: note = RuvC_P5
  REGION 211..298: note = Tnp_domain
  SITE 219: note = Tnp_P1
  SITE 249: note = Tnp_P2
  SITE 257: note = Tnp_P3
  SITE 258: note = Tnp_P4
  SITE 270: note = Tnp_P5
MNIVTLGIDLAKSSFALHGVDSSGKVLLRKNVSRKKLPEMLINMPPCLVGMEACSSAHYWARLFKQFGHDVKLMPPQFVKPYVKSNKNDTADAEAICEAVTRPNMRFVPIKSIEQQSILSIHKARERLVSMKTGQTNQLRGLLAEFGIVIPKGSASLNKQIPLILENAGNNLTSSVRRLVAQLKELIDDLVIQICVLTKEIEHWHSTNVDSKRIAEIPGIGPITATALVASIGDPASFNNGRQVSAWIGLVPKQFSTGGKQVLLGISKRGDSYLRRLLVHGARAVLGHLKQQPNTYTHRWLNDLLKRKHKNVAIVALANRNARIAWALLANQQQYNPELLSA

SEQ ID NO: 11225 - protein, 327 aa, unidentified
  source 1..327: note = protein_44690e0
  REGION 4..158: note = RuvC_domain
  SITE 7: note = RuvC_P1
  SITE 61: note = RuvC_P2
  SITE 101: note = RuvC_P3
  SITE 103: note = RuvC_P4
  SITE 106: note = RuvC_P5
  REGION 201..287: note = Tnp_domain
  SITE 209: note = Tnp_P1
  SITE 238: note = Tnp_P2
  SITE 246: note = Tnp_P3
  SITE 247: note = Tnp_P4
  SITE 260: note = Tnp_P5
MNVIGIDVSKAKLDCAWIKDRDAGKVKNKNFLNTPEGYRSLMDWAMKQCKGPIKSIHFVMEATGIYHEAVAHALYQAGARVSVVNPAQTRDYAKSLGIRTKTDKKDSVVITRFGLTQTPRLWQPEPEEIRTLKALISRLEAIEKDIQREKNRLEKAQISLTSHDVIVSIQTVLAQLEKERKRLETLINRHIDSHPQLKQDRQLLESIPGVGPVISRLMISVIRSRDFTSAPQCAAFIGLIPVHHESGTSVKGRPRLSKAGKASIRAKLYMAAVVSIQHNPDIKRQYERLLKNGKAKMSALCAAMRKLVHICFGVIKHQQPYQPQAVL

SEQ ID NO: 11226 - protein, 389 aa, unidentified
  source 1..389: note = protein_0784884
  REGION 1..151: note = RuvC_domain
  SITE 44: note = RuvC_P2
  SITE 90: note = RuvC_P3
  SITE 92: note = RuvC_P4
  SITE 95: note = RuvC_P5
  REGION 263..349: note = Tnp_domain
  SITE 270: note = Tnp_P1
  SITE 300: note = Tnp_P2
  SITE 308: note = Tnp_P3
  SITE 309: note = Tnp_P4
  SITE 322: note = Tnp_P5
MLPNGDKHSNFSVANSHEGSTQLVKRILSALTSHSLDTVLIGLEATSVYGDNLVYFLREDATLAPFNRKIHVINPKQVKKFHDAYNDLPKNDYVDSFVIADCLRFGRINKEVYLGDYRYKALQNLTRARFFAVQNLVKEKQRFMNVLFKKYSTMTQEKVFSDTFSTTALAVYDEFESAEALANMDLHELTDFIIEKGKNRFPDPDAVAKAIQKAARSSYRLPKTVNDSVNQVLSISITSMKALESQIKEFDKAIKAQMELLPNVLISIPGIGPVYSAGIMAEIGDINRFNSQAALAKYAGLAWKQHQSGGFESEVTRLIPSGNRFLKYYLCEAAFSLVRCDKEYSDFYHLKYKEVNRCQHKRALALTARKFVRLVFRLLKDNRLHCPAK

SEQ ID NO: 11227 - protein, 338 aa, unidentified
  source 1..338: note = protein_7b873ea
  REGION 6..152: note = RuvC_domain
  SITE 9: note = RuvC_P1
  SITE 53: note = RuvC_P2
  SITE 91: note = RuvC_P3
  SITE 93: note = RuvC_P4
  SITE 96: note = RuvC_P5
  REGION 211..296: note = Tnp_domain
  SITE 219: note = Tnp_P1
  SITE 249: note = Tnp_P2
  SITE 257: note = Tnp_P3
  SITE 258: note = Tnp_P4
  SITE 270: note = Tnp_P5
MTIVTVGIDLAKNVFAVHGVDATGKPVLLKPSVPRAKLAPLIASLPPCLIGMEACSGAHYWARLFATFGHTVRLMAPKFVAPYRLSGKRGKNDAADASAVCEAVTRANMRFVPIKTVDQQGQLMVHRARQGFVEQPNATINRIRGLLSEFGVVLPLKAAVVRQQALQHLEDLPGWANTVVGDLLSEVSHFDERITQYDHHIATLAKADPAARQLMQLPGVGPTTATALISTIGHGHDFSNGRQLSAWLGLVPGQYSSGGKQRLGHITKAGDSYLRSLLVLGAKAVLVAAKNKTYPISRWATSLAERRGYWRAIVAIAAKNARMCWAVLHRGDAFKLPV

SEQ ID NO: 11228 - protein, 306 aa, unidentified
  source 1..306: note = protein_4fbc51a
  REGION 5..152: note = RuvC_domain
  SITE 8: note = RuvC_P1
  SITE 52: note = RuvC_P2
  SITE 92: note = RuvC_P3
  SITE 94: note = RuvC_P4
  SITE 97: note = RuvC_P5
  REGION 183..267: note = Tnp_domain
  SITE 191: note = Tnp_P1
  SITE 220: note = Tnp_P2
  SITE 228: note = Tnp_P3
  SITE 229: note = Tnp_P4
  SITE 240: note = Tnp_P5
MNNTIGIDISKDTLDVHRLTDGQHKHFLNGKAGHIQLLKWVNLRPGQLIIFEATGAYHRQLERTLGAKAIPFVKVNPKQARRFAHASGKLAKTDRVDCEMLAKMGVALQLTPKPLNAENLYDLRELLSARRALIKDRTAAKARNATVTQLLGKRLRNIKSDIAKIDAVMLALAHQDQPMSKRLDILSSIPGIGMTTALMILVDMPEIGTLDNKQVASLAGLAPMSQSSGKWQGKARIQGGRPNLRHAIFMPALVAIRHNADLKAKYEQLVAAGKEKKVAITAVMRKLLVLANALLRDHRKWAEKAA

SEQ ID NO: 11229 - protein, 343 aa, unidentified
  source 1..343: note = protein_0122ddb
  REGION 6..149: note = RuvC_domain
  SITE 9: note = RuvC_P1
  SITE 54: note = RuvC_P2
  SITE 89: note = RuvC_P3
  SITE 91: note = RuvC_P4
  SITE 94: note = RuvC_P5
  REGION 213..299: note = Tnp_domain
  SITE 221: note = Tnp_P1
  SITE 251: note = Tnp_P2
  SITE 259: note = Tnp_P3
  SITE 260: note = Tnp_P4
  SITE 272: note = Tnp_P5
MKLTRVGVDLAKQVFQVHGVDRTERPAWCKRLKRSRWIAELERAAEPGAEIGMEACGSAHHWARVLQGKGYRVKLIAPQFVKPYVKSNKTDANDAEAICEAMSRPSMRFVGVKTVEQQDLQAVHRVRSSLIRERTAKANQLRGLVYEYGLVAPQELISLRRAVPQWLEDAENGLTARFRALLVGLYRDLQRFDERVRELDQEIAAIAREHEAVGRLEQLRGIGPLTASALYALVGDARQYRNGREMAVSLGLTPRQHSSGGKERRLGISKRGYKYVRTLLIHGARSALRAAPGKTDRLSRWVLALAERSHPNVAATALANKMARVAWAMLRHGTNYEPEGVVA

SEQ ID NO: 11230 - protein, 412 aa, unidentified
  source 1..412: note = protein_1c0c7fd
  REGION 4..170: note = RuvC_domain
  SITE 7: note = RuvC_P1
  SITE 67: note = RuvC_P2
  SITE 107: note = RuvC_P3
  SITE 109: note = RuvC_P4
  SITE 112: note = RuvC_P5
  REGION 278..364: note = Tnp_domain
  SITE 286: note = Tnp_P1
  SITE 317: note = Tnp_P2
  SITE 325: note = Tnp_P3
  SITE 326: note = Tnp_P4
MLFVGDDWAEEHHDIEVQDEAGTVLAKKRLPEGLSGMVAFHELLGSYVPASWADLDPAEAAAEVVIGIETDRGPWVAGLVAAGYQVFAINPTSASRYRQRHSMSGAKADATDAHLLAEIVRVDRAHHRPVAGDSPDAQAVKVVARMHQSLIWDRTRHLLRLRSALREYFPAAIRVFDDLDAPEALELLAAAPAPDAAAKLTKTRIAAALKRAHRRNIDERAMAILQVLRSPELRLPGPVQQAYAAGIASQVAVLGVLNQQIDQLSVVVGDHFGRHRDAEIYTSLPGLGVVLAARVLGEFGDDTDRYVDAKGRKAYAGTAPITRASGKKKVVLARYARNDRLADALQQWAFGSMRGSAGAKAYYKALRARKIGHQAALRQLGNRWVGILHGCLKTGQTYDEHLAWGHIHAAAS

SEQ ID NO: 11231 - protein, 311 aa, unidentified
  source 1..311: note = protein_46eec83
  REGION 6..152: note = RuvC_domain
  SITE 9: note = RuvC_P1
  SITE 53: note = RuvC_P2
  SITE 92: note = RuvC_P3
  SITE 94: note = RuvC_P4
  SITE 97: note = RuvC_P5
  REGION 188..272: note = Tnp_domain
  SITE 196: note = Tnp_P1
  SITE 225: note = Tnp_P2
  SITE 233: note = Tnp_P3
  SITE 234: note = Tnp_P4
  SITE 245: note = Tnp_P5
MTDDTIGIDVSKATLDVHRLSDGKMTSFSNDTAGFKQLSSLCKETVVIRVVYEATGAYHKGLERTLGAHLPLVKVNPLQARRFAQAQGVRAKTDAVDAKMLAIMGEAFALVPDKPISQTHHVLRELRAFRSGLIKDRTRILSRQKTQTLPITRRQSTARLAQIDKQIIEIDTEIERLIQSNDVMARSMEILRSIPGIGAVSAATILIEMPEIGDMERKQVASLTGVAPMTRQSGQWRGKSFIQGGRKVVRDALYMPALVAMRFNPDLKAKYQAMIKAGKPPKVAITALMRKIIELANTLIKANRLWENKRA

SEQ ID NO: 11232 - protein, 392 aa, unidentified
  source 1..392: note = protein_b030d4a
  REGION 1..147: note = RuvC_domain
  SITE 44: note = RuvC_P2
  SITE 84: note = RuvC_P3
  SITE 86: note = RuvC_P4
  SITE 89: note = RuvC_P5
  REGION 255..341: note = Tnp_domain
  SITE 263: note = Tnp_P1
  SITE 294: note = Tnp_P2
  SITE 302: note = Tnp_P3
  SITE 303: note = Tnp_P4
MQDATGRRLGKARLPEGIGGITQLHALLGVLLPEAAEPDQVVIGIETDRGPWVQTLVAAGYQVVAVNPLQVARSRERHGTSGAKSDAGDAHTLADMVRTDHHQLRRIAGDSDLAAAVKIVARAHQTLIWDRQRHLLRLRSVLRESFPAALVAFEDLTAPDVLELLGKAPDPASAARLGTAQIAAALTRAHRRNVADKAAAIRAALAAEQLGQPPVVAAAYAVAVRAQVAVLAALNAEIERLQAQVSAYFGRHPDAEVYRSQPGLGDVLAARVLGEFGDDADRYAGARARKNYAGTSPITQASGKKKVVLARYARDDRLTDALHQQAFSALQASAGSRAYYDALRARGIGHHAALRQLGNRLVGILHGCLKTRKPYDEATAWPQHADTDQAAA

SEQ ID NO: 11233 - protein, 336 aa, unidentified
  source 1..336: note = protein_e457148
  REGION 6..147: note = RuvC_domain
  SITE 52: note = RuvC_P2
  SITE 87: note = RuvC_P3
  SITE 89: note = RuvC_P4
  SITE 92: note = RuvC_P5
  REGION 211..298: note = Tnp_domain
  SITE 219: note = Tnp_P1
  SITE 249: note = Tnp_P2
  SITE 257: note = Tnp_P3
  SITE 258: note = Tnp_P4
  SITE 270: note = Tnp_P5
MEPTTIAIDLAKRVFQIHYVEPVTGAIRSKVLKRAQLVPFFANRPATCVVMEACGSAHHWARVLARLGHDVRLIAAQFVRPFVKSNKNDAADAAAIWEAAQRPGMRFVAVKTEDQQAMLAMHRIRQQLVRIRVMQVNQLRGLLYEFGVILPAGRRASIEAAKVALASMAEQLPTMLADSLQDQISRLRGLDEQIARIEQRILEWRRNNDACRRISEIPGVGVLTATAAVSVIGQAKTFRSGREFAAYLGLVPRQNGSGGKVKLGGISKRGDVYLRTLLIHGARSVISSSRYLPERLRQMLTRRPTNVVAVALANKMARTIWALLAYGRTYQAAPAQ

SEQ ID NO: 11234 - protein, 339 aa, unidentified
  source 1..339: note = protein_47fa3dc
  REGION 6..152: note = RuvC_domain
  SITE 9: note = RuvC_P1
  SITE 53: note = RuvC_P2
  SITE 91: note = RuvC_P3
  SITE 93: note = RuvC_P4
  SITE 96: note = RuvC_P5
  REGION 211..298: note = Tnp_domain
  SITE 219: note = Tnp_P1
  SITE 249: note = Tnp_P2
  SITE 257: note = Tnp_P3
  SITE 258: note = Tnp_P4
  SITE 270: note = Tnp_P5
MAILFVGIDLAKSVFAVHGVDELGKPALVRPSVPRAKLHELIATLPACTVAMEACSGAHHWARLFAAHGHTVRLIAAKFVSPYRLSGKRGKNDAADAAAICEAVQRPSMRFVPVKSEDEQARLCVHRVRQGLVEQRTSIINRIRGLLAEFGVVLPQTASVIRREAAARLEDLPGWVNIAVGDSLSELHRLDERLAEYDRHVSRMAAEDSRSKRLMALPGIGCTTASALVSTIGSGRDFKNGRQLAAWLGLVPGQHSSGGKPRLGSITKAGDSYLRTLLVMGAKAVLQAAKGKTDRMSRWAIALEARRGYWKAVIAIAAKNARMTWAVLAKGELFKPLDA

SEQ ID NO: 11235 - protein, 388 aa, unidentified
  source 1..388: note = protein_b6fd7c8
  REGION 4..160: note = RuvC_domain
  SITE 7: note = RuvC_P1
  SITE 58: note = RuvC_P2
  SITE 98: note = RuvC_P3
  SITE 100: note = RuvC_P4
  SITE 103: note = RuvC_P5
  REGION 264..351: note = Tnp_domain
  SITE 272: note = Tnp_P1
  SITE 302: note = Tnp_P2
  SITE 310: note = Tnp_P3
  SITE 311: note = Tnp_P4
  SITE 324: note = Tnp_P5
MIYVGIDIAKLNHCASAIDSDGQVLIEPFEFLNDNDGFYMLFSRLSSFEKDSLIIGLESTAHYGNNLMYFLVSKGFSVCLINPIQTAAMRKNNIRKTKTDRVDALVIAKTIATMDDLRFVTLYDIALMQLKNLGRFRMKLVKQRTRTKIQLTSYLDQVFPELQYFFKSGIHQKTVYAILKEAPSANQIASMHLTHLKNLLVSNSMGHFKKETALELRVLAQKSVGTADRSLSVQITQSIAQIELLDSQIAAVESEITDIVSSLDSVIMTIPGIGPINGGMILGEIGDIDRFSKPRKLLAFAGLDPSVYQSGNFSAKKTRMSKRGSSALRYALMNAAHNAVKYNKTFREYYDSKRAEGRGHYNALGHCAGKLVRVIYKMLKDDVEFNLD

SEQ ID NO: 11236 - protein, 391 aa, unidentified
  source 1..391: note = protein_eb2a05e
  REGION 4..163: note = RuvC_domain
  SITE 7: note = RuvC_P1
  SITE 60: note = RuvC_P2
  SITE 101: note = RuvC_P3
  SITE 103: note = RuvC_P4
  SITE 106: note = RuvC_P5
  REGION 266..353: note = Tnp_domain
  SITE 274: note = Tnp_P1
  SITE 304: note = Tnp_P2
  SITE 312: note = Tnp_P3
  SITE 313: note = Tnp_P4
  SITE 326: note = Tnp_P5
MIYVGIDIAKDKHDCFITNSDGEVLFKPFTITNNRDGFDDLYNKICSITTDLSKVKVGLEATGHYSYNLLGFLVDRGLAAFVINPLHTNLYRKSLSLRQTKTDKVDARTIASMLMSDVNLKSYSDTSYHNEELKSLTRYRFDKVKERAKLKTSISRLVLILFPELEKMVSTLHMVSVYALLYEFPGASKVSSAHLTRLTNLLEDASNGRYSKDTAIMFREAARTSIGSNMPAKSLELKHTIRSIRALDTEIKEIEKEIKIIMDEINSPILSIPGINYRMGAMIIAEIGDFERFDTPDKILAYAGLSPSTYQSGQLDNAYSHMEKRGSRYLRYALFNAAKFVCHWDPTFAAYLAKKRAEGKHYTVAISHAAKKLVRIIYQLEKTGQTYRRVA

SEQ ID NO: 11237 - protein, 343 aa, unidentified
  source 1..343: note = protein_a14e2e0
  REGION 6..149: note = RuvC_domain
  SITE 9: note = RuvC_P1
  SITE 54: note = RuvC_P2
  SITE 89: note = RuvC_P3
  SITE 91: note = RuvC_P4
  SITE 94: note = RuvC_P5
  REGION 213..300: note = Tnp_domain
  SITE 221: note = Tnp_P1
  SITE 251: note = Tnp_P2
  SITE 259: note = Tnp_P3
  SITE 260: note = Tnp_P4
  SITE 272: note = Tnp_P5
MKLMRIGVDLAKNVFQIHGVDCHEKPVWRQRLPRECWLQTMLEKIEPGCEIGMESCGGAHHWARQLETRGFRVKLIAPQFVKPYVKSNKNDANDAEAICEAMSRPSMRFVAIKTVEQQDIQATHRIRAGLIEQRTAKANQIRGLVAEYGLVAPKELLSLRRAIPCWLEDADNGLTLRFRHLLDGLWGDLRTLDERVRELDTEISVIAANEPNALCLQQLRGVGPMIATALIAAIGDARQFANGRQFAASLGLTPRQHSSGGKDRLLGISKRGDAYLRTLMVHGARSALRTANSKDDRLSQWVVRLAERSHANVAAIALANKTARMAWAMLRNGTNYQPDRAAA

SEQ ID NO: 11238 - protein, 353 aa, unidentified
  source 1..353: note = protein_646fcbf
  REGION 6..168: note = RuvC_domain
  SITE 9: note = RuvC_P1
  SITE 68: note = RuvC_P2
  SITE 106: note = RuvC_P3
  SITE 108: note = RuvC_P4
  SITE 111: note = RuvC_P5
  REGION 212..299: note = Tnp_domain
  SITE 220: note = Tnp_P1
  SITE 250: note = Tnp_P2
  SITE 258: note = Tnp_P3
  SITE 259: note = Tnp_P4
  SITE 272: note = Tnp_P5
MKKIVVGIDISKEKIDAGAICVGNLQESPVRLDHQVFVNRPAGFRRMLAWARHLMPDITLNDVLFCCETTGGYDRILCDYIYAKGLQIWREGALQIKRSMGVRKGKDDRADSFMIAEYTMRNMDKAVVYVSPDSTIRELKALFLYRHRLVQEKAEKRVRATHLAETAPRSKSMSFILRDAQKGIRALEKSIKECEERIIELTKSDGELMRNYKHIVSIKGVSIVNTTALIAYSNNFQSITTANKMASYYGIAPFRERSGTSVDRKACVRYYSCSLLRATITQAAECTVKEGGIFRKYYMRLKATGKPYGVILNNIKNKLLHLVFSLVRNDADFDMNYETRRNEIHSTMQKVET

SEQ ID NO: 11239 - protein, 394 aa, unidentified
  source 1..394: note = protein_acf0d3f
  REGION 4..164: note = RuvC_domain
  SITE 7: note = RuvC_P1
  SITE 59: note = RuvC_P2
  SITE 99: note = RuvC_P3
  SITE 101: note = RuvC_P4
  SITE 104: note = RuvC_P5
  REGION 267..354: note = Tnp_domain
  SITE 275: note = Tnp_P1
  SITE 305: note = Tnp_P2
  SITE 313: note = Tnp_P3
  SITE 314: note = Tnp_P4
  SITE 327: note = Tnp_P5
MKLIGIDVGKNSHHFCIMDKETGELNITPTPFPNNKEGFDFLINSLKPYSKKSVLFGMEDTGHYHIALLKFLLNNGYTVALINPKTTDLTRKMEGGITKNDKLDTITICDVLDTPERKKQYRITKVNSFDLYEQKQLTRHHHNLKEELNVYCNRLQKSIDLVFPEFNTLFRSKYGVVYMNLLKTFGSAEVIASTDIRTIRKCFEIRGKGNRIPLTPEELKECAKNSVGISSEVETIQIKHLVSQIMLIKEQIAEIDKKIEEFSIKNNSPILTIPGISHFSGTSILAELGDIGNYSKPSKIIKYAGVAPYHYESSQFNAQHTSITKKGSKYLRKTLYQIILPVINNNPVFKRYYQLKISQGKGHRCAQGHCIRKLLRIIYHLLDTGQAFEPALLR

SEQ ID NO: 11240 - protein, 402 aa, unidentified
  source 1..402: note = protein_8c0d502
  REGION 6..161: note = RuvC_domain
  SITE 9: note = RuvC_P1
  SITE 60: note = RuvC_P2
  SITE 100: note = RuvC_P3
  SITE 102: note = RuvC_P4
  SITE 105: note = RuvC_P5
  REGION 265..352: note = Tnp_domain
  SITE 273: note = Tnp_P1
  SITE 303: note = Tnp_P2
  SITE 311: note = Tnp_P3
  SITE 312: note = Tnp_P4
  SITE 325: note = Tnp_P5
MSSVFVGIDIGKKKHQSALMGEKGETLARTLSFTNSLAGFQSLLKQLDPWSKEDILIGLEATGHYWLDLYTRLVDTGYSVVVINPLQTDGIRNMYVRKTKNDRCDAVIIADVLRFGRFRKSSVPEEDIAQMKALSRLRTGMVQSMSNVKRQIVAILDRLFPEFEACFNDIFSKSSMAVLDEFADPEELARCPLEELADLLFEKSNGRLGAAKAEHLKETASRSFGTGYAKRSMKFELKLLLEQVRFTQEQILEIEVKLKELMKDHQLITTIPGISDILGSAILGEIGDISRFENPKQLVAFAGLDPSVHQSGNFSATSMHLSKRGSPHLRRALYIAAHVARIHDPVLKEHYEKLINRGKHHRQAQNAVAAKLARIVFSVLYSREPYDIEKLRSKPKLEEMSA

SEQ ID NO: 11241 - protein, 315 aa, unidentified
  source 1..315: note = protein_ee63b73
  REGION 9..153: note = RuvC_domain
  SITE 12: note = RuvC_P1
  SITE 56: note = RuvC_P2
  SITE 96: note = RuvC_P3
  SITE 98: note = RuvC_P4
  SITE 101: note = RuvC_P5
  REGION 192..276: note = Tnp_domain
  SITE 200: note = Tnp_P1
  SITE 229: note = Tnp_P2
  SITE 237: note = Tnp_P3
  SITE 238: note = Tnp_P4
  SITE 249: note = Tnp_P5
MPHPTSQSAGVDISKDHLDVNIYPDGAAKRFANDAKGFRALIVWLAPFAPARIVFEPTGPYHRNFERTLGAAGFPLAKVNPRQARRFAEALGQLAKTDRADAFALARFGMALEPTVRAIAGETLDDMRELHVARRALVKDRTATLNRAHTCRSPLLKRQAAQRLKQIETQIASIELALKSLMSADPALAARFDILMSIPAVGEITAMAMLIEMPELGAIENKQVASLAGLAPVARESGNWKGKRSIRGGRATLRQALYMPALVAIRFNDDFKTKYQALIAAGKAPKVAITAVMRKLLILANALLRAERKWAPKSA

SEQ ID NO: 11242 - protein, 389 aa, unidentified
  source 1..389: note = protein_506a498
  REGION 4..159: note = RuvC_domain
  SITE 7: note = RuvC_P1
  SITE 58: note = RuvC_P2
  SITE 98: note = RuvC_P3
  SITE 100: note = RuvC_P4
  SITE 103: note = RuvC_P5
  REGION 263..349: note = Tnp_domain
  SITE 270: note = Tnp_P1
  SITE 300: note = Tnp_P2
  SITE 308: note = Tnp_P3
  SITE 309: note = Tnp_P4
  SITE 322: note = Tnp_P5
MFYIGIDVGKFNHCACVVSSEGEVLIEPFFFPNNLEGFQSFIKTVKKYKSPKHIVGLEATGHYGDNLVSFLVSHDYEVALINPLTTDAKRKSKIRKTKNDKKDTFLICSVLFDRDYTKVTQRKLDMKQARELTRYHASITEGINQKKNQLQKCIDIVIPEFNSWFKTKYSKAYMAVLKEFGSSYNLASANLAHLKKVLKPKSSGSRVDIDASTLRDNAKKSIGENNEVITLEIKMLIENIELLTSQLKTVDKKIEELAAKLDSPIFSIPGIGIYSGMSILSEIGNINNFSSAVKVMGFAGVDPGTYQSGEYSAPQTALSKRGSRYLRKSLYQCILTVCKYNLTFNKYYKLKRSQGKSHRCAQGHSVRKLIRVIYKLLSENILFDEKLLI

SEQ ID NO: 11243 - protein, 324 aa, unidentified
  source 1..324: note = protein_2fadedc
  REGION 5..154: note = RuvC_domain
  SITE 8: note = RuvC_P1
  SITE 58: note = RuvC_P2
  SITE 98: note = RuvC_P3
  SITE 100: note = RuvC_P4
  SITE 103: note = RuvC_P5
  REGION 195..281: note = Tnp_domain
  SITE 203: note = Tnp_P1
  SITE 233: note = Tnp_P2
  SITE 241: note = Tnp_P3
  SITE 242: note = Tnp_P4
  SITE 254: note = Tnp_P5
MSSIVGIDIAKHSFDIATLQANGKYRSKAKLINAAEGFQVLQEWLNKHSEPGAWIVMEATGTYHEALAEHFYALGYRICVMNPAQIAYYARSQLQRVKTDQVDAKLIASYGEHHQDELRAWQPEPAAIRRLRALVRRLQDLKEIEQMERNRLGVADASVQESIHSVLQRVEEQIAETLKTIRDHIDDDPDLRGKRDLLTSIDGIGEQTAALLLAELGDPLQFESARAITAFAGLNPKLQDSGKHKGHVRISRVGSARLRAGLYMPAITSMTHNPAINALAQRLRARGKAGKQIVCAAMRKLLHIAYGVLKSGQPFDAQLALARG

SEQ ID NO: 11244 - protein, 344 aa, unidentified
  source 1..344: note = protein_e363231
  REGION 6..147: note = RuvC_domain
  SITE 9: note = RuvC_P1
  SITE 52: note = RuvC_P2
  SITE 87: note = RuvC_P3
  SITE 89: note = RuvC_P4
  SITE 92: note = RuvC_P5
  REGION 211..295: note = Tnp_domain
  SITE 219: note = Tnp_P1
  SITE 249: note = Tnp_P2
  SITE 257: note = Tnp_P3
  SITE 258: note = Tnp_P4
  SITE 270: note = Tnp_P5
MTIVTLGIDLGKNLNSVVGLDAQERVVLRRRVRRATLAELADKLQPCTVAMEACCGAHHVGRLFAAKGHEVRLMSPEYVRPYVRAQKNDDNDAAGIAEAATRPSMRFVELKSQERLDLQTLHRARSRLVAARKALVNQLRAILLERGYTFRQGREILEREIDPFLAEPPADLSARMLRLVGDMRAEWRSLNERIDDLNDDLSEHARTDEAANRLTSIPGIGVLGATALVAAVGDGEAFRQARDVSAWLGLVPKQMTTGGKPRLLRITKRGNVYLRMLLIHGARAALPSLSKQATPLGEWLRGLLSRAHRNVVIVALAAKLARIAWATLRRGVRFQPQMGAAAMT

SEQ ID NO: 11245 - protein, 410 aa, unidentified
  source 1..410: note = protein_3a3a37d
  REGION 11..166: note = RuvC_domain
  SITE 14: note = RuvC_P1
  SITE 63: note = RuvC_P2
  SITE 103: note = RuvC_P3
  SITE 105: note = RuvC_P4
  SITE 108: note = RuvC_P5
  REGION 273..368: note = Tnp_domain
  SITE 281: note = Tnp_P1
  SITE 321: note = Tnp_P2
  SITE 329: note = Tnp_P3
  SITE 330: note = Tnp_P4
  SITE 342: note = Tnp_P5
MHHEGEIDVYLGLDVGKGEHHGTALTPAGKKVFDKPLPNSEPRLRELFEKLQAKHGKMLVVVDQPASIGALPLAVARDAGCRVAYLPGLTMRRIADLYPGESKTDARDAAIIADAARSMPHTLRDLAPDAETVAELNMIAGFDDDLAGEVTRTKNRLRGLLTQIHPSLERVLGPRLDHPAVRFLLERYGSPAQLRKAGRRRLITMLRPKAPRMADRLVEDIFDALDEQTVVVPGTDAAALIVPSLAASLTAVLDQRRLLAARIEELLEAHPLSQVLTSVPGIGVRTAARILVDVDVDVDVDVDVGDGSGFATAGCLAAYAGLAPATRRSGSSIRGEHPARRGNKQLKRAFYLAAFASLSQPDSRAHYDRKRREGKHHVAALVCLARRRIDVLFAMLRDGTFYQPPKIATA

SEQ ID NO: 11246 - protein, 341 aa, unidentified
  source 1..341: note = protein_d63bb23
  REGION 7..149: note = RuvC_domain
  SITE 10: note = RuvC_P1
  SITE 53: note = RuvC_P2
  SITE 88: note = RuvC_P3
  SITE 90: note = RuvC_P4
  SITE 93: note = RuvC_P5
  REGION 209..296: note = Tnp_domain
  SITE 217: note = Tnp_P1
  SITE 247: note = Tnp_P2
  SITE 255: note = Tnp_P3
  SITE 256: note = Tnp_P4
  SITE 268: note = Tnp_P5
MEEITLVGIDLGKHVFHLHAQNKAGKAVFRKKLSRKQLVEFFAALHACTVVMEACAGAHQMARKLAIFGHQVKLISPQFVRPFVKSNKNDFVDAEAICEAASRPSMRFVAPKTESQQTLAALHRVRDSLVRDRVRSTNQIHGFLLEFGISLPKGQAVIKRLPALLAEHALPPRLIAILERLHKHIKYLGQQLAEIEKDLNRQLDEDDLGQRLLTIPGVGPITASVLAAEMGDGKQYRCSRDFAASIGLVPRQYSTGGKSNLLGISKRGDKHIRWLLVQCARAFMRQLHKHASPMAEWVRSMLTRRHPNVVACALANKLARVAWALATRHTRFDERSPALPA

SEQ ID NO: 11247 - protein, 385 aa, unidentified
  source 1..385: note = protein_015a4e1
  REGION 38..183: note = RuvC_domain
  SITE 41: note = RuvC_P1
  SITE 87: note = RuvC_P2
  SITE 123: note = RuvC_P3
  SITE 125: note = RuvC_P4
  SITE 128: note = RuvC_P5
  REGION 248..334: note = Tnp_domain
  SITE 256: note = Tnp_P1
  SITE 286: note = Tnp_P2
  SITE 294: note = Tnp_P3
  SITE 295: note = Tnp_P4
  SITE 307: note = Tnp_P5
MQIIVGQSRFAPFGLSFPGFDELKEGVQNVTARYDYHIGVDYHKSYSHLVVQDSAGKTLRSGRVKNDRQALGSFLERYRNNSHAVMEATRNWMVMYDWLDDICEDVVLAHPLKVKAIADARIKTDKIDATVLAHLPRADLVPQAWAPGDRVRELRLALRERMFYVRLRTMTRNRVVTVFDRYPEQTAQLKKLGDLFGKTGRQQLVGLNVSEIDRIQIDRGLEFIGDINERIKQSEATIRAMTKTNGNVKLLKTIPGIGEFFARLIDAEIDDISRFRNPKKLAAYAGLVPSTYSSGGKTYHGKIIRQGNKWLRWAFVEAVQPAIATDPQLRAQYEHLKFRGVNKARVAIARKLLAITFQILRDQRPYERRSDNSVEGSSSTKSRLS

SEQ ID NO: 11248 - protein, 401 aa, unidentified
  source 1..401: note = protein_39b2162
  REGION 7..172: note = RuvC_domain
  SITE 10: note = RuvC_P1
  SITE 63: note = RuvC_P2
  SITE 103: note = RuvC_P3
  SITE 105: note = RuvC_P4
  SITE 108: note = RuvC_P5
  REGION 272..357: note = Tnp_domain
  SITE 280: note = Tnp_P1
  SITE 310: note = Tnp_P2
  SITE 318: note = Tnp_P3
  SITE 319: note = Tnp_P4
  SITE 330: note = Tnp_P5
MDPHLCVGIDVGCRSHRVGIALPDGWILEEFDISHSDAGFQEFFRRVEVHRCELSLPVAVAMEGYNGYARPLDQLVQDKGYRLYNVNNLKLARFKEVFPGAAKTDPIDARKILELFRLKDQLPLAKDAIQEVLSAPVVNEKLKRLSRRRRHLVIEKMRVLNRMQADLQAVCPELLAATNDADNLWFLRLLTFGDDLRQLARLRPSTILQIPSVGQKYAGLIQQWQVKAQFSGEVEYVGPMIIQDARRILELREQIHALDEVMAELADQSEIARRLSTIPGFGKTSIAELAGEIGTMERFASEASLALYLGMCPLTRQSGQMCTARAPRQVNTRCKSAMMTTVARHIGCVPQSRAYYDRKRAEGKTHNQAIRSLGRHLVRVIWAMLRDGRNYETREDLHPTT

SEQ ID NO: 11249 - protein, 348 aa, unidentified
  source 1..348: note = protein_1aca842
  REGION 7..147: note = RuvC_domain
  SITE 10: note = RuvC_P1
  SITE 53: note = RuvC_P2
  SITE 88: note = RuvC_P3
  SITE 90: note = RuvC_P4
  SITE 93: note = RuvC_P5
  REGION 210..296: note = Tnp_domain
  SITE 218: note = Tnp_P1
  SITE 248: note = Tnp_P2
  SITE 256: note = Tnp_P3
  SITE 257: note = Tnp_P4
  SITE 269: note = Tnp_P5
MENISRIGMDTSKSIFVLHGVDASDQVALRKKLRRKEVVEYFRKLRPTRIGIEACGASHYWARELGALGHQVLLIAPQHVKPYVRRNKNDAADAEAICEAMSRPRTWFVPAKTAEQQAGLMLAGTREAFVRRRTQLSNTIRSYAAEFGLVSSRGLDKIEPLLARIAADDDLPTLAKEMFADLGEDYVLLQKRLDIIERKLRLWHRNDEQSRRLAEIPGVGVVGAALLAMKVPDPKAFRSGRDFAAWLGLTPKDHSTAGKQRLGVITRAGDETLRSVLVVGATALLRQVRLGRSHHSRWLVDLLRRKPPKLVAVALANKTARIAWKLMVSGECYDRTRVGTAAREAAPA

SEQ ID NO: 11250 - protein, 349 aa, unidentified
  source 1..349: note = protein_0d84758
  REGION 12..153: note = RuvC_domain
  SITE 15: note = RuvC_P1
  SITE 58: note = RuvC_P2
  SITE 93: note = RuvC_P3
  SITE 95: note = RuvC_P4
  SITE 98: note = RuvC_P5
  REGION 217..302: note = Tnp_domain
  SITE 225: note = Tnp_P1
  SITE 255: note = Tnp_P2
  SITE 263: note = Tnp_P3
  SITE 264: note = Tnp_P4
  SITE 276: note = Tnp_P5
MIRNTPRDAAVYGVDLGKNLFHVVGLDSCGAVVQRVKFRRETLLNFFERAGRAVVGMEACPGSQWLARKLLAMGHTVRIVPAQFVKPYVKSQKNDTIDAEAIAEAVTRPTMRFTQVRTTEQVDLQALHRIRDQLVASRTRLINQVRAFCLEYGVAIRQGAGVFRLDLPRVLANEGNDLTPAMRRMLTELFEDVGRLDQRIATVTREVEGLAARDDRARRLMTIPGIGPLAATALLAAVGDGRQFRRARDLAAWLGLVPREHSTGGKTTLLGISKRGNRYVRRLLIHGARSCVTHLDRTRDRLGGWLDGLQARMHVNKVTVALAAKIARTAWAIITKPGALYERRDPTVA

SEQ ID NO: 11251 - protein, 352 aa, unidentified
  source 1..352: note = protein_9e9fc57
  REGION 4..160: note = RuvC_domain
  SITE 7: note = RuvC_P1
  SITE 59: note = RuvC_P2
  SITE 100: note = RuvC_P3
  SITE 102: note = RuvC_P4
  SITE 105: note = RuvC_P5
  REGION 222..307: note = Tnp_domain
  SITE 230: note = Tnp_P1
  SITE 260: note = Tnp_P2
  SITE 268: note = Tnp_P3
  SITE 269: note = Tnp_P4
  SITE 280: note = Tnp_P5
MVTVGIDPHKHVHVAVAVDAAGRRIGQPLTVKNDALVITNLLKWIRSLTDDALITWAIEDGRGFARRLADGLLLAGHEVVWVPSRLTAAHRKLHAATGSKSDPTDAAAAAHAVIATPDLDRHRIDEHVRELRVLVDYRSDVVKRRTMVINQIKAQFHVWLDHTPGDLSRTKVLNTLTTRLGAAPLRTHIRQALTEMIAEIADLNRRVHDLDATIKDLVTPLAPTLLEITGISHNSAAVLISEIGDVTRFSTSAKLARYTGCAPIPVYSSDKERYRLHRGGNRRLNSVLYTAAIVQKRWHPAAQELLARHTPAKGARGARRILQRHLVDVVHRAMITDQASWQHQITRYQPAA

SEQ ID NO: 11252 - protein, 417 aa, unidentified
  source 1..417: note = protein_5508301
  REGION 9..163: note = RuvC_domain
  SITE 12: note = RuvC_P1
  SITE 60: note = RuvC_P2
  SITE 100: note = RuvC_P3
  SITE 102: note = RuvC_P4
  SITE 105: note = RuvC_P5
  REGION 286..371: note = Tnp_domain
  SITE 294: note = Tnp_P1
  SITE 324: note = Tnp_P2
  SITE 332: note = Tnp_P3
  SITE 333: note = Tnp_P4
  SITE 345: note = Tnp_P5
MHDQFGVFVGLDVGKEGHHAVALNRDGKRLHDATLPNTEAGLRKLFDKLARHGRILLVVDQPASIGALPVAVARARGHQVAYLPGLVMRRLADLHPGTAKTDARDAYVIADAARTLPHTLRRVDTGDETLAELEVLVGYDDDLAGEVTRISNRIRGLLTQTHPPLERVLGPKLQHPTVLELLSRCGGPAGIREAGRAKLTEIVKKRAPRMGVRLVEQILTALDPRMGVRLVEQILTALDAQTVVVPGTTAAQTVLLRLADSLRDLLRQRDQVAEQVEGMLDAHPLAEVLTSIPGIGVRTAARILLEVGDGSSFPTAGHLAAYAGLAPVTRRSGTSIRGEHPPKGGNKQLKRAFFLSAFAALADPASRTYYDRKRAEGKKHNAALICVARRRVDALHAMLRTRTPYQPRTADEPRLAA

SEQ ID NO: 11253 - protein, 342 aa, unidentified
  source 1..342: note = protein_6639202
  REGION 7..150: note = RuvC_domain
  SITE 10: note = RuvC_P1
  SITE 53: note = RuvC_P2
  SITE 89: note = RuvC_P3
  SITE 91: note = RuvC_P4
  SITE 94: note = RuvC_P5
  REGION 213..299: note = Tnp_domain
  SITE 221: note = Tnp_P1
  SITE 251: note = Tnp_P2
  SITE 259: note = Tnp_P3
  SITE 260: note = Tnp_P4
  SITE 272: note = Tnp_P5
MTEVSTIGLDLAKRVFQVHGIDATGAAVLRRQLRRAEVVKFFAKLTPCVVGMEACASAHYWARTLVKLGHEVRLIPPSQVKPYVKRGRKNDAADAAAIAEAVTRPHMQFVPIKSEDTQAVLMLHRTRRLLVSQRTMLANALRSHFAEFGIVEPEGQAGLTRLVVLALDAPDAALPQAAREALAMVAAHLRDTEVKIDALDHEILLWHRGNADSQRVASIPGIGPLTASAIVAAMGDPGRFRTGRDFAAWLGLVPSQNSTGGKTVLGPITKTGDRYVRTLLVIGATSTLWRRRKESGTWLAAMMARGKTARQISVALANKMARIAWAILAKGDTYREPAAQAA

SEQ ID NO: 11254 - protein, 350 aa, unidentified
  source 1..350: note = protein_25d2eb3
  REGION 13..155: note = RuvC_domain
  SITE 16: note = RuvC_P1
  SITE 59: note = RuvC_P2
  SITE 94: note = RuvC_P3
  SITE 96: note = RuvC_P4
  SITE 99: note = RuvC_P5
  REGION 218..304: note = Tnp_domain
  SITE 226: note = Tnp_P1
  SITE 256: note = Tnp_P2
  SITE 264: note = Tnp_P3
  SITE 265: note = Tnp_P4
  SITE 277: note = Tnp_P5
MKERNKPKQAPVFGIDIGKNIFHVVGVGVSGQPVQKVRFRRETLLQFFERAAPALIGMESCPGSQWLARKLIAMGHEVRIMPAQFVKPYVKTNKNDLIDAEAIAEAVTRPTMRFAAVRNVEQVDLQALHRLRSQLVSSKTRLINQMRAFCLEYGIAMRQGAGVFKLDIGRVIADEANDLTRTMRRLLNDMSADLRHMEMRIKAVTTEIEALAAKDDVARRLMTIPGIGTLGATALLSAMGNAQRFRKARDLAAWLGLVPHQHSTGGRSNLLSISKRGNGYLRRLIIAGARSCYAHLDRKRDRLGNWMNALEARMHPNKAIVAVAAKIARIAWVIITKPGALYERKDPRFA

SEQ ID NO: 11255 - protein, 341 aa, unidentified
  source 1..341: note = protein_713bbac
  REGION 7..148: note = RuvC_domain
  SITE 10: note = RuvC_P1
  SITE 53: note = RuvC_P2
  SITE 88: note = RuvC_P3
  SITE 90: note = RuvC_P4
  SITE 93: note = RuvC_P5
  REGION 211..296: note = Tnp_domain
  SITE 219: note = Tnp_P1
  SITE 249: note = Tnp_P2
  SITE 257: note = Tnp_P3
  SITE 258: note = Tnp_P4
  SITE 270: note = Tnp_P5
MGEVSTIGLDLAKNVFQVHGADASGAVLFRKKLRRHQVLTFFAAQRPCTVAMEACASSHHWAREIGRLGHAVRLIPPAYVKPFVKRQKNDAADAEAICEAAQRPTMRFVAPKSEQAQAAAIVFRARDLLVKQRTQIINALRGHLAEFGLVRAKGPAHVPQLVQVIEDGAESVPELARPILKMLIETLHSLDEQIARLDREVAERAKRDETARRLMTIPGIGPVTAVALTALAPPAEAFSRGRDFAAWVGLTPLQHSTGGKQKLGATSKMGERTLRRLLIIGANSVLLRVARNGAPAGSWIGRMLARKPPMLVRVALANKMARIVWALLTSGEVYRAPAVSA

SEQ ID NO: 11256 - protein, 344 aa, unidentified
  source 1..344: note = protein_5560990
  REGION 7..150: note = RuvC_domain
  SITE 10: note = RuvC_P1
  SITE 54: note = RuvC_P2
  SITE 89: note = RuvC_P3
  SITE 91: note = RuvC_P4
  SITE 94: note = RuvC_P5
  REGION 213..299: note = Tnp_domain
  SITE 221: note = Tnp_P1
  SITE 250: note = Tnp_P2
  SITE 258: note = Tnp_P3
  SITE 259: note = Tnp_P4
  SITE 271: note = Tnp_P5
MNTIRVVGIDIAKSVFQVCVWMDDGSVAWNKKISRSKLQDTVRQFEPGTLLAMEACSTSHFWGRTFSAMGYSVRLIPAQHVKAFVRSQKNDANDALAICETALRPGIHFVSVKTTEQQDIKALRNTRQLMVEQRTALANQLRSLLAEYGVTIPVGIQYLQQQLPEVIEDASNNLTFTLRHLLSSLRANMQALNELVASLDSEIAALSSQQTVYRHLLTIPGVGPLIAAAFISEVDATQFSSGRELSAWCGLVPRQYSSGGKQRLSSVTKNGNRSLRTLIIHGARSVMRCVKKRDDNLGRWLQKLEARRGFLKATVALANKLPRIIWRVLTDSVDFNMNKAFSMV

SEQ ID NO: 11257 - protein, 343 aa, unidentified
  source 1..343: note = protein_c1e706f
  REGION 6..150: note = RuvC_domain
  SITE 9: note = RuvC_P1
  SITE 54: note = RuvC_P2
  SITE 89: note = RuvC_P3
  SITE 91: note = RuvC_P4
  SITE 94: note = RuvC_P5
  REGION 213..299: note = Tnp_domain
  SITE 221: note = Tnp_P1
  SITE 251: note = Tnp_P2
  SITE 259: note = Tnp_P3
  SITE 260: note = Tnp_P4
  SITE 272: note = Tnp_P5
MDMIRVGIDLAKNVFQMHGVDRSEKAIWRRKLARVEWLDVLQRTVPLHAVIGMEACGSAHHWARRLQAIGYTVKLIAPQFVKPYVKSNKNDANDAEAICEAMSRPGMRFVAVKTVEQQDVQAVHRVRAGLMEQRNAKANQIRGLTSEYGIVAPREILQLRRAVPVWMENVNSGLSDRFRRLLRGLWEDLRSLDDRIRELDREIAAIAASDPVARRLQQLRGVGPMVATALIATVGDARQFSNGRQMAASLGLTPRQNSSGGRERLLGISKRGDAYVRCLLIHGARAMIQMARRRTDALSLWVMRIAGSRHPNIAAVALANKTARIAWAMITRETDYQPELAAH

SEQ ID NO: 11258 - protein, 345 aa, unidentified
  source 1..345: note = protein_bcdc147
  REGION 21..172: note = RuvC_domain
  SITE 24: note = RuvC_P1
  SITE 77: note = RuvC_P2
  SITE 117: note = RuvC_P3
  SITE 119: note = RuvC_P4
  SITE 122: note = RuvC_P5
  REGION 217..303: note = Tnp_domain
  SITE 225: note = Tnp_P1
  SITE 254: note = Tnp_P2
  SITE 262: note = Tnp_P3
  SITE 263: note = Tnp_P4
  SITE 276: note = Tnp_P5
MHKASERSWLTLKQEVIVFYLGMDVAKAKLDCCLLLDEASGKRKTKVVKNTQSGIVDLLAWVAKQNVSSEALHIVMEATGIYHEQAAMALADAGVIVSIINPAQVKDFGRGLAVRTKTDGVDSVVLARYGALLKPKAWVPPPLEARVLQALLVRREALVQDLHRERNRQEKAGATDTPALIHKSLEEGIAFLAKQLAQIQKDIDSHIDKHSDLQKDRALLQSIPAVGPQVGSNLLSVMHNHDFGSAEQLAAYLGLVPVERQSGSSVLGRARMSKAGPARIRAVLYMAAVVGTRYNPHVKAVYERLLARGKSKMSSLGAAMRKLVHLCFGVLKTQQPYQHNYLKYA

SEQ ID NO: 11259 - protein, 394 aa, unidentified
  source 1..394: note = protein_beed8cb
  REGION 4..163: note = RuvC_domain
  SITE 7: note = RuvC_P1
  SITE 60: note = RuvC_P2
  SITE 101: note = RuvC_P3
  SITE 103: note = RuvC_P4
  SITE 106: note = RuvC_P5
  REGION 266..353: note = Tnp_domain
  SITE 274: note = Tnp_P1
  SITE 304: note = Tnp_P2
  SITE 312: note = Tnp_P3
  SITE 313: note = Tnp_P4
  SITE 326: note = Tnp_P5
MIYVGIDVEKDKHDCFIVNLDGEVLHDVFTIQNNMAGFKDLLFKIKSAEPNPDKVKVGLEATGHYSCNILGFLKRMGLTTIEINPLYTSLSRKSISLRKTKTDKVDARTIANMIMSDVSLKPYSDKLYHNEDLKSLTRYRFDKVAQRAKLKQSVSRLINILFPELETLVSTLHGKAVYTLLSEFPSAQHIASANLKHLTHLLDKASKGRFKRATADQIRETARQSIGSYLPAKSLELKHTIKLINELSDEIAEIEAEIKKIMDIIDSPILSIPGIGINLGAIIIAEIGDFSRFDNPDKILAFAGCSPSTYQSGQLYSSHAKMEKRGSKYLRWALMNAAAYVCKWEPTFANYLSKKRSEGKHYYVALSHAAKKLVRLVFHLETTGEKYKFQKLSS

SEQ ID NO: 11260 - protein, 331 aa, unidentified
  source 1..331: note = protein_3de3629
  REGION 10..152: note = RuvC_domain
  SITE 13: note = RuvC_P1
  SITE 56: note = RuvC_P2
  SITE 91: note = RuvC_P3
  SITE 93: note = RuvC_P4
  SITE 96: note = RuvC_P5
  REGION 215..299: note = Tnp_domain
  SITE 223: note = Tnp_P1
  SITE 253: note = Tnp_P2
  SITE 261: note = Tnp_P3
  SITE 262: note = Tnp_P4
  SITE 274: note = Tnp_P5
MKACKTAAVFGVDIGKNIFHVVGVDVGGKPVFCGKFRRDGLLKFFVNTPPVTIGMESCPGSQWLARKLQGMGHTAKIIPAQFVKPFVKSNKNDTVDAEAIAEALTRPTMRFVQLRNPEQISVQALHRVRDRFMRQRTGLINQIRGFLLEFGISIRQGAGVFKLDFPRILEDTENELPHSLRCLLADLWNDLKGLEIRIEEITLAIQRTVQSSDTARRLMTVPGIGPLAASALEAAAGRGQHFKNGRFFAAWLGLVPRQYSTGGEPTLLAISKRGNTYLRRLLIHGARSCVQTCDRGKHPLGAGLPSSNNECIATKLSLHWPTKSLEWPGKF

SEQ ID NO: 11261 - protein, 269 aa, unidentified
  source 1..269: note = protein_01cfb4a
  REGION 1..67: note = RuvC_domain
  SITE 7: note = RuvC_P3
  SITE 9: note = RuvC_P4
  SITE 12: note = RuvC_P5
  REGION 131..217: note = Tnp_domain
  SITE 139: note = Tnp_P1
  SITE 169: note = Tnp_P2
  SITE 177: note = Tnp_P3
  SITE 178: note = Tnp_P4
  SITE 190: note = Tnp_P5
MQGKGGKNDANDAAAVCEAASRPSMRFVPLKTPAQQAMLAIHRLREGYKEERTACINRIRGLLTEFGLVFAQRPEVLRRDLSDVLEDATNEIPALLRMALRQAHLHWLELECHMAWCDERIEAHVRADEQAKAAAQLCGVGPVTASALVAMVGDFKQFRSGNPFGAWLGFVPRQNSSGGKASLGQIRNGGDGYLRTRLIQGAKAAMVHAKKRSDRISLWMVSLIDRIGWQKAVVAMANKNARILWAVLTKGTAYDPNHVPINPGLPAIA

SEQ ID NO: 11262 - protein, 396 aa, unidentified
  source 1..396: note = protein_808a8b9
  REGION 6..160: note = RuvC_domain
  SITE 9: note = RuvC_P1
  SITE 58: note = RuvC_P2
  SITE 98: note = RuvC_P3
  SITE 100: note = RuvC_P4
  SITE 103: note = RuvC_P5
  REGION 265..352: note = Tnp_domain
  SITE 273: note = Tnp_P1
  SITE 304: note = Tnp_P2
  SITE 312: note = Tnp_P3
  SITE 313: note = Tnp_P4
  SITE 325: note = Tnp_P5
MPEIWAGVDIGKTHHHAVVINAEGERLLSRRIQNDETELLALLGDVLAISDDVLWAVDLNHGGAALLIGLLTAHDQSVAYLTGLAVHRASATYRGEAKTDAKDAFVIADQARIRRDLGLLRPGDEIAVALRTLTTRRLDLVFDRTRQINRLRAQLLEIFPALERALDLTNKGPVMLLTGYQTPAAIRRTGAKRIETWLRNRKVKGAAALARTAVDAAQAQHTALPGERLAAAMVVRLAKGVMALDEEIAELDALIEARFREHPHAEAIRSLPGMGARLGAEFIAATGGDMDAFGSADRLAGFAGLAPQPRDSGRVSGNLHRPRRYHRGLLRAMYLSAPASLKCCPASKADYQRKRSEGKGHKQALLALARRRVNVLWAMIRDRECYQVSLPVTVAA

SEQ ID NO: 11263 - protein, 341 aa, unidentified
  source 1..341: note = protein_e695362
  REGION 7..149: note = RuvC_domain
  SITE 10: note = RuvC_P1
  SITE 53: note = RuvC_P2
  SITE 88: note = RuvC_P3
  SITE 90: note = RuvC_P4
  SITE 93: note = RuvC_P5
  REGION 209..296: note = Tnp_domain
  SITE 217: note = Tnp_P1
  SITE 247: note = Tnp_P2
  SITE 255: note = Tnp_P3
  SITE 256: note = Tnp_P4
  SITE 268: note = Tnp_P5
MDSVTLIGIDLGKHSFHVHGQDRQGKALLRKKFSRKQLMEFLANFPPCTIVMEACAGAHHMARQLAALGHEPKLISPQFVRPFVKSNKNDFIDAEAICEAACRPTMRFVTPKNEAQQTLAALHRVRDSLVRERVKASNQIHGFLLEFGISLPIGHAAIRRLALVLAEQELPPKLVQVLERLHAHFKYLEAQIADIEKELTREVTEDDLGQRLMTVPGIGPITASVLAAEVGDGKHYRCGRDFAASVGLVPRQYSTGGRSKLLGISKRGDKDLRRLLVQCARAYMQRLERQQGRLAQWVRGMLMRRHSNVVACALANKLARITWAIAAHHEQFKIKEVPLAQ

SEQ ID NO: 11264 - protein, 337 aa, unidentified
  source 1..337: note = protein_a76265b
  REGION 6..147: note = RuvC_domain
  SITE 9: note = RuvC_P1
  SITE 52: note = RuvC_P2
  SITE 87: note = RuvC_P3
  SITE 89: note = RuvC_P4
  SITE 92: note = RuvC_P5
  REGION 208..293: note = Tnp_domain
  SITE 216: note = Tnp_P1
  SITE 245: note = Tnp_P2
  SITE 253: note = Tnp_P3
  SITE 254: note = Tnp_P4
  SITE 266: note = Tnp_P5
MQYKRIAVDTSKATFTVHGVDAQDRPILRQNLSRAQFEVFCRKLAPTELVLEACGGSHHWGRLLQNIGHVVRLIPPQYVKPFVKRGKNDRNDAAAISEAASRPDMRFVPVKPLASQADAIDLSVRDLLIRQRTQLVNAMRGHAAEFGIIAAQGIAQIDPLLDKVAGSEMPQIAKDALAQLGQCIDDLDNHRAAVDQRLTARHKANSVSQRLAAVPGVGPITALTLATKIDPSQFNSARHFAAWLGLTPKERSTGGRARLGGISRAGNERLRQLLVLGATAVIRHAKPESKTPNPWLLKLLERRPRKLAAVALANKMARILWAMMANNTAYRRTPQAA

SEQ ID NO: 11265 - protein, 328 aa, unidentified
  source 1..328: note = protein_ee7e924
  REGION 7..149: note = RuvC_domain
  SITE 10: note = RuvC_P1
  SITE 53: note = RuvC_P2
  SITE 88: note = RuvC_P3
  SITE 90: note = RuvC_P4
  SITE 93: note = RuvC_P5
  REGION 212..298: note = Tnp_domain
  SITE 220: note = Tnp_P1
  SITE 250: note = Tnp_P2
  SITE 258: note = Tnp_P3
  SITE 259: note = Tnp_P4
  SITE 271: note = Tnp_P5
MEKITTIGLDITKQVFQVHGINGAGSIVSRRKLRRDDVVGFFRALPPCLIGIEACATGHHWARVLMALGHEVRLMPASYVKPYVKRQKNDATDAEAICEAVARPTMRFVPVKSEEQQSVLMLHRVRELLIRQRTMLVNALRGHLAEFGIVTRQGIAGVGMLIALVEGDDHDLIPALARSALLPLIGQLREVHQKVSEMDRQILAWHRSNELSRRLETTPGIGPITASAITATVTDASLFKSGRQLAAWIGLAPRQNSSGGKDRLGRISKQGDPYLRRLLVVGTHAVLRFSRKGKAASTRWAAELLAKKPYNVVAVALANKIARIVFGR

SEQ ID NO: 11266 - protein, 450 aa, unidentified
  source 1..450: note = protein_11971aa
  REGION 11..166: note = RuvC_domain
  SITE 14: note = RuvC_P1
  SITE 63: note = RuvC_P2
  SITE 103: note = RuvC_P3
  SITE 105: note = RuvC_P4
  SITE 108: note = RuvC_P5
  REGION 281..332: note = Tnp_domain
  SITE 310: note = Tnp_P2
  SITE 318: note = Tnp_P3
  SITE 319: note = Tnp_P4
MVDTTAIDLFLGLDLGKEFHHAHGRTGDGRTVHDKRLPNTEPKLLELFSKLVARFGTVLVVVDQVANIGALPLTVARAAGCRVAYLPGLSMRRAADLHPSEAKTDARDAFVIAETARTMPHTLRAVDRDDEVLAELTMLTGYDNDLAGEVNRATNRLRGLLSQIHPSLERVLGPRLAYPYVQALLQRHGSPARLRKLGQARCKALLKAHGSRKAHHLTTEIFDALAEQTLVVPGTEASALIVPGLAAQLAAAHAQRQATDRRSRPAGGPPSFPPPDVTARHGRQDHAAVIVAIGDGSGFRTAGHLASYAGLAPATKSSGTSIRASTPPTAATACSNVPCSRPLSPRSAAGATCPRGSTTTASAPAADPHPGHPPPGETTRERHPRDDPHRHLLRTTRPSTSPPEHPTCPVTPAHRHGHPPSRPPARPHDTRSSRERHAPRDAPGNHHEPL

SEQ ID NO: 11267 - protein, 275 aa, unidentified
  source 1..275: note = protein_e94af9a
  REGION 1..74: note = RuvC_domain
  SITE 14: note = RuvC_P3
  SITE 16: note = RuvC_P4
  SITE 19: note = RuvC_P5
  REGION 138..223: note = Tnp_domain
  SITE 146: note = Tnp_P1
  SITE 176: note = Tnp_P2
  SITE 184: note = Tnp_P3
  SITE 185: note = Tnp_P4
  SITE 197: note = Tnp_P5
MPAKYVRPYSKGQKNDFNDAEAIAEAVQRPTMKFVATKTAEQLDLQALHRVRERLVSQRTGINNQIRAFMLERGIAVRQGIGFLRTELPTILATRTDALSPRMLRVIEELAGDWRRLDQRIDGLSGEIEALARQDQACSRLMTVPGIGPIISSAMVAAISTGDVFSKGRDFGAWLGLVPKQISTGDRTILGKISRRGNRYLRVLFVQAVWVVLVRIKNWERYGLKSWIEAAKRRLHRNVLAMALANKLARIAWAVLAKGRAFELKRTDDAAVRPA

SEQ ID NO: 11268 - protein, 338 aa, unidentified
  source 1..338: note = protein_39b4cc5
  REGION 17..168: note = RuvC_domain
  SITE 20: note = RuvC_P1
  SITE 67: note = RuvC_P2
  SITE 105: note = RuvC_P3
  SITE 107: note = RuvC_P4
  SITE 110: note = RuvC_P5
  REGION 210..297: note = Tnp_domain
  SITE 218: note = Tnp_P1
  SITE 248: note = Tnp_P2
  SITE 256: note = Tnp_P3
  SITE 257: note = Tnp_P4
  SITE 270: note = Tnp_P5
MNCSLSKSNKVMKSIYVGIDISKKTLDICLIDQGLESYFKITNTIKSVAKFFKGLAEKQVQFFVAMENTGHYNYNLYEVLKCYSFKVYVVDSRHVKKSIGLARGKNDKVDAKRIAIFIERNHQDFQCWKPASKQVQAIKILLSQRRHKVKARQGLKQQNKELKIMKDLACVKKIISINMEQIKQLTSHIKTLEKLIELEIKEDKELHQNIKRIKTVPGIGPISAWSLVVKTEGFTRLTDPRKLACFTGVVPFEQQSGTSLKTKPRVSKMADKQLKCVLQMAAMRAVRMENDLQKFYLRKVKEGKNKMSVLNAVRNKLIHITMALIKNQTFYQNRLQMS

SEQ ID NO: 11269 - protein, 317 aa, unidentified
  source 1..317: note = protein_4d62f2f
  REGION 6..148: note = RuvC_domain
  SITE 9: note = RuvC_P1
  SITE 52: note = RuvC_P2
  SITE 87: note = RuvC_P3
  SITE 89: note = RuvC_P4
  SITE 92: note = RuvC_P5
  REGION 189..275: note = Tnp_domain
  SITE 197: note = Tnp_P1
  SITE 227: note = Tnp_P2
  SITE 235: note = Tnp_P3
  SITE 236: note = Tnp_P4
  SITE 248: note = Tnp_P5
MNRIVVGVDIAKRVFQLHWVEPQTGEIVALQVKREKFLEHFGNRSKSLIGMQACGGSQHWARALQKLGHEAKLLSARMVKPFVVGNKNDAADARGIWMAVQQTGIKAVAVKSEEQQAVLALHRMREQLVKFRTAQINGLRGLLTEYGEVMPQGRAGIKRDIPGALGRLSEQIGRIERRLRQWQREDSATQRIAAIPGVGLLSATAAVATMGDAKVFKSGREFAAWLGLLPRQSGTGGRVRLLGISKRGDKYLRTLLIHGARAVLTHSKSPPEWLTELLKRRPKNVAVAALANKMARTIWALTAHEPAYQSGYVSRPA

SEQ ID NO: 11270 - protein, 406 aa, unidentified
  source 1..406: note = protein_bc69bb4
  REGION 6..164: note = RuvC_domain
  SITE 9: note = RuvC_P1
  SITE 59: note = RuvC_P2
  SITE 101: note = RuvC_P3
  SITE 103: note = RuvC_P4
  SITE 106: note = RuvC_P5
  REGION 278..364: note = Tnp_domain
  SITE 286: note = Tnp_P1
  SITE 316: note = Tnp_P2
  SITE 324: note = Tnp_P3
  SITE 325: note = Tnp_P4
  SITE 338: note = Tnp_P5
MNMYAVGIDVSKRKSTVAILQPGGKVVVRPFDVPHLSPHFRSLKRMIGNLDGEARIVMECTGRYHEPVARALSQAGFFVSAVNPQIIHNFQGQDNPLRKVKTDQSDSVKLARYTLDNWADLKQYSLMDELRSQLKTMNRQFDFYMKHKIAMKNNLIGLIDLTYPGANAYFDSPAREDGSQKWVDFLDTYWHVDCVRRMSFHAFTDHYQKWCARKKYNFSLTKADEIYGKAKELIPVLPKDNFTKQIIKQAIQQLNSVSQTVEQLRSLMNETASKLPEYPVVMAMKGVGPSLGPQLMAEIGDVTRFTHRSAITAFAGVDPGVNASGEYSQKSVHASKHGSPVLRKTLFQIMDTLIKTKPDDAVYQFMDKKRAQGKPYYVYMTAGANKFLRIYYGRVKEYLSTLPTSD

SEQ ID NO: 11271 - protein, 388 aa, unidentified
  source 1..388: note = protein_296a945
  REGION 11..163: note = RuvC_domain
  SITE 14: note = RuvC_P1
  SITE 60: note = RuvC_P2
  SITE 100: note = RuvC_P3
  SITE 102: note = RuvC_P4
  SITE 105: note = RuvC_P5
  REGION 267..352: note = Tnp_domain
  SITE 275: note = Tnp_P1
  SITE 304: note = Tnp_P2
  SITE 312: note = Tnp_P3
  SITE 313: note = Tnp_P4
  SITE 325: note = Tnp_P5
MPAAETPVAYLGIDVGKSSHSACALDAGGGVAFRAELANRPDDIDRLLERAGSGALVVVDQKRNIGALVLARAHAHGNPCAYLPGYAEKQARGMFPGIAKTDAIDAEVIARTALGVPRALRPAPEEPEGAASLRILSSQREFASSARTRAKNRLRATLLEADPALEGAVDPSSRWQVSMLAEFGGAAGCSAAGWRSFSNAARRAGAPAAGARRLWEALLASSRSGRRLPAGEDVAVRMLAREIASLDADIEELDSLVADSLAGDEVYECLLTVPGIGPKTAAALVTSIDISAFRGHDELASYCGVAPSDRRSGSSIRSTSPQHGGNRQLKNLLIFSCNSLIGTDNRFGRYYGECRARGMRHSKALKAVARKRLKVIYAIMRDAVPYAA

SEQ ID NO: 11272 - protein, 328 aa, unidentified
  source 1..328: note = protein_8b95f93
  REGION 5..159: note = RuvC_domain
  SITE 8: note = RuvC_P1
  SITE 62: note = RuvC_P2
  SITE 102: note = RuvC_P3
  SITE 104: note = RuvC_P4
  SITE 107: note = RuvC_P5
  REGION 204..289: note = Tnp_domain
  SITE 212: note = Tnp_P1
  SITE 241: note = Tnp_P2
  SITE 249: note = Tnp_P3
  SITE 250: note = Tnp_P4
  SITE 262: note = Tnp_P5
MSINVGIDVSKGSLDVCVLNNQTKSGQRYRKFKNDKEAHSDLNSWLLKTAKCKAEDILITMEATGVYHEPIAFYLHMAGFLVFISNPGKAKKFSQSLGLIHKTDKSDSYMLALYGDAQGSRAHLWTPDSLNVRNIKSLSRRLSALEKDRLRESNRLEASEISDAHERVICSIKRVISLIDEEIASIEEEIDLAIRSDPTMNKNHQLLQSIVGVGKVMSRELVYLFSAKQFSSAKQAAAFVGPIPRLNESGNLKGRTTLSKVGPSRVRAKLFLAAVSASTHNPDIKEQKRRLLAAGKTKMQALGAAMRKLIQICFGILKTQTEYQPQTS

SEQ ID NO: 11273 - protein, 465 aa, unidentified
  source 1..465: note = protein_f27df07
  REGION 36..182: note = RuvC_domain
  SITE 39: note = RuvC_P1
  SITE 86: note = RuvC_P2
  SITE 121: note = RuvC_P3
  SITE 123: note = RuvC_P4
  SITE 126: note = RuvC_P5
  REGION 312..396: note = Tnp_domain
  SITE 318: note = Tnp_P1
  SITE 349: note = Tnp_P2
  SITE 357: note = Tnp_P3
  SITE 358: note = Tnp_P4
  SITE 369: note = Tnp_P5
MRTDKMLWRNRKLKKELARRLQSENPGLEVVHPHAAGIDVGNSAHYVAVRPDRDSQPVRRFECFTADLHRLANWLQDCGVKTVALQSTGVYWIPLYDILEERGFEVYLVNARHTKNLPGRKSDVQESQWLLKLHTYGLLNNSFQPPSKIRILRTYWRQRLQHVTGAATCVQRMQKALTQMNIQLANVISDLSGVTGQLIVRAIIGGERDPWKLAELSHPRIQASRGEIAKSLEGNWRPELIFVLQQEMEMYNTYQRRVAECDQELQKHLGAFADTVPPPVKEELPPKKKKKQNKNNPHFHLAEELQRISGVDLTRIDGVDVMVAQTVISEVGLDMSRWKTEAHFASWLGLCPDNRISGDKVLARGTRHVLNRAATALRLGASTLLRSQTYLGAQYRRLRTKLGAPKAITAMAHRLARLVYRMLKYGQQYIDKGAEYYEQRNRQQQIEFVRKKAAQLGLQVTPAHV

SEQ ID NO: 11274 - protein, 409 aa, unidentified
  source 1..409: note = protein_8d08105
  REGION 4..163: note = RuvC_domain
  SITE 7: note = RuvC_P1
  SITE 60: note = RuvC_P2
  SITE 100: note = RuvC_P3
  SITE 102: note = RuvC_P4
  SITE 105: note = RuvC_P5
  REGION 271..357: note = Tnp_domain
  SITE 279: note = Tnp_P1
  SITE 310: note = Tnp_P2
  SITE 318: note = Tnp_P3
  SITE 319: note = Tnp_P4
MLLVGDDWAEDHHDVELMDSAGRVLARARLPEGAAGMARLHAMIGEQLGEDAEAGGVRVGIETDRGLWVMALAAAGYAVFGINPLQVARYRERHGVSGAKSDAADAHTLADMMRTDAHQLRPVAADSPAAQAVKVVARAHKTLIWERTRQVQRLRHQLRDYFPAALEAYPDLAAPGTLELLAKAPDPASAAQLTTAQVSAALKRARRRDITARAAAIRAALRGEQLAQPPAVTAACAAVARALAAVITALNTQIKVMEGQVEAHFLQHPDAEIILSQPGLGPILGARVLGEFGDDPHRYASGKARKNYAATSPITRASGKRKTVMARYVHNDRLRDALDGQAFAALSASPGARAYYDRQRARGLSHRPALRQLANRLVGILHGCLKTRTLYDEATAWPHHASQEIKPAA

SEQ ID NO: 11275 - protein, 405 aa, unidentified
  source 1..405: note = protein_00860ff
  REGION 5..161: note = RuvC_domain
  SITE 8: note = RuvC_P1
  SITE 58: note = RuvC_P2
  SITE 98: note = RuvC_P3
  SITE 100: note = RuvC_P4
  SITE 103: note = RuvC_P5
  REGION 275..362: note = Tnp_domain
  SITE 283: note = Tnp_P1
  SITE 313: note = Tnp_P2
  SITE 321: note = Tnp_P3
  SITE 322: note = Tnp_P4
  SITE 335: note = Tnp_P5
MINAVGIDVSKGRSTIAVLRPGGVTIRRPFDVSHSSADLSSLVQYIGSLEGDTRAVMESTGRYHEPVLHALSDAGIFVSAVNPHLIRNYGNNSLRKVKTDPADAMKIARYTIDNWSELREYTGMDNIRSQLKILNTQTAFLMKQKTAVKNNLIALLDQTYPGVDKLFTSPVRTDGSEKWVDYVYSFWHVDCVRKIGIKAFSERYAAFCKRHGYNFQKGKPQELFDASKELIATLPKDLICKKMIQNSIEQLKLLSRHIVELRFEMDRLASTLPEYSTVMEMYGVGPVYGPQLIAEIGDVSRFPRRESLTAFAGVDPGKNDSGQRISKSVHASKCGSSRLRKTLFQIMSTILQLGDNDDPVYRFLDKKRSEGKDYLVYMTAGANKFLRIYYGKVKECLRQQTNATE

SEQ ID NO: 11276 - protein, 342 aa, unidentified
  source 1..342: note = protein_7ef45fe
  REGION 6..148: note = RuvC_domain
  SITE 9: note = RuvC_P1
  SITE 52: note = RuvC_P2
  SITE 87: note = RuvC_P3
  SITE 89: note = RuvC_P4
  SITE 92: note = RuvC_P5
  REGION 210..294: note = Tnp_domain
  SITE 218: note = Tnp_P1
  SITE 248: note = Tnp_P2
  SITE 256: note = Tnp_P3
  SITE 257: note = Tnp_P4
  SITE 269: note = Tnp_P5
MKDVMIGVDLAKSVFQVHGATMTGEVLFRRRLSRGQFLRFMGGQPPAVVVLEACGSAHHWARELAAQGHEVKLIAPQYVRPFVKRQKNDAADAEAIVVAAQRPEMRFVKPKTQDQQARAVLFRARERLVHQRTELVNALRAVLYEYGQAVPAGVAQLRRIESIIDDPDVALPDLVRDECRDLLAQVAEKSARIEAKTKTRAALAEESDTARRLQTMPGVGPMTALAVEAFAPAMTTFRCGRDFAAWLGLVPRQFSSGGKERLGRVSKAGQVDIRRLLIIGAMARVSWARRRPPAPGSWLDRMLARKPRMLVAIAMANKMARRIWAMLTKGEDYRDPVLALAA

SEQ ID NO: 11277 - protein, 407 aa, unidentified
  source 1..407: note = protein_55020e6
  REGION 6..158: note = RuvC_domain
  SITE 9: note = RuvC_P1
  SITE 57: note = RuvC_P2
  SITE 98: note = RuvC_P3
  SITE 100: note = RuvC_P4
  SITE 103: note = RuvC_P5
  REGION 221..307: note = Tnp_domain
  SITE 229: note = Tnp_P1
  SITE 259: note = Tnp_P2
  SITE 267: note = Tnp_P3
  SITE 268: note = Tnp_P4
  SITE 279: note = Tnp_P5
MMAVMIGIDPHKGSHTAVAIGAAEEPLGDLRVRAGAAQADTLVGWAAAWPERTWAVEGAGGLGHLLAQQLVAAGERVLDVPPKLAARVRLLEAGDTNKNDPNDALSVAVAALRSKARREVAAEDHAAVLKVWAKRHRDLARARNQVACRLHAVLCDLLAGGVSKEITAAHAARILEQVTPSGPVAAARRDLAGQFLEDLRGLDAQLRDTKKKLAAAVRASGTSLTEVFGFGPVNTGTVIGDVTDVTRFPSRDHFASYNGTAPVEVSSGNRKIYRLSLRGNRRINHALHMAAITQIRHRHSDGRAYYDRKIAEGKTHKEALRCLKRRISDAVFARLQADARKAIATAAAKGPGGQPGNDSDSSAAGSHPERQLFGQATPEPATTLRPATPATRTISPKPTSKKTRRDP

SEQ ID NO: 11278 - protein, 407 aa, unidentified
  source 1..407: note = protein_29654ac
  REGION 4..163: note = RuvC_domain
  SITE 7: note = RuvC_P1
  SITE 60: note = RuvC_P2
  SITE 100: note = RuvC_P3
  SITE 102: note = RuvC_P4
  SITE 105: note = RuvC_P5
  REGION 271..357: note = Tnp_domain
  SITE 279: note = Tnp_P1
  SITE 310: note = Tnp_P2
  SITE 318: note = Tnp_P3
  SITE 319: note = Tnp_P4
MLFVGDDWAEDHHDIEVQDGAGRVLARARLPEGIAGITRLHALIGQFAGPDTEPGEVAVGIETDRGLWVMALRAAGYAVYAINPRQVARYRERHGTSGAKSDKADAHAMAGMVRADSRQLRPVAGDSAGAQAIKVAARAHQTLIWERTRQVQRMRHQLREYFPAALAAFEELDAPDALELLARAPDPARAARLTRAQVAAALKRAGRRDIAGKTDTILAALRGEQLVQAEPVAAAYAAAMSSLTVIIAALNGEIAKMERQVTACFRGHPDAAIYLSQPGTGEILGARQLGEFGDDPHRYASAKARKNYAASSPVTRQSGKKKIVMARFIRNDRLADALHRQAQSALRASPGARACYDEQRDRGLDHNAALRALSNRLVGLLHGCLKTRTLYDEATAWSHRANIARAS

SEQ ID NO: 11279 - protein, 340 aa, unidentified
  source 1..340: note = protein_b9fca4f
  REGION 7..149: note = RuvC_domain
  SITE 10: note = RuvC_P1
  SITE 53: note = RuvC_P2
  SITE 88: note = RuvC_P3
  SITE 90: note = RuvC_P4
  SITE 93: note = RuvC_P5
  REGION 212..300: note = Tnp_domain
  SITE 220: note = Tnp_P1
  SITE 250: note = Tnp_P2
  SITE 258: note = Tnp_P3
  SITE 259: note = Tnp_P4
  SITE 271: note = Tnp_P5
MGPVVTIGLDIAKSVFQVHGVDAEGGVVIRQKLTRARLLKFFGKLDPCLVGIEACGTSHHWARELIELGHDVRLMPPSYVKPYVKRQKNDMADAEAICEAVTRPTMRFVPVKSPEQQSVMVLHRTRSILIRQRIQISNAIRSHMAEFGMAAAVGRQGLQALIAVVEESSDPRVPTEARGCLGMLAAQLRLVNEQILDTDRLIRTNARSTEVGRRLMEIPGVGPLLASALVGTIADPRAFKTGRNLAAWIGLVPRQNSSGGKERLGGITKQGDRYLRQMLVVGALAVVRYAVRNGARRPWLLQLLARRTPKVAAVALANKTARMVWAIMTSGERYREPLAA

SEQ ID NO: 11280 - protein, 340 aa, unidentified
  source 1..340: note = protein_4a5461a
  REGION 6..148: note = RuvC_domain
  SITE 9: note = RuvC_P1
  SITE 52: note = RuvC_P2
  SITE 87: note = RuvC_P3
  SITE 89: note = RuvC_P4
  SITE 92: note = RuvC_P5
  REGION 211..301: note = Tnp_domain
  SITE 219: note = Tnp_P1
  SITE 249: note = Tnp_P2
  SITE 257: note = Tnp_P3
  SITE 258: note = Tnp_P4
  SITE 270: note = Tnp_P5
MNIVYLGIDLAKNVFQLCGLNQAGKPLYTKRVDRKILLQTVANLPACLIGLEASTGAFYWQREFEKLGHKVKVISPQYVKPFVRGQKNDGNDALAIAIALMQPTMKFVPPKSPEQQDIQALHRARQRIVNHRTATVCQMRGLLLDRGIPIGTAVTRARRAIPLILEDAENGLSARMRRTIAELYDLFLDLERRIRFFDKEIDIVFKQSEACQRIAKVKGIGPKTATAVIAAIGKGTEFKNGRHFAAWLGLVPRQHSSGDRQVLMNMTKKGDKHLRTLFIHGARAVVRVATNNNYGYLNQWVNQLKERREFNKTTVAVANKNARIIWSILHNETEYQPATI

SEQ ID NO: 11281 - protein, 413 aa, unidentified
  source 1..413: note = protein_beacbd3
  REGION 11..166: note = RuvC_domain
  SITE 14: note = RuvC_P1
  SITE 63: note = RuvC_P2
  SITE 103: note = RuvC_P3
  SITE 105: note = RuvC_P4
  SITE 108: note = RuvC_P5
  REGION 283..358: note = Tnp_domain
  SITE 311: note = Tnp_P2
  SITE 319: note = Tnp_P3
  SITE 320: note = Tnp_P4
  SITE 331: note = Tnp_P5
MLALPEAQFFTGIDWASAEHAVCVLDAAGKITAQFTIARSAEGIASLVRRLARYGDPADLPVAIERPSGRLVDLLLQAGHPVVPVSPNAIKTWREGEVLSGAKSDAGDAAVIAGYLRLRSHRLQPAAPYSDETRALRTAVRTRDDLVQMRVAATNQLSALLEAHWPGAKAVFADAGSPVSLEFLTRYPTPAAARHLGEKRMAAFLIKHGYSGRRPAAQLPGRLRQAPPGSTGEALTEALRDAVLALATVLRALNGAIKDLDRPAAAHLGEHPDGPIFTSLPRPGHADWMLAEWGDCRQACAGPDSVAALAGVSPVTRQSGKHRSVSFRWACSKRFRRAITTFAGNSRHASPWAAQVYADARAAGKDHPHAIRILARAWIRVIWPCWINGVPYDPARHGAAAALAEHTSTRFVA

SEQ ID NO: 11282 - protein, 387 aa, unidentified
  source 1..387: note = protein_88b1625
  REGION 4..159: note = RuvC_domain
  SITE 7: note = RuvC_P1
  SITE 58: note = RuvC_P2
  SITE 98: note = RuvC_P3
  SITE 100: note = RuvC_P4
  SITE 103: note = RuvC_P5
  REGION 263..350: note = Tnp_domain
  SITE 271: note = Tnp_P1
  SITE 301: note = Tnp_P2
  SITE 309: note = Tnp_P3
  SITE 310: note = Tnp_P4
  SITE 323: note = Tnp_P5
MIYVGIDIAKRTHYACVMHSDGEILADPFPFTNDRAGFQLLLNCIGSYPKEQLLIGMESTAHYAENLTSFLFSRDFQVCIINPIQTASLRKSNIRKTKTDSVDTFLIIKALSLHNYRCFSKRDYDSLQLKNLCRFRQKLMKARTKVKIQLVSYVDLIFPELQFFFKSGIHTKSCYALLKTESNPDRIAKMHLTRLSNLLKKTSMGHYTKNHAIALKELASQSVGINDDTLSLQILQSIEQIEMYSQQISRVEASINEIMDNMDSVIKTIPGIGNLNGAMIIGEIGDISRFEKPCQLLAYAGLDPSVYQSGKFTAAKTRMSKRGSKLLRYALINAAWQLTLHNETFKAYYDLKVSQGRRHYNALGHVAHKLVRVIHKMMTDNLVFDLD

SEQ ID NO: 11283 - protein, 320 aa, unidentified
  source 1..320: note = protein_35ebc83
  REGION 4..151: note = RuvC_domain
  SITE 7: note = RuvC_P1
  SITE 51: note = RuvC_P2
  SITE 91: note = RuvC_P3
  SITE 93: note = RuvC_P4
  SITE 96: note = RuvC_P5
  REGION 190..277: note = Tnp_domain
  SITE 198: note = Tnp_P1
  SITE 228: note = Tnp_P2
  SITE 236: note = Tnp_P3
  SITE 237: note = Tnp_P4
  SITE 250: note = Tnp_P5
MTYIGIDVSKDSFVAAYPAKSGYTTKTFPNTTSGVRRFIQTLPVESHCVMEATGNYSMLLLYLLQETNIPVSMENPQKIKNFSRAMLSVTKTDEIDAKLIAMYGEKMEPAPYKIPSESIIMLKQKRTVLRQLKKQLTMMINLQHSLSVLPKQDPTAKVVTEQTIKHLRKQISKMEEEITNLSNKEFKRQMDLLTSIKGIGENIASALIMATGGFTYFNSAKQISRFLGLCPTYQQSGTSVHVKGHINRNGDTHLRSQLYVIAFASIRFNSACRETYERLRARGKSGKVAIVAVANKLIRQAFAVVTNNRPYIDGYVSTLP

SEQ ID NO: 11284 - protein, 345 aa, unidentified
  source 1..345: note = protein_b5a1f57
  REGION 9..169: note = RuvC_domain
  SITE 12: note = RuvC_P1
  SITE 68: note = RuvC_P2
  SITE 108: note = RuvC_P3
  SITE 110: note = RuvC_P4
  SITE 113: note = RuvC_P5
  REGION 209..295: note = Tnp_domain
  SITE 217: note = Tnp_P1
  SITE 247: note = Tnp_P2
  SITE 255: note = Tnp_P3
  SITE 256: note = Tnp_P4
  SITE 269: note = Tnp_P5
MIRIVKQAVGIDVAKKELVVSLGRMSHDTGVEIYAHKTFPNHTKGFANLVAWVGKMTLRDVRTRYVMEATGVYHECLAYYLSGQGHQLSIVLPNKISNYFRTLDVKTITDKTASQAICQFGLERKLDDWQKPKKIFSELKQLTREREQLITDRTMLKNQLHAEMAEAFPNLGSIKRATKRIHLINRQELEIRAELAGIIKKDAELARKIDLITTIPGVGKLTAVIVLAETNGFELINNKKQLIGYSGLDVRLKDSGTSVKGKPRISKRGNRHIRKAMHMPALSAIKHNREHKGLFIRLVSGHGIKMKAVVAVQRKILELIHAIFKTDRPFDSDYAKMEVAEVLND

SEQ ID NO: 11285 - protein, 351 aa, unidentified
  source 1..351: note = protein_c9a8356
  REGION 4..156: note = RuvC_domain
  SITE 7: note = RuvC_P1
  SITE 57: note = RuvC_P2
  SITE 97: note = RuvC_P3
  SITE 99: note = RuvC_P4
  SITE 102: note = RuvC_P5
  REGION 220..307: note = Tnp_domain
  SITE 228: note = Tnp_P1
  SITE 258: note = Tnp_P2
  SITE 266: note = Tnp_P3
  SITE 267: note = Tnp_P4
  SITE 279: note = Tnp_P5
MVVVGADVHKRSHTFVAVDQTGRKLGQLTVEAITAGHLKALGWARREFGDELEWAIEDCRHLSSRLERDLLGAGQTVVRVPPKMTGQARAIARTRGKSDPIDALAVARAALAEPNLPRACHDDQARELKLLVDRRDTLITQRTATINSLRWRVHELDPEYPIKPSGLDRAKHQQALAAWLAAQTGIVAELATDELEDVIALTGRINVLEKRIAALVAQRAPELVALPGCGALTAAKLVGEIGALDRFDNEAQLARHAGIAPIPVWSGRTEGRVRMTRSGNRQINCAIHRIAVTQTRLKDSLGRAYYDKKKSEGMSNREALRCLKRHLIRLVFTTLKNARRSAPQPCLPAAA

SEQ ID NO: 11286 - protein, 394 aa, unidentified
  source 1..394: note = protein_ebd328a
  REGION 4..164: note = RuvC_domain
  SITE 7: note = RuvC_P1
  SITE 59: note = RuvC_P2
  SITE 99: note = RuvC_P3
  SITE 101: note = RuvC_P4
  SITE 104: note = RuvC_P5
  REGION 267..354: note = Tnp_domain
  SITE 275: note = Tnp_P1
  SITE 305: note = Tnp_P2
  SITE 313: note = Tnp_P3
  SITE 314: note = Tnp_P4
  SITE 327: note = Tnp_P5
MFLVGIDVGKLSHMFCIMDSSNGEILVSPVSFKNNKQGFDFLMGNIKLYPKDKLLIGMEDTGHYHFNLLKFLLDSGYTVALINPITTDLTRKMQLNPTKDDNLDTMTICDVLASSPRKKGYRISEINNFEFYEQKRLTREHHDLKEQLNVYANKLQKCIDIVFPEYNSLFKSKYGTVYMKVLKAFGCANAIAHADIRNIRKCFETNRNGRTISLTPEKLKEAAKHSIGFPSKAEVIEIRHLIDLIELIKEQINDVDIKIEEFSTQLNSPILTIPGISHFSGTSILAELGDLRNYSKASQIIKFAGVSPYKHQSSQYEAQHTAITKKGSRYLRKTLYQVILPVIRYNPVFNEYYHLKLSQGKGHRCAQGHCVRKLLRIIYHLVITNQPFDSTLLK

SEQ ID NO: 11287 - protein, 326 aa, unidentified
  source 1..326: note = protein_9e39afb
  REGION 8..172: note = RuvC_domain
  SITE 11: note = RuvC_P1
  SITE 55: note = RuvC_P2
  SITE 95: note = RuvC_P3
  SITE 97: note = RuvC_P4
  SITE 100: note = RuvC_P5
  REGION 194..280: note = Tnp_domain
  SITE 202: note = Tnp_P1
  SITE 231: note = Tnp_P2
  SITE 239: note = Tnp_P3
  SITE 240: note = Tnp_P4
  SITE 252: note = Tnp_P5
MQIAVSFFGADVGKAEIVVADHGRAKPVTKILKNTPSSLSKWLQTLPPGSVLAMESTGGYERMLADLAHERGLRVYVLNPKALHHYAKSQGQRGKTDRLDAIMIARFIASEHERLHPYQPCAQYIERLRQMLRLRRMAVITRTQLRLSSERHHQVHDAQAQVQKALDALTELAKSLEDQMLAEIQAEPALAQDFKLLTSIVGVGNLTATALVTTFARIPFTSSDAVVAYAGLDPRPKESGAYKGMRKLSKQGDAILRSLAYNAATAAARSITFKPMYQALLAKGWATTQALNIIARKLLRIAFGVWKSRKPFERELFLANQACVKP

SEQ ID NO: 11288 - protein, 399 aa, unidentified
  source 1..399: note = protein_f4db548
  REGION 9..163: note = RuvC_domain
  SITE 12: note = RuvC_P1
  SITE 60: note = RuvC_P2
  SITE 100: note = RuvC_P3
  SITE 102: note = RuvC_P4
  SITE 105: note = RuvC_P5
  REGION 271..357: note = Tnp_domain
  SITE 279: note = Tnp_P1
  SITE 309: note = Tnp_P2
  SITE 317: note = Tnp_P3
  SITE 318: note = Tnp_P4
  SITE 330: note = Tnp_P5
MEQEFDIFCGLDVGKSEHHATALNAAGERVFDKPLPQDEARLRMLFTALQEHGQVLVVVDQPNTIGALPVAVARDCGCEVAYLPGLAMRKAADLYPGKSKTDARDAFIIAATARAMPHTLRAVDRDSEVLSALKVLSGFDEDLTHECTRAINRLRSLLLQIFPALERAFPGTVLTRSLVLEMLIRYAGPTGLRAAGRSNVLRWVRNHSRKDPAALIDAVFAALGEQTVTVAGTEAVELVIPRVAAQIKELKRQRTIVAEEVEKLLDDFPLSRVLMSMPGVGIKTAATILLTIGDGSSFRTSGHLAAYAGIAPVTRRSGTSIRGEFPARSGNKELKNALFRSAWIASCHDPVSKAYYDRKRAEGKKHNAAVICLARRRCDVIHAMLRNGTLYEEKAPQTA

SEQ ID NO: 11289 - protein, 387 aa, unidentified
  source 1..387: note = protein_f4d54fd
  REGION 4..159: note = RuvC_domain
  SITE 7: note = RuvC_P1
  SITE 58: note = RuvC_P2
  SITE 98: note = RuvC_P3
  SITE 100: note = RuvC_P4
  SITE 103: note = RuvC_P5
  REGION 263..350: note = Tnp_domain
  SITE 271: note = Tnp_P1
  SITE 301: note = Tnp_P2
  SITE 309: note = Tnp_P3
  SITE 310: note = Tnp_P4
  SITE 323: note = Tnp_P5
MIYLGIDIAKRLHVAAAISSDGEIIIEPFEFSNDHDGFSKLLSSLHNIQKEYLIIGLESTAHYGNNLVVFLFSHGFNITVINPIQTSVMRKNNIRKTKTDKVDALLVAKTLLLNNFRLVTKQDIDLIRLKDLCRFRQKLIKARTSVKIQMTTYIDQVFPELQYFFKSGIHHKACYALLKEASSPEEIASMHMTHLAALLNKASHGHFKKEKAQELRVLAQKSVGTGNKTLSIQIAQSISQVELYDRQLTEVHLEIEKTMKSLNSVIMSIPGIGYLNGAMILGETGNITRFSDPSKLLAFAGLDPSVYQSGNFKAANTRMSKRGSRVLRYALINAAHNVVLNNKTFKEYYDLKISQGRSHYNALGHCAGKLVRIIYKMLTCNLEFNLE

SEQ ID NO: 11290 - protein, 350 aa, unidentified
  source 1..350: note = protein_80a1d7d
  REGION 13..155: note = RuvC_domain
  SITE 16: note = RuvC_P1
  SITE 59: note = RuvC_P2
  SITE 94: note = RuvC_P3
  SITE 96: note = RuvC_P4
  SITE 99: note = RuvC_P5
  REGION 218..303: note = Tnp_domain
  SITE 226: note = Tnp_P1
  SITE 256: note = Tnp_P2
  SITE 264: note = Tnp_P3
  SITE 265: note = Tnp_P4
  SITE 277: note = Tnp_P5
MSLRNAPRPAAVYGVDIGKNIFHVVGLDSDGEPVQRVRFRRDTLMKFFERAAPAIVGMESCAGSQWIARRLQALGHKVRLIPAQFVKPYVKSNKSDIIDAEAIAEAATRPTMRFAAIKREEQADLQALHRVRDQMIGTRTRLINQMRAFCLEYGIALRQGAGLFKLDLPLVLDDLSNDLSPAMRKLLVDLFADLRQLEQRINDVTREIAAIADREDVARRLMTIPGIGALGATALLAAVGTGCQFQKARDLAAWLGLVPREYSTGGKQKLLGISKRGNRYVRKLLVHGARSCFRHLDRPRDRLGSWLDGLQSRMHPNKAVVALAAKMARIVWVVLTKPGALYERRDPAFA

SEQ ID NO: 11291 - protein, 387 aa, unidentified
  source 1..387: note = protein_892f9ca
  REGION 6..159: note = RuvC_domain
  SITE 9: note = RuvC_P1
  SITE 57: note = RuvC_P2
  SITE 98: note = RuvC_P3
  SITE 100: note = RuvC_P4
  SITE 103: note = RuvC_P5
  REGION 263..347: note = Tnp_domain
  SITE 269: note = Tnp_P1
  SITE 299: note = Tnp_P2
  SITE 307: note = Tnp_P3
  SITE 308: note = Tnp_P4
  SITE 320: note = Tnp_P5
MTMYFVGIDISKYKHDCCIISAANQKVVSKFTFKNDKSGFEQLNSLSTPEDIKIGFESTAHYALNLELFLENANHSFMEINPVLIKDFKKSQTLRRTKTDSIDCELIARWLMTVEYKPHSKGFYHAYSLKSLTRLRDRLVRQRSFYLVKITNVLDHTFPEFKPFFHERLSKTALYLLENYGSAEKIARMNSASYEKLRSISRGKFSPQQFIRLKELAANTVGVNNSIFDVELNSLLTLYKSLVDEIKTLESEINRLVDEVHPHYMSIPGIGPISAAIIYAEYGDISNFSSPNQMLAFAGIEPSVHESGTEAYNGKMVKHGSSQLRYVLINCCLPLIRFDVTFATYYARKRSENKPHRVAITHVAKKLVRVIYALESQDIDFDPKKLR

SEQ ID NO: 11292 - protein, 444 aa, unidentified
  source 1..444: note = protein_332f21a
  REGION 18..177: note = RuvC_domain
  SITE 21: note = RuvC_P1
  SITE 76: note = RuvC_P2
  SITE 116: note = RuvC_P3
  SITE 118: note = RuvC_P4
  SITE 121: note = RuvC_P5
  REGION 293..385: note = Tnp_domain
  SITE 300: note = Tnp_P1
  SITE 330: note = Tnp_P2
  SITE 338: note = Tnp_P3
  SITE 339: note = Tnp_P4
  SITE 352: note = Tnp_P5
MHYQKVLKMLESIPYLSVGLDVGADFTWMSILLPNGTLVGKPFKIVHCDPASRELAVSKIKEAQEAYSLKSRCFLESTGIYHIPLLCFLRDKGLDCSVINPIITKNSTNMNVRKLHNDKFDSKKAAKVGQDASLKTSIVPADAVIDLRNLVRDYYYFKDLQSAVVLKLNAELKVSFPAYLDVFSKVTAQTSLKLLEAYPLAADMLAAPRDELVETIRNTARFGEKYALSKYDAICAAAKDAAVFGRALPSNALRIRLYIKTYREYQAHLDSILEELHKAVDNLQGDPVYDRICLLQSLRGVGFLSAVVLIAEMGSFDLFSSPKKLYAYFGMDPGVNDSGKFHGDRVHMSKRGSSLARRILHMIAINNLKVDKAAKAPVNPVIYDYYIRKCANKKKIVAVGAVMHKICNIIFAMLRDNKPFELITPKEHCERYAAEHPGSVNIAA

SEQ ID NO: 11293 - protein, 334 aa, unidentified
  source 1..334: note = protein_113f8e3
  REGION 7..157: note = RuvC_domain
  SITE 10: note = RuvC_P1
  SITE 58: note = RuvC_P2
  SITE 96: note = RuvC_P3
  SITE 98: note = RuvC_P4
  SITE 101: note = RuvC_P5
  REGION 201..287: note = Tnp_domain
  SITE 209: note = Tnp_P1
  SITE 239: note = Tnp_P2
  SITE 247: note = Tnp_P3
  SITE 248: note = Tnp_P4
  SITE 260: note = Tnp_P5
MNNKITIGCDISKEKLDFFCRNTEEHFILENNKDGMLQLSKWIKQHKFNKSEIEIGFEHTGIYTTAIRQFCNEEKLTHYIIPGLELKKSLGMARGKNDVVDSKRICEYVFEKSYKLKPTNAINTSISNLKRLDSLREKLVSDRAGLITRMNEEIEMLELNETDFGIKIQRDTIEMLSEKIELIDTEMEIELTKDISIKKNFDLLNTIVGIGKITAYQLIITTENFIKFDNPRKYASYAGVAPFTKQSGKSEGRTKVSGLANKKVKSLLDMCARSAMLNDPELKLYYKRKVLEGKNNRLVRNAIRFKLLTRVFSVIKKQTPFVKNHVNNLVISMS

SEQ ID NO: 11294 - protein, 343 aa, unidentified
  source 1..343: note = protein_b3658db
  REGION 6..148: note = RuvC_domain
  SITE 9: note = RuvC_P1
  SITE 52: note = RuvC_P2
  SITE 87: note = RuvC_P3
  SITE 89: note = RuvC_P4
  SITE 92: note = RuvC_P5
  REGION 211..303: note = Tnp_domain
  SITE 219: note = Tnp_P1
  SITE 249: note = Tnp_P2
  SITE 257: note = Tnp_P3
  SITE 258: note = Tnp_P4
  SITE 270: note = Tnp_P5
MDVSTIGLDIAKSVFQVHGIDAAGQVVVRRQLRRRQLLGFFEKLAPCLVGIEACATAHHWGREIAALGHEVRLMPAHYVKAYVKRGKNDATDAEAICEAVQRPTMRFVGLKSPKQQSLLMLHRTRELLVRQRTMLVNAIRGHMAEFGIVTRVGLPQLKELLAVIADRDDHRLPPDARACLESLGRQFLSLNEEICAADKRLQAWHRSSELSRRLATIPGIGPITASALVASITDPSAFRTGREMAAWIGLVPRQNSTGGKPRLGRISKQGDQYLRWLLVAGAMAVIRHAKRRGTANHPWLDDLIARRPTKVAAVALANKMARMAWALLSHGGAYRQPVITANL

SEQ ID NO: 11295 - protein, 392 aa, unidentified
  source 1..392: note = protein_8c179b7
  REGION 4..162: note = RuvC_domain
  SITE 7: note = RuvC_P1
  SITE 60: note = RuvC_P2
  SITE 101: note = RuvC_P3
  SITE 103: note = RuvC_P4
  SITE 106: note = RuvC_P5
  REGION 267..354: note = Tnp_domain
  SITE 275: note = Tnp_P1
  SITE 305: note = Tnp_P2
  SITE 313: note = Tnp_P3
  SITE 314: note = Tnp_P4
  SITE 327: note = Tnp_P5
MLFVGIDIGKNNHVASMMDEYGKVVFKAFSFSNTTDGGNALFSKLSSYSSNPSDFEIGMEATGHYWLSVYSFLFEKGFLLHVINPIQTDGWRKGTEIRKRKNDTIDSVLIADLIRYGQFVQTRLADEDLFSLRTLTRFRTYLVESISDLKRKVVCVLDQIFPEYQSIFSDIFGKTSKEILLQFSSPIDFETISSESLAELLAQLSRQKIGAAKAEQLKAAASSSFGITFAKNSFTFQLKALIEQISFIENQVKETESEISNIMRKLDSPITTITGIGNVTGAAIISEIGDISKFDNPRKLVAFAGLDATVTQSGEFEASHNVMSKRGSPYLRKAIFQAALIASFHDPVLSVYYQKKKAEGKHHLTCVGAVARKMCNIIYAVLKNNQPYVPKA

SEQ ID NO: 11296 - protein, 410 aa, unidentified
  source 1..410: note = protein_f671e01
  REGION 7..170: note = RuvC_domain
  SITE 10: note = RuvC_P1
  SITE 64: note = RuvC_P2
  SITE 110: note = RuvC_P3
  SITE 112: note = RuvC_P4
  SITE 115: note = RuvC_P5
  REGION 282..368: note = Tnp_domain
  SITE 289: note = Tnp_P1
  SITE 319: note = Tnp_P2
  SITE 327: note = Tnp_P3
  SITE 328: note = Tnp_P4
  SITE 341: note = Tnp_P5
MSNSLLVGIDVSLKDNKVRILHPDGTSLSKFTVLNSVTGAKAFTQRVAAVAEKHNFDSIVIGLESTSVYGDPLVYFLKQDAAINRFNTKIHVLNPTQVNKFKQMYPDLPKTDDIDAWIIAEHLRFGRINKEVYMDDKYKALQKLTRARYHTVQSLTKEKNWFLNNLFLKFSSLAQEKIFSDRFGATSSSIIEDFFSVDEISYMPIEELVEFINKKGKGHFENPVEVAAAVQKAARSSYRLPKTVTDSVNQVLSVSFLAIKAYKEQLKIFDKAIEEQIKLIPNTLTSIKGIGPVYSAGIIAEIGDIHRFNDQAALAKFAGIAWTKHQSGNFTAAYTKLIKSGNRYLRYYLMEATNKVRLHDHELKRFYDKKYSQTPKTAHKRALVLTARKFVRLVYALLHSNRLYVPPKGN

SEQ ID NO: 11297 - protein, 402 aa, unidentified
  source 1..402: note = protein_2f55761
  REGION 4..160: note = RuvC_domain
  SITE 7: note = RuvC_P1
  SITE 57: note = RuvC_P2
  SITE 97: note = RuvC_P3
  SITE 99: note = RuvC_P4
  SITE 102: note = RuvC_P5
  REGION 274..361: note = Tnp_domain
  SITE 282: note = Tnp_P1
  SITE 312: note = Tnp_P2
  SITE 320: note = Tnp_P3
  SITE 321: note = Tnp_P4
  SITE 334: note = Tnp_P5
MNSVGIDISKGRSMVAVMRPFGEVVVSPFEVRHTDSELSELAKLLKSLDGETRVVMEATGNYHTPVAWLLHGAGLYVSVVNAKLVHGYGNNDLRRVKTDRKDAVKLANYGLDRWLTLPRYIPEEDTRLLLKNCYRQYQQYSKVQTMLKNNLISLLDTTFPGMNRLFNTPARADGSEKWVDFAADFWHCGCVCECSEKVFMNKYQRWCRKHGYNFSERKALDIYTEASGHIGVMPMSDTTKLLVAQAVSQLRATSAALAVLKQEMQTLASQLPEYPIVMEMFGVGPALGPQLMAEIGDVRRFHSKKALVAYAGIDAPPNDSGDVTGRHKGMSKVGAPSLRRTLFLVMSVYLQNAPLDEPVYQFMDRKRAEGKPYRVYMMASANKFLRIYYASVKAYLETLERF

SEQ ID NO: 11298 - protein, 398 aa, unidentified
  source 1..398: note = protein_4f0b0a6
  REGION 6..159: note = RuvC_domain
  SITE 9: note = RuvC_P1
  SITE 57: note = RuvC_P2
  SITE 98: note = RuvC_P3
  SITE 100: note = RuvC_P4
  SITE 103: note = RuvC_P5
  REGION 221..306: note = Tnp_domain
  SITE 229: note = Tnp_P1
  SITE 259: note = Tnp_P2
  SITE 267: note = Tnp_P3
  SITE 268: note = Tnp_P4
  SITE 279: note = Tnp_P5
MTGVIIGVDPHKLSATIEVVDQHGHLLGSGRFTTDKAGYAAMRSYVKSWRQRAWAVEGANGAGRPLAQRLLADGERVVDVPAKLAARVRLFDTGHNRKTDVLDAHSIAMVAVRTAGLRELAPDGELEALRMLADRRDELAQRRVQTVNRLQRLLSELVPGQRKRDLSALQAKAILASVRPRDVAGKIRRRMAAEELADLVAVDAKLKTIKAELRAAVLGRGSSLMEITGVGPAGAARILADVGDIARFADRNRFASWTGTAPLDASSGEHVRHRLSRAGNRRMNHVLHIAAIVQLRHDTPGRAYFLRKVAAGKTRMEALRCLKRRLSDVVYRRLVADARAADTGPGGHCGATLQSSAVDLHPHIDTSDQPLPGPATPTLRPTPPPRKATPPKAHASAS

SEQ ID NO: 11299 - protein, 257 aa, unidentified
  source 1..257: note = protein_11981b8
  REGION 1..90: note = RuvC_domain
  SITE 33: note = RuvC_P3
  SITE 35: note = RuvC_P4
  SITE 38: note = RuvC_P5
  REGION 129..213: note = Tnp_domain
  SITE 137: note = Tnp_P1
  SITE 166: note = Tnp_P2
  SITE 174: note = Tnp_P3
  SITE 175: note = Tnp_P4
  SITE 187: note = Tnp_P5
MLARLAHERGFVVYVLNPTHVHHYAISLGNRGKTDRLDAQVIAQDIAQRHAKLHRYEPISPELQQVRALQALRSTVVRVGTSLRLSAQRHGCASKHQKQALASLGAWAEQLERELIAKIKAQSEWAKTYGLLTSICGIGPINGAALTTLFNRIHFASSDAAVAFCGLDPRPNESGRKVGRRRLSKQGDKAARTLLYNAASSAARTAHFKDYYAMLRARGLASTAALVVIARKLLRIAYGVWRTGQAFDPGRLNLKAA

SEQ ID NO: 11300 - protein, 328 aa, unidentified
  source 1..328: note = protein_98c5316
  REGION 4..155: note = RuvC_domain
  SITE 7: note = RuvC_P1
  SITE 60: note = RuvC_P2
  SITE 100: note = RuvC_P3
  SITE 102: note = RuvC_P4
  SITE 105: note = RuvC_P5
  REGION 200..286: note = Tnp_domain
  SITE 208: note = Tnp_P1
  SITE 237: note = Tnp_P2
  SITE 245: note = Tnp_P3
  SITE 246: note = Tnp_P4
  SITE 259: note = Tnp_P5
MFYLGIDVSKLKLDCTLLLDPDNDKRKSKVVPNSRDGVRELVKWCAKHGVTVDQVHVVLEATGPYHEQAATTLHDSGVSVSIANPANVHDFGRALAMHSKTDALDSLVLARYGMAMKPARWEPPPAHVRELRALIAQVDALSKDRLRTMNRQEKAEASAAPELVERSISNTLSFYDEEIARLEKAIDDHIDRHPDLKDDATLLSTIPGVGPKVARTMLRVMRTHQFKRAEDLAAYLGLVPVQRQSGTSLRGRSRLSKAGPADVRALVYMAGVVAAKHNPHVRALYQRLLAAGKTKMSAIGACMRKVVHLCFGVLKTRQAYRPDYTFSA

SEQ ID NO: 11301 - protein, 413 aa, unidentified
  source 1..413: note = protein_c8b416e
  REGION 14..166: note = RuvC_domain
  SITE 17: note = RuvC_P1
  SITE 65: note = RuvC_P2
  SITE 103: note = RuvC_P3
  SITE 105: note = RuvC_P4
  SITE 108: note = RuvC_P5
  REGION 273..359: note = Tnp_domain
  SITE 281: note = Tnp_P1
  SITE 312: note = Tnp_P2
  SITE 320: note = Tnp_P3
  SITE 321: note = Tnp_P4
  SITE 332: note = Tnp_P5
MSIDPRATRVRISAGVDWAKDDHACCVVGGEGEVLDRFAVRHDAAGLKSMVTRLLRAGAGQAGIERPDGPVVTALAQAGLSVFVIPPGQVKNLRSRYGPAGNKDDRFDAYVLADVVRTDIRRPRPLVCDSEQTTALRSSVRARKDLVTHRVAVANQLRAHLQIVFPAATTLFAGIDSAITLSFLERFATQERAGWLSPKRLGTWLRSMSYSGGSDPAVLHARLLAAPRGATGEHATIHATITGTYVALLRALSTQIRVLATSIGEQLAVHPDAPVFTSLPRSGTVRAARLLAEIGDARARFPTADSLACLAGVAPSTRQSGKVRAVTFRWGADKQLRDALCDFAGDSRHASPWAADLYRKAITRGHDHPHAVRILARAWAHIIWRCWQDDTPYNPAAHGALQILLKQDQPLAA

SEQ ID NO: 11302 - protein, 320 aa, unidentified
  source 1..320: note = protein_b038221
  REGION 10..152: note = RuvC_domain
  SITE 13: note = RuvC_P1
  SITE 57: note = RuvC_P2
  SITE 97: note = RuvC_P3
  SITE 99: note = RuvC_P4
  SITE 102: note = RuvC_P5
  REGION 193..278: note = Tnp_domain
  SITE 201: note = Tnp_P1
  SITE 230: note = Tnp_P2
  SITE 238: note = Tnp_P3
  SITE 239: note = Tnp_P4
  SITE 250: note = Tnp_P5
MMTQDDLVVVGIDVAKDKIDACIRTVTERKTCPTTAAGRRSLIAWFRKHQVGKAVMEASGGYERVWAKALRQAGLEVRIVDPKRVRHFAESAGRLAKNDKIDAEMISWFAETFGEAPSQVDNPAHEEMKALVKGRQGLLDVRARLEMQKEHEAPALVQKARARLLKKLADEIAALETAIAATIKTTPDFAKRAEIIQSVPGFAEGTAMALLGGLPELGQVSDEVAAALMGVAPYDDDSGKRRGERCIKGGRRWVRNALYMPCVGAATLNNPVFKAFYERLIAKGKPPKVAIVACMRKLIIILNTMIARGETWDPKKYRVA

SEQ ID NO: 11303 - protein, 411 aa, unidentified
  source 1..411: note = protein_2e58e06
  REGION 5..163: note = RuvC_domain
  SITE 8: note = RuvC_P1
  SITE 62: note = RuvC_P2
  SITE 102: note = RuvC_P3
  SITE 104: note = RuvC_P4
  SITE 107: note = RuvC_P5
  REGION 273..360: note = Tnp_domain
  SITE 281: note = Tnp_P1
  SITE 311: note = Tnp_P2
  SITE 319: note = Tnp_P3
  SITE 320: note = Tnp_P4
  SITE 333: note = Tnp_P5
MNPVVGLDISKGESQVQAFLDKGKPYQKSFKITHTVEGLNLLVAFLEDVKKVSGQKPSVVLEATGHYQTPVVHYLEERGYLLIIINPLISYKARGSSLRKVKTDAIDAYLLCELFYKEELEPYKKRGVQLLNLRNLTRQHENITGVMIQTKLQFQAVLEQVFPEYKGVFGDLYSVVSLLTLSEFPSSEDILKASEEAITARIFELCKSRSIKWANEKAIQLKAAAARNPFEKTVYQSHILSLGMYINILLQYKEHLSKLEAEIDALAKEIEEYTILKSIPGIGEKIAATIISEIGEIDRFNNPKKLVAFSGVDPSVFESGKFTATKNRITKRGSSRLRHALYMAVRCAIRDCRKSKTTDEIIPRNKKLRVFYDKKREEGKPYKVAVIACVNKLLHWIFALLKNKMTFQDIV

SEQ ID NO: 11304 - protein, 319 aa, unidentified
  source 1..319: note = protein_fc57905
  REGION 6..153: note = RuvC_domain
  SITE 9: note = RuvC_P1
  SITE 56: note = RuvC_P2
  SITE 96: note = RuvC_P3
  SITE 98: note = RuvC_P4
  SITE 101: note = RuvC_P5
  REGION 191..277: note = Tnp_domain
  SITE 199: note = Tnp_P1
  SITE 229: note = Tnp_P2
  SITE 237: note = Tnp_P3
  SITE 238: note = Tnp_P4
  SITE 250: note = Tnp_P5
MTLTSVGVDIAKLKFDVAVLLPGQKYKTKKFANTPAGCREFIHWLTRFGDCHVCMEATGSYSTELATALSDGGYRVSLENPARIHAFSNTELTRNKTDKSDAALIARYCALYQPAQWHPAPLSQRQLTALVRHLKNLEEMRQMEENRLEAADEVITGSLKEHIATLDELIKETKKKIRQHIDDDPDLRKDKALLESIPGVGDVLSTSLLAFAGNLRRFRSSKALVAYAGLNPRRCESGMWKGKSRLSKVGSRELRSVLYMPTVVAGRCNEVVKDLMTRMASRGKTGKERVCAGMRKLLQLAYGVVKSGREFNAEIPLAG

SEQ ID NO: 11305 - protein, 366 aa, unidentified
  source 1..366: note = protein_99cb20d
  REGION 7..149: note = RuvC_domain
  SITE 10: note = RuvC_P1
  SITE 53: note = RuvC_P2
  SITE 88: note = RuvC_P3
  SITE 90: note = RuvC_P4
  SITE 93: note = RuvC_P5
  REGION 212..298: note = Tnp_domain
  SITE 220: note = Tnp_P1
  SITE 250: note = Tnp_P2
  SITE 258: note = Tnp_P3
  SITE 259: note = Tnp_P4
  SITE 271: note = Tnp_P5
MNEITTIGIDLAKHVFQLHGVDGAGKVVVCRRLRRSQVATFFATLPPCLVGMEACGTAHFWAREIAASGHDVRLMPPGYVKPYVKRNKHDAADAEAVCEAVRRPSMRFVPVKTPEQQAALVAHSVRDLLVRQRTMLVNALRGHLAEFGIVAQRGIHKVEELTAVIGDETDGRIPASARSALRVLAAALAALELRIAVVESEIVARTKADPTARRLATIPGIGPIIASRITATVPDPSIFRSGRDFAAWIGLVPRQNSTGGKTRLGGISKRGNGSLRRLLVGGAMAAMFRSKALQHDPWLCRLRARKPAMVAAVALANKTARTVWAVMRRDQDWRPAAASSSRLHEPAAVLAAVKTMPPSAVAFGQS

SEQ ID NO: 11306 - protein, 342 aa, unidentified
  source 1..342: note = protein_9c1f2ad
  REGION 7..148: note = RuvC_domain
  SITE 10: note = RuvC_P1
  SITE 53: note = RuvC_P2
  SITE 88: note = RuvC_P3
  SITE 90: note = RuvC_P4
  SITE 93: note = RuvC_P5
  REGION 211..296: note = Tnp_domain
  SITE 219: note = Tnp_P1
  SITE 249: note = Tnp_P2
  SITE 257: note = Tnp_P3
  SITE 258: note = Tnp_P4
  SITE 270: note = Tnp_P5
MEQATIVGMDIAKQVFQIHGADAAGVVVFRRKIARAKVLAFFASQPPCVVAMEACSGAHYWAREIATLGHVVKLIAPKYVKPFVKRQKNDTAGAEAICEAAQRPTMRFVAVKSEVAQANSLVFRARDLLVRQRTQIINALRGHLAEHGWVAAKGSAHVAKLVDHLEDPTCQFPEGVRATLGVMIGSLRALDMQIGQLDREINKRAKEDPTARRLTSIPGVGPIIATAIVALAPPPDSFSKGRDFAAWVGLIPLQRSTGGKQRLGATSKMGERTIRRLLIIGASAVVRQAAARGAPKGSWLAQMLARKPRMLVTVALANKMARVAWALLTRGEVYKAPIGAAA

SEQ ID NO: 11307 - protein, 320 aa, unidentified
  source 1..320: note = protein_dbf8011
  REGION 8..157: note = RuvC_domain
  SITE 11: note = RuvC_P1
  SITE 56: note = RuvC_P2
  SITE 96: note = RuvC_P3
  SITE 98: note = RuvC_P4
  SITE 101: note = RuvC_P5
  REGION 195..279: note = Tnp_domain
  SITE 203: note = Tnp_P1
  SITE 232: note = Tnp_P2
  SITE 240: note = Tnp_P3
  SITE 241: note = Tnp_P4
  SITE 252: note = Tnp_P5
MSVTSVTVGIDVAKAHVDVCVLGAKSSAQRFDNDAEGHSALAAALQPLDVGLVVMEATGGYEAALACALQATGLPVAVINPRQARDFAKSMGRLAKTDAVDARTLAELAAVLLRRDDLQRFLRPLADERQQWLAALVTRRRQLLTMLHSERQRLQITPKKLHASIEAIEAAIKAQLDEIEEQMVTHVREHFGELDTLLQSAAGVGPVASATMIAELPELGRLNRREIAALVGVAPMANDSGGSKGRRRVQGGRFEIRRVLYMATLTATRYNPAIKAFYERLKAAGKLPKVALVACMRKLLTTLNAMVRTGKPWDKSLHCA

SEQ ID NO: 11308 - protein, 422 aa, unidentified
  source 1..422: note = protein_bda25c6
  REGION 4..157: note = RuvC_domain
  SITE 7: note = RuvC_P1
  SITE 59: note = RuvC_P2
  SITE 94: note = RuvC_P3
  SITE 96: note = RuvC_P4
  SITE 99: note = RuvC_P5
  REGION 284..371: note = Tnp_domain
  SITE 292: note = Tnp_P1
  SITE 323: note = Tnp_P2
  SITE 331: note = Tnp_P3
  SITE 332: note = Tnp_P4
  SITE 344: note = Tnp_P5
MLGVGLDWAEDHHDVALGVPGKGVIEQFRIDHGPEGVARLVARCLALETDPAEVRVVLETRHGLLVEALLDAGFTVLPVNPDLVARRRGPAKKKDDAEDARICCLLALDPFVELRKLIPHGELGAELRAIARDDDRAARDERRLGNRLRADLLAVFPAAIDIADGDLGAAVFLRLLERWPSHTELAAAGRDAVEALARANRHGWPDRFAERVIAALNSPRLAVRPELARAKAGSIRLAAAQLLLLREQRRVWQRRMGELLLGSPRVGRAKQPKEPRPGNAFPGGEIYLSMPGLGDRLAARVAGEIGEHVEQFTTPNALQCYAGTAPVTRRSGRSEFVIARRLAYNRYLGNAVHQWAFCSLQQSGWARAFYDAKIAKGKSHNAALRALGNRWLEILWHCLRLNVRYDEAVHTAHRTHALKQAA

SEQ ID NO: 11309 - protein, 400 aa, unidentified
  source 1..400: note = protein_6dc9fd9
  REGION 4..160: note = RuvC_domain
  SITE 7: note = RuvC_P1
  SITE 57: note = RuvC_P2
  SITE 97: note = RuvC_P3
  SITE 99: note = RuvC_P4
  SITE 102: note = RuvC_P5
  REGION 275..363: note = Tnp_domain
  SITE 283: note = Tnp_P1
  SITE 313: note = Tnp_P2
  SITE 321: note = Tnp_P3
  SITE 322: note = Tnp_P4
  SITE 335: note = Tnp_P5
MISIGIDISKGKSTVCMLKPYGEIVASPFEVMHTESELKNLIQMIQRLDGEIRIVMEATGIYHLPMLTALQDQKLFVAVINPFEMKEYASRGLRRVKTDKQDSITIANYGIDNWYRLENHQGNDDVYSELKLLGRQYCHYMELHVKALLELTHMLDYTMPGVKKEFHSWNESNGKDKLSDFVERYWHFDNITAMTKEDFIEDYISWAAEKKYHQNRSKAAELYDLASDGISTLPANTPSTKMLVLEAVRVLREIDSTLLKIITRMKELAKTLPEYNTVRAMGGVGDVLAPKLIAEIGDIRRFHSGKALIAFAGIDAPPYESGQFVGTNRKISKRGSKVLRKIGYETMRVLKTHKAPEDDAVYQFILKKEAEGKSKRQAKIAGLNKFLRIYYARVSEVYKA

SEQ ID NO: 11310 - protein, 307 aa, unidentified
  source 1..307: note = protein_4b6f5fd
  REGION 22..146: note = RuvC_domain
  SITE 51: note = RuvC_P2
  SITE 91: note = RuvC_P3
  SITE 93: note = RuvC_P4
  SITE 96: note = RuvC_P5
  REGION 187..275: note = Tnp_domain
  SITE 195: note = Tnp_P1
  SITE 224: note = Tnp_P2
  SITE 232: note = Tnp_P3
  SITE 233: note = Tnp_P4
  SITE 244: note = Tnp_P5
MPQTVIGCDLARGWIDTHALPTKVVVRIDNNPNSITRWTASLPANSLVVFEATSGCDTLLIKALCDRGLRFARVNPRQAREFARATGVLAKTDRVDARILADMGRLLPLEVTAPPHPDRARLSDFLRRRRQLVEMRKAEKVRRHSAGQPAILREIETMIALLDRRIVIMDRKIAALIGDSPELTEHAELLRAVPGIGPTVLATLLGELPELGTLCRRRIASLAGLAPHARESGTWRGTRRIWGGRRKVREALYIAALSASRRVPLLIAMRDRMKAAGKAPKTVLIAVARQLLVILNAMIRNKQPIRL

SEQ ID NO: 11311 - protein, 321 aa, unidentified
  source 1..321: note = protein_d9d4658
  REGION 7..149: note = RuvC_domain
  SITE 10: note = RuvC_P1
  SITE 53: note = RuvC_P2
  SITE 88: note = RuvC_P3
  SITE 90: note = RuvC_P4
  SITE 93: note = RuvC_P5
  REGION 209..294: note = Tnp_domain
  SITE 217: note = Tnp_P1
  SITE 247: note = Tnp_P2
  SITE 255: note = Tnp_P3
  SITE 256: note = Tnp_P4
  SITE 268: note = Tnp_P5
MENIALIGIDLGKNSFHIHCQDRRGKAVYRKKFTRPKLIEFLATCPATTIAMEACGGSHFMARKLEELGHSPKLISPQFVRPFVKSNKNDFVDAEAICEAASRPSMRFVQPRTESQQAMRALHRVRESLVQDKVKTTNQMHAFLLEFGISVPRGAAVISRLSTILEDNSLPLYLSQLLLKLQQHYHYLVEQIKDLESQLKRKLDEDEVGQRLLSIPCVGTLTASTISTEIGDGKQYASSRDFAAATGLVPRQYSTGGRTTLLGISKRGNKKIRTLLVQCARGYSYKNWNTSLANWPIGSGIYCAGKATLSSLVLWQTSWPE

SEQ ID NO: 11312 - protein, 262 aa, unidentified
  source 1..262: note = protein_0021d87
  REGION 6..147: note = RuvC_domain
  SITE 9: note = RuvC_P1
  SITE 52: note = RuvC_P2
  SITE 87: note = RuvC_P3
  SITE 89: note = RuvC_P4
  SITE 92: note = RuvC_P5
  REGION 211..262: note = Tnp_domain
  SITE 219: note = Tnp_P1
  SITE 249: note = Tnp_P2
  SITE 257: note = Tnp_P3
  SITE 258: note = Tnp_P4
MEIHTIGIDLAKTIFHLVGVTARGEVVVRKKCSRNQLLRFTSNLRVSLIGMEACGGSHFLGRALREQGHDVRLMPAQYVKPYVKTNKNDYIDAEAIAEAVTRPSMRFVPIKTDDQLDLQSLHRVRERWVGRRTAVINQIRGMLLERGITVTKGRRHIEESLPGILEDSDNKLSGALRVLLTELRLEMQYLSRQIEESDQLILRIASELEPCRRLVAIPGIGPVIATATIAAIGNGAAFKKGRGFATWLGVVPGEHSSGGNKH

SEQ ID NO: 11313 - protein, 266 aa, unidentified
  source 1..266: note = protein_1393442
  REGION 2..75: note = RuvC_domain
  SITE 14: note = RuvC_P3
  SITE 16: note = RuvC_P4
  SITE 19: note = RuvC_P5
  REGION 138..226: note = Tnp_domain
  SITE 146: note = Tnp_P1
  SITE 176: note = Tnp_P2
  SITE 184: note = Tnp_P3
  SITE 185: note = Tnp_P4
  SITE 197: note = Tnp_P5
MPAAYVKPYLKRGKTDAADAEAICEAVRRPTMRFFEIKSEDQQAVLAIHRARDLVVRQRTQVVNMIRSILREFQHILPTGIEAVSKFAREHGTEAQLEMPEIADEILGVMCHQLNGLNAQVDGLTKLIEQHAWYDPDARRLMRMPGIGPITASAVVATIDDAKQFETGLNLAAWLGLTPLNKSSGGRERLGRITKKGDRYIRKLLIIGMTSRAFMAKNKPEKADIWTAKLFDEKPFRLATVAMANKSARIIWAPLTKQEEYRQPIA

SEQ ID NO: 11314 - protein, 269 aa, unidentified
  source 1..269: note = protein_b104391
  REGION 2..75: note = RuvC_domain
  SITE 14: note = RuvC_P3
  SITE 16: note = RuvC_P4
  SITE 19: note = RuvC_P5
  REGION 140..224: note = Tnp_domain
  SITE 148: note = Tnp_P1
  SITE 178: note = Tnp_P2
  SITE 186: note = Tnp_P3
  SITE 187: note = Tnp_P4
  SITE 199: note = Tnp_P5
MAPAYVKPYVKRGKNDMVDAEAICEAVTRPTMRFVPIKTASQQSILMVHKSRALLIRQRTMLVNALRGHLTEIGIVAPVGIERTAELVGRVLAHDPTEPDVPPLVTDIVVSLAKQIDSLTAEVRTLEAKIREWHRTSEASRRLATIPGVGVITATALSATVPDASVFKSGREFAAWVGLTPRSNSSGGKERLGRITKAGNRYLRTLLIVGATAVLRHVRHRMYGPLIEWVRKLLLTKSARLTTVALANKMARIAWAVMARRTVYTNAIA

SEQ ID NO: 11315 - protein, 351 aa, unidentified
  source 1..351: note = protein_26baac8
  REGION 6..147: note = RuvC_domain
  SITE 9: note = RuvC_P1
  SITE 52: note = RuvC_P2
  SITE 87: note = RuvC_P3
  SITE 89: note = RuvC_P4
  SITE 92: note = RuvC_P5
  REGION 209..296: note = Tnp_domain
  SITE 217: note = Tnp_P1
  SITE 247: note = Tnp_P2
  SITE 255: note = Tnp_P3
  SITE 256: note = Tnp_P4
  SITE 268: note = Tnp_P5
MKVTTIGLDLAKDVFQVCAADASGKILYNKQLRRSQMAEFFTKLPACLIGVEACGSAHYWARKLQAMGHTVKLMPPQYVKPYVKTHKNDATDAAAICEAVTRPTMRFVAVKSEEQQALLALHRVRQSFVKDRTAHSNQIRGELAEFGLIVPKGLSALRKRVPVLLEDPLVPAPFGHLIERLLAEVLRLDDQIKLLERDIVQWHRNSELSKRLAQIPGIGPLTASALLCSIGDIACFKSARQLPAWLGLVPRQHSSGGRNTLLGITKRGDCYLRTLLIHGARSAILAAQRKPDDPQHPNWLKRLLGRVHPNIAAVALANKNARVAWALLSKHQDYKRGYDPSEDNMARVQLA

SEQ ID NO: 11316 - protein, 341 aa, unidentified
  source 1..341: note = protein_aa9148d
  REGION 7..149: note = RuvC_domain
  SITE 10: note = RuvC_P1
  SITE 53: note = RuvC_P2
  SITE 88: note = RuvC_P3
  SITE 90: note = RuvC_P4
  SITE 93: note = RuvC_P5
  REGION 210..295: note = Tnp_domain
  SITE 218: note = Tnp_P1
  SITE 248: note = Tnp_P2
  SITE 256: note = Tnp_P3
  SITE 257: note = Tnp_P4
  SITE 269: note = Tnp_P5
MKQFIRIGVDLAKNYFQVHALESANGPALTRKLKRSKMHEFFSQIEPCLIGMEACGSAHYWARELKAMGHEVLLMPPAYTKPYVKRGKNDAVDADAICEAMSRPGMRFVPIKSSEQQATLMLHKTRELLVKQRTMSVNALRGHLSEFGIIAAKGIGRVDELLELAESDATLPDAAKTGMRVLAQTLEGLDKAIDDLEDEITSAHAQNEVVRLLDKVPGIGKLIASVIAASVPDPSVFKSGRDFAAWLGLTPRQNSSGGKQTLGGITKQGNRYIRKLLVLGATSLLNVVGKRKGALRDWIVMLLAKKPARMVTVALANKLARILWAMMKTGECFRTEMFAKA

SEQ ID NO: 11317 - protein, 341 aa, unidentified
  source 1..341: note = protein_e661598
  REGION 7..149: note = RuvC_domain
  SITE 10: note = RuvC_P1
  SITE 53: note = RuvC_P2
  SITE 88: note = RuvC_P3
  SITE 90: note = RuvC_P4
  SITE 93: note = RuvC_P5
  REGION 211..297: note = Tnp_domain
  SITE 219: note = Tnp_P1
  SITE 249: note = Tnp_P2
  SITE 257: note = Tnp_P3
  SITE 258: note = Tnp_P4
  SITE 270: note = Tnp_P5
MTTITLLGLDIGKHSFHLVGQDAHGKPVFKRQFTRTSIMTYLAQHPACRIVMEACCGAHWLARQLAGFGHQVQLIAPQYVRPFVTGNKNDFLDAQAICEAASRPSMRYVGIKTPEQQASSAQHRLREARIAERVQTSNQIHALLLEFGIVLPLGARGIKQVPDILTDAGSDLPTVAQQVLSAQYDHYVYLAALITELDKQIGAQAKEEPLSSLLMTIPGIGPITASQFAADAGNAQSYGSARHFAASLGLVPRQHSTGGKNRLLGISKRGDKSLRRLLVQCARVIMLNAPKWECAMALWTQQLMARCHSNVVACALANKLARIIWAVLVKGEEYRPHPKAA

SEQ ID NO: 11318 - protein, 339 aa, unidentified
  source 1..339: note = protein_b2db41d
  REGION 6..147: note = RuvC_domain
  SITE 9: note = RuvC_P1
  SITE 52: note = RuvC_P2
  SITE 87: note = RuvC_P3
  SITE 89: note = RuvC_P4
  SITE 92: note = RuvC_P5
  REGION 210..297: note = Tnp_domain
  SITE 218: note = Tnp_P1
  SITE 248: note = Tnp_P2
  SITE 256: note = Tnp_P3
  SITE 257: note = Tnp_P4
  SITE 269: note = Tnp_P5
MTLTVIGVDIAKNVFQVHFVDSETGEIVNKPIKRAAFLAFFVNRQPCLIGMEACGGAHHWARQLRQLGHQVRLMPGRFVKAFNIGNKSDAADARAIWLALQQPGKTVAVKTEAQQAVLAMHRMRQQLIKFRTMQINCLRGLLTEHGEVMGRNRSALDKAMPMALERLAERLPAMLIDTFRDQWHGLTKLDQQVDEIEQRLRKWMRTEESVKAIHAIPGVGLLTATAVVAAIGDARTFRSGREFAAWLGLVPRHTGSGGKVQLHGISKRGDTYLRTLLIHGARIIHRHQADTCSWLKQLGQRRHKNVAIVAQANKTARIIWAVLAREQAYQAGHISARPA

SEQ ID NO: 11319 - protein, 359 aa, unidentified
  source 1..359: note = protein_5db2efb
  REGION 6..159: note = RuvC_domain
  SITE 9: note = RuvC_P1
  SITE 57: note = RuvC_P2
  SITE 98: note = RuvC_P3
  SITE 100: note = RuvC_P4
  SITE 103: note = RuvC_P5
  REGION 221..304: note = Tnp_domain
  SITE 229: note = Tnp_P1
  SITE 259: note = Tnp_P2
  SITE 267: note = Tnp_P3
  SITE 268: note = Tnp_P4
  SITE 279: note = Tnp_P5
MDQVIIGVDPHKLPVTIEARDSREVLRATGRFGTDTQGYRQLLRAARQWPQRVWAVEGANGIGRPLAQRLLADGERVLDVPARLAARARVSGTGQGRKTDATDAHAIVMVALRDTGLRELSSDAGLMVLRLLCDRRDEISRARAQALNPMHRLFLELLPGGAPVKKSTGQYKAMPARVRPRDLAGKTRRRMAAGELAGLARLDAKLKAMKAELKAAVQASGSHLMDIHGIGPAGAARILADVGDVARFPDRNHFASWTGTAPIDASSGEHTRHRLSRAGNRRLNHVLYMAGIAGSATTPPAGPATGASGSSPGPPWKPCGACAGACPTWSTASSPPTPPLHGQQQHQIRQAREGTRGRL

SEQ ID NO: 11320 - protein, 403 aa, unidentified
  source 1..403: note = protein_4b9ca9e
  REGION 4..160: note = RuvC_domain
  SITE 7: note = RuvC_P1
  SITE 57: note = RuvC_P2
  SITE 97: note = RuvC_P3
  SITE 99: note = RuvC_P4
  SITE 102: note = RuvC_P5
  REGION 275..361: note = Tnp_domain
  SITE 282: note = Tnp_P1
  SITE 312: note = Tnp_P2
  SITE 320: note = Tnp_P3
  SITE 321: note = Tnp_P4
  SITE 334: note = Tnp_P5
MNAVGIDVSKGKSMVAALQPGGKLLARPFEVLHTKNGLKELVSFVRSLDGDTRIVMEHTGRYYEPMLQWLSASDLFVTAVNPKLIKDFGNNTLRRVKTDKADAKKIARYALDNWCDLRQHTGMDTTRTQLKTMNRQFAFCMRQRTACKNNLIALTDQVYPGANTYFESPARADGSQKWVDYVAAFWHVDYVCSMRLSTFTERYRKWCHRHGYNFQSDKPRMLWEKAKDLIAMLPMDKMTKSLVQTAVAQLNVLSKTVETLRTQMIELAEKLPEYPVVIAMNGVGATLASQLIAEIGDITRFPRRGSLTAFAGVDPGAKQSGTMQLRSNKTSKAGSPHLRRALFQIVSGLLMRAPDDPVYNFMDKKRTEGKPYYVYMTAGANKFLRIYYGRVNEYLAGLSKEQE

SEQ ID NO: 11321 - protein, 321 aa, unidentified
  source 1..321: note = protein_ecf6d0e
  REGION 8..150: note = RuvC_domain
  SITE 11: note = RuvC_P1
  SITE 52: note = RuvC_P2
  SITE 92: note = RuvC_P3
  SITE 94: note = RuvC_P4
  SITE 97: note = RuvC_P5
  REGION 191..278: note = Tnp_domain
  SITE 199: note = Tnp_P1
  SITE 229: note = Tnp_P2
  SITE 237: note = Tnp_P3
  SITE 238: note = Tnp_P4
  SITE 251: note = Tnp_P5
MNKYNTIYGIDISKDVFDVVDSNKVYCQFENTPKGFKTFLKTLASSSLVVMEATGYYHYRLAQYLFKHGVAASVVNPLSVKRFIQMKLAKVKTDKSDAKAICDYALANEVPLYNALTDVQSECLQLFRLLDSYLKKRTATKNKLHGEETLGFPSKFVHQSLKRDLKHLDKEIGALEDRLLELVKQDQQYQLTLLKGIPGLGTKTALFLIVTTDGFQKFETAGQLCSYVGITPTIRQSGSSVRGRSKISKVGNKKLRNLLFLCAFSACKHNKACREVYERIIAKGKSKKLALIAVANKLLKQAFAIAKSGLPYEENFVSKLN

SEQ ID NO: 11322 - protein, 394 aa, unidentified
  source 1..394: note = protein_6b0b3da
  REGION 4..157: note = RuvC_domain
  SITE 7: note = RuvC_P1
  SITE 58: note = RuvC_P2
  SITE 98: note = RuvC_P3
  SITE 100: note = RuvC_P4
  SITE 103: note = RuvC_P5
  REGION 263..353: note = Tnp_domain
  SITE 271: note = Tnp_P1
  SITE 301: note = Tnp_P2
  SITE 309: note = Tnp_P3
  SITE 310: note = Tnp_P4
  SITE 326: note = Tnp_P5
MATIGIDVGKRQHIAAIQYDGEREARRAVLHFGADRAGLATLSAWIARQGGISRAVLESSGHYHLNLAAALQRQGLPVAVVNPLESKYFGKRRLQRTKSDPADARTLATLAMVDEPQVRDVLAGAELREAARFAMGLVDQLGRVDQKICRLVEIGFPELEQAYDDPTCVSALAVLRTAPTAQAAARKHTATLAQVARPGGGRRIGPKKAEHISALAHDTIAAPELAAQIGFQMRLLIAQHDMLESQIAEAEAHLASLLDGELVRRLRTIPGVGPAIVATLIAEIGDIARFSEFDKLVAFVGVHPAERSSGEKGKNPETSWRMSKAGNAYLRTALYRMAIVGITHNPLIRAHYARKRAQGKSKMNAVGHCMKKALAIVWGVWRSGTDFAAPPSHP

SEQ ID NO: 11323 - protein, 320 aa, unidentified
  source 1..320: note = protein_cb0b97b
  REGION 10..160: note = RuvC_domain
  SITE 13: note = RuvC_P1
  SITE 55: note = RuvC_P2
  SITE 95: note = RuvC_P3
  SITE 97: note = RuvC_P4
  SITE 100: note = RuvC_P5
  REGION 190..274: note = Tnp_domain
  SITE 198: note = Tnp_P1
  SITE 227: note = Tnp_P2
  SITE 235: note = Tnp_P3
  SITE 236: note = Tnp_P4
  SITE 248: note = Tnp_P5
MTILDSQVVVGVDVAKDEIVIYRSDLERTRNVANKRSALKQWLKTLPANSAIALEATNIYHLDTTEIAHEMGHDVYVIDGCRLNKYRDGIGMRAKTDALDAELLARYLSRESDRLRIWSPPPKAYTQLKSLLRRRAQLVRGCVALKQSWKNEPLLKEQFKQLLAAIAQFEKTIQKTLKEIAEDAGMQDQVKRCQAVEGVGLLTATAAATAFLRGKFANSDEYVAFLGMDPRVRQSGQKDQRRRLSKRGDSEFRRLFHNSAMAASRSPIWKPYYESYLARGLKGTQALVILARKLARVMFALMKNQSEYKPNSMLGGSPQT

SEQ ID NO: 11324 - protein, 344 aa, unidentified
  source 1..344: note = protein_711b6f2
  REGION 5..152: note = RuvC_domain
  SITE 8: note = RuvC_P1
  SITE 55: note = RuvC_P2
  SITE 92: note = RuvC_P3
  SITE 94: note = RuvC_P4
  SITE 97: note = RuvC_P5
  REGION 212..300: note = Tnp_domain
  SITE 220: note = Tnp_P1
  SITE 250: note = Tnp_P2
  SITE 258: note = Tnp_P3
  SITE 259: note = Tnp_P4
  SITE 271: note = Tnp_P5
MEHFAGLDVSVNETSICIVDDTGRIIRETKVASEPDALLAVLKSPTHHFKRIGLEAGPLSQWLYSALAEVNLPVICVETRHMRAVLKAQINKTDRNDARGIAQMMRAGLYRPVHVKTLRSQKLRMLLTHRKLLQSKAIAIENDLRGTLRNFGLKVGTVGAAKFEARIRELVEKLPDIAALVEPLLIVRRVLREQVAILHRRLLAIVRDDEVCRRLMTIPGVGPTVALTYRATIDVPARFRNSRAVGAGLGLTPCKYQSGESEYTGAISKCGDAMMRVMLYEAAQILLMRATKWSWLKAWAMQIARRRGVKKAIVALARRLAVIMHRIWVDGTEFRWTRQQVAAA

SEQ ID NO: 11325 - protein, 268 aa, unidentified
  source 1..268: note = protein_8ec45e0
  REGION 3..78: note = RuvC_domain
  SITE 17: note = RuvC_P3
  SITE 19: note = RuvC_P4
  SITE 22: note = RuvC_P5
  REGION 137..224: note = Tnp_domain
  SITE 145: note = Tnp_P1
  SITE 175: note = Tnp_P2
  SITE 183: note = Tnp_P3
  SITE 184: note = Tnp_P4
  SITE 196: note = Tnp_P5
MAPKFVSPYRLAGKAGKNDAADALAICEAVRRPHMRFVPVKDEEQQSMQCLHRTRQGFIEGRTASYNRLRGLVSEFGFIAPQRTESLRRLVAEHRENLPGWVRQCIDTLLEHIDAIELKIAEYDRILATIAKQDSRSQNLMKLKGVGPTTASALVASIDTAHDFKNGRQLAAWLGLTPSQYSSGGKSRLGKITKAGDAYLRTLLVQGARSVMIGVEKKQDPFSQWVSSLSHRRGYWRTAVAIAAKNARLCWASLFYGDDFRFYNKSFN

SEQ ID NO: 11326 - protein, 291 aa, unidentified
  source 1..291: note = protein_bd80620
  REGION 5..98: note = RuvC_domain
  SITE 37: note = RuvC_P3
  SITE 39: note = RuvC_P4
  SITE 42: note = RuvC_P5
  REGION 160..245: note = Tnp_domain
  SITE 168: note = Tnp_P1
  SITE 198: note = Tnp_P2
  SITE 206: note = Tnp_P3
  SITE 207: note = Tnp_P4
  SITE 219: note = Tnp_P5
MEACGGAHFWGREIGKIGHDVRLVPPAYVKPFVKRQKNDMADAEAICEAATRPTMRFVPVKSEETQGAAMVFRIRELLIRQRTQTINALRGHLGEFGMIVPQRAANMSKLIAIVEDPESGLPADAIPTLKVLVASLAHLGAEIGKLDAEIARCAKENEVARRLMTVPGIGPLIATAIAVLAPPPETFRKARDFAAWLGLTPRQHSTGGKQRLGANTKMGERSLRRLLIIGANSVIIKRHVHAAARPGTWLGEMLTRKPPMLVRVALANKMARIVWALMARGGAYQSPTAAA

SEQ ID NO: 11327 - protein, 337 aa, unidentified
  source 1..337: note = protein_b8695fb
  REGION 1..104: note = RuvC_domain
  SITE 2: note = RuvC_P2
  SITE 42: note = RuvC_P3
  SITE 44: note = RuvC_P4
  SITE 47: note = RuvC_P5
  REGION 210..297: note = Tnp_domain
  SITE 218: note = Tnp_P1
  SITE 249: note = Tnp_P2
  SITE 257: note = Tnp_P3
  SITE 258: note = Tnp_P4
  SITE 270: note = Tnp_P5
MESTACYHMNLFSFLLAGGYMAIIINPLLISNFVKMQLRKTKTDKNDALVIAQFLSMYADGLAQTSISPHISDLRDLSRQRESLLSQMTALKCDMKRILTITFPELEKLTGVFTKSILKLLSRFPSARAIVQADPAEMTQLLIDHSMGRNSSKAAEIIIKAARSSVGTTSSAREVILKQKAEVLMHLDGHLKELTAVMIELCRSGMGDDVDIMTSLRGIGEKTATNFLVEMGGDIKRFKDHKKLIATAGIDPAIYQSGKHDGQGRITKRGNRHLRRVIWLMTVRVIQFNDCFHNYYQKRRQDGLPYKKAVLATAHKLLRVIFAMLTQKTFFRYAVNS

SEQ ID NO: 11328 - protein, 430 aa, unidentified
  source 1..430: note = protein_11f4a39
  REGION 9..168: note = RuvC_domain
  SITE 12: note = RuvC_P1
  SITE 67: note = RuvC_P2
  SITE 107: note = RuvC_P3
  SITE 109: note = RuvC_P4
  SITE 112: note = RuvC_P5
  REGION 283..377: note = Tnp_domain
  SITE 291: note = Tnp_P1
  SITE 321: note = Tnp_P2
  SITE 329: note = Tnp_P3
  SITE 330: note = Tnp_P4
  SITE 343: note = Tnp_P5
MHNKNYISVGIDVGSAFSFMTILAPDETVILKPFKITHNNKDSLERAVSEIKKAEELYSLESRTFLESTGIYHFPLFCYLVDCGFNASIINPIITHSTKNGNIRKVKNDKIDSKGIAKLGLSKDIPVSQFPAKLVLELRSLTRKYYDLTDERSAHINKLKGDLHTVFPQYLDVFCDVTGKTSTMILRQYGTPDKILRGHKKTMIEKISKASRKGLAKASERYEKLCAAANAAKTFGCQIDSIYFNIFLTLDLVEKLDSALDSILNRIRQLITFNKNEKFIQQIKLLNTIPGVGFLTAVTIMCEIGDFSAFRNPKQLFAYFGLDPEVNESGKFVGTQLHMSKRGSRIARRAIFAVALASIRTKRNGEGINPYLRKYYELKSGQKPKMVAIGAVMHKVCNIVFAVLRDEKAFELRSPEEHCKQYQRPALAAA

SEQ ID NO: 11329 - protein, 338 aa, unidentified
  source 1..338: note = protein_e4ac96a
  REGION 5..151: note = RuvC_domain
  SITE 8: note = RuvC_P1
  SITE 53: note = RuvC_P2
  SITE 91: note = RuvC_P3
  SITE 93: note = RuvC_P4
  SITE 96: note = RuvC_P5
  REGION 211..297: note = Tnp_domain
  SITE 219: note = Tnp_P1
  SITE 249: note = Tnp_P2
  SITE 257: note = Tnp_P3
  SITE 258: note = Tnp_P4
  SITE 270: note = Tnp_P5
MGEYIGLDVSLKETAVSVRRAGKRIWRGKCPSDPRLLAEVIRQRAPEVERVVFETGPLSVWFYHALTAEGLPAICIDARHAKAALDMAPNKTDANDADGLAHLAEVGFFREVRVKGYDSMLMRTLVAARTKLVRISTELSNQIRGLMKTFGLLVPSSKGGKFEEHVRRLLAGKEELARVILPILEAWRGLRLRAAELGRQLLSAARQSQACQLLMSIPGVGAVTATSFATAIEDPANFSKSRSVGAWLGLTTRRYQSGEVDYDGHISRRGDAHIRGLLYEAATVILTRAQADSALRSWGLKLREKLGFKRAAVAVARKLAVIMHAMLKSGEPFNRTAA

SEQ ID NO: 11330 - protein, 411 aa, unidentified
  source 1..411: note = protein_08b7549
  REGION 6..165: note = RuvC_domain
  SITE 9: note = RuvC_P1
  SITE 62: note = RuvC_P2
  SITE 102: note = RuvC_P3
  SITE 104: note = RuvC_P4
  SITE 107: note = RuvC_P5
  REGION 275..361: note = Tnp_domain
  SITE 283: note = Tnp_P1
  SITE 314: note = Tnp_P2
  SITE 322: note = Tnp_P3
  SITE 323: note = Tnp_P4
MLVLFIGDDWAEDHHDVELQDGTGRKLATARVPEGVEGIAKLHALVARHGGEEPMPGQVVVGIETDRGPWVQALIAAGYRVYAVNPRQAARFKERYGTSGAKSDKGDAHALADMVRIDRDQLRPIAGDSDQAQAVRVVARAHQTLIWERTRTFQRLRSTLREYFPGALTAYAGLELTSTDAMELLVKAPTPEEAARLTKPQITAVLARHRRRDRDQKAAAIQAALREPRLGLPAPVAAAYGAAAIAHARLLIALNEQIAVLEEQVSAHFLAHPDAEIYLSMPGIGEITGARALAEFGDDPTRYTTAKARKNYAGTSPITRASGRTHAVQARFVRNNRLADALQRQAFCSLQRSPGARRYYDKQRARELDYNPALRQLGNRLVGILHGCLKTRTLYDEATAWSHHATLPATA

SEQ ID NO: 11331 - protein, 343 aa, unidentified
  source 1..343: note = protein_670fa1e
  REGION 6..148: note = RuvC_domain
  SITE 9: note = RuvC_P1
  SITE 52: note = RuvC_P2
  SITE 87: note = RuvC_P3
  SITE 89: note = RuvC_P4
  SITE 92: note = RuvC_P5
  REGION 211..300: note = Tnp_domain
  SITE 219: note = Tnp_P1
  SITE 249: note = Tnp_P2
  SITE 257: note = Tnp_P3
  SITE 258: note = Tnp_P4
  SITE 270: note = Tnp_P5
MQIIRIGLDLAKYVFEVHGVDCHGKAVLRKTLRRDVVSGFFANLPPCQIGMEASNGAHYWAKVLTEFGHEVRLISPQFVTPYVKSNKNDRNDAEAICEAVGRPHMRFVPVKSVDQLAVQAVHRIRSRLVGGRTRLANQIRGVLAEHGIVIARNIAKLRRSLADIAGSDENGLSDLVRDFVRELQLELVELDRRIATYDRRIRELYRSSEQCQRLGQIEGIGPLSATALMAAVGDRRCFKNGRQFAAWLGLVPRQRSSGGHARLFGISKRGDRYLRTLLIHGARAALSRAGGRQNPRSQWLVKLRERRHPNIAAVALANKNARIAWAMLSGDETYDPGLTVGPA

SEQ ID NO: 11332 - protein, 292 aa, unidentified
  source 1..292: note = protein_9fa7788
  REGION 6..147: note = RuvC_domain
  SITE 9: note = RuvC_P1
  SITE 52: note = RuvC_P2
  SITE 87: note = RuvC_P3
  SITE 89: note = RuvC_P4
  SITE 92: note = RuvC_P5
  REGION 211..255: note = Tnp_domain
  SITE 219: note = Tnp_P1
  SITE 249: note = Tnp_P2
MEIAVLGIDLGKNSCSVVGLDTTGRVVLKRRLHRDGVVKLAGGLPSCVMAMEACCGAHHLGRILRDHGHDVRLMSPEYVRPYVKAQKNDDRDAEAIAEAATRPTMQFVELKSETQLDMQSLHRARDRLIGERTALINQLRAILLERGIIMPQGRRKLELHLDTRLAGETVALSTRTRLLVDDLRLEWRELDRRIEVFDAEFAAQARTDETARLLTTIPGIGPLNATALAAAIGNAQNFPTWTRPGSLAGAGAEADDNRRQAKAVGHQQARQRILAQDADPRGASGLAATVHG

SEQ ID NO: 11333 - protein, 318 aa, unidentified
  source 1..318: note = protein_8643357
  REGION 7..156: note = RuvC_domain
  SITE 10: note = RuvC_P1
  SITE 54: note = RuvC_P2
  SITE 94: note = RuvC_P3
  SITE 96: note = RuvC_P4
  SITE 99: note = RuvC_P5
  REGION 193..277: note = Tnp_domain
  SITE 201: note = Tnp_P1
  SITE 230: note = Tnp_P2
  SITE 238: note = Tnp_P3
  SITE 239: note = Tnp_P4
  SITE 250: note = Tnp_P5
MFEAPFLGIDVSQDALEIASSSSETTWRCTNDTASIETLATQIQALRPTLVVLEATGGYEFEAACALQAVGLAVAVVNPRQARDFARSMGLLAKTDSLDATMLASFARVLNQHPHRERFIKPLANADLQRLQALVLRRRQLVGMLVSERQRLGQAHVCARASIKSTIDFLKAQIADLERESGEHVRRHHAELASVLGSVRGVGPATISTLLAELPELGTLCRRRIAALVGVAPLNRDSGRMRGRRSIWGGRAEVRRALYMATLVAVRHNAVFKAFYGRLVGAGKPKKVALVAAMRKLLTTLNSIAKSGLRWDDALHSV

SEQ ID NO: 11334 - protein, 330 aa, unidentified
  source 1..330: note = protein_5eb47dd
  REGION 8..157: note = RuvC_domain
  SITE 11: note = RuvC_P1
  SITE 59: note = RuvC_P2
  SITE 97: note = RuvC_P3
  SITE 99: note = RuvC_P4
  SITE 102: note = RuvC_P5
  REGION 202..289: note = Tnp_domain
  SITE 210: note = Tnp_P1
  SITE 240: note = Tnp_P2
  SITE 248: note = Tnp_P3
  SITE 249: note = Tnp_P4
  SITE 262: note = Tnp_P5
MKKWEVILGVDVSKLTLDISYAEQHLHLRISNDSKGFAVFKKWCREYKFELENTLVVMEHTGGYEYRFMQFCSSLGLSYCRLAGLEIKQSMGIQRGKNDQADSYRIATYGQEKIRRLKPSEPVNQQIMELKQLLAFRKRLVREKAGLQATLKERAHMYGHRKGDTITLLSRQKMKDAQKYIAKVEAEISELIASDGQLLQNYKILTSIKGVGPVNAWMTLAYTANFTLFSDARKYAVYIGVVPFSHSSGTSIRGRARVSHIANKELKQELNQAAKAAITHDKDIGEYAARKRLTKSYALVLNNVKFKLILRMFSLIKRQELYVDNYRKAA

SEQ ID NO: 11335 - protein, 323 aa, unidentified
  source 1..323: note = protein_c6457e1
  REGION 8..150: note = RuvC_domain
  SITE 11: note = RuvC_P1
  SITE 52: note = RuvC_P2
  SITE 92: note = RuvC_P3
  SITE 94: note = RuvC_P4
  SITE 97: note = RuvC_P5
  REGION 191..278: note = Tnp_domain
  SITE 199: note = Tnp_P1
  SITE 229: note = Tnp_P2
  SITE 237: note = Tnp_P3
  SITE 238: note = Tnp_P4
  SITE 251: note = Tnp_P5
MNKDIKYFGIDISHLVFDVTDSSGNYYQFKNNVTGFKKFVKHLDYNSHCVMEATGYYHYRLAYFLQENSIKVSVENPLSVKRFIQMKLSKIKTDKSDSRLICEYAKQVELKLWQGNSKHQLECLQMTRLLSVYTKQSTMLKNKIHGEEVLGNPSKVVTSSLKSSLRQVTKQIEKVEAALLILVRKLHQDVLTRLKTIPGIGNKTALMLVVLTDGFDRFKSGSELCSYAGLTPVIRQSGSSINGRARISKIGNQKLRNLLFMCSFNACKYNKACREIYERIVAKGKSKKLALIAVCNKLLKQAFAIAKSGLIYDDTYRSTLVNI

SEQ ID NO: 11336 - protein, 402 aa, unidentified
  source 1..402: note = protein_135d152
  REGION 4..157: note = RuvC_domain
  SITE 7: note = RuvC_P1
  SITE 56: note = RuvC_P2
  SITE 94: note = RuvC_P3
  SITE 96: note = RuvC_P4
  SITE 99: note = RuvC_P5
  REGION 265..351: note = Tnp_domain
  SITE 273: note = Tnp_P1
  SITE 304: note = Tnp_P2
  SITE 312: note = Tnp_P3
  SITE 313: note = Tnp_P4
MYFVGIDWADLHHDVTVLDEKGQELKYFTIPHKREGMELLKQKLLSIDPNPESFACLVETKNGLLVQFLLEVGFPVYPLNPKVVDYRRKPSGAKSDPIDARLLANIGRSDLAQLKRLKPDTELISELKILTRDQDSLIQESTRLTNKLIACLKEYYPVALEFFSKPTLPVALEFFKGYPTPDLVREATVPEIAAFLKACKHPRPNQTAVSIWQKAHEPQLRASAPTVRAKCRLLLALVGQLEVVKEQIAAYDEEINRLFQLHSDSRIFASLPGAAGRLAPRLLAEWGDDRERYENAAVVQALAGTSPVLFQSGKYRFAQQRKSCIKPFRRAMQLFAFQSIKQVCWAREYYDAKRSQGKTHHEALRALANIWVRIIFAMWKSHACYDEATFMTARARHLNWAA

SEQ ID NO: 11337 - protein, 389 aa, unidentified
  source 1..389: note = protein_3ccda67
  REGION 4..163: note = RuvC_domain
  SITE 7: note = RuvC_P1
  SITE 60: note = RuvC_P2
  SITE 101: note = RuvC_P3
  SITE 103: note = RuvC_P4
  SITE 106: note = RuvC_P5
  REGION 267..353: note = Tnp_domain
  SITE 274: note = Tnp_P1
  SITE 304: note = Tnp_P2
  SITE 312: note = Tnp_P3
  SITE 313: note = Tnp_P4
  SITE 326: note = Tnp_P5
MIYIGIDVAKNKHDCFITNSDGEILFKPFTIPNNLEGFDDLYHKIESTTNDPSQVKVGLEATGHYNYNLLGYLIDKGLTTYVINPLHTNLFRKSQSLRQTKTDKVDARTIASMLMSDVNLKSYSDTSYHNEELKSLTRYRFDKVKERSALKVSISRLVCILFPELENLVPTLHMASVYALLSEFPSATHIASAHLTRLTNLLKTASKGRYDKKTAILFRNTARSSIGSNMPAKALELMHTIRLIQELNSEIAEIESVIQTIMDKLNPPILSIPGISYRMGAMILAEIGDFDRFESPDKILAYAGLSPSTYQSGQLNNSHSRMEKRGSRYLRYALYNATKYVCHWDPLFNAYLSKKISEGKHYNVAMSHATKKLVRVIFHLQKTGQLYAS

SEQ ID NO: 11338 - protein, 366 aa, unidentified
  source 1..366: note = protein_d111e70
  REGION 19..175: note = RuvC_domain
  SITE 22: note = RuvC_P1
  SITE 73: note = RuvC_P2
  SITE 113: note = RuvC_P3
  SITE 115: note = RuvC_P4
  SITE 118: note = RuvC_P5
  REGION 281..366: note = Tnp_domain
  SITE 289: note = Tnp_P1
  SITE 320: note = Tnp_P2
  SITE 328: note = Tnp_P3
  SITE 329: note = Tnp_P4
  SITE 341: note = Tnp_P5
MTITATREVKGAAMPQIWAGIDAGKGHHHCVVIDSDGAKLHSARVANDETALLDLIAAVTELAAGDECLWAIDLSSGGASLLLGLLAAHGLPVVYIPGHAVHHAAKAYRGDGKTDAKDAAIIADQARMRRDLQVLTVEDEIRIELRALTGHRKDLVCDRTRAINPLRAHLLEYFPALERAFNYSASRASLILLTGYATPDAIRRMGESRLARWLRSQGCRTAVATASDAVAAAKSQQTVLPGQAIESELARSLAHDVIALEARIAEIDQLIATHVETSRAAELLQSMPGFGPLLAAEFLASTGPDLSAYVSADRLAGVAGLAPAPRDSGRISSNHHRPRRYDRRLLRACYLAAMVSVQQKTESRAF

SEQ ID NO: 11339 - protein, 344 aa, unidentified
  source 1..344: note = protein_1052410
  REGION 6..149: note = RuvC_domain
  SITE 9: note = RuvC_P1
  SITE 53: note = RuvC_P2
  SITE 88: note = RuvC_P3
  SITE 90: note = RuvC_P4
  SITE 93: note = RuvC_P5
  REGION 212..298: note = Tnp_domain
  SITE 220: note = Tnp_P1
  SITE 250: note = Tnp_P2
  SITE 258: note = Tnp_P3
  SITE 259: note = Tnp_P4
  SITE 271: note = Tnp_P5
MSIKVVGIDLAKHFFQVCVLSNENKVTSNKKVTRAKLLDVIRQFPENTLIAMEACGSSNYWARTIEKMGFSIKLIPPQHVKPFVGHQKNDANDARAICEAASRPNLHSVPIKTIELQDIKSLRCVRQRLVVQRIAISNQLRGLASEYGVVIAKSFKCLREQVPEVLEDADNELSDVMRKLIYSLWLEVDGLTEDIKSISIELESLCKQQPRYKALLAIPGFGPIVTAAFLSQVGTGKQFSNGRQLSAWCGLVPRQASSGGKSKLGRITKNGNNELRALLIHGARAVSKYTPDRADALSRWFNALVIRSGKAKAIVALANKLTRIAWVIVTSKDEFKASCAFKAA

SEQ ID NO: 11340 - protein, 405 aa, unidentified
  source 1..405: note = protein_82a29a4
  REGION 6..162: note = RuvC_domain
  SITE 9: note = RuvC_P1
  SITE 58: note = RuvC_P2
  SITE 99: note = RuvC_P3
  SITE 101: note = RuvC_P4
  SITE 104: note = RuvC_P5
  REGION 271..317: note = Tnp_domain
  SITE 279: note = Tnp_P1
  SITE 310: note = Tnp_P2
MGKVFVGHDWAEAHHDVCVIDDEGHRLAGARFPEGVEGVARFHELIASHADVPGEVAIATETDRGLFVGSLVAAGYGVLAVNPMSTSRYRERHSTSGAKSDPGDAFVLANLARTDGHNHRPIAGDSDLAEAVKVLARAHQGLIWTRQRQLNQLRSTLREFYPAALTAFPELGHRDALEVLAIAPTPAQGRRLSQSKIASALRRGGRQRRIDERTVEIQAALRAEQLTAPDLVSDAMGSAARALVAVIVELTAQIAVLETDLADHFDQHPDAEIIRSLPGLGMILGARVLAEFGDDPNRYHDAKSRKNYAGTSPIHPSLRHPPGRLGPLRPQQAPRRRLLPLGLRSPPSQPRRPRLLRPPARLGDTHHRALRALANRLVGILHGCLRHHSPYDEHTAWGHRADIAA

SEQ ID NO: 11341 - protein, 323 aa, unidentified
  source 1..323: note = protein_2df4159
  REGION 5..155: note = RuvC_domain
  SITE 8: note = RuvC_P1
  SITE 58: note = RuvC_P2
  SITE 98: note = RuvC_P3
  SITE 100: note = RuvC_P4
  SITE 103: note = RuvC_P5
  REGION 195..281: note = Tnp_domain
  SITE 203: note = Tnp_P1
  SITE 233: note = Tnp_P2
  SITE 241: note = Tnp_P3
  SITE 242: note = Tnp_P4
  SITE 254: note = Tnp_P5
MSSFVGVDVAKNTFDIATHLPNGKHKTKAKLANDPKGFKEFEAWLQKQVEPSALIVMEATSVYHLELAEFVYNKGYRVCVVNPATTHAYAGSELRRIKTDKSDAKLIADFAREKSEKLQLWAPEPLKYRQLKALVRRLDDLQEMEQMERNRLDVSDEKVKASINSVLHHIEKEIAETHKAIKKHIDDDPDMREMRNLIVTIDGIGEKTIERLLAELGDLRKYDDPRKLVAAAGLNPKLHDSGLLKGRTTISKIGSVRVRAGLYMPGLVALQHNEAIKAMKDRLKANGKAPKQIICAAMRKLLHFVYGVLKSGQPYDPKLALAR

SEQ ID NO: 11342 - protein, 403 aa, unidentified
  source 1..403: note = protein_670c800
  REGION 6..158: note = RuvC_domain
  SITE 9: note = RuvC_P1
  SITE 57: note = RuvC_P2
  SITE 95: note = RuvC_P3
  SITE 97: note = RuvC_P4
  SITE 100: note = RuvC_P5
  REGION 266..352: note = Tnp_domain
  SITE 274: note = Tnp_P1
  SITE 305: note = Tnp_P2
  SITE 313: note = Tnp_P3
  SITE 314: note = Tnp_P4
MSNYFAGLDWASKAHALCVVDERGGVVDRFEIGHDALGLGELQRRLRRLDSPPIAIERPSGLLVDTLVEAGLTVVPIHPNAVKASRPRYRSHGGKSDASDAYVLADLLRTDGHRFKALTPQGDEIKALQALVRGRDDLVATRVQLANQLRTLLESFWPGAAVVFADIDSPIALAFVERYPTPESARTLGPKRMAAFCAQHAYCGRRSTVDLLARLHQAPTAVCAELEMEAKGELARSLARTLKCLVEQIRLLSSRIEHHVASLEDGKIIMSFPRAGRICAAQLLAELGSVRERFLSDEHLAAEAGVAPVTYASGKSKAVVFRWACNHRLRAALTCLADNSRHANDWAAHVYAKAKARGCDHPHAVRILARAWLRVIWRAWTDHKTYDPTQHRAAQLLLKTAGG

SEQ ID NO: 11343 - protein, 343 aa, unidentified
  source 1..343: note = protein_daae8fd
  REGION 7..149: note = RuvC_domain
  SITE 10: note = RuvC_P1
  SITE 53: note = RuvC_P2
  SITE 88: note = RuvC_P3
  SITE 90: note = RuvC_P4
  SITE 93: note = RuvC_P5
  REGION 212..297: note = Tnp_domain
  SITE 220: note = Tnp_P1
  SITE 250: note = Tnp_P2
  SITE 258: note = Tnp_P3
  SITE 259: note = Tnp_P4
  SITE 271: note = Tnp_P5
MLEVTTIGLDIAKNVFHAHGADSSGRALFSRKISRTKLLEFFARQPQSLVALEACGGAHHWARELTLLGHKVKLIPPAYVKPFVKRNKNDAVDAEAICEAAQRPSMRFVAIKSEEQQASALVFRTRDLLVRQRTQLINAIRGHLTEYGWVAPKGPSHIAVLADMLDGEMGSSLPDTAKPMFRTMLDLLDQLNAKIGELDKEIARRAREDVVARRLMTIPGVGPITATAIVALAPPAETFSKGRDFAAWLGLAPRQLSTGGKQKLGSITKMGERTLRRLLIIGSSAVVLQASKRGAPAGSWLEQMMARKPRMLVTVALANKTARIVWALLIKQEEYKAPVAAAA

SEQ ID NO: 11344 - protein, 393 aa, unidentified
  source 1..393: note = protein_79faf3a
  REGION 4..162: note = RuvC_domain
  SITE 7: note = RuvC_P1
  SITE 60: note = RuvC_P2
  SITE 101: note = RuvC_P3
  SITE 103: note = RuvC_P4
  SITE 106: note = RuvC_P5
  REGION 265..352: note = Tnp_domain
  SITE 273: note = Tnp_P1
  SITE 303: note = Tnp_P2
  SITE 311: note = Tnp_P3
  SITE 312: note = Tnp_P4
  SITE 325: note = Tnp_P5
MIYAGINVAKEKHDCLVSDTGGLVLLEPFTIANNRNGFDDLLSKLKSCSEDLSNIKVGLEATGHYSDNLLEFLISQGLTTIVINPLHTSLYRKSLSLRKTKTDKVDAHSIVTMLRTESLKSYSQTSYHIRELKSLTRYRFSLVQDLAKLKISYARLCVILFPELEKLVPSLHLVSIYSLLAEFPTARTIANCHLTRLKLLLSSASKGRYGDEKAIEIRDAARSSIGSFSEMKVLELQQTIQRILVLEKQIALIESKINPIVDSLHSPLLSVPGISYRMAAIIISETENFANFDCAEQILVYAGLELSVYQSGQLVSTHAKMVKRGSKYLRYALFNSTKYVCHWDTHFGEYLAKKRSEGKAYNVAFSHAAKKLTRVLFHLVKSEQTFVSRSYDY

SEQ ID NO: 11345 - protein, 370 aa, unidentified
  source 1..370: note = protein_bdf75db
  REGION 7..151: note = RuvC_domain
  SITE 10: note = RuvC_P1
  SITE 55: note = RuvC_P2
  SITE 92: note = RuvC_P3
  SITE 94: note = RuvC_P4
  SITE 97: note = RuvC_P5
  REGION 224..308: note = Tnp_domain
  SITE 232: note = Tnp_P1
  SITE 262: note = Tnp_P2
  SITE 270: note = Tnp_P3
  SITE 271: note = Tnp_P4
  SITE 283: note = Tnp_P5
MTYITSIGLDVHARSVSACAFDPFTGEVAQRRFGTDAGEIAEWILGFESPKAVYESGPTGFALCRELRAPGVDCVVGAVSKMQKPSAEKRRKNDRRDAAFLARLLATRNITEVWVPPVEAEAARDLSRALDDAREDLQRARQRLSKFLLRRGLVFDETDALGRRRGAWTRAFWRWAESCRPSDPAAAAAFDHYVTCVRCAESDKRALEKRVLAEARADRWRGAVEALPCIKGIDAVTAFCLATEAGCFSRFPTAGAYASWLGLAPSEHSSGEKEAKGGITKTGNSASRRALVEAAWHFKSCSPKPKAPPAGSAVPAAVKRRCDDATARLRRRHESLGAAGKRPCVANVAVARELACWVWEVGRRAEGTLA

SEQ ID NO: 11346 - protein, 407 aa, unidentified
  source 1..407: note = protein_7c96d9c
  REGION 4..160: note = RuvC_domain
  SITE 7: note = RuvC_P1
  SITE 57: note = RuvC_P2
  SITE 97: note = RuvC_P3
  SITE 99: note = RuvC_P4
  SITE 102: note = RuvC_P5
  REGION 269..355: note = Tnp_domain
  SITE 277: note = Tnp_P1
  SITE 308: note = Tnp_P2
  SITE 316: note = Tnp_P3
  SITE 317: note = Tnp_P4
MIFVGVDWAEAHHDVHVQDVDGKRLAGGRLPEGVEGIARFHDLVGGHVEDPEEVVIGIETDRGLFVAALVAAGYAVYAVNPMSTSRYRDRHSASGAKSDPGDAKVLADMVRTDRHNHRQVAGDSDEVEALKVLARAHQRMVWSRGRQTNLLRSTLREFYPAALVAFDDLASGDAIEVLRAAPTPTLGARLSVSKISAALRRGGRQRRVDERAAEIQAALRSEQLQASAAVAIAMGASVAASVAVIAEMTAQTALLAAELEAGFDQHPDAAVVRSLPGLGTILGARVLGEFGDEPNRYATAKSRKNYAGTSPITRASGTKRIVLARHVRNQRLADAIYLWAFAALTASPGARRYYDQRRAADDTHHQALRTLGNRLVGILHGCLAHHVTYDETVAWGHRSANNLTEAA

SEQ ID NO: 11347 - protein, 346 aa, unidentified
  source 1..346: note = protein_c18d221
  REGION 5..152: note = RuvC_domain
  SITE 8: note = RuvC_P1
  SITE 55: note = RuvC_P2
  SITE 93: note = RuvC_P3
  SITE 95: note = RuvC_P4
  SITE 98: note = RuvC_P5
  REGION 212..300: note = Tnp_domain
  SITE 220: note = Tnp_P1
  SITE 250: note = Tnp_P2
  SITE 258: note = Tnp_P3
  SITE 259: note = Tnp_P4
  SITE 271: note = Tnp_P5
MQHYAGLDVSVKETSVCIVDASGRTCQEKKVVSHPEDLVTILSNPALSLERIGLEAGPMSQWLFDGLAKAGLPVFCIETRHTKGFLKPSQTNKSDRNDARGIAHMMRVGLFKNVHVKTLTSQKRRALLTVSLLQEKAIALENDMRGLLRNFGLKVGVVSAGTFEEKVRELVEADADLLEIMEPLLAGRRKLREEFAKLDKKVVHEAKRDQVCKRLMTVPGVGPVVSLAYVATIDIPSPFHNSRSVGAALGLTPVLNQSGESKRIGHISLCGDAMMRSLLYEAAQTMLTRLVKWCWLKAWAMNIARRHGRKKANVALARRLAVVMHRMWVDGTEFRWTREAAGPMPV

SEQ ID NO: 11348 - protein, 401 aa, unidentified
  source 1..401: note = protein_1cc89a3
  REGION 4..160: note = RuvC_domain
  SITE 7: note = RuvC_P1
  SITE 57: note = RuvC_P2
  SITE 97: note = RuvC_P3
  SITE 99: note = RuvC_P4
  SITE 102: note = RuvC_P5
  REGION 274..361: note = Tnp_domain
  SITE 282: note = Tnp_P1
  SITE 312: note = Tnp_P2
  SITE 320: note = Tnp_P3
  SITE 321: note = Tnp_P4
  SITE 334: note = Tnp_P5
MNCVGIDVSKGKSMIAVMRPLGEVVIPPFEVGHTESELCELSKLLGNLDGETRVVMETTGNYHFPVASFLYDSGFYVSVVNAMLVHSYGNNSLRRAKTDKKDAIKLANYGLDHWLTLPRYIPEDDVRLMLKTTYRQYQQCAKVQTMLKNNLISLLDTAFPDANRLFASPARADGSEKWVDFVAAFPHCECVCGLPERVFTAKYQKWCRKHGYNFNQDKALDIYASACGHFSVMPRTDTAKLLVVQAVSQLRAASASLAALRNEMQSLAASLPEYPVVMGMFGVGPALGPQLMAEIGDVRRFHSKKALVAFAGIDAPPYQSGQLEVRSRSISKRGSSALRRTLFLVMSVVLQRSPADEPVYQFMDRKRAEGKPYRVYMMASANKFLRIYYATVKQYLDSLEV

SEQ ID NO: 11349 - protein, 353 aa, unidentified
  source 1..353: note = protein_e3e9c23
  REGION 10..160: note = RuvC_domain
  SITE 13: note = RuvC_P1
  SITE 64: note = RuvC_P2
  SITE 100: note = RuvC_P3
  SITE 102: note = RuvC_P4
  SITE 105: note = RuvC_P5
  REGION 231..315: note = Tnp_domain
  SITE 238: note = Tnp_P1
  SITE 268: note = Tnp_P2
  SITE 276: note = Tnp_P3
  SITE 277: note = Tnp_P4
  SITE 288: note = Tnp_P5
MLAEVVDAVIGIDTHRDSHEVAIADPAGRPIAVLRIGNDSGGFAQLLAEIAEVAPGPRVAVSVEGTRSFGIGLARALAAAGLLVLECEQPACRQRRGKGKSGPIDAHLAVLAALRLDTGRLLVPRADGDREALRILLVARQEITEARTAQIGRLRALLLAGDDTDRQAARTALTQTALAALAGRVLPAHASREQAVRQAEIRRLALALGQARQDLTGNRAQLQAIVDEIAPGLTSRFGVGPVSAAQAIVSFSHPGRCRSEAAFAALSGTSPLPASSGMTVRHRLNRGGDRALNRAIHAIALVRMRTCPRTRAYIARRSTEGKTTREIRRCLKRYIARELYRQLTRSMNPPVGP

SEQ ID NO: 11350 - protein, 347 aa, unidentified
  source 1..347: note = protein_9e985e6
  REGION 7..149: note = RuvC_domain
  SITE 10: note = RuvC_P1
  SITE 53: note = RuvC_P2
  SITE 88: note = RuvC_P3
  SITE 90: note = RuvC_P4
  SITE 93: note = RuvC_P5
  REGION 210..296: note = Tnp_domain
  SITE 218: note = Tnp_P1
  SITE 248: note = Tnp_P2
  SITE 256: note = Tnp_P3
  SITE 257: note = Tnp_P4
  SITE 269: note = Tnp_P5
MKKFIRIGIDLGKRYFQVHALVSEDGRAVTRKLRRDGFLAFFAEAGPCLIGMEACGSAHYWGRELRAMGHDVRLIPPIYVKPYVKRGKNDAVDAAAVCEAVSRPDMRFVPIKSAENQASLMLHKTRELLVKQRTMSVNALRGHLAEFGVVAAKGVGHAGELLEKAKNDATLPEIAKATVKIFVQQLEAISAAIVALDKEIANVHAQSEISKLLAGVPGVGKIVATAIVASVPDPSVFKSARDFAAWLGLTPRQNSSGGKEKLGAITKQGNRYLRKLLTLGATSLLRVAGKRNGVLRDWLVALLARKPARLVSLALANKLARIIWAMMTTGEAFRTQIMARAGKPSMA

SEQ ID NO: 11351 - protein, 318 aa, unidentified
  source 1..318: note = protein_6b517e1
  REGION 8..146: note = RuvC_domain
  SITE 11: note = RuvC_P1
  SITE 54: note = RuvC_P2
  SITE 89: note = RuvC_P3
  SITE 91: note = RuvC_P4
  SITE 94: note = RuvC_P5
  REGION 231..281: note = Tnp_domain
  SITE 237: note = Tnp_P3
  SITE 238: note = Tnp_P4
  SITE 250: note = Tnp_P5
MQQDVVTVGVDLAKNVFQIHAIGADGKVLVRRQLRRGEVLKFFSSLPPCLVGMEACASAHHWGRELLALGHDVRLMPPAYVKPYVKRGKTDAADAEAVTRTTMRSVAVKSVDQQAVLMLHKTRYLLVRQRTALINALRAHLSEYGIVTSKGPGGVTALMKLLHEGQEKLPAHARSAMHTIGAQLRSLASEVNRLETLILAWHRADDTSRRLATISGIGPITASAIAAAVPDASLFRSGGKERLDGISKQGDGYLRKLLVVGATAVMRMARKDASRKPWLARLLERKPVKIATVGLANKTARIAWAVMARKEVYAAAAA

SEQ ID NO: 11352 - protein, 399 aa, unidentified
  source 1..399: note = protein_e35ea05
  REGION 10..164: note = RuvC_domain
  SITE 13: note = RuvC_P1
  SITE 61: note = RuvC_P2
  SITE 101: note = RuvC_P3
  SITE 103: note = RuvC_P4
  SITE 106: note = RuvC_P5
  REGION 271..358: note = Tnp_domain
  SITE 279: note = Tnp_P1
  SITE 310: note = Tnp_P2
  SITE 318: note = Tnp_P3
  SITE 319: note = Tnp_P4
  SITE 331: note = Tnp_P5
MTPDDIDLWVGLDVGKSAHHACALDRDGRTVYDKPLKQDERAIRAMLERLSGRGRVLLVVDQPNTIGSLPLTVARDMGVRVAYLPGSSMRKTADLLPGKAKTDRRDAYVIAWAALKLPESLRDAGPDDETLAALKILAGHDEDLAHESTRHINRLRSLLLHTHPAFERALKGERITRDATLALLERYGGPAAMNAAGADEVRRWARDNRLHAGRIIDDMFRAIGEQTVTVPGTATAESIIPAIVRDIRAIKERRRQVGEQVESLLDDHPLLTVLTSMPGIGVRTASNILLSIGGDVTGFASAAHLASYAGIAPVTSQSGTSIKGERPARAGNKRLKNALWQAAFVASVKHPASKAYYKRKREQGKHHNAAIICLARRRCDVIYSMLKNGTLYQEQTLAA

SEQ ID NO: 11353 - protein, 342 aa, unidentified
  source 1..342: note = protein_6dc953f
  REGION 6..147: note = RuvC_domain
  SITE 9: note = RuvC_P1
  SITE 52: note = RuvC_P2
  SITE 87: note = RuvC_P3
  SITE 89: note = RuvC_P4
  SITE 92: note = RuvC_P5
  REGION 211..294: note = Tnp_domain
  SITE 219: note = Tnp_P1
  SITE 249: note = Tnp_P2
  SITE 257: note = Tnp_P3
  SITE 258: note = Tnp_P4
  SITE 270: note = Tnp_P5
MAITVLGIDLGKNSCSVVGLDGSGAVVLRRRLHRENVIKLASDLAPCLMAMEACCGAHHLGRILRDQGHQVRLISPEYVRPYVKSHKNDDWDAEAIAEAATRPTMRFVELKSSEQLDMQSLHRVRDRLVGERTALLNQLRAVLMERGITIAQGRRKLEQHLTAMLEGDEVRLSRRVRALLEDMRAEWCELDRRIEAFDDEFAALAKTDDAARRLVSIPGIGVLNATALVAAIGNGAIFARGRDLAAWLGLVPRQMTTGGKPRRLGISKRGNKYLRKLLVHGARAALPSLSSSPTPIGQWLQGLMARAHKNTVVVALANKLARIVWAVLRHGGIYNPAAVRAI

SEQ ID NO: 11354 - protein, 322 aa, unidentified
  source 1..322: note = protein_ee4799f
  REGION 9..157: note = RuvC_domain
  SITE 12: note = RuvC_P1
  SITE 56: note = RuvC_P2
  SITE 96: note = RuvC_P3
  SITE 98: note = RuvC_P4
  SITE 101: note = RuvC_P5
  REGION 195..279: note = Tnp_domain
  SITE 203: note = Tnp_P1
  SITE 232: note = Tnp_P2
  SITE 240: note = Tnp_P3
  SITE 241: note = Tnp_P4
  SITE 252: note = Tnp_P5
MSLPNQLCAGIDVSKATLDIAASSDFAQFTAGNNADGFDAIIVELRKHSVALVLMEATGGLETAVACALQAEGFSVAVVNPRQARDFARAMGYLVKTDRIDARVLAQMAGVINQHPERKRFIRELPDTERRALAAMVVRRRQLVTMWVAGRNRLHPSHPQSRESIDIIINALEDEIARVDENMNNHIRTYFKELAERLSSIKGVGPMTTAALLAEVPEPGHLSRREISALVGVAPANRDSGTMRGRRTIFGGRAGVRTALYMAVLVATRFNPVIKAFYTRLLSMGKPKKVALVACMRKLLTILNAMLRKSEEWDESYHHVTP

SEQ ID NO: 11355 - protein, 323 aa, unidentified
  source 1..323: note = protein_7513884
  REGION 5..155: note = RuvC_domain
  SITE 8: note = RuvC_P1
  SITE 58: note = RuvC_P2
  SITE 98: note = RuvC_P3
  SITE 100: note = RuvC_P4
  SITE 103: note = RuvC_P5
  REGION 195..281: note = Tnp_domain
  SITE 203: note = Tnp_P1
  SITE 233: note = Tnp_P2
  SITE 241: note = Tnp_P3
  SITE 242: note = Tnp_P4
  SITE 254: note = Tnp_P5
MSVVVGVDVAKRSFDIATPLANGKVRTKARLANDSKGFEQFEAWLQTHTEPGAWVVMEATGTYHEALAEYLHARHYRVCIVNPAVIAKFAEFELRRVKTDKADAKTIAAYAQHKGDSLRQWEPEPEAQRRLRALVRRLDDLKEMRQMEQNRLDVAPLTVQASIKAVIGHITDEMEKTRKAIEQTIDDDPDLRRRRDLITSIDGLGETTAALLLAELGDPLKYESPSAIVAFAGLNPMVHQSGEKVGQTTISRVGSSRLRAGLFMAGTVSMRFNPVIKALAERLNTRRKAYKQIVCAAMRKLLHLVYGVVKSDRPFDPHIALAK

SEQ ID NO: 11356 - protein, 343 aa, unidentified
  source 1..343: note = protein_50f82dd
  REGION 7..148: note = RuvC_domain
  SITE 10: note = RuvC_P1
  SITE 53: note = RuvC_P2
  SITE 88: note = RuvC_P3
  SITE 90: note = RuvC_P4
  SITE 93: note = RuvC_P5
  REGION 211..296: note = Tnp_domain
  SITE 219: note = Tnp_P1
  SITE 249: note = Tnp_P2
  SITE 257: note = Tnp_P3
  SITE 258: note = Tnp_P4
  SITE 270: note = Tnp_P5
MTDVVIIGVDLAKNVFQLHGAAADGTVVFRKKFTRPMFQRFMADHPRCLVAMEACGGAHHCARELVRLGHEVKLIAPRYVKPFVKRQKNDAADAEAIVEAAMRPTMRFVEPKTMEQQARAIVFRTREKFVNQRTEAINALRAHLYEFGYIAPQGIGYLSRLEAVVDDPNSDLPELARDLCRALLNHIAQLTASIEDLKRRIDKISKEQETSRRLQTMPGVGPVGALAIETFAPPMDQFKRGRDFAAWLGLVPRQNSSGGKQRLGKTSKMGQRDIRRLLVTGAMAVVNWASRKGAAEGTWLARMLSRKPRMLVAMALAGKMARGIWAMLTRQEDYRNPVLVGVA

SEQ ID NO: 11357 - protein, 394 aa, unidentified
  source 1..394: note = protein_f6ae744
  REGION 4..164: note = RuvC_domain
  SITE 7: note = RuvC_P1
  SITE 59: note = RuvC_P2
  SITE 99: note = RuvC_P3
  SITE 101: note = RuvC_P4
  SITE 104: note = RuvC_P5
  REGION 267..354: note = Tnp_domain
  SITE 275: note = Tnp_P1
  SITE 305: note = Tnp_P2
  SITE 313: note = Tnp_P3
  SITE 314: note = Tnp_P4
  SITE 327: note = Tnp_P5
MKLVGIDIGKNKHFFCIMDKDTGELIVHPASFSNDKHGFDLLIQNLKPYSKKSILIGMEDTGHYHFALLRFLLDRNFSVALINPTTTDFSRKMQGGITKNDKLDTLTICDVLDTPERKKQYRITKVNSFDLYEQKQLTRHHHNLKEELNVYSNRLQRCIDIVFPEFNSLFDSKYSRVYMAVLKTFGSAEAIANADIRRIRRCFEYKGRGRRISLTPEMLKDRAKSSVGIPSSADVIQIRHLVDQIELIHEQITEIDKKIEEFSLKTNSPILSIPGISHFSGTSILAELGDISNYSNARKIIKAAGVAPYHYESSQFAAQHTAIAKKGSKYLRKTLYQIILTVIRCNPVFKEYYQLKISQGKGHRCAQGHCVRKLLRVIYHLVTTNQPFNPDLLR

SEQ ID NO: 11358 - protein, 405 aa, unidentified
  source 1..405: note = protein_5f09577
  REGION 4..160: note = RuvC_domain
  SITE 7: note = RuvC_P1
  SITE 57: note = RuvC_P2
  SITE 97: note = RuvC_P3
  SITE 99: note = RuvC_P4
  SITE 102: note = RuvC_P5
  REGION 274..361: note = Tnp_domain
  SITE 282: note = Tnp_P1
  SITE 312: note = Tnp_P2
  SITE 320: note = Tnp_P3
  SITE 321: note = Tnp_P4
  SITE 334: note = Tnp_P5
MNAVGIDVSKGKSTVTIRQPGDVVVLAPRDYRHTQSSINDLITTIKCLEGETKVCMEHTGRYYEPMASWLSAAGIFVSAVNPWLIKDFGNESIRTPKTDKADAKIIARFALDRWAKLPQYSRMDELRNQLKTMNRQFGFYMDQKTAMKNNLIALLDQTFPGANCFFDSPARSDGSQKWVDFVYTYWHVDCVRSKSLEAFTEHYKNWCKRKGYNFSAAKAEEVYLAAADLIAVFPKDDYTKLLIRQAVAMLNIASETVETLRIKMDQTASQLPEYPVVMEMDGVGATLGPQLIAEIGDVTRFKHRGALTAFAGVDPRANESGDYKCVSNPTSKKGSPHLRKTLFQIMDGLIQRSPADNPVYAFMDKKRAQGKPYYVYMTAGANKFLRIYYGKVNAYLSPTEGAEDS

SEQ ID NO: 11359 - protein, 391 aa, unidentified
  source 1..391: note = protein_837aa4c
  REGION 4..163: note = RuvC_domain
  SITE 7: note = RuvC_P1
  SITE 60: note = RuvC_P2
  SITE 101: note = RuvC_P3
  SITE 103: note = RuvC_P4
  SITE 106: note = RuvC_P5
  REGION 266..353: note = Tnp_domain
  SITE 274: note = Tnp_P1
  SITE 304: note = Tnp_P2
  SITE 312: note = Tnp_P3
  SITE 313: note = Tnp_P4
  SITE 326: note = Tnp_P5
MIYVGIDVAKDKHDCFITNSEGEALFKAFTIQNNRAGFDELYQKIQSVEKDKSKIKVGLEATGHYNYNLLGYLIDNGLTAYVINPLHTNLYRKSLSLRKTKTDKVDARTIAMMLMSDVNLKSYSDISYHNEELKSLTRYRFDKVRERAQLKQSISRLVTILFPELEKLVPTLHMASIYTLLKELPSAKAIADCHLTHLKTLLEEASKGRYSRDKAIEIRDAARTSIGSNMPAKSLELKHTIKLISELDSEIDEIETEIQKIMDEIHSPILTIPGISYRMGAMIIAEIGDFSRFDSPDKILAYAGISPSTYQSGQLESSYSHMEKRGSRYLRFALINATKYVCHWDPTFGAYLQKKRAEGKHYNVAISHAAKKLVRLIYAMEKSQKAYSPAA

SEQ ID NO: 11360 - protein, 287 aa, unidentified
  source 1..287: note = protein_6c157e1
  REGION 3..57: note = RuvC_domain
  REGION 162..249: note = Tnp_domain
  SITE 170: note = Tnp_P1
  SITE 200: note = Tnp_P2
  SITE 208: note = Tnp_P3
  SITE 209: note = Tnp_P4
  SITE 222: note = Tnp_P5
MILTIAQILRFGEFSVSHFSDEDTFALRNLSRFRFALVDEASDWKRKLVAILDQVFPEYSSLFSNIYGVASRELLSKYPLPEDMISISADELAKMLSKCSRGRFGLDKAKEIQEKASNSFGVKFALKSFSFQIKQIIAQISFLEDQIFEIEDEISSMINSLCPVITSITGIGDVLGAAIFSEIGDISRFERANQLVAYAGLDVAVKQSGNFNATDTKISKRGSPYLRRAIWLAACVAAFKDPALSVYYQKLRQRGKAHGTAIGAVARKLTNIIFAVLRDNKAYIPNI

SEQ ID NO: 11361 - protein, 411 aa, unidentified
  source 1..411: note = protein_6b2827f
  REGION 4..170: note = RuvC_domain
  SITE 7: note = RuvC_P1
  SITE 67: note = RuvC_P2
  SITE 107: note = RuvC_P3
  SITE 109: note = RuvC_P4
  SITE 112: note = RuvC_P5
  REGION 278..364: note = Tnp_domain
  SITE 286: note = Tnp_P1
  SITE 317: note = Tnp_P2
  SITE 325: note = Tnp_P3
  SITE 326: note = Tnp_P4
MLYLGDDWAEDHHDVELVDDHGARLARKRLPEGLEGVTRLHALIAERMPPEWADLDPGEAAAQVRIGIETDRGPWVQALIAAGYQVYAINPMSVARYRERHSTSGAKSDAGDAHVLAEIVRLDHAHHRPVAGDSDQAEAMKLVARTHQTLIWDRTRQLLRLRSVLREFFPAALDVFDDLTASDALELLARAPDPARAARLSRSQIAAALRRANRRHVDAKAADVQQRLRGAQLRQPDAVQAAYAAIVTAQVRLIAALNVEVEQLGQVVADHFGRHRDAEHYLSQPGLGVVLGARILGEFGDDPHRFTDAKARKNYAGTSPITRASGTRTIVLARYARNRRLADAVHQWAFCSLKGSPGARAYYDALRARGTGHQAALRQLGNRLVGILHGCLKTDTTYDEATAWAHLQPTS

SEQ ID NO: 11362 - protein, 347 aa, unidentified
  source 1..347: note = protein_9a15a00
  REGION 9..151: note = RuvC_domain
  SITE 12: note = RuvC_P1
  SITE 55: note = RuvC_P2
  SITE 90: note = RuvC_P3
  SITE 92: note = RuvC_P4
  SITE 95: note = RuvC_P5
  REGION 214..299: note = Tnp_domain
  SITE 222: note = Tnp_P1
  SITE 252: note = Tnp_P2
  SITE 260: note = Tnp_P3
  SITE 261: note = Tnp_P4
  SITE 273: note = Tnp_P5
MTQSQIYIYGIDLGKNWFHLVAMDRMGHVLTKQKLTRSQLKQFISTTPPCRVAFEACPGSQYWGRLFQQAGFEPKIIPAQFVKPYLKSNKNDFNDATAIAEAGSRGTMRCVPLKSHEQLALQATHRVRQRFIIERTATVNQMRALLLEYGLTVPVGRKVFERALPAILEDAENGLPDFIRALVLRLRERWQQLDIQIDEMSLMLGQASSASSLCQKVSTVPGIGPIVSTALIAAIGNGSQFKKARDLSAWLGLVPRQYSTGGKSSLGGISKRGNNYLRQMVIQGAKALKIHMKRDKSSLGEWVARLEVGHHHHVVLIALANKIMRICWKVLTSGRDYRPYPNASAAV

SEQ ID NO: 11363 - protein, 341 aa, unidentified
  source 1..341: note = protein_5e0832b
  REGION 6..165: note = RuvC_domain
  SITE 9: note = RuvC_P1
  SITE 67: note = RuvC_P2
  SITE 105: note = RuvC_P3
  SITE 107: note = RuvC_P4
  SITE 110: note = RuvC_P5
  REGION 211..299: note = Tnp_domain
  SITE 219: note = Tnp_P1
  SITE 250: note = Tnp_P2
  SITE 258: note = Tnp_P3
  SITE 259: note = Tnp_P4
  SITE 272: note = Tnp_P5
MKNLFIGIDFSKEKVDVAIIFADGLTETAARVFNEFKTTVSGYRQLVKWVEQNSYGIDPSLWLFCGENTGGYSNGLCKFLYGRGYDMWLENAKSIKDASGLRRLKSDRADASMIAEYAMRNHDKAVMYKPLNESLEQLRELFLFRQTLVRYRCSFQVRREEKRLTMDKSPVKTMISQIGRHMVTTLEKEIEKVNKRIADLIKSDDELTEVFTIVTSIPGIGTQNAVCLMVYTDNFRRFNYDSRKIACYYGIAPFGKDSGTSVHSDPHVHYMANRQIKAMLTQAALAAVNYNHVIARYYKRLVERGKKKQVALNNVKNKLVHLVSAMVRNRQLFSPEYKISA

SEQ ID NO: 11364 - protein, 342 aa, unidentified
  source 1..342: note = protein_b685a81
  REGION 6..148: note = RuvC_domain
  SITE 9: note = RuvC_P1
  SITE 52: note = RuvC_P2
  SITE 87: note = RuvC_P3
  SITE 89: note = RuvC_P4
  SITE 92: note = RuvC_P5
  REGION 211..297: note = Tnp_domain
  SITE 219: note = Tnp_P1
  SITE 249: note = Tnp_P2
  SITE 257: note = Tnp_P3
  SITE 258: note = Tnp_P4
  SITE 270: note = Tnp_P5
MQITTIGIDLAKNVFQIHGADQRGKAVLRKQLRREQVAPFFANLPPCLIGIEACSSAHHWARKLQALGHTVRLMAPQFVKPYVKSNKNDVADAEAICEAVGRPTMRFVPIKNVEQQSVLSLHRVRQAFVKARTAQANQIRGLLAEYGLIVPKGIGFIATRVPDLIEDASNELPGLFRQLIDRLLKHLKLLDQQVDEIEVQIKAWHRDDETSQKLQKVPGIGPITASALAATVGNAKNFDNGRQLAAWLGLVPRQNSSGGKQTLLGMSKRGDAYLRTLLIHGARSVLYRASQKNDTESWLIKLTARRNANVAAVALANKTARIVWALLAHDREFRPDYTAAAA

SEQ ID NO: 11365 - protein, 319 aa, unidentified
  source 1..319: note = protein_30e583e
  REGION 10..152: note = RuvC_domain
  SITE 13: note = RuvC_P1
  SITE 56: note = RuvC_P2
  SITE 96: note = RuvC_P3
  SITE 98: note = RuvC_P4
  SITE 101: note = RuvC_P5
  REGION 196..280: note = Tnp_domain
  SITE 204: note = Tnp_P1
  SITE 233: note = Tnp_P2
  SITE 241: note = Tnp_P3
  SITE 242: note = Tnp_P4
  SITE 253: note = Tnp_P5
MSKVSQARIIGIDVSRDWLDIHCLPEGKRTRLPNKAEGHERVAQLALETGALVCFEATGGQEWRLWSALDVCGIATRQLPPAQIKAFAASRGTRAKTDRIDAELIARFMMFRPDAGRVLPHGKLRLLRALSSKRGQLVETRKRLLAQIKAHGKLGSADMFEAMNAELKDLLDRQIAGLEERIEQTLASDDELARTADILRSVPGIGPVASTMLIAEMPELGQLSGEQAAALAGLAPIAHDSGAMRGKRAIGGGRRLLRHVMFQAALVASHHNPLLKTFADRLRAAGKPHKVVITAVARKLVTIANALCKSRIKWSHQAA

SEQ ID NO: 11366 - protein, 348 aa, unidentified
  source 1..348: note = protein_dbe8f28
  REGION 7..147: note = RuvC_domain
  SITE 10: note = RuvC_P1
  SITE 53: note = RuvC_P2
  SITE 88: note = RuvC_P3
  SITE 90: note = RuvC_P4
  SITE 93: note = RuvC_P5
  REGION 210..296: note = Tnp_domain
  SITE 218: note = Tnp_P1
  SITE 248: note = Tnp_P2
  SITE 256: note = Tnp_P3
  SITE 257: note = Tnp_P4
  SITE 269: note = Tnp_P5
MKQIIRIGIDTSKRVFQLHGVNASEETVLRKKLSRKEMVRFFENAPPTTIALEACGGSHHWARLLGSFGHEVKLIAPQLAKPYVKRGKNDAADAEALCEAMSRPTMRFVPVKTADQQAALMLLGVRERLIRNRTQLSNIIRGYAMEFGVIAAKGICRIEPLLERIAADVSLPELARELFAMHGREYRELLAKIKLIEEKLMAWHRSDECSRRLAEIPGVGPISASLLMMKTPDPKMFKSGRDFAAWMGLTPKDHSTAGKVRLGVITRAGDEMLRSVLVAGATALLQHIRRGRSKYASRWIVELLQRKKPKLVAVAIANKIARIAWKLMVSGESYRGQKGDPVVAMPTR

SEQ ID NO: 11367 - protein, 343 aa, unidentified
  source 1..343: note = protein_b157edc
  REGION 6..148: note = RuvC_domain
  SITE 9: note = RuvC_P1
  SITE 52: note = RuvC_P2
  SITE 87: note = RuvC_P3
  SITE 89: note = RuvC_P4
  SITE 92: note = RuvC_P5
  REGION 210..296: note = Tnp_domain
  SITE 218: note = Tnp_P1
  SITE 248: note = Tnp_P2
  SITE 256: note = Tnp_P3
  SITE 257: note = Tnp_P4
  SITE 269: note = Tnp_P5
MNIVTIGLDLAKHWFQVHGVDAQGRVVVRRKLRRIEVLAYFRSLEPCLVGMEACATAHHWARELALLGHEFKLMPPGYVKAYVKRNKNDAADAEAICEAVTRPTMRFVPVKTCDQQAVLMLHRACYLLVRQRTMLVNALRAHMAEFGIIAPQGLHHAEELTKQLAEGQDRLPELARSILLTIVDQLHDTAARVRDIEIRLTKWHKESRVSQLLASIPGIGIMAATAIAATVSDPSLFRSGREFAAWLGMTPRQNSSGGKERLGRTSKRGDKYIRCLLVAGAVAVLRHTRTRTTKDAAWVRGLLARRPAKVVPVALANETARIAWAVMARGESYRGNEEIVQAA

SEQ ID NO: 11368 - protein, 391 aa, unidentified
  source 1..391: note = protein_2ba12ba
  REGION 4..163: note = RuvC_domain
  SITE 7: note = RuvC_P1
  SITE 60: note = RuvC_P2
  SITE 101: note = RuvC_P3
  SITE 103: note = RuvC_P4
  SITE 106: note = RuvC_P5
  REGION 266..353: note = Tnp_domain
  SITE 274: note = Tnp_P1
  SITE 304: note = Tnp_P2
  SITE 312: note = Tnp_P3
  SITE 313: note = Tnp_P4
  SITE 326: note = Tnp_P5
MIIVGIDVAKDKHDCFIMDSEGTVLFDVFTVPNTLDGFNILLDNIKSVTDDLGKTKVGLEATGHYSYDLLGFLLNNGLPTYVLNPLHTNLYRKSLTLRKTKTDKVDARVIASMLMSCVDLKPYTSTLYQNEELKSMTRYRFDKVSERAKLKTSVSRLVTILFPELEKLVPTLHMKSVYALLAEYPSAKHIADAHLTRLTNLLSEASKNRYGKDKAIQIREAARRSIGSVMSAKSMELRHTIKLIADLTEQIDEVEAEIKKLVDESGTTLLTVPGLSYATVAVILAEVGDFSNFATPDKVLAFAGMSPSTYQSGQLTNCYARMEKRGSKYLRYALYNAAKYVCTWDKTFADYLSKKRAEGKHYNVALSHAVKKLVRLIFALEKSHMPYQPSI

SEQ ID NO: 11369 - protein, 323 aa, unidentified
  source 1..323: note = protein_8eb4a56
  REGION 5..155: note = RuvC_domain
  SITE 8: note = RuvC_P1
  SITE 58: note = RuvC_P2
  SITE 98: note = RuvC_P3
  SITE 100: note = RuvC_P4
  SITE 103: note = RuvC_P5
  REGION 195..281: note = Tnp_domain
  SITE 203: note = Tnp_P1
  SITE 233: note = Tnp_P2
  SITE 241: note = Tnp_P3
  SITE 242: note = Tnp_P4
  SITE 254: note = Tnp_P5
MSAFVGIDTAKNTFDIATPLDNGKFRTKAKLPNNASGFSEVEAWLEKHADPQAWVVMEATGTYHEALADFLHAKGYRVCIVNPAVIHAFGKEDLRRVKTDKADAKLIAAYAQQKQHKLRAWVPELPARRRLRALVRRLEDLQEILQMETNRLDVAQANVQASILSVINHVKSEIAATQKAIKDNIDDDPDLRQKRDLIVSIDGLGETSAALILAELGDPLDYSGPRAVVAFAGLNPLIDQSGNYVGPTPISKTGSASLRTGMYMPAMVAMRWNPAVRALSERLKAKGKAPKQIICAAMRKLLHLVYGVLKSGIPFDPNIALAR

SEQ ID NO: 11370 - protein, 412 aa, unidentified
  source 1..412: note = protein_15198d1
  REGION 4..160: note = RuvC_domain
  SITE 7: note = RuvC_P1
  SITE 57: note = RuvC_P2
  SITE 97: note = RuvC_P3
  SITE 99: note = RuvC_P4
  SITE 102: note = RuvC_P5
  REGION 274..361: note = Tnp_domain
  SITE 282: note = Tnp_P1
  SITE 312: note = Tnp_P2
  SITE 320: note = Tnp_P3
  SITE 321: note = Tnp_P4
  SITE 334: note = Tnp_P5
MNAAGIDVSSRKSTVAVLRPFGEVVRLPFDVRHSAEDLAVLAQELKAIEGETRVVMEHTGRYYEGIAKVLHEAGLFVSAVNPLLIKEYGNNSLRKVKTDKADAVKIARYALDNWADLRDYTPMDTIRYDLKTLNRQFQLASKQKTATANNLIALQEQSFPGIRKLFDSPVRSDGTQKWVDFTHDFWHADCVRGSSQNAFTERYRKWCKRNRYQFSLEKAAQVYALARSAVVLVQKTSVTKTLVQEAANQLTAISRSVETYRTEMNKLASLLPEYPVVMQMYGVGESLGPQLMAEIGDVRRFQRKQSLVAFAGIDPAPNESGDYRSRSNKTTKRGSPYLRKTLFNIMTIHLQRAPLDEPVFQFLDKKRAEGKPYYVYMTAAGNKFLRRYYAKVMAYFATLENLPPVDMESTGL

SEQ ID NO: 11371 - protein, 392 aa, unidentified
  source 1..392: note = protein_cd7cf59
  REGION 4..162: note = RuvC_domain
  SITE 7: note = RuvC_P1
  SITE 60: note = RuvC_P2
  SITE 101: note = RuvC_P3
  SITE 103: note = RuvC_P4
  SITE 106: note = RuvC_P5
  REGION 267..354: note = Tnp_domain
  SITE 275: note = Tnp_P1
  SITE 305: note = Tnp_P2
  SITE 313: note = Tnp_P3
  SITE 314: note = Tnp_P4
  SITE 327: note = Tnp_P5
MIFAGVDIAKVDHVVAAIDERGEAVAKPMPFKNSGTGFERCVAYLEGLALDNAGVFVGMEATGHYWMACFSYLVSRGFKVAVINPMQVKAVRKLKGYSRVKNDRIDSQIIAETMRIGDFDETRLATDELQSLKTLTRYQQSLKQEVATVKTQAICLMDAYFPEYAGMFTDMFGTSSMAILSKCPTPAECNRTHAATLAKILSEASRGRFGTEKAANVKAAAKGSVGITLGSDAASFQIKELVSRIVFLNKKASEADRRISVLLQGIEPLILTIPGISTTTGAQIVAEIGDASRFPNAAAIVSYAGLNSAVSQSGRFEATGEPITKHGSPYLRRSMWLAANRARQYDPNLKAFYDKKRSEGKCHRVAVTAVARKLCHIVFAVMRDQIPYDPER

SEQ ID NO: 11372 - protein, 344 aa, unidentified
  source 1..344: note = protein_e6ba37f
  REGION 6..148: note = RuvC_domain
  SITE 9: note = RuvC_P1
  SITE 52: note = RuvC_P2
  SITE 87: note = RuvC_P3
  SITE 89: note = RuvC_P4
  SITE 92: note = RuvC_P5
  REGION 211..298: note = Tnp_domain
  SITE 219: note = Tnp_P1
  SITE 249: note = Tnp_P2
  SITE 257: note = Tnp_P3
  SITE 258: note = Tnp_P4
  SITE 270: note = Tnp_P5
MEITTIGVDLAKSIFQVHGVDATGQVVIRKSLRRAQMLPFFARLPSCLVGMEACGTSHHWARELIKLGHEVRLIPPAYVKPYVKRGKTDAADAEAVCEAVTRPTMRFVPVKSPEQQAALSMHRTRDLLVKQRTQLVNMIRGLLAEFGINIPKGLERALLMARQIVDGEAPDVPIEAVKIVGTLSQQALDIHVRLRQIDRDLLVWQRGNAVARRLMTIPGIGPVGATALAASVTDPHQFRSGRQFAAWLGLTPLQKSSGGKERVGRITKMGDKYLRKLLIVGMTSLVRRAKHNPRTIDPRLANLLARKPVRVATVAMANKTARTIWAIMTRGETYRAGYQPALAA

SEQ ID NO: 11373 - protein, 393 aa, unidentified
  source 1..393: note = protein_aa45f41
  REGION 4..163: note = RuvC_domain
  SITE 7: note = RuvC_P1
  SITE 60: note = RuvC_P2
  SITE 101: note = RuvC_P3
  SITE 103: note = RuvC_P4
  SITE 106: note = RuvC_P5
  REGION 266..355: note = Tnp_domain
  SITE 274: note = Tnp_P1
  SITE 304: note = Tnp_P2
  SITE 312: note = Tnp_P3
  SITE 313: note = Tnp_P4
  SITE 328: note = Tnp_P5
MICVGIDVAKDKHDCFILNSEGEILADVFTIPNNAEGFRTLLQAIRRCTCSEDKIKVGLEATGHYSYNILGFLLDKGLATYVINPLHTNLYRKSLSLRKTKTDRVDARTIATMLMSDVDLKSYTDTAYHNEELKSLTRYRFDKVRERAKLKQSVSRLVTILFPELEKMVPTLHMASVYALLSEFPGARQIACAHLTHLTALLNNVSRGRYGRGTAMELRGAARCSVGSVMPAKSLELQHTIRLIRELDTEIDDIEGAIQSIMEELQSPITTIPGIGVRMGAMILAEIGDFSRFDSPDKILAYAGMSPSTYQSGQLSLSGTYSHMEKRGSRYLRYALYNATKYVCLWDPTFAAYLAKKRAEGKHYNVAISHAAKKLVRLIYAMEKSRQPYNSAA

SEQ ID NO: 11374 - protein, 309 aa, unidentified
  source 1..309: note = protein_a99ddb1
  REGION 8..153: note = RuvC_domain
  SITE 11: note = RuvC_P1
  SITE 54: note = RuvC_P2
  SITE 94: note = RuvC_P3
  SITE 96: note = RuvC_P4
  SITE 99: note = RuvC_P5
  REGION 190..274: note = Tnp_domain
  SITE 198: note = Tnp_P1
  SITE 227: note = Tnp_P2
  SITE 235: note = Tnp_P3
  SITE 236: note = Tnp_P4
  SITE 247: note = Tnp_P5
MKQEIVYVGIDVAKAHLDVAWEKQFHRLPNDVAGTKQLLCLLKAIAGQVQVIWEASGGYERSVMQTLQRGGIKASVVQASRVRQFARAIGILAKTDCIDAAVLCAFGKAMQPQVTAPSNPQQERLREMESHRRHLSRLLVAEQNRRAQLTDPTVLALTERLVGQIQKQIERIDLLIKELIEGSPGLSSKAQKLMALTWVGPRTAALLLAQMPELGQLNRREAAALAGLAPFNRDSGKLRGRRTIFGGRRAVRTGLYMAALVATRHNPILAAFYRRLRAAGKPPKLALSATMRKLLLALNTSLKPQPILA

SEQ ID NO: 11375 - protein, 438 aa, unidentified
  source 1..438: note = protein_9d15cb0
  REGION 35..183: note = RuvC_domain
  SITE 38: note = RuvC_P1
  SITE 89: note = RuvC_P2
  SITE 123: note = RuvC_P3
  SITE 125: note = RuvC_P4
  SITE 128: note = RuvC_P5
  REGION 280..368: note = Tnp_domain
  SITE 319: note = Tnp_P2
  SITE 327: note = Tnp_P3
  SITE 328: note = Tnp_P4
  SITE 340: note = Tnp_P5
MLGNQSMLSIPIILLNFTVQKGVPMTLKIVYQICCGIDVHKTFVVACIASTDSKGVTTYRRHRFSTYTKGLKELLQWLLDHNCKDVCMESTGKYWIPVFNVLEKSCTICLAHPKYVKAIRGKKTDKKDAKWIAGLFKHDLVAGSFMPPLDIRQLRDLMRYRYKLTCFMSSEKNRFQNCLTVSNIQLGNVVSDTFGKSSQKIIDKILENPLDTSFDIEPLIHGSMKSKLPDLELAVDGYITPEQAGKLKVIKHHFEDLETRKAELEELILAPAMPYQQELDLILTAPSFKNIFSAITVISEIGVNMEAFPTAKHLCSWAGLTPTNNESAGKKKTVRVSKAGCYIKPLLVQLANSVVKSEKHPEIRNRYLRLRKRRGHKKAIIAIARMLLTALYNMLKNKEPYNAELYRKSDVLPVNREITVEQAILLAQFQGYRIKPVS

SEQ ID NO: 11376 - protein, 322 aa, unidentified
  source 1..322: note = protein_f24e8ee
  REGION 4..157: note = RuvC_domain
  SITE 7: note = RuvC_P1
  SITE 61: note = RuvC_P2
  SITE 101: note = RuvC_P3
  SITE 103: note = RuvC_P4
  SITE 106: note = RuvC_P5
  REGION 200..282: note = Tnp_domain
  SITE 208: note = Tnp_P1
  SITE 237: note = Tnp_P2
  SITE 245: note = Tnp_P3
  SITE 246: note = Tnp_P4
  SITE 259: note = Tnp_P5
MAVIGIDISKQKFDCLWLRDVRSLKVKTKVFANRPTGFAELIDWCCAQTGETVEQLQVFLEATGVYHEPLALYLHDRGVQVFVLNPARVREYARSLGIQGKTDKQDSLVLARYGATQPVRPWTPERREVRELKALIARHEALQEDLQREHNRREKAAVSDSLGVLASIDNVVKALQQEAERVRQDIDDHIDRHDDLKRDRALLQSIDGIGEVLSRHLLSLLRSRDFSSARQCTAFVGLVPRPWQSGKTVAAPTRLSKAGPPRIRAKLYVAKGCNPAVKALYERLLARGKPRMSALGAAMRKLLQIAYGVLKTQRPYQPRQAL

SEQ ID NO: 11377 - protein, 320 aa, unidentified
  source 1..320: note = protein_0bc0077
  REGION 10..151: note = RuvC_domain
  SITE 13: note = RuvC_P1
  SITE 55: note = RuvC_P2
  SITE 95: note = RuvC_P3
  SITE 97: note = RuvC_P4
  SITE 100: note = RuvC_P5
  REGION 190..275: note = Tnp_domain
  SITE 198: note = Tnp_P1
  SITE 227: note = Tnp_P2
  SITE 235: note = Tnp_P3
  SITE 236: note = Tnp_P4
  SITE 248: note = Tnp_P5
MAMTVSQSIIGVDVAKAEVVIYQTETDELKIVPNTKTKLKAWLDTLPAGSAIAIEATNIYHLQTVTLAHSMGHKVYVVDGFRLNHYRKSTGGRAKTDASDARLLARYLKNEQADLRVWSPPPKIYTRLQSLLRRRAALVKTRIALNQSWAGEPLLKASSKSVSACLERHEALIEKRILDAVTEAGLLHQVKRCQAVEGIGFLTAVALTMAFQRGEFESADAYIAFLGLDLRVTDSGQMNGRRALSKKGDGEIRRLLHNAASAGIRSKAWKPLYEGYLARGLKTTQALVIIARKLARIAFSLMKNQSEYQSKAVLEASPQP

SEQ ID NO: 11378 - protein, 333 aa, unidentified
  source 1..333: note = protein_ee42ea6
  REGION 9..157: note = RuvC_domain
  SITE 12: note = RuvC_P1
  SITE 62: note = RuvC_P2
  SITE 102: note = RuvC_P3
  SITE 104: note = RuvC_P4
  SITE 107: note = RuvC_P5
  REGION 201..288: note = Tnp_domain
  SITE 209: note = Tnp_P1
  SITE 239: note = Tnp_P2
  SITE 247: note = Tnp_P3
  SITE 248: note = Tnp_P4
  SITE 261: note = Tnp_P5
MIVVGSPVVGIDVSKKKLDAALLAGGKLKYKVVENSRKGYAELATWLGKQGVVIEDVHACMESTGVYSEPVALGLSDLGLKVSMVNPTLVKGFGQCENMRNKNDRADAGVIARYCAAMHPPLWEAPSPELRHLRSLTDRVAAMKDMRQQEENRLEAYTFASDTAMQANAKNLIAYLDEEIKRLAKEIDDHIDGHPGLKRDVDLMTSIPGLGRVTAAKVISRVGDIRRFTDAKKLAAYLGVTPKQRQSGSSVRGRSTISRMGSGEVRTAMYMPAITAIKHNPLIAAFAQRLSANGMAKMAVVVAAMRKLVHQIYGVIRSGQPFDSNYLQKPLAS

SEQ ID NO: 11379 - protein, 413 aa, unidentified
  source 1..413: note = protein_f07af12
  REGION 5..167: note = RuvC_domain
  SITE 8: note = RuvC_P1
  SITE 64: note = RuvC_P2
  SITE 104: note = RuvC_P3
  SITE 106: note = RuvC_P4
  SITE 109: note = RuvC_P5
  REGION 275..361: note = Tnp_domain
  SITE 283: note = Tnp_P1
  SITE 314: note = Tnp_P2
  SITE 322: note = Tnp_P3
  SITE 323: note = Tnp_P4
MRLFAGDDWAQDHHDAGLMDATGRRLAKARLPEGVAGLARLHAMIGEQLGEDADEDDAGQVAIGTETGQGPWVAALIAAGYTVFAVNPLQASRYRERHGVSGAKSDAGDAHVLADMVRTDSRQLRPVAGDSAQAAAIKVVTRTHKTLIWERTRHTQRLRHALRDYFPAALEAFEDLDAADTLELLARAPDPASAARLTAAQISAALKRARRRDIAAKAERIQAVLRAAHLGQPDIVAAAYAASARALIAVLVTLNEQVKALQGQVEAYFGQHPDAEILLSQPGLGPVLGARVLAESGDDPARYASAKARKNYAGTSPITRASGKKKIVMARYVHNDRLTGALMSQAFTALRASPGARAYYDHQRARGAGHNPALRQLASRLTGILHGCLKTRTLYDEATAWPQYAATSEKTAA

SEQ ID NO: 11380 - protein, 331 aa, unidentified
  source 1..331: note = protein_89947d4
  REGION 10..165: note = RuvC_domain
  SITE 13: note = RuvC_P1
  SITE 70: note = RuvC_P2
  SITE 110: note = RuvC_P3
  SITE 112: note = RuvC_P4
  SITE 115: note = RuvC_P5
  REGION 206..289: note = Tnp_domain
  SITE 213: note = Tnp_P1
  SITE 242: note = Tnp_P2
  SITE 250: note = Tnp_P3
  SITE 251: note = Tnp_P4
  SITE 262: note = Tnp_P5
MTGSARETHVGIDVSKRALGVCVLPGASAFGEAGAPRGESFVAANDQEGVDGTLPRLAKPGGSPKLVVMEATGRCERLAATSIAAAGISAAVINPRQARGFAEAMGRPAETDGMDAFVLARLAEAIEPEASATPDGDAAASRGVLARRRQPVEMLVSEGERLRMAPKALAKRIRAHVGRLGKEIGRTGSDLDGAIEDNAAFKASESLPRGVPGVGRALSRALLAELPELGEVTHRRPCALVGAAPFNRDSGQRSGRRGAWGGRAPARAALYMGALAATRHNPAIKEFYQRLLDAGKPKKVALVACMGRPLSILDALMRDRSIWRCPHALTP

SEQ ID NO: 11381 - protein, 315 aa, unidentified
  source 1..315: note = protein_0ca8842
  REGION 12..162: note = RuvC_domain
  SITE 15: note = RuvC_P1
  SITE 57: note = RuvC_P2
  SITE 97: note = RuvC_P3
  SITE 99: note = RuvC_P4
  SITE 102: note = RuvC_P5
  REGION 184..276: note = Tnp_domain
  SITE 200: note = Tnp_P1
  SITE 229: note = Tnp_P2
  SITE 237: note = Tnp_P3
  SITE 238: note = Tnp_P4
  SITE 250: note = Tnp_P5
MAMPSSEHSTIIGVDVAKAELVIYEDSSGQLSTIANNKTAIKQWIKALHGKVSIAIEATNVYHLLFTDMVHEAGHTLYLMDGYALSHYRKGIGSRAKTDPIDARVLARYLKNEGVNLSPWIPPSTLYRDLVSLFRRRAMLVQTRTALRLSWEGEPLLKSLLKSQLTSMKRLEDLIENMIKKLLDQAGLMPLVKQCMKVEGIGFLTAARLVATYQRGEFKSADAFIAFLGMDLRVAQSGKKKERSTLTKRGDPEVRRLLHNAAMSAGRTAAWKTFYEDKQSRGFKKTQVLVMLARKLARVVFALIRSGEEYRPKTA

SEQ ID NO: 11382 - protein, 390 aa, unidentified
  source 1..390: note = protein_4c6f89f
  REGION 4..160: note = RuvC_domain
  SITE 7: note = RuvC_P1
  SITE 59: note = RuvC_P2
  SITE 99: note = RuvC_P3
  SITE 101: note = RuvC_P4
  SITE 104: note = RuvC_P5
  REGION 264..350: note = Tnp_domain
  SITE 271: note = Tnp_P1
  SITE 301: note = Tnp_P2
  SITE 309: note = Tnp_P3
  SITE 310: note = Tnp_P4
  SITE 323: note = Tnp_P5
MLLLGVDIAKLNHVASFIDSSSGELIFSNFKFQNNILGFSSLFEKISKFSVSEIIIGLESTGHYGENFINFFFQKGFKIAVINPLQTSHLRKANIRDSKNDRLDSINIAKALLFGKHTYVSQKNLTNFSLKKLTRFRKSLIKQKTKTKIQLVSLLDIIFPELQYFFKSGVHSNAVYTLLKKYPSTEKIAALREKSLFSILNKASKGHYKEQHASQLKSLAKSSVGIKDTSISMHIPQLIQLIEMLDSQIKAIEKEIDSFIDEESPILTIPGINTVAAASILGEINDIENFDSSSKLLAFSGLDPKIRQSGNFNASSCRMSKKGSSYLRYALIFTAWNLVRNSATFNRYYLSKRAQGKSHYSALGHTAHKLVRVIYTLLKKNISYQEDFIS

SEQ ID NO: 11383 - protein, 423 aa, unidentified
  source 1..423: note = protein_85c30ef
  REGION 9..157: note = RuvC_domain
  SITE 12: note = RuvC_P1
  SITE 63: note = RuvC_P2
  SITE 97: note = RuvC_P3
  SITE 99: note = RuvC_P4
  SITE 102: note = RuvC_P5
  REGION 259..347: note = Tnp_domain
  SITE 267: note = Tnp_P1
  SITE 298: note = Tnp_P2
  SITE 306: note = Tnp_P3
  SITE 307: note = Tnp_P4
  SITE 318: note = Tnp_P5
MKVIYQTCCGVDVHKSFLVATIIKTTSGVEPTYQKKRFSTFNNSILEFKQWLIENECRDICMESTGKYWVPVFNLLEEDINVTIANPKWVKAVKGNKDDTKDSKWIGNLFRLGLVPGSYIPCKPIRILREYTRYRYKMVCCRSGEKNRYQNALTVCNVALDSVVSDIFGKSSTSIIDYLLEQSGNSINHEEIASKLLKKLKEKEPAVIESIEGYQMTDTQKYRMRLVRAHMDYITAEIQDIDSQIEFLISSHADFENAIQFLCTIPGVKRDSAITIISEIGIDMSQFSSNKRLCSWAGLTPGNNESAGKKKSVRITRAGVYLKPALVQCAHAAVKSDKSPYYKKKYESLLKRRGKKRAIIAIARMILTAIYQMLSNGEVWNPSDIYKIDMPVTLVEKQKEKAIKQAKKLLLREGVITESQLLS

SEQ ID NO: 11384 - protein, 323 aa, unidentified
  source 1..323: note = protein_498717b
  REGION 5..154: note = RuvC_domain
  SITE 8: note = RuvC_P1
  SITE 58: note = RuvC_P2
  SITE 98: note = RuvC_P3
  SITE 100: note = RuvC_P4
  SITE 103: note = RuvC_P5
  REGION 195..281: note = Tnp_domain
  SITE 203: note = Tnp_P1
  SITE 233: note = Tnp_P2
  SITE 241: note = Tnp_P3
  SITE 242: note = Tnp_P4
  SITE 254: note = Tnp_P5
MSSVVGIDIAKGSFDIATLQINDKYRTKARLPNNPKGFDALQAWLGKHATADAWLVMEATGIYHLALAEHMYNLGYQVAVINPACISSYAKSQLQRVKTDKVDAKLIALYGQRHKDELVAWQPEPLAQRRLRALVRRLEDLKGLEQMEQNRLDVSDASVQGSIRSVIQHLEQEITATLKAIKEHIDDDPDLRGQRELLVSIDGISDKTAALIMAELANPLRFKSSRAVVAFAGLNPRLQESGKHKGHVRISRTGSASLRAGLYMPALVAMTHNPAVKALSERLKAKGKPGKQIVCAAMRKLLHIAYGVLKSGKPFDAQLAIAH

SEQ ID NO: 11385 - protein, 293 aa, unidentified
  source 1..293: note = protein_cfe7cb8
  REGION 1..68: note = RuvC_domain
  SITE 8: note = RuvC_P3
  SITE 10: note = RuvC_P4
  SITE 13: note = RuvC_P5
  REGION 145..228: note = Tnp_domain
  SITE 152: note = Tnp_P1
  SITE 182: note = Tnp_P2
  SITE 190: note = Tnp_P3
  SITE 191: note = Tnp_P4
  SITE 202: note = Tnp_P5
MSEILGKKTDKLDAQRLLVAYMTGVIKGSYIPTGEIRELRELTRYRESLVEKITQVKNEIRKILELAGYKIQPLDKKGRQLLEKLAKGEELNKEEKDELKERLGRNLNDAEKLALKQLVELLKSLENMVKEVEDMIISKIPQPVVELSKIPGVGLISAATIYAEFGDVSRFSSSKAARAYAGFAPRTKQSGESESHPGMIMGNKYLRRVLYLVARVARGLGPFNEYYERLVARGKSVKQATCALAGKLASICYHVIKDGVYKGVVKKSFRVPRGKEVDVKDFDVGDALDSLSP

SEQ ID NO: 11386 - protein, 396 aa, unidentified
  source 1..396: note = protein_563d4d0
  REGION 4..166: note = RuvC_domain
  SITE 7: note = RuvC_P1
  SITE 60: note = RuvC_P2
  SITE 100: note = RuvC_P3
  SITE 102: note = RuvC_P4
  SITE 105: note = RuvC_P5
  REGION 269..356: note = Tnp_domain
  SITE 277: note = Tnp_P1
  SITE 307: note = Tnp_P2
  SITE 315: note = Tnp_P3
  SITE 316: note = Tnp_P4
  SITE 329: note = Tnp_P5
MIHVGIDVGKLKHCFCILDYSTGEELVKPTFFENNQAGFDLLTHALEAYSRDDELLIGMEDTGHYHFALLRYLLDHNFSVALMNPTTTDFERKRQGSCTKNDKLDTITICDVLASNTHRKKLYRLVTPNNFKFYEMKQLTRQHHNLKEQKNVYSNRLQRAIDLTFPEFNQLFKSKYGTVYMTVLKNFGSADKIAKADLRSLRKCFDVKGRGSRIALTAEKLKEAAKASVGFSSIAEELNIKHLAAQIELINEQIAEIDKKIEEFSLETNSPILSMPGISHFSGTSILAELGEIRNYDKVSKVIKMAGVAPREYESSQYRAEHMAITKKGSTYLRKTLYQIITPVIRYNPVFKRFYDLKRSQGKGHRCAQGHCVRKLLRVIYHLLITNQQFDPALLK

SEQ ID NO: 11387 - protein, 428 aa, unidentified
  source 1..428: note = protein_b571f61
  REGION 20..181: note = RuvC_domain
  SITE 23: note = RuvC_P1
  SITE 79: note = RuvC_P2
  SITE 120: note = RuvC_P3
  SITE 122: note = RuvC_P4
  SITE 125: note = RuvC_P5
  REGION 288..377: note = Tnp_domain
  SITE 296: note = Tnp_P1
  SITE 326: note = Tnp_P2
  SITE 334: note = Tnp_P3
  SITE 335: note = Tnp_P4
  SITE 347: note = Tnp_P5
MKYNTQNAKIESITEKTLIVGIDVGSETHFARAFDWRNYEFTKKPFEFSNSEAGFLTFKAWMEDLLEKNGKSVVIPGMEPTGHYWFALGKFLQDNGMRPVHVNPHHVKKSKELDDNNPNKNDRKDPKTIASLVNEGRFSYPYIPTGVYAEIRNLSNMRFQEQEELTRAKNRIARWFSIYFPEYKDVYRDLKAVSGRMVLQAAPLPEDIRKLGVEGVNRIWRDAKLRGAGMKRAKTLVSAAEHSVGSKEAPEAARLELRNLLNDMDVYASRVEELLGMIEEKLKEIPYIDKLMAIKGVGLITVSGFIAEVGDIRRFDDPKQLQKLAGYAIVANESGKHKGESRISYRGRKRLRYVLYEAALSLIGRNAEFKEIHEYYRTRRDNPLKKMQSVVAIACKVIRIFYVILTKGVDYDPEKMKGDIRRSQIQAA

SEQ ID NO: 11388 - protein, 354 aa, unidentified
  source 1..354: note = protein_a62129b
  REGION 12..152: note = RuvC_domain
  SITE 15: note = RuvC_P1
  SITE 58: note = RuvC_P2
  SITE 93: note = RuvC_P3
  SITE 95: note = RuvC_P4
  SITE 98: note = RuvC_P5
  REGION 217..302: note = Tnp_domain
  SITE 225: note = Tnp_P1
  SITE 255: note = Tnp_P2
  SITE 263: note = Tnp_P3
  SITE 264: note = Tnp_P4
  SITE 276: note = Tnp_P5
MSQKLNTAIAVIGIDIGKNSFHVVGLDQRGAIVLRQRWSRGQVEARFANMPPCLIGMEACVGAHHLSRKLKSLGHDARLMPAKYVRPYSKGQKNDFRDAEAIAEAVQRPTMRFVATKTVEQLDLQALHRVRERLVGQRTGIINQIRAFLLERGVAVRQGVRFLRAELPGILANRTDVLSPRMVHVIEGLADDWRRLDERIEGLSTEIGALACQDPACDRLMTVPGIGPIISSAMVAAIGNGAAFSKGRDFGAWLGLVPKQISTGDRTILGKISRRGNRYLRVLFVQAAWVVLIRPKSWERYGLKPWIEAAKKRLHHNVLAITLANKLARIAWAVLNKERKFECIRTNKMSPRAA

SEQ ID NO: 11389 - protein, 341 aa, unidentified
  source 1..341: note = protein_bcf3346
  REGION 7..148: note = RuvC_domain
  SITE 10: note = RuvC_P1
  SITE 53: note = RuvC_P2
  SITE 88: note = RuvC_P3
  SITE 90: note = RuvC_P4
  SITE 93: note = RuvC_P5
  REGION 210..294: note = Tnp_domain
  SITE 218: note = Tnp_P1
  SITE 248: note = Tnp_P2
  SITE 256: note = Tnp_P3
  SITE 257: note = Tnp_P4
  SITE 269: note = Tnp_P5
MEQVTTIGLDIAKHVFHAHGSDDQGRIVFSKRVSRSRLLSFFARQPRCVVALEACSGAHHWGRELQRLGHEVRLIPPAYVKPFVKRQKNDAADAEAICEAAQRPSMRFVAVKSEEQQAGALVFRGRDLLVGQRTQIINALRSHMGEHGWIAPKGPSHIARLRELLEDEASVPASARPVLKLLLDMVAELDRRIAELDREIARRAREDDTARRLMTIPGIGPITATALTALAPPPQTFARGRDFAAWLGLVPRQHSTGGKQKLGAISRMGERSLRRLLIIGASAVVLHASKRGAPPGSWLERMLARKPRMLVTVALANKTARIVWALLSRNEVYRAPAPVAA

SEQ ID NO: 11390 - protein, 420 aa, unidentified
  source 1..420: note = protein_a48705d
  REGION 14..170: note = RuvC_domain
  SITE 17: note = RuvC_P1
  SITE 66: note = RuvC_P2
  SITE 107: note = RuvC_P3
  SITE 109: note = RuvC_P4
  SITE 112: note = RuvC_P5
  REGION 279..366: note = Tnp_domain
  SITE 287: note = Tnp_P1
  SITE 317: note = Tnp_P2
  SITE 325: note = Tnp_P3
  SITE 326: note = Tnp_P4
  SITE 338: note = Tnp_P5
MTSQNSIPADAVLVAIDIAKVRNEVLIEAPGHKRRRRLSVLNTRAEHDHLIAILQSYDRPVVCAFEATGNYHRPIAWRLVEAGFETRLVSSLALARTREALHNSWDKNDPKDAQVILHMLRIHSTQVYHDPLRAGINDVQELSKTHEAIANAKTEIQHRILTHYLPLYFPEIERFRGNSRSDWFFAFLDAFPTPSSITTLTKEKFVEAAWDVVGRKVSKSQILMDIYETARTSIGLPLPLDAPAIRMFRMVVAEARSLIRQRNEIEAQADDLLRNSRDYQILRQIPGIGPINALTIIAEAGDLRRFHHHRQFLKFCGLDLSTQQSGQYRGQTRLSKFGNARLRRTLWIAGQVAIRQRENGFRHKFERYIARDRDNPDLRRKAMTAITAKMARVVHAVVKSGSDYRPFVEGRVPGGRTSVS

SEQ ID NO: 11391 - protein, 319 aa, unidentified
  source 1..319: note = protein_737f839
  REGION 10..151: note = RuvC_domain
  SITE 13: note = RuvC_P1
  SITE 55: note = RuvC_P2
  SITE 95: note = RuvC_P3
  SITE 97: note = RuvC_P4
  SITE 100: note = RuvC_P5
  REGION 191..275: note = Tnp_domain
  SITE 198: note = Tnp_P1
  SITE 227: note = Tnp_P2
  SITE 235: note = Tnp_P3
  SITE 236: note = Tnp_P4
  SITE 248: note = Tnp_P5
MAMNTQPIQIGIDVAKEELVIYRQDLDQLDSLPNTPPNIRRWLKTLPEQAALAVEATGTYHMSLTEQAHRAGHSVFVIDGYQLKHYRESVRARAKTDPCDARLLARYLAREGDDLRAWTPPPKAYRTLQSLLRRRSKLIQARVALQQSLGQEPSLKAPLKRLVAQINRIDQLIQKRMDQAVRQADLTEQVARCEAVEGIGPLSACALVMAFLRGDFRNSDAFVAFLGLDVRVRDSGKQVQRRRLSKRGDPEIRRLLHNAAMAARRHPYWANVYQRYRDRGLQTTQALVILARKLARIAFALMKNQTTYQAKARPACGTT

SEQ ID NO: 11392 - protein, 358 aa, unidentified
  source 1..358: note = protein_13b77d2
  REGION 16..172: note = RuvC_domain
  SITE 19: note = RuvC_P1
  SITE 77: note = RuvC_P2
  SITE 111: note = RuvC_P3
  SITE 113: note = RuvC_P4
  SITE 116: note = RuvC_P5
  REGION 239..324: note = Tnp_domain
  SITE 247: note = Tnp_P1
  SITE 277: note = Tnp_P2
  SITE 285: note = Tnp_P3
  SITE 286: note = Tnp_P4
  SITE 297: note = Tnp_P5
MAGPQPIVADVYTYVVGVDTHAATHHYAIIEARTGGLIDHAEFPTHTAGLLRAADWIARRTAEATAGEVDRVLVSIEGTRSYGAQLTAVLSQTGYRVVDAPTPKRERGSGKNDQIDAVVAARGSLHKHLDQLADARSGETSATLQVLLSARNSITGERTRAINALTALLRVHDLGVDARRKPTRQTIRSIAAWRTRRGDTPTQAVARREAIRLATRILALDAEATSNDKQLHDIVAATAPTLLDLPGVGPVNAATVLTAWSHPGRVRNEASFAKIAGVCPLEVSSGRRHEHRLNRTGDRQLNRALHSIASNRMKYHPATRDYVARRTAESLTKPRIRRCLKRYIAREIYRHLAALDTL

SEQ ID NO: 11393 - protein, 339 aa, unidentified
  source 1..339: note = protein_26b9a87
  REGION 7..150: note = RuvC_domain
  SITE 10: note = RuvC_P1
  SITE 53: note = RuvC_P2
  SITE 89: note = RuvC_P3
  SITE 91: note = RuvC_P4
  SITE 94: note = RuvC_P5
  REGION 213..302: note = Tnp_domain
  SITE 221: note = Tnp_P1
  SITE 251: note = Tnp_P2
  SITE 259: note = Tnp_P3
  SITE 260: note = Tnp_P4
  SITE 272: note = Tnp_P5
MSEIIRIAIDLSKGAFALHGVNADEEAILCRQLKRGQVLGFFTKLSPCLVGMEACASAHYWAREIGALGHEVVLVPPAYVKPYVKRGRKNDANDAAAICEAMARRSVPRVPVKTPEQQAVLMLHRARKMLVGQRTMLANAVRAHLAEFGIVAPCGDKALDGLIALAVDAGDLALPQLAREALGMLAAQLRDAEAKIDALEHEVLAAQRADEACRRLTSIPSIGPVTASAIAATMGDPHRFKTGRDFAAWLGLVPSQHSTGGKTALGPITKAGDRYLRSLLVVCATGMLRHRTESPWIKALLERMPARKATVAIANKLARIAWAILAHGGTYHRQAGLAA

SEQ ID NO: 11394 - protein, 349 aa, unidentified
  source 1..349: note = protein_3ffebc8
  REGION 6..147: note = RuvC_domain
  SITE 9: note = RuvC_P1
  SITE 52: note = RuvC_P2
  SITE 87: note = RuvC_P3
  SITE 89: note = RuvC_P4
  SITE 92: note = RuvC_P5
  REGION 211..299: note = Tnp_domain
  SITE 219: note = Tnp_P1
  SITE 249: note = Tnp_P2
  SITE 257: note = Tnp_P3
  SITE 258: note = Tnp_P4
  SITE 270: note = Tnp_P5
MNRTTYGLDIAENVMQLHWVDTETGEIGRKKLVRAKLSEFFARLQPVRVAMEACGSAHHWARVLSSLGHQVELLPARQVRPFVRSNKDDAADARAIWVAAQQSDIRRVPLKSVAQQASLALHRSRQHWVSVRTATINALRGTLYEFGVTLAGGKHAGLKALTTHRAEIDAKIPATIQRLIDGQLATLKEIGRRIDELEAEIGVQQEQLEEAAKLRKVPGIGLLGATALAATLGDGGAWKSGREFSASLGLVPAHSGTGGKARVGHLSKRGDPYLRTLLIHGARAVIARAKHKPKWLEQLLARRPMNVAVAALANKMARTTWALVAHGREYQREWKSTPPKGCTAQAAAA

SEQ ID NO: 11395 - protein, 339 aa, unidentified
  source 1..339: note = protein_2b7770e
  REGION 6..148: note = RuvC_domain
  SITE 9: note = RuvC_P1
  SITE 52: note = RuvC_P2
  SITE 87: note = RuvC_P3
  SITE 89: note = RuvC_P4
  SITE 92: note = RuvC_P5
  REGION 211..302: note = Tnp_domain
  SITE 219: note = Tnp_P1
  SITE 249: note = Tnp_P2
  SITE 257: note = Tnp_P3
  SITE 258: note = Tnp_P4
  SITE 270: note = Tnp_P5
MQATTIGFDLAKNVFQVHGIDDHGEVVFNRALRRGQVLAFFERIEPCLIGIEACGTSHHWARELIKLGHSVKLIPPAYVKPYVKRGKSDAVDAAAICEAVTRPTMRFVEVKTPEQQAILAVHRTRDLIVRQRTQTINMLRAQLAEFGIILPQGVYHALQFAKDCVNEGPSNLPNDAEEVIIDLCDQLLFLHSKILRLSRHMTQIAKREKRVALLRTIPGVGPITASAIVATVGSGKQFNNGREFAAWLGLTPLNKSSGGKERLGHISKMGDQYIRRLLVLGMTSRIRSIRSKPEKFDPWFADILSRKPSRVAAVAMANKTARMIWAVLSRNEPYTVRTV

SEQ ID NO: 11396 - protein, 342 aa, unidentified
  source 1..342: note = protein_4251b4f
  REGION 6..148: note = RuvC_domain
  SITE 9: note = RuvC_P1
  SITE 52: note = RuvC_P2
  SITE 87: note = RuvC_P3
  SITE 89: note = RuvC_P4
  SITE 92: note = RuvC_P5
  REGION 211..297: note = Tnp_domain
  SITE 219: note = Tnp_P1
  SITE 249: note = Tnp_P2
  SITE 257: note = Tnp_P3
  SITE 258: note = Tnp_P4
  SITE 270: note = Tnp_P5
MQVATIGLDLAKHWFQVHGVDAAGAPVHRKRLKRAEVLAFFQGLEPCLVGMEACASSHYWAREIARFGHTVRLMPPAYVKPYVKRGKNDAADAEAICEAVMRPTMRFVAVKTAEQQGLLLLHRARRLLVRQRTMTACAIRSHLAEFGFITGQGIGRVEPLLERLAEKGAERLPGEVRDILLMLAAELATLGERIAQIEARIDEQHRANPVSRLIATIPGIGPITATAIAATVPDAAAFRSGRDFAAWLGLTPRQNSSGGKDRLGSITKRGDTYLRHLLFIGARNVIRYPKARAAAGAAWIEALVARRSKTVAAVALANKMARIAWAMMTSGEVYRSAREATA

SEQ ID NO: 11397 - protein, 389 aa, unidentified
  source 1..389: note = protein_2d4e5c1
  REGION 4..160: note = RuvC_domain
  SITE 7: note = RuvC_P1
  SITE 58: note = RuvC_P2
  SITE 99: note = RuvC_P3
  SITE 101: note = RuvC_P4
  SITE 104: note = RuvC_P5
  REGION 263..350: note = Tnp_domain
  SITE 271: note = Tnp_P1
  SITE 301: note = Tnp_P2
  SITE 309: note = Tnp_P3
  SITE 310: note = Tnp_P4
  SITE 323: note = Tnp_P5
MLFVGIDVAKDKHDCCILSSTGEELACFTFSNDRVGFDCLISTISSFGSLEDVKIGLESTGHYSTNIANFLLQKRLCVKIFNPLSIQLMRKAQSLRKTKTDKSDSKFLAGILFSDNSKPYQMPVYQISELKTLTRNRHRLVALRSKLKLSVSRLITILFPELPSAVYSVNQKSTYALLLRSPTAKSIASTHLTSLIKLLSDNSHGRYGKDKALEIRAMAANSIGLDSCATGLELQQTIRIIQNIQSEIDVLDKEIKALMKELNSPILTIPGIGYILGAIIVAEIGNANNFANHGKLLAFAGLEPSTYQSGKFTANKTPMVKHGSAYLRWALLQAARLAAYRDETFGRYYAKKKAEGKHHFVALSHVAKKLVRVVYMLLRSNQAFMPQQA

SEQ ID NO: 11398 - protein, 326 aa, unidentified
  source 1..326: note = protein_22bcdf7
  REGION 4..156: note = RuvC_domain
  SITE 7: note = RuvC_P1
  SITE 61: note = RuvC_P2
  SITE 101: note = RuvC_P3
  SITE 103: note = RuvC_P4
  SITE 106: note = RuvC_P5
  REGION 201..287: note = Tnp_domain
  SITE 209: note = Tnp_P1
  SITE 238: note = Tnp_P2
  SITE 246: note = Tnp_P3
  SITE 247: note = Tnp_P4
  SITE 260: note = Tnp_P5
MAVIGIDVSKQKLDCLWLRDPESLKVKTKVFTNQVDDFAALVDWCCTHTGATAGELKVFLEATGVYHESLAYYLHERGVQVFVLNPAQVRDYARSQGIRGKTDKQDSLVLARFGATQKARRWLPEAREIRELKAMIVRYEALQEDLQRELNRREKAEVSQASLSVMASIDTMLSALRQEAERLKQEIDDHIDRHDQLKRNRQLLQSIQGIGDVLSRHLLAFLHSRDFGTARQCAAFAGLVPRPWDSGSSVKGKPRLTKAGQPRLRAKLYMAAIVAKQYNPTVRALYQRLLARGKAKMSALGAAMRKLLQIAYGVLKTQTPYQPQPT

SEQ ID NO: 11399 - protein, 330 aa, unidentified
  source 1..330: note = protein_f2866d6
  REGION 5..153: note = RuvC_domain
  SITE 8: note = RuvC_P1
  SITE 55: note = RuvC_P2
  SITE 95: note = RuvC_P3
  SITE 97: note = RuvC_P4
  SITE 100: note = RuvC_P5
  REGION 197..283: note = Tnp_domain
  SITE 204: note = Tnp_P1
  SITE 234: note = Tnp_P2
  SITE 242: note = Tnp_P3
  SITE 243: note = Tnp_P4
  SITE 256: note = Tnp_P5
MSTFAGIDVSAKKLDVACLTGKAKPAFAQFEQSPAGHRKLVAYLKKRRVEAVVMEATGIYYLDAAVALSWASVPVSVINPRSAHHFAEAMLQSSKTDRIDADLLAQYAQRMDLKPWQPPRGDWLALRDISRRINQLSGMCTAEKNRLHALEAQRHTRQAVLEDVRSHIELLERSIDRLTASALELIEQDADLAHYRSCMTAAKGVADASVVTLLGELCMLPLELRSAQVSRQAGMDVRLTESGSSVDKPGRLSKAGNAYLRAALHMPSLSLIVHDKYAKAHYEALVERGKKKMQALCAIQRKMLTGLWACMKTGQPFDSTKLFAIEPKKA

SEQ ID NO: 11400 - protein, 349 aa, unidentified
  source 1..349: note = protein_7b46c7e
  REGION 7..148: note = RuvC_domain
  SITE 10: note = RuvC_P1
  SITE 53: note = RuvC_P2
  SITE 88: note = RuvC_P3
  SITE 90: note = RuvC_P4
  SITE 93: note = RuvC_P5
  REGION 210..296: note = Tnp_domain
  SITE 218: note = Tnp_P1
  SITE 248: note = Tnp_P2
  SITE 256: note = Tnp_P3
  SITE 257: note = Tnp_P4
  SITE 269: note = Tnp_P5
MSQIIRIGMDTSKYIFQLHGVDAEERTVLRKRLSRKAMLEFFAKLPPTVVVIEACGAAHYLARELGKLGHTAKLIAPQLVKPYVPRNKNDGRDAEGLCEAASRPRMRYVPVKTAEQQAALMLLGVRDQLVGRRTQLSNTIRGHAAEFGLIAAKGLDKLASFLAAIDQDERVPVLARELFAMLAREYARVQAELRAIEAKLLAWHRADASSRRLAQIPGVGPVTAAALVMKAPDPHAFRSGRLFAAWLGLTPKDHSTGGKTRLGKITRAGDERLRQLLVVGATSVVRQAKAKGRAPRWLLDLLKRKSPKLAAVALANKMARIAWKLMTTGENYESARLDARADTQAAATA

SEQ ID NO: 11401 - protein, 323 aa, unidentified
  source 1..323: note = protein_89bade0
  REGION 5..158: note = RuvC_domain
  SITE 8: note = RuvC_P1
  SITE 58: note = RuvC_P2
  SITE 98: note = RuvC_P3
  SITE 100: note = RuvC_P4
  SITE 103: note = RuvC_P5
  REGION 195..281: note = Tnp_domain
  SITE 203: note = Tnp_P1
  SITE 233: note = Tnp_P2
  SITE 241: note = Tnp_P3
  SITE 242: note = Tnp_P4
  SITE 254: note = Tnp_P5
MSPVIGIDVAKRSFDVAIDLTNGKHRTKAKLSNDAKGFQALQAWLQTHAQPDSWIAMEATGTYHQALAEFLHARGYRVCVLNPAQTAAYARSQLSRVKTDRSDAKLIASYALRHREQLRRWHPDPPALKQLKALVRRRQDLQQMLQMERNRLEVAPAQVKDSIQVHLADLQHHIAQIEQAIDDHIDQDPTLRGQRELLVSIQGIADTSAALMLAELGDVRRFADASAVTAFAGLNPCLQESGERKGHVCISRTGSPRLRAGLFMPALVAMTHNPIIRTLKQRLSERGKAGKQIVCAAMRKLLHLAYGVLKSGTAFDPKRGLAC

SEQ ID NO: 11402 - protein, 311 aa, unidentified
  source 1..311: note = protein_a7ef6d0
  REGION 6..153: note = RuvC_domain
  SITE 9: note = RuvC_P1
  SITE 53: note = RuvC_P2
  SITE 92: note = RuvC_P3
  SITE 94: note = RuvC_P4
  SITE 97: note = RuvC_P5
  REGION 188..272: note = Tnp_domain
  SITE 196: note = Tnp_P1
  SITE 225: note = Tnp_P2
  SITE 233: note = Tnp_P3
  SITE 234: note = Tnp_P4
  SITE 245: note = Tnp_P5
MPDDTIGIDISKATLDIHRLSDGKMMSFSNCPAGFKALSKFCAQTTVTRVVYEATGAYHGGLERALGAHLPLVKVNPLQARRFAQAQGVRAKTDAVDAKMLAAMGNAFALQPDEPATKIQHDLKELRSFRSGLIKDRTGIMSRLKTQTLPITCRQSKTRLAQVDKNIAEINAEIDRLINSNDTLANSMKILRSIPGIGAVCASTILIEMPEIGSMDRKQVACLTGVAPMTRQSGQWRGKSFIQGGRKVVRDALYMPALVAMRFNPDLKAKYQAMIKAGKPPKVALTALMRKLIELANALIKANRNWVIKEA

SEQ ID NO: 11403 - protein, 325 aa, unidentified
  source 1..325: note = protein_89540db
  REGION 4..157: note = RuvC_domain
  SITE 7: note = RuvC_P1
  SITE 59: note = RuvC_P2
  SITE 99: note = RuvC_P3
  SITE 101: note = RuvC_P4
  SITE 104: note = RuvC_P5
  REGION 198..284: note = Tnp_domain
  SITE 206: note = Tnp_P1
  SITE 235: note = Tnp_P2
  SITE 243: note = Tnp_P3
  SITE 244: note = Tnp_P4
  SITE 257: note = Tnp_P5
MAYIGIDVSKSKLDLCWLRENGKVKTKVFTNHPKHFPALIDWLTRQTGEQARDLRVYLEATGIYHEPVAEWLHEVGVQVHVVNPAQVRHYGHALGHSGKTDKKDSQLLARYGLDRQPPRWQPEPAAIRRLRRLAGRLETVQQDIQREENRREKAMFSRDTETVSSIDQVLLALQGEAKRLREEIKDHIDGDGDLKRDQALLESIPGIGEVTSVHLMVLLRGKTFRSARQAAAFVGLVPCEWTSGSSVRGRPRLTKKGSPAMRRRLYMAALTASRYNPVVQGFYTRLRQAGKTPMSALTAAMRKLMHIAFGVLHRQTPFQTQPAGG

SEQ ID NO: 11404 - protein, 308 aa, unidentified
  source 1..308: note = protein_5c6fee7
  REGION 7..146: note = RuvC_domain
  SITE 51: note = RuvC_P2
  SITE 91: note = RuvC_P3
  SITE 93: note = RuvC_P4
  SITE 96: note = RuvC_P5
  REGION 187..292: note = Tnp_domain
  SITE 195: note = Tnp_P1
  SITE 224: note = Tnp_P2
  SITE 232: note = Tnp_P3
  SITE 233: note = Tnp_P4
  SITE 244: note = Tnp_P5
MPQAVIGCDLSRALIDICELPSGRIGQIANTPDAITTWLDTLDHDIRLVFEATSGCDGDLIAALATRGHPFSRVNPRQAREFARATGTLAKTDRVDARVLAQMGAALDLPATIPLSPARSRLADFLRRRRQLVDMRKAEKLHRHSAGQPEIAQAIEAMITLLGQQIADLDRQIAGFIAEDQALAEEARLLTAVPGIGPTVLATLLDELPELGTLCRRKIASLAGLAPHARESGTWRGARRIWGGRRKVREALYIAALNASRRIPVLTAMRDRMRAKGNAPKTILIAVARQLLVILNAMIRKRQPIAFA

SEQ ID NO: 11405 - protein, 338 aa, unidentified
  source 1..338: note = protein_376c3a8
  REGION 13..170: note = RuvC_domain
  SITE 16: note = RuvC_P1
  SITE 69: note = RuvC_P2
  SITE 109: note = RuvC_P3
  SITE 111: note = RuvC_P4
  SITE 114: note = RuvC_P5
  REGION 209..295: note = Tnp_domain
  SITE 217: note = Tnp_P1
  SITE 246: note = Tnp_P2
  SITE 254: note = Tnp_P3
  SITE 255: note = Tnp_P4
  SITE 268: note = Tnp_P5
MASVKGDIIMYYVGIDISKRFVDVCLLADGMKGKRKTKTLPNGPNAVQALAEWLTRQKCDPGQAHIIMEATGVYHEHLAYGLHQSGIAVSVINPHRLREFARGMGILTKTDKVDAYVLACYGGLRQPEGWSPPSPEIRKLKALLQHRDSLLSDKQRIENRLSTLASTQAPEEVVASLDSMVRHVKSELERIERLIEDHIDKHPGLKNDLKLLKSIDGVGDQIGWNMLATIRSGHFRSAEQVAAYLGVIPVERRSGTSVRGRARLSKIGPPAMRAKLYMGAIAAISHNRHVKAQYERLLLKGKAKMLAVGAAMRKLVHLCYGVLHTQQRYDKNYGVVAS

SEQ ID NO: 11406 - protein, 318 aa, unidentified
  source 1..318: note = protein_ae1e0d7
  REGION 7..156: note = RuvC_domain
  SITE 10: note = RuvC_P1
  SITE 54: note = RuvC_P2
  SITE 94: note = RuvC_P3
  SITE 96: note = RuvC_P4
  SITE 99: note = RuvC_P5
  REGION 193..277: note = Tnp_domain
  SITE 201: note = Tnp_P1
  SITE 230: note = Tnp_P2
  SITE 238: note = Tnp_P3
  SITE 239: note = Tnp_P4
  SITE 250: note = Tnp_P5
MTKTICIGIDVAKASLEIALGAQGTVMTYPNTPEGHDELAATLTNYEIDLVVLEATGGYEVSVACVLQTIGLAVAIVNPRQARDFAKAMGNLAKTDKIDAQVLAQLALVLSQRTDRDKIVRILPSAQQRVLQAMIARRRQLVVLSISERQRLGNCHPDIRESITLMISFIQEQLKVIESALSKHIKTYHRSKLDLLSTVKGVGPATIATLIADVPELGKLTRREISALIGVAPFNRDSGFFRGKRTIFGGRAMVRRMLYMATLTAIRFNPVLCAFYKRLTEAGKPNKVAIVACMRKLLVILNAMIKTNRPWDESFHTV

SEQ ID NO: 11407 - protein, 296 aa, unidentified
  source 1..296: note = protein_1cd2841
  REGION 7..149: note = RuvC_domain
  SITE 10: note = RuvC_P1
  SITE 53: note = RuvC_P2
  SITE 88: note = RuvC_P3
  SITE 90: note = RuvC_P4
  SITE 93: note = RuvC_P5
  REGION 209..294: note = Tnp_domain
  SITE 217: note = Tnp_P1
  SITE 247: note = Tnp_P2
  SITE 255: note = Tnp_P3
  SITE 256: note = Tnp_P4
  SITE 268: note = Tnp_P5
MQNVTLIGIDLGKHSFHVHAQDKNGNALLRKKFSRNPLTAFLSTCPASTVVMDSCAGAHFMARHISQFGHQVKLISPQFVRPFVKSNKNDFIDAGDICEAASRPSMRFVTPRTEDQQAMSALHRVRDAIVRDRVKTTNQMHAFLLEFGISMPRGIAVIRRLAAVLEEHELPPYLARLLMRLHQHYAYLTEQIEELEQELKTHMADDDTAQRLLTIPGVGLITASLLATKPGDGKSYASSRDFAASTGLVPRQYSTGGKSTLMGISKRGDKNLRRLLVQCARAFMQRPEHNQGRLAD

SEQ ID NO: 11408 - protein, 313 aa, unidentified
  source 1..313: note = protein_84aa953
  REGION 10..158: note = RuvC_domain
  SITE 13: note = RuvC_P1
  SITE 55: note = RuvC_P2
  SITE 95: note = RuvC_P3
  SITE 97: note = RuvC_P4
  SITE 100: note = RuvC_P5
  REGION 190..274: note = Tnp_domain
  SITE 198: note = Tnp_P1
  SITE 227: note = Tnp_P2
  SITE 235: note = Tnp_P3
  SITE 236: note = Tnp_P4
  SITE 248: note = Tnp_P5
MAKAVEPVLTGVDVSKAELVIARSDSSGVEAISNAVGPTRRWLKSLPPGSKIALEATGIYHRQLARLAHEAGFELYLLDGYKLNHYRSGVGTRAKTDASDAKLILRYLTKEMDSLKPWIPAHDAFYRVQGLMRRRASLVHTRVALSQSLQDIPELKQAAKQLDAHIRRVELLIVQRLKQAMADVGWWLDAKRCKAIEGIGDLTAMALANTFHRGPFKTSDAFIAFLGMDVRVRDSGKQIGRRKLTKKGDPELRRLLYNAAMAARKTQAWKSLYETYIAQGLKPTQALVKLARKLARIAFALMQNQTTYQPKTA

SEQ ID NO: 11409 - protein, 406 aa, unidentified
  source 1..406: note = protein_aa31065
  REGION 4..162: note = RuvC_domain
  SITE 7: note = RuvC_P1
  SITE 57: note = RuvC_P2
  SITE 99: note = RuvC_P3
  SITE 101: note = RuvC_P4
  SITE 104: note = RuvC_P5
  REGION 277..364: note = Tnp_domain
  SITE 285: note = Tnp_P1
  SITE 315: note = Tnp_P2
  SITE 323: note = Tnp_P3
  SITE 324: note = Tnp_P4
  SITE 337: note = Tnp_P5
MNAVGIDVSKGKSTVAVLRPGGEVVISPFDVSHNPKELSKLVTLLKTLNGDTKIVMEYTGNYYLPIALFLRNNGLFVSVVNPILVKDYGSKSFSVRKCKTDKKDSLKLAAFALYRWLELPEFNAQSQARLLLKSYNRQYNQYNKLKVMLKNNLISLLDLTFPNANSLFSTPTRKTDGHEKWVDFVLKYPHCECISKKSFSLFSKSYLSWCRKCSYNFSESKAQSIYDFACNCSPSLPHNESSSLLISNAISQLNCINETIASLAKQMNSLSSTLPEYDVVLSFFGVGSVLGSQLIAEIDDVSRFPNKKALVGFAGLDAPPFQSGSFHSLSRKISKRGSSDLRKTLFQVMSVILQKAPSNNSVFQFMNKKRDEGKHFYVYMTAAANKFLRIYFARVTELLISLQTVS

SEQ ID NO: 11410 - protein, 341 aa, unidentified
  source 1..341: note = protein_13a7449
  REGION 7..149: note = RuvC_domain
  SITE 10: note = RuvC_P1
  SITE 53: note = RuvC_P2
  SITE 88: note = RuvC_P3
  SITE 90: note = RuvC_P4
  SITE 93: note = RuvC_P5
  REGION 209..295: note = Tnp_domain
  SITE 217: note = Tnp_P1
  SITE 247: note = Tnp_P2
  SITE 255: note = Tnp_P3
  SITE 256: note = Tnp_P4
  SITE 268: note = Tnp_P5
MSELVLVGIDLGKHSFHLHGQDKSGREVFRKKISRQQMMRFFGNLPACTIVMEACAGAHFVARELMIMGHQAKLISPQFVRPFVKGNKNDFVDAEAICEAASRPSMRFVSPKTEAQQTLSVLHRLRESLVRDRTKTANQMHGFLLEFGISLPRGLAIMKRLSSVLAEHELPVRLTALLQRLHDHFVYLDGQIKELDKELADQLANDDLGSRLLSLPCVGPITASLLAVEMGGGQQYGCSRDFAASVGLVPRQYSTGGKANLLGISKRGDKNLRRLLVQCARVYMQRLKHQKGALADWVRSLLMRRHSNVVACALANKLARIAWAIATHHTEFETGPNTLSA

SEQ ID NO: 11411 - protein, 340 aa, unidentified
  source 1..340: note = protein_fd9abdd
  REGION 7..149: note = RuvC_domain
  SITE 10: note = RuvC_P1
  SITE 53: note = RuvC_P2
  SITE 88: note = RuvC_P3
  SITE 90: note = RuvC_P4
  SITE 93: note = RuvC_P5
  REGION 209..294: note = Tnp_domain
  SITE 217: note = Tnp_P1
  SITE 247: note = Tnp_P2
  SITE 255: note = Tnp_P3
  SITE 256: note = Tnp_P4
  SITE 268: note = Tnp_P5
MRKYIRIGVDIAKNCFQVHALESEDCSATKRRLSRSGIVKFLAEVEPCAIGMEACGSAHYWARRFRAMGHEVKLTPPIYVKPYVKRGKNDAADAAAICEAMSRPNMRFVAVKSEDQQATLMAHKTRELLIKQRTMSVNALRGHLAEFGVIAAKGISHVEELLERAAAADLPAMVQATLGVLLAQLRSLDAAIDELERAIVADHRRDPVSRLAASVPGVGALAASAILASAPDPRAFKSGRDFAAWLGATPKQNSTGGKEKFGSITKQGNRYIRRLLVLGAISVLRAAPKRKGALCDWLAALRARKPAKVVAVALANKLARIVWAIITTGEAFRTSIYAKA

SEQ ID NO: 11412 - protein, 339 aa, unidentified
  source 1..339: note = protein_0b922a5
  REGION 6..147: note = RuvC_domain
  SITE 9: note = RuvC_P1
  SITE 52: note = RuvC_P2
  SITE 87: note = RuvC_P3
  SITE 89: note = RuvC_P4
  SITE 92: note = RuvC_P5
  REGION 210..298: note = Tnp_domain
  SITE 218: note = Tnp_P1
  SITE 248: note = Tnp_P2
  SITE 256: note = Tnp_P3
  SITE 257: note = Tnp_P4
  SITE 269: note = Tnp_P5
MTYIPVGVDIAKHLIQVHFINEHTGEVVDRQLHRSDFLTFFSNREPCLIGMEACGGSQHWARELTTLGHKVRLMQARFVKAFVMGNKNDVMDARAIWMAVQQPGKEIAVKTEDQQSVLVLHRSRRQLVKFRTAQINALHGTLLEFGETIHKGRAAMDKELPVALERMKIRLPPYLITLLEEQYSRLNELDSQIDGIEKQLISVAKQSETCKRLVEIPGVGPLIATAAIATMGETSAFKSGREFAAYVGLVPKQTGSGGKVRLLGISKRGDTYLRTLFIHGARAASLVAKEPGPWITELKKRRPTSVAIVAMANKLARTVWAIAAHNRKYDKNHVSVRPY

SEQ ID NO: 11413 - protein, 284 aa, unidentified
  source 1..284: note = protein_b0d83f3
  REGION 1..56: note = RuvC_domain
  REGION 160..247: note = Tnp_domain
  SITE 168: note = Tnp_P1
  SITE 198: note = Tnp_P2
  SITE 206: note = Tnp_P3
  SITE 207: note = Tnp_P4
  SITE 220: note = Tnp_P5
MIIAQAVSMMRDRRFATLYDVALMQLKNLGRFRLKLVKQRSRLKIQLTSYMDQVFPEFQYFFKSGLHQKACCAVLKEAPSAEQTASMHLTHLKNLLVSNSHGRFKKETALELRVLAQKSVGNADRALSIQITQSIAQIELLDSQISILESEITDTVNSLDSVIMTIPGIGSINGGMILGEIGDIHRFSKPRKLLAFAGLDPSVYQSGKFSAKHTGMSKRGSSALRYVLINAAHNVVKNNDTFKAYYESERAEGRGHYNALGPCSGKLVRIIYKMLSENVKFDLD

SEQ ID NO: 11414 - protein, 342 aa, unidentified
  source 1..342: note = protein_d7696ad
  REGION 6..148: note = RuvC_domain
  SITE 9: note = RuvC_P1
  SITE 52: note = RuvC_P2
  SITE 87: note = RuvC_P3
  SITE 89: note = RuvC_P4
  SITE 92: note = RuvC_P5
  REGION 211..297: note = Tnp_domain
  SITE 219: note = Tnp_P1
  SITE 249: note = Tnp_P2
  SITE 257: note = Tnp_P3
  SITE 258: note = Tnp_P4
  SITE 270: note = Tnp_P5
MQITTIGLDIAKNVFQVHGIDAAEKVVVRKQLRRRQVLEFFKSLPPCLIGMEACATAHYWARELTKLGHRVRLMPAKDVKAYVKRNKNDAADAEAICEAVRRPTMRFVQIKSTEQQGRLMLHRTRDLLMRQRTQVINAMRAHLAELGIVAAQGREGIKELLKIIASEEDARLPVDAHTSLVILAAELQAMQTLIGSIEKRIMVQHRSSEASQRLESIPGIGVIGATAIAATVPDPKVFRSGRDFAAWIGLVPREDSTGGKQKLGPISKQGDRYLRRILVVGACAVLRYARQQPEKYPWLTQLLARKPFRVVAVALANKMARIAWALLAKGGTYRSPALAAAA

SEQ ID NO: 11415 - protein, 375 aa, unidentified
  source 1..375: note = protein_b72bb39
  REGION 9..158: note = RuvC_domain
  SITE 12: note = RuvC_P1
  SITE 62: note = RuvC_P2
  SITE 98: note = RuvC_P3
  SITE 100: note = RuvC_P4
  SITE 103: note = RuvC_P5
  REGION 223..310: note = Tnp_domain
  SITE 231: note = Tnp_P1
  SITE 261: note = Tnp_P2
  SITE 269: note = Tnp_P3
  SITE 270: note = Tnp_P4
  SITE 282: note = Tnp_P5
MYQYTTKYVGLDVHKETIAVAIAQEGRGEPVYYGEILNSAGAIRKLVKKVASNGEKVSFCYEAGPCGYDVYRQLIDLGQRCDVVAPSLIPKKSGDRVKTDRRDATTLTRLYRAGELTPVWVPDKEQEAIRDLTRAREDMKAIEGHAKQRLGAFLLRHGKKFSGRSKWTQAYFRWLEGITFETPAQQIVLQEYVDTVKHMKGRVEALEEEMRQAMQGWSLAPVVTGLMALRGVELITAMTTVAELGDMSRFDSGRQIMAHLGLVPSEHSSGNRQQRGGITKTGNGHARRVLIEASWCYRLPARKSAQLQRRAEKTSETVQAIAWKAQKRLCKRYWYLVNKGKRPVEACTAVARELSGFIWAIACEVMGKTGPGVTV

SEQ ID NO: 11416 - protein, 408 aa, unidentified
  source 1..408: note = protein_5006549
  REGION 11..165: note = RuvC_domain
  SITE 14: note = RuvC_P1
  SITE 62: note = RuvC_P2
  SITE 102: note = RuvC_P3
  SITE 104: note = RuvC_P4
  SITE 107: note = RuvC_P5
  REGION 272..358: note = Tnp_domain
  SITE 280: note = Tnp_P1
  SITE 310: note = Tnp_P2
  SITE 318: note = Tnp_P3
  SITE 319: note = Tnp_P4
  SITE 331: note = Tnp_P5
MEKQIGFDIWCGLDVGKQAHHACALDAAGNRVFDKPLPQDQSKLEDLFGRLSEHGRVLMIVDQPNTIGALPIAVARSMGITVAYLPGLAMRRIADLHPGNAKTDARDAFIIADAARTMPHTLRRVDVGEEALAELKVLVGFDDDLAAEATRLSNRIRGLLTQIHPALERVVGPRLTTKQGLAVIEHLGGPQGITAATKSRLLRIVTKANPRGAQSFADAITTALAEQTVVVAGTAAAEKVLPKLAASLRQTLEQRAELALQVEKVVDDHPLAEVLTSMPGVGVRTAARILLDIGDASSFPTAGHLAAYAGLAPVTRRSGTSIRGEFPARSGNKHLKRALFLSSFAALRSDPASRAYYDRKRAQGKKHNAALICLSRRRCDVLFAMLRNREPYRAPAPTPEPSPRPLAT

SEQ ID NO: 11417 - protein, 375 aa, unidentified
  source 1..375: note = protein_d14a7b6
  REGION 6..86: note = RuvC_domain
  SITE 9: note = RuvC_P1
  SITE 57: note = RuvC_P2
  REGION 189..274: note = Tnp_domain
  SITE 197: note = Tnp_P1
  SITE 227: note = Tnp_P2
  SITE 235: note = Tnp_P3
  SITE 236: note = Tnp_P4
  SITE 247: note = Tnp_P5
MTKVIIGVDPHKLSATIEVVDGRERLLGSGRFSTDQGGYTAMRTYAKAWPERVWAIEGSNGAGRPLAQRLLEAGEHVVAVRTTTLRVLRPDGELEALRMLCDRREELTRLRVQTVNRLHRLLAELVPGHAKKDLTALQAKAILATVRPRDIAGKTRRRIAAEELADLVAVEAKMKKATAELKVLVKARGSRLMDLPGVGPVVAARTLADVGDIARFADRNRFASWTGTAPLDASSGEQNRHRLSRAGNRRMNHMLHIVAISQIRLDTEGRAYYRRKRAAGKTTLEALRCLKRRISDALYRQLVADADRAALNKQQAPDDTGPGGHCGASQESSAVDLPPHIDTSDQPLPGPATPTLQPPRPTRKTSRPRTPQTTG

SEQ ID NO: 11418 - protein, 312 aa, unidentified
  source 1..312: note = protein_421299f
  REGION 5..163: note = RuvC_domain
  SITE 8: note = RuvC_P1
  SITE 62: note = RuvC_P2
  SITE 102: note = RuvC_P3
  SITE 104: note = RuvC_P4
  SITE 107: note = RuvC_P5
  REGION 273..312: note = Tnp_domain
  SITE 281: note = Tnp_P1
  SITE 311: note = Tnp_P2
MDPVIGLDIAKEESQVQAFLQRKHRYKKSFKFEHHLDGLNVFYKFYKEVEAEADKPPIVIFESTGHYHEPVVQFLEREEIVYIMVNPIVSHGAKKSSMRKVKTDAIDASHLCELYYKEDLEPYHKKSVQVLNLRNLTRQHDAITSSYVQMKLQFQANLDQVFPEYKKVFGDTYSRVSLKTLLLYPTSEKVLNEDHKHLAETIKELCPTRSYNWAIKKAEELKGAASRDPFQQNLYQSNLISLKMYIQILLEYQEHLSKLKEEIDTLAKDMEDYHIIRSIPGIGDKIAATFLSEIGEIDRFIHPKKLVAFAGH

SEQ ID NO: 11419 - protein, 342 aa, unidentified
  source 1..342: note = protein_02c83a1
  REGION 6..146: note = RuvC_domain
  SITE 9: note = RuvC_P1
  SITE 52: note = RuvC_P2
  SITE 87: note = RuvC_P3
  SITE 89: note = RuvC_P4
  SITE 92: note = RuvC_P5
  REGION 211..295: note = Tnp_domain
  SITE 219: note = Tnp_P1
  SITE 249: note = Tnp_P2
  SITE 257: note = Tnp_P3
  SITE 258: note = Tnp_P4
  SITE 270: note = Tnp_P5
MKVEVIGIDLGKNCCSVAGMDAAGGIVFRRRMNRAGLAEIVGRHPGCIVAMEACCGAHHLGRVFAGEGHDVRLMSPEYVRPYVKAQKNDDRDAEAIAEAATRPTMRFIPVKSQEQSDLQSLHRARERLVGDRTALINHLRALLLERRLVVAKGRAKLRKEVTELLASAATELSPRIRRLVADLVDDWERLDARIKSFDAEFVAIARADPGMRRLSTVPGIGPINATALVAAVGEAGAFSKGRDLSAWLGLVPRQATTGGKPRLLGISKRGNRYLRKNLVHGARAVLPRLAERDTPIGHWLRELLARQHKNVVVVALANKLARICWAVLTGDRGFAEEAVAMR

SEQ ID NO: 11420 - protein, 341 aa, unidentified
  source 1..341: note = protein_2382586
  REGION 7..149: note = RuvC_domain
  SITE 10: note = RuvC_P1
  SITE 53: note = RuvC_P2
  SITE 88: note = RuvC_P3
  SITE 90: note = RuvC_P4
  SITE 93: note = RuvC_P5
  REGION 211..296: note = Tnp_domain
  SITE 219: note = Tnp_P1
  SITE 249: note = Tnp_P2
  SITE 257: note = Tnp_P3
  SITE 258: note = Tnp_P4
  SITE 270: note = Tnp_P5
MGQASTIGLDIAKRVFQAHGADAAGRVVFRKRLMRAKVLEFFAGQAPCVVALEACGGAHHWAREIGKLGHTVRLIPPACVKPFVKRQKNDVSDAEAICEAAQRPGMRFVPVKGEAQQANAVVFRARDLLVRQRTQCINALRGHLAEYGHVVPQGPAHVDSLVALVEDPEASVPESARGILQVLIRALEALEEQLKELDGEITRRAKADPVARRLMTIPGIGPNAATAITALVPALEGFRAGRDFAAWLGLTPLQKSTGGKQRLGAISKMGERTIRRLLILGASAVVRWASQRGAAEGSWLARMLSRKPRMLVTVALANKTARIVWALLVKGGTYKAPAVAA

SEQ ID NO: 11421 - protein, 387 aa, unidentified
  source 1..387: note = protein_028a4db
  REGION 12..164: note = RuvC_domain
  SITE 15: note = RuvC_P1
  SITE 61: note = RuvC_P2
  SITE 101: note = RuvC_P3
  SITE 103: note = RuvC_P4
  SITE 106: note = RuvC_P5
  REGION 266..351: note = Tnp_domain
  SITE 274: note = Tnp_P1
  SITE 303: note = Tnp_P2
  SITE 311: note = Tnp_P3
  SITE 312: note = Tnp_P4
  SITE 324: note = Tnp_P5
MPSAISPPKAVLGIDVGKSSHWACLVTREGEVALNRRVRNSEGDLDGLFSQVACDTIVVVDQCRNIGLLAISRARLAGLGVAYLPGLAAHQAARLFAGDAKTDERDALVIAKTALGIPDALLPVPEPDEALEAARSLAAQRSHMVTCATRDKNRLRSILLESCPAFEALADLGDRRWLNMLEKLGGPWGCIDAGKPAFGAVTKGANRARMDAAWNAAMASTRPSKRRVDAENPQVRMLARRIREALEEADGIDREITALLAGDGTYECLVTIPGIGPRTAAELVIGINIEDFPDHDHLASYCGIAPRNRQSGTSISSVSASRQGNRRLKNLLIFSCNSLVRSENRFGEYYRACRGRGMCHGEALKAVARKRLKVIYAIMRDKVPYSA

SEQ ID NO: 11422 - protein, 400 aa, unidentified
  source 1..400: note = protein_8fdb04d
  REGION 10..164: note = RuvC_domain
  SITE 13: note = RuvC_P1
  SITE 62: note = RuvC_P2
  SITE 102: note = RuvC_P3
  SITE 104: note = RuvC_P4
  SITE 107: note = RuvC_P5
  REGION 270..356: note = Tnp_domain
  SITE 278: note = Tnp_P1
  SITE 308: note = Tnp_P2
  SITE 316: note = Tnp_P3
  SITE 317: note = Tnp_P4
  SITE 329: note = Tnp_P5
MSKRRACVWAGIDAGKGHHWTAAVDETGATLWSKKVDNDESAILSALGEILDLADEVRWAVDISGTASALLLALLAAHGQQAVYVPGRTVNRMAGAYRGEAKTDARDAYIIAETARHRRDFATIDVPAQLAAELALLTAHRSDLVADRVRMINRLRDVLTGVFPALERSFDYSAHKGALVLLTGYQTPAAIRRRGRARLTAWLANRGVRSADAVAVTALEAARTQQTALPGEEVAAQIVADLAEQILALDERLKRIEKRIRETFRSHPQAEIIESLPGMGPMLGAEFVVAAGDLTAYADAGHLASAAGLVPVPRDSGRRTGNLHRPKRYSRRLRRVFYLSAQTSIIREGPNRDFYLKKRGEGCKHVQAIIALARRRASVLWALLRDGRMFTTAPPVTQAA

SEQ ID NO: 11423 - protein, 420 aa, unidentified
  source 1..420: note = protein_002e543
  REGION 4..170: note = RuvC_domain
  SITE 7: note = RuvC_P1
  SITE 67: note = RuvC_P2
  SITE 107: note = RuvC_P3
  SITE 109: note = RuvC_P4
  SITE 112: note = RuvC_P5
  REGION 282..368: note = Tnp_domain
  SITE 290: note = Tnp_P1
  SITE 321: note = Tnp_P2
  SITE 329: note = Tnp_P3
  SITE 330: note = Tnp_P4
MLFVGDDWAEDHHDIEVVDETGRRLARARVPEGITGITRLHELIAEHLGEEAVDPDTGQVAGQVVVGIETDRGSWVAALVAAGYQVFAINPMSAARYRERHSTSGAKSDAGDAHVLAEIVRLDRAHHRRVAGDTPGVEGLKLVARTHQSLIWDRTRQLLRLRSALREFFPAALAAFTAAGLDLTDPDALELLGRAPDPDRAGWLSRPAITAALNRGRRRDVDAKAEKIQTVLRAPELRQPEPVQRAYAAIVVAQARLIAALSAQIAELQAVVAEGFGQHPAAETYLSQPGLGPVLAARVLAEFGDDPTRYADARARKNYAGTSPITRASGKRTLVLARYARNRRLGDADHQWAFCALTSSPGARAYYDRLRARGTGHHAALRQLGNRLVGILHGCLKTNTPYTETTAWPTAEHPPLTAAA

SEQ ID NO: 11424 - protein, 341 aa, unidentified
  source 1..341: note = protein_60c137e
  REGION 6..147: note = RuvC_domain
  SITE 9: note = RuvC_P1
  SITE 52: note = RuvC_P2
  SITE 87: note = RuvC_P3
  SITE 89: note = RuvC_P4
  SITE 92: note = RuvC_P5
  REGION 211..298: note = Tnp_domain
  SITE 219: note = Tnp_P1
  SITE 249: note = Tnp_P2
  SITE 257: note = Tnp_P3
  SITE 258: note = Tnp_P4
  SITE 270: note = Tnp_P5
MKQSVIGMDIAKKVFQLHTVDQRSGKIERFKLRREEVLAFFAERQPYLVAMEACGSAHWWARQLQQLGHEVRLLAPRSVRPFVLRNKTDAADAQAIWTAVQQPDAHQVAIKQADQQAILSLHRIRAQLLKFRIMQSNALRGLFYEFGIVLPEGYTPLTKAVPNAFVDAENQVPHVLLESLREQWARVIRLDEEIQAIELRLKHCMRERLDCQKIAEIPGVGLLTATAAVASLGDAKTFRSGRQFAAWVGLVPRQTGTGGRVRQLGLSKRGDTYLRTLFMHGARSIIARGQKSEWVERLLARRPYNVVVAAVANKLARTVWAVLVKGSRYRAELFTACPVGH

SEQ ID NO: 11425 - protein, 330 aa, unidentified
  source 1..330: note = protein_6df9252
  REGION 4..156: note = RuvC_domain
  SITE 7: note = RuvC_P1
  SITE 61: note = RuvC_P2
  SITE 101: note = RuvC_P3
  SITE 103: note = RuvC_P4
  SITE 106: note = RuvC_P5
  REGION 200..286: note = Tnp_domain
  SITE 208: note = Tnp_P1
  SITE 237: note = Tnp_P2
  SITE 245: note = Tnp_P3
  SITE 246: note = Tnp_P4
  SITE 259: note = Tnp_P5
MAHIGVDVSKNKLDCMWVRDLEAGKVKPKVFPNRQDQYRELLHWLERNTGETPEGLHVYLEATGIYHEPLAYWLHDQGVQVHVLNPAQVRSHAKGMGVRNKTDRKDSMMLARYGIERAPRRWQPEPPEVRELKRLLSRLEALEQDMRREENRLEKARFSEDTLAQASIDNVLQALREEHRRLQQQIDDHFDAHHHLKRDRTLLESIPGIGRVLSASMTAALRSRAFTSARQAAAFHGLAPVLEESGATVRRPSRLAKIGSSRLRKALYMAAVVATRYNPDVRHQHQRLLTRGKAKMSAIGAAMRKLLHIAFGVLKSQTPYQARHETPCTP

SEQ ID NO: 11426 - protein, 391 aa, unidentified
  source 1..391: note = protein_022f473
  REGION 4..161: note = RuvC_domain
  SITE 7: note = RuvC_P1
  SITE 60: note = RuvC_P2
  SITE 100: note = RuvC_P3
  SITE 102: note = RuvC_P4
  SITE 105: note = RuvC_P5
  REGION 266..353: note = Tnp_domain
  SITE 274: note = Tnp_P1
  SITE 304: note = Tnp_P2
  SITE 312: note = Tnp_P3
  SITE 313: note = Tnp_P4
  SITE 326: note = Tnp_P5
MFYVGIDVAKQNHEASIINSNGKLLDKSISFSNSKAGCNKLITVLERFEANTSNVIIGMEATGHYWVSLYSYLIDLGFDVYVINPIQSDAFRKMYIRQTKNDSKDSFVVAQIMRFGQFTSTSLADEDIMALRQLSRYRLALVDECSDWKRRCIALLDQVFPEYSKLFSDTFGVTSRKLLSKYPTPEDMLSVDTDTLSRLLSEASRGRFSVSKASEIQECATNTFGVSLAKDAFQFQIKQIITQINFIEEQLEELEIKISTLLHQTNSVITTITGIGDVLGAIIIGEIGDISRFNSAPQLVAYAGLDPSVNQSGDFAGTKTKISKRGSPYLRRAIWLAANTAAFRDPSLSVYYQSLKARGKHHLTAIGAVARKMCNIIFAVLRDNEPYVPHV

SEQ ID NO: 11427 - protein, 355 aa, unidentified
  source 1..355: note = protein_86c0eeb
  REGION 38..182: note = RuvC_domain
  SITE 86: note = RuvC_P2
  SITE 126: note = RuvC_P3
  SITE 128: note = RuvC_P4
  SITE 131: note = RuvC_P5
  REGION 225..312: note = Tnp_domain
  SITE 233: note = Tnp_P1
  SITE 263: note = Tnp_P2
  SITE 271: note = Tnp_P3
  SITE 272: note = Tnp_P4
  SITE 285: note = Tnp_P5
MLCISKPDSSLGHIEPVFATMVYKMYFSLKFFQLWFISVSTSAKAVLLQLIRQRAATVPILSRTRSAGVRKFIVTLSAFEHHCVMEATGNYGFLLLYLLHQGGIAVSLVNPKQIKHFARMMMAVTKTDEKDACMIAMYGEKMNPPIYKMPSQAIILLKQKKTVIRQLRKQLVASKNLRGSLVVLPYRDKACVRALDKTIDFLTRQIEQLEAELADIASSEFDKQLKALTSIKGIGITLATALILTTGGFTYFDNAKQLSRFIGICPTYQQSGTSVNIKGHINRNGDEHLRSLLYVASWTALRYNAACRECYLRLKANGKPSKVALIAVANKLVRQAFAIATTDSTYVDGFVSTKK

SEQ ID NO: 11428 - protein, 387 aa, unidentified
  source 1..387: note = protein_ebb59b8
  REGION 45..185: note = RuvC_domain
  SITE 79: note = RuvC_P2
  SITE 118: note = RuvC_P3
  SITE 120: note = RuvC_P4
  SITE 123: note = RuvC_P5
  REGION 255..342: note = Tnp_domain
  SITE 263: note = Tnp_P1
  SITE 292: note = Tnp_P2
  SITE 300: note = Tnp_P3
  SITE 301: note = Tnp_P4
  SITE 313: note = Tnp_P5
MPQPNDLSRSRASFEQDATIVAVIEMSQSSWLIAGTVPGIERQPLKKIVPDAVALLRLLQRWRDEATRGGRCVARIAVAFEAGRDGFWLARWLMRHEIETHVIHPTSVAVSREHRRAKTDRLDTAMLMRVFLGWLRGERGHCGMVAVPSLEEEDARRPSRERENLVGERTRIVNRMKAALARLGIRGFKPELRKAAQQLESLHTPEESPIPPNTLDELRRDLARLAILRGQIIAIEQTRLERLEQAPHTGANAMIRLLASVIGVGIETADMLVREALSRGLRDRRAVARYAGLTGSPDESGTRRHEKGLAKSGNARVRRGMIQLAWRFLMLQRDSVLAQWFRARTEGVKGARKTTMIVALARKLLIALWRMVTTGEVPQGVVLRQPT

SEQ ID NO: 11429 - protein, 392 aa, unidentified
  source 1..392: note = protein_659771f
  REGION 10..163: note = RuvC_domain
  SITE 13: note = RuvC_P1
  SITE 61: note = RuvC_P2
  SITE 102: note = RuvC_P3
  SITE 104: note = RuvC_P4
  SITE 107: note = RuvC_P5
  REGION 225..310: note = Tnp_domain
  SITE 233: note = Tnp_P1
  SITE 263: note = Tnp_P2
  SITE 271: note = Tnp_P3
  SITE 272: note = Tnp_P4
  SITE 283: note = Tnp_P5
MSGTSDRVVIGMDPHKRSATIEVMAGDEAVVGGGRFDTGRAGYAAMRKYATRWPNRVWAIEGCQGIGRHIANRLLADGEQVVDLPPKLSARARVFATGQGRKTDATDAHSIALVGTRMAGLRPVVNDEQLALLRILADRRRSLGEDHTRMVSQLHQLLLELIPGGAKKNLSAAQAKALPATVRPRDAVGKARRRVAAELISDLERIYQRSKQADKELKELVASTGTTLMDLHGIGPSGAARLLIEVGDITRFPNRAHFASWNGTAPIDASSGDQIRHRLSRAGNRQINRVLHIMATVQLRNPTEGRAYFDGKKASGKTSMEAMRALKRRLSDIVFRHMIDNAAATAATGPGGHRGTTTDSSMTSSHPHASSSEKSLPGPAATQHRTPLPTAS

SEQ ID NO: 11430 - protein, 398 aa, unidentified
  source 1..398: note = protein_a19e10f
  REGION 10..165: note = RuvC_domain
  SITE 13: note = RuvC_P1
  SITE 63: note = RuvC_P2
  SITE 103: note = RuvC_P3
  SITE 105: note = RuvC_P4
  SITE 108: note = RuvC_P5
  REGION 271..358: note = Tnp_domain
  SITE 279: note = Tnp_P1
  SITE 310: note = Tnp_P2
  SITE 318: note = Tnp_P3
  SITE 319: note = Tnp_P4
  SITE 331: note = Tnp_P5
MEAAKPTTWVGVDVGKGFHWAVAVGTEGETLLSRRVDNDEADLSALVEEARALADGEPLWAVDQPGGGAALLLTLLWERGQRVLYIPGLAVDRARDGFRGEAKTDRRDALVIAEQARMRRDLKRLEPTDELLAEMRLLLSRRRDLVADQSRALQRIRDALLALFPGLERALPDMRYRGALELLCRYQTPAAIRRSGRKRIEAYLKGRGARNAAGLALAAVSAAKAQKATMPAEGIAASIVADLAREVLDLKEKIAAFDGEIEVRFCDHPMAGVLTSLPGMGVLLGTEFLVTVGDPHDGFAGPDQLAAFAGLAPAARDSGKKTGNNRRMRGGNRALKRVFYQAAFASLRGCPASRAFYDRKRAEGKRHNQALVALARRRVNVLWAMLRDGTEFDPVLAT

SEQ ID NO: 11431 - protein, 340 aa, unidentified
  source 1..340: note = protein_c957128
  REGION 6..146: note = RuvC_domain
  SITE 9: note = RuvC_P1
  SITE 52: note = RuvC_P2
  SITE 87: note = RuvC_P3
  SITE 89: note = RuvC_P4
  SITE 92: note = RuvC_P5
  REGION 211..304: note = Tnp_domain
  SITE 219: note = Tnp_P1
  SITE 249: note = Tnp_P2
  SITE 257: note = Tnp_P3
  SITE 258: note = Tnp_P4
  SITE 270: note = Tnp_P5
MNIVFMGIDLAKNVFQLCGLNQAGKPVYTRRVERKILLQTLVNIPACLIGIEACTGAFYWQREFEKLGHKVKIISPQYVKPFIRGQKNDGNDAQAIAVALMQPTMQFVPPKSPEQQDIQALHRARQRIVNHRTATICQIRGLLLDRGISIGAAMSRARRAVPLILEDAENGLSIRMRRTVAELYELFIDLEKRINFFDKEIETVFRQSSECQRIAKVKGIGPKTATAVVAAIGNGQEFKNGRHFSAWLGLVPRQHSSGDRQVLMNITKKGDKHLRTLLIHGARAVVRVATNNNCGSLNPWVNQLKERRGFNKTTVAVANKNARIIWSILRHETEYQPALN

SEQ ID NO: 11432 - protein, 324 aa, unidentified
  source 1..324: note = protein_8a5748b
  REGION 5..156: note = RuvC_domain
  SITE 8: note = RuvC_P1
  SITE 58: note = RuvC_P2
  SITE 99: note = RuvC_P3
  SITE 101: note = RuvC_P4
  SITE 104: note = RuvC_P5
  REGION 196..282: note = Tnp_domain
  SITE 204: note = Tnp_P1
  SITE 234: note = Tnp_P2
  SITE 242: note = Tnp_P3
  SITE 243: note = Tnp_P4
  SITE 255: note = Tnp_P5
MSSIVGINIAKHSFDIATVQANGKFRTKAKLPNGSAGFELLQEWLSKHAAPDAWVVMEATGTYHEALAEYLYSLGGYRVCVMNPAQIAYYARSQLQRVKTDQVDAKLIALYGLRHVDELRLWQPEPQAIRRLRALVRRLQDLKEIKQMESNRLEVADDSVQESIRLVIERVDEQIKETLRAIRNHIDNDPDLRNRRDLLEGIDGIGELTAALLMAELGDPVQFKDAGAITAFAGLNPRLQDSGKYKGHVRISRVGSARLRAGLYMPSLVAITYNPAVNALAQRLRERGKTGKQIICAAMRKLLCIVYGVLKSGVPFNPELALAR

SEQ ID NO: 11433 - protein, 401 aa, unidentified
  source 1..401: note = protein_77cf59e
  REGION 10..165: note = RuvC_domain
  SITE 13: note = RuvC_P1
  SITE 62: note = RuvC_P2
  SITE 103: note = RuvC_P3
  SITE 105: note = RuvC_P4
  SITE 108: note = RuvC_P5
  REGION 270..357: note = Tnp_domain
  SITE 278: note = Tnp_P1
  SITE 309: note = Tnp_P2
  SITE 317: note = Tnp_P3
  SITE 318: note = Tnp_P4
  SITE 330: note = Tnp_P5
MEGNVPEIWAGVDIGKTHYHCVVINADGKRLLSRRVANDESELLALIGDVLEISADALWAVDLNHGGAALLIGLLVSHGQPVAYLTGLAVHRASATYKGGEGKTDAKDAFVIADQARVRRDLGLLRPGDEIAVDLRTLTTRRLDAVFDRTRQINRLRAQLLEIFPALERALELTNRGPVVLLTGYQTPAAIRRAGASRIETWLKNRKVRGAAALAKTTVEAAQAQQTALPGEKLAAAMVVRLAKGVMALDEEIAELDALIEVKFCEHPHAEVIRSLPGMGAKLGAEFLAATGGDMDAFGSPDRLAGFAGLAPRPRDSGRVSGNLRRPRRYHRGLLRTMYLSAMVSLQCCPASKAFYDRKRGEGKGHKQALLALARRRLNVLWAMIRDGECFHTSPPVTRAA

SEQ ID NO: 11434 - protein, 262 aa, unidentified
  source 1..262: note = protein_ffeb32d
  REGION 6..147: note = RuvC_domain
  SITE 9: note = RuvC_P1
  SITE 52: note = RuvC_P2
  SITE 87: note = RuvC_P3
  SITE 89: note = RuvC_P4
  SITE 92: note = RuvC_P5
  REGION 211..262: note = Tnp_domain
  SITE 219: note = Tnp_P1
  SITE 249: note = Tnp_P2
  SITE 257: note = Tnp_P3
MEIRTIGIDLGKTVFHLVGINARGEVVVRKKSSRIQLLRFTSNLRACLIGMEACGGSHFLGRALREQGHDVRLMPAQYVKPYVKTNKNDYIDAEACAEAVTRPTMRFVPIKSDDQLDLQSLHRVRERWVVRRTAVINQIRGLLLERGITIRKGRQHIEMALPGILEDPDNKLSGALRVLLTQLRLEMQYLQGQIEESDKLIVRICGELEPCRRLVAIPGIGPVTATATIAAIGNGAAFKKGRGFAAWLGVVPGEHSTEASKS

SEQ ID NO: 11435 - protein, 321 aa, unidentified
  source 1..321: note = protein_2a66e66
  REGION 4..154: note = RuvC_domain
  SITE 7: note = RuvC_P1
  SITE 56: note = RuvC_P2
  SITE 96: note = RuvC_P3
  SITE 98: note = RuvC_P4
  SITE 101: note = RuvC_P5
  REGION 194..280: note = Tnp_domain
  SITE 202: note = Tnp_P1
  SITE 232: note = Tnp_P2
  SITE 240: note = Tnp_P3
  SITE 241: note = Tnp_P4
  SITE 253: note = Tnp_P5
MQVIGNDMAKATFDVALPLSDGKYRTKAKLPNTTKGYTEFLAWRAKHAPDAAVGMEATGIYHEALARALVEAGVTVYVANPARVKAFGQAEGVRTKTDRSDAKLIARFFEAQRPEKLHPYVPPTPSEVKLRALVRRRDDLQEMLQMEQNRLEVADISVQQGINDVIRTLEEQIKQVQKAIQDHIDNDPDLRGRHQLLTSIPGVGDTSSAQLLAFLGDLNKYSDVRQVVAHAGLNPAQRQSGSYEGKARISRVGDANFRKKLYMPALTGKTYNPTLKAFAERLSEKGKPFKVIMCALMRKLIHLVWGVLKSGRPFEPEVVLA

SEQ ID NO: 11436 - protein, 401 aa, unidentified
  source 1..401: note = protein_98d289a
  REGION 14..168: note = RuvC_domain
  SITE 17: note = RuvC_P1
  SITE 65: note = RuvC_P2
  SITE 105: note = RuvC_P3
  SITE 107: note = RuvC_P4
  SITE 110: note = RuvC_P5
  REGION 276..359: note = Tnp_domain
  SITE 283: note = Tnp_P1
  SITE 312: note = Tnp_P2
  SITE 320: note = Tnp_P3
  SITE 321: note = Tnp_P4
  SITE 333: note = Tnp_P5
MQDTQQRDAVDVFVGVDVGKGQHHAVALDRNGKRLYNQALPNDEAKLRALIAELKTHGRLLFVVDQPSTIGALPVAVARAEGILVAYLPGLAMRRIADLHAGEAKTDARDAAIIAEAARSMPHTLRSLRLADEQLAELTMLCGFDDDLAAQVTQTSNRIRGLLTQIHPALERVLGPRLDHPAALDLLERYPSPAALASTSEKTLANRLTKLAPRMGKSLAAEIVQALSEQAVIVPCTQAATIVMPRLAQQLAALRKQRDEVAAELEQLVLAHPLWPVLTSMPGVGVRTAARLLTEVAHKVFASAAHLAAYAGLAPVTRRSGSSIRGEHPSRRGNKVLKRALFLSAFAALRDPVSRAYYARKIQQGKRHNQALIALARRRCDVLFAMLRDGTIYQPKSAPTA

SEQ ID NO: 11437 - protein, 415 aa, unidentified
  source 1..415: note = protein_fd268ce
  REGION 9..159: note = RuvC_domain
  SITE 12: note = RuvC_P1
  SITE 64: note = RuvC_P2
  SITE 99: note = RuvC_P3
  SITE 101: note = RuvC_P4
  SITE 104: note = RuvC_P5
  REGION 256..344: note = Tnp_domain
  SITE 264: note = Tnp_P1
  SITE 295: note = Tnp_P2
  SITE 303: note = Tnp_P3
  SITE 304: note = Tnp_P4
  SITE 315: note = Tnp_P5
MKVVFPTCCGVDVHKTFLVATIITTPADSLQPNYQKKRFSTFNSDLNRCADWLLEHNCLDVCMESTGKYWVPVFNILEKRGIRVVIANPKWVKAVKGNKDDTKDSKWIGDLFRIGLVKSSFIPDLNIRILREFTRYRYKLVSMKSSEKNRFQNAFTVCNVALDSVVSDMFGKSATAITDYLTSDESFDAEHCVSLLQRSLKKKAEQVLESIEGFSIADEQKARIKIIREHHDFIEEMIATVDTRVNEMVAKYEGNINLLCTIPGIDRRSAITIISEIGTDMGQFGSSKRLCCWAGLTPGNNESAGKKKSVRISRAGVYLKPALVQVAHAAVKDNDHPYYKLKYERIAKRRGKKRAIIAIARMILTAVYSMFCTGEVWNPVDLYKVDMPGCLKEQQLAKAIKQATRFLEKQGLSVA

SEQ ID NO: 11438 - protein, 411 aa, unidentified
  source 1..411: note = protein_e600280
  REGION 4..170: note = RuvC_domain
  SITE 7: note = RuvC_P1
  SITE 69: note = RuvC_P2
  SITE 107: note = RuvC_P3
  SITE 109: note = RuvC_P4
  SITE 112: note = RuvC_P5
  REGION 278..364: note = Tnp_domain
  SITE 286: note = Tnp_P1
  SITE 317: note = Tnp_P2
  SITE 325: note = Tnp_P3
  SITE 326: note = Tnp_P4
MIWVGDDWAEDHHDVEILGEDGRRLVRARLPEGLEGVGRLHALIAEHMPASWADLDPAEAAGRVRIGIETDRGTWVQALVAAGYQVYAINPMSVARYRERHSTSGAKSDAGDAHVLAEIVRLDHAHHRQVAGDSSLAEAVKLVARAHQSLVWDRTRQVLRLRSALREFYPAALEAFDDLAAGEALELLDRAPDPERGARLPRVTIVAALRRAGRRDLDGKATAIQQTLRAEQLRQPQPVQNAYAAIVSSQVQLINVLNIEIAELGQVVASHFGRHRDVERYLSLPGLGPVLGARILGEFGDDPHRYVDAKARRNYAGTSPITRASGSRRVVLARYARNRRLADAVHQWAFCAMRGSPGARAYYQALRDRGTGHQAALRQLSNRLVGILHGCLKTGTTYDEATAWAHLRSST

SEQ ID NO: 11439 - protein, 409 aa, unidentified
  source 1..409: note = protein_bb40a03
  REGION 4..163: note = RuvC_domain
  SITE 7: note = RuvC_P1
  SITE 60: note = RuvC_P2
  SITE 100: note = RuvC_P3
  SITE 102: note = RuvC_P4
  SITE 105: note = RuvC_P5
  REGION 271..357: note = Tnp_domain
  SITE 279: note = Tnp_P1
  SITE 310: note = Tnp_P2
  SITE 318: note = Tnp_P3
  SITE 319: note = Tnp_P4
MLLIGDDWAEDHHDVEVQDETGRRLAKTRLPEGVAGLARLHALVGEHLGEHGEAGQVVVGIETDRGPWVAALVAAGYQVYAINPLQVARYRERQSTSGAKSDAGDAHTLADMVRTDRHQLRPVAGDSGQAEAVKVLARAHQNLVWERTRHTLRLRAGLREFFPAALHAFADLTAPDTLALLAAAPDPVSAARLSVDQIATALSAARRRRVSEKAAAIAAALRAKQLTQPEVLTAAYAATVRAQVAVLTTLNAEIATLEGRVEACFGQHPDAEIYLSQPGLGPVTGARVLGEFGDDPDRYADAKARKNYAGTSPITRQSGKKKTVLARYVHNDRLVDALHSQAFSALSSSPGARRYYDALRARGIGHSAALRQLANRLVGILHGCLKTGTLYNETKAWAHHTNKDQEAAA

SEQ ID NO: 11440 - protein, 341 aa, unidentified
  source 1..341: note = protein_3c1e80a
  REGION 7..149: note = RuvC_domain
  SITE 10: note = RuvC_P1
  SITE 53: note = RuvC_P2
  SITE 88: note = RuvC_P3
  SITE 90: note = RuvC_P4
  SITE 93: note = RuvC_P5
  REGION 212..296: note = Tnp_domain
  SITE 220: note = Tnp_P1
  SITE 250: note = Tnp_P2
  SITE 258: note = Tnp_P3
  SITE 259: note = Tnp_P4
  SITE 271: note = Tnp_P5
MEQVSTIGLDIAKHVFQVHGVDAVGAVVVRRKLRREDVAAFFRKLPPCLIGIEACATGHHWARVLLALGHEVRLMPASYVKPYVKRQKNDATDAEAICEAVARPTMRFVPVKSEEQQSVLMLHRVRELLIRQRTMLVNALRGHLAEFGIVTRQGIVGVGMLIALVEDDGQNLIPPLARSALLSLIGQLREVHERVGEMDCQIHAWHRSNELSRRLETIPGIGPITASAIAATVTDASLFKSGRQLAAWIGLVPRQNSSGGKDRLGRISKQGDPYLRRLLVVGAHAVLRFSRKARVPPTQWAAELLAKKPYNVVAVALANKMARIVWALMTTGRRFEAAANL

SEQ ID NO: 11441 - protein, 314 aa, unidentified
  source 1..314: note = protein_5923fc1
  REGION 8..155: note = RuvC_domain
  SITE 11: note = RuvC_P1
  SITE 53: note = RuvC_P2
  SITE 93: note = RuvC_P3
  SITE 95: note = RuvC_P4
  SITE 98: note = RuvC_P5
  REGION 188..272: note = Tnp_domain
  SITE 196: note = Tnp_P1
  SITE 225: note = Tnp_P2
  SITE 233: note = Tnp_P3
  SITE 234: note = Tnp_P4
  SITE 246: note = Tnp_P5
MTSQALVIGIDVAKESLSLCHAQSGEVFELPNDARSLKAWLKTLPPCCAIAIEATGIYHVEVATLAHARGHRIYVINGYRLSNYRKGIGGRNKDDRSDAQLLARYLAHEQAQLEPWQPPCKTYSRLQSLLHRRASVVKSRTALRQSFSQDRLLKKELDPILRRMAKLEQKLEENIQQMLLDAGLGEQSKRCQKVEGIGPLTAAALNLAFLRGCFRNSDAFIAFLGLDVRLKESGRYCGRRKLSKQGDPEIRRLLHNAAMAASRTSRWQKLYQGYLARGLKRTEALTILARKLARIAFALMTTQQPYWPATNTEG

SEQ ID NO: 11442 - protein, 307 aa, unidentified
  source 1..307: note = protein_7474f6d
  REGION 8..149: note = RuvC_domain
  SITE 11: note = RuvC_P1
  SITE 52: note = RuvC_P2
  SITE 92: note = RuvC_P3
  SITE 94: note = RuvC_P4
  SITE 97: note = RuvC_P5
  REGION 188..272: note = Tnp_domain
  SITE 196: note = Tnp_P1
  SITE 225: note = Tnp_P2
  SITE 233: note = Tnp_P3
  SITE 234: note = Tnp_P4
  SITE 245: note = Tnp_P5
MNKAVVYVGVDVSKAYLDVAWAERSRRFANNKSGLSALMKWIRQSPVHLICEASGGYERGLLEAAEQNAIKLSLVQANRVRQYARAAGILAKTDKVDARVLCAFGTAMQPKPLASLSMQQKQLRELEAQRRHLSRMVVSEQNRLAQLKNKQLQRLTRSLLATLKRQMTAIDARIAAVIVQDQTLDEKAQKLTAIVGVGRRTAVLLLAQMPELGTLNRAQAAALAGLAPFNRDSGTLRGKRTIFGGRRALRCGLYMAALVAARHNRILRDFYQHLRTKGKPHKVALTAVMRKLLLALNHTLKPTACFA

SEQ ID NO: 11443 - protein, 349 aa, unidentified
  source 1..349: note = protein_36411b1
  REGION 6..147: note = RuvC_domain
  SITE 9: note = RuvC_P1
  SITE 52: note = RuvC_P2
  SITE 87: note = RuvC_P3
  SITE 89: note = RuvC_P4
  SITE 92: note = RuvC_P5
  REGION 211..298: note = Tnp_domain
  SITE 219: note = Tnp_P1
  SITE 249: note = Tnp_P2
  SITE 257: note = Tnp_P3
  SITE 258: note = Tnp_P4
  SITE 270: note = Tnp_P5
MNRTTYGLDIAKNVMQLHWVDGETGEIGRRKLPRSRLSEFFAQRQPARVAMEACGSAHHWARVLGGLGHQVELLPARQVRAFVRSNKDDAADARAIWLAAQQSDIRRAPVKTIEQQAVMSLHRARSHWVSVRTATINMLRSLLYEFGVVLPGGKKAGLKTMGVKRAEIDDQLSPLMRRLADLQLETLKEVERSIDRLEVEIAEQQRRIDQARTLREVPGIGVLGATALAATLGDASGWRSGREFAASLGLVPAHSGTGGKTRVGHLSKRGDPYLRTLLIHGARSVITHAKAKPAWLEELLRRRPLNVAVVALANKMARTAWALLAHGRAYRSEWKSTPPSGCGAQAQAA

SEQ ID NO: 11444 - protein, 400 aa, unidentified
  source 1..400: note = protein_5899135
  REGION 5..163: note = RuvC_domain
  SITE 8: note = RuvC_P1
  SITE 62: note = RuvC_P2
  SITE 102: note = RuvC_P3
  SITE 104: note = RuvC_P4
  SITE 107: note = RuvC_P5
  REGION 273..362: note = Tnp_domain
  SITE 281: note = Tnp_P1
  SITE 311: note = Tnp_P2
  SITE 319: note = Tnp_P3
  SITE 320: note = Tnp_P4
  SITE 333: note = Tnp_P5
MNPVIGLDVSKGESEVQAFLNKGIPYGKSFKIYHTSEGLISFLHFLNDLENKSLVKPTVIRESTGHYQAPIIQFLEKYNYLYIVINPILSHQSKKTSLRKVKTDAMDAFHLCELFYKEELEPYKKRGINLLNLRHLTRQHEAITGLYVQAKLQFHTMLDQIFPEYRHVFGDLFSKVSLNLLNEFPTSETVLEVSEVTLADKIHSLCKTRSYQWALKKAAKLNEAAKNNPFENIVYQSHLVSLKMFIKMLLQYQEHLSILDEQIDTLARDIEEYEIIQSIPGIGEKIAATIISEIGEIERFNHPKKLVAYAGIDPSVHQSGKFTATINRITKRGSSRLRHVLYMAVLCGIRSSRNKRLKEFYDRKREEGKPSKVAIIACVNKLLHWIYTLMKRKETFLDLS

SEQ ID NO: 11445 - protein, 418 aa, unidentified
  source 1..418: note = protein_ae9871e
  REGION 9..165: note = RuvC_domain
  SITE 12: note = RuvC_P1
  SITE 62: note = RuvC_P2
  SITE 102: note = RuvC_P3
  SITE 104: note = RuvC_P4
  SITE 107: note = RuvC_P5
  REGION 280..366: note = Tnp_domain
  SITE 288: note = Tnp_P1
  SITE 318: note = Tnp_P2
  SITE 326: note = Tnp_P3
  SITE 327: note = Tnp_P4
  SITE 340: note = Tnp_P5
MKSMEITAVGIDVSKSKSTVAIRRPGGVIVARPFDISHSNHDLEKLVSILKTTGGDIRVVMEHTSNYWKPIALTLKEAGFYVSVVNAMLIHDFSDNSIRKLKTDRADSLKIANYALTFWNELPPFNDEDETRLVLREQSRMYERLASTATSLRNGLIALADQTFPSIDQAFGHAIKNADGHEKWVDFFSIYWHRDCVLRLSIEKFTESYRKWCLRRNYKFRTNTAHKLYALAQDAVPTLPKNNGTKALVLQACKSLNAVCEAKQSTQEEMNRLASLLPEYEVVMQMEGTGPITGPALMAEIGDVRRFKNKKALVAFAGIDAPPFQSGNFESKSRHVSKRGSPHLRRAVFLVANIILTLSHKDNSVFCFMDKKRAEGKHYYVYTIAGSAKFLRIYYARVTEYLRTQEIPVAASCLNGNS

SEQ ID NO: 11446 - protein, 344 aa, unidentified
  source 1..344: note = protein_4e68b74
  REGION 7..147: note = RuvC_domain
  SITE 10: note = RuvC_P1
  SITE 53: note = RuvC_P2
  SITE 88: note = RuvC_P3
  SITE 90: note = RuvC_P4
  SITE 93: note = RuvC_P5
  REGION 213..296: note = Tnp_domain
  SITE 221: note = Tnp_P1
  SITE 251: note = Tnp_P2
  SITE 259: note = Tnp_P3
  SITE 260: note = Tnp_P4
  SITE 272: note = Tnp_P5
MKDVRTLGVDLGKNSCSVVGLDATGHVLLRRRMRREGVVALADKLPGCVIAMEACCGAHHLGRLLVARGHEVRLMSPEYVRPYVKAQKNDDRDAEAIAEAATRPTMRFVALKTEAQLDVQVLHRVRDRLVGQRTSLMNQMRSILLERGTVVAQGRRSLLDALALLAEEAEPSGISRRVRALLDDMLDQWRALDGRIKALDDEFAEMARTDPAARRLATIPGIGVMNATALVAAIGDGRTFSRGRDLSAWLGLVPRQATTGGKPKLLGITKRGSKYLRKLIIQGARAALPSLARTSTPLGAWLRGLLARAHGNTVVVALASKLARIAWALLRTETGFMAGGPTAA

SEQ ID NO: 11447 - protein, 343 aa, unidentified
  source 1..343: note = protein_5042eab
  REGION 7..149: note = RuvC_domain
  SITE 10: note = RuvC_P1
  SITE 53: note = RuvC_P2
  SITE 88: note = RuvC_P3
  SITE 90: note = RuvC_P4
  SITE 93: note = RuvC_P5
  REGION 212..304: note = Tnp_domain
  SITE 220: note = Tnp_P1
  SITE 250: note = Tnp_P2
  SITE 258: note = Tnp_P3
  SITE 259: note = Tnp_P4
  SITE 271: note = Tnp_P5
MQTITTIGLDIAKSVFQVHGIDAEGKVILRRQLKRRYVLAFFEKLPPCLVGIEACASSHHWSRELQALGHTVRLMPPAYVKPYVKRQKNDMADAEAICEAVTRANMRFVPTKTPEQQSVLMLHRTRHLFIRQQTSVINAIRAHLAEFGIVAPVGRRGVEELLNVVANPNDKRVPEIARACLLAFGVQLRRLKEQILEFDRMIIAWHRSSETSRRLDDCPGIGPALATALVATVADPKAFRSGRNFSAWIGIVPKQHSSGGKDRLGRISKQGDRYLRSLFVAGALAVIRYAKIHGTKHRPWLAALLARRPTKVAAIALANKIARMAWAMMAKGERYKEPIALAA

SEQ ID NO: 11448 - protein, 340 aa, unidentified
  source 1..340: note = protein_34bd28d
  REGION 7..148: note = RuvC_domain
  SITE 10: note = RuvC_P1
  SITE 53: note = RuvC_P2
  SITE 88: note = RuvC_P3
  SITE 90: note = RuvC_P4
  SITE 93: note = RuvC_P5
  REGION 211..298: note = Tnp_domain
  SITE 219: note = Tnp_P1
  SITE 249: note = Tnp_P2
  SITE 257: note = Tnp_P3
  SITE 258: note = Tnp_P4
  SITE 270: note = Tnp_P5
MINGTAVGVDIAKSVFQVHYVDQETGEIVNKPVKRAKFLEFFANRAPCVIGMEACGGAHHWARQLTKMGHQVKLMAAEFVKAFNIRNKNDAADARAIWMAAQQPGKPVAVKTEMQQAMLALHRMRQQLIKFRTMQSNGLRGLLTEYGEVMSKSRDKLDKEIPTVFERIAARLPASLIDTFREQWSGLAKLDEQIAEIDRRMREWKKEDKAVKAISEIPGVGLLTATAAVATMGDAKAFRSGREFAAWAGLVPKQTGSDGKVNLHGISKRGDTYLRTLLIHGALAVLTHAKEPDRWVERMQKRRPKNVVIVALANKMARTIWAVLAHDRPYQKGYVSAKPV

SEQ ID NO: 11449 - protein, 439 aa, unidentified
  source 1..439: note = protein_55a4fa2
  REGION 37..200: note = RuvC_domain
  SITE 40: note = RuvC_P1
  SITE 94: note = RuvC_P2
  SITE 140: note = RuvC_P3
  SITE 142: note = RuvC_P4
  SITE 145: note = RuvC_P5
  REGION 312..398: note = Tnp_domain
  SITE 319: note = Tnp_P1
  SITE 349: note = Tnp_P2
  SITE 357: note = Tnp_P3
  SITE 358: note = Tnp_P4
  SITE 371: note = Tnp_P5
MILIREVADAPVIMGISKPAGLKSPCGEVKIVNPLFVGIDVSSRSNVAYLMKPDGSKHSSFSVQNNLGGAKMLSERIVSALSSMRLSDVVIGLEATSIYGNNLVYALREDGSLSRFQRKIHVLNPKQVKKFKEAYPDLPKNDFVDAFVIADHLRFGRIAKEVYMDDYRYQALRTLTRARFDVIQNLTREKQRFANYLFLKCSGIAQEKDIQNTSATTIALMEHFETVDDLANTDLDELTDFIAQAGRGRFVDPDATARAVRAAAKGSYRLPKTVNDTVNQAMSVSIASMRALKEQVKVLDKAIEQQLEIIPNTLTSIPGIGKVYSAGIIAEIGDIHRFDSQASVAKFAGLVWTQYQSGEFEAEHSRMIKSGNRYLRYYLLEAANSVRRCDSEFRRYYDLKFKEVNKYQHKRALALTARKLVRLVFRLLKDNRLYIPSEG

SEQ ID NO: 11450 - protein, 334 aa, unidentified
  source 1..334: note = protein_48ecc43
  REGION 12..164: note = RuvC_domain
  SITE 15: note = RuvC_P1
  SITE 64: note = RuvC_P2
  SITE 102: note = RuvC_P3
  SITE 104: note = RuvC_P4
  SITE 107: note = RuvC_P5
  REGION 205..292: note = Tnp_domain
  SITE 213: note = Tnp_P1
  SITE 243: note = Tnp_P2
  SITE 251: note = Tnp_P3
  SITE 252: note = Tnp_P4
  SITE 265: note = Tnp_P5
MQYKNMEIIDVIGIDVSKLTLDCCIHKSGLQRGFANDPEGIGKMIKWSLSKSKVNKENLLFILEHTGLYSDRLVESLDRENYLLKVVSGLEIKRSLGIIRGKDDKADAKRIALYGYRTREEGVLVKLPGSTLVRLKRLMSLRRKLVGQRAGHMATLKEQKKVLEEDALLFWVQEDIINLLSWRISDLEREMDKLLQSDQELKEMMELLVGIKGIGRVTARFLIVYTAGFTSFGSWRKFASYCGIAPFPHTSGTSIKGRTKISRLANLEGKSLLHQCAIAAIKSSPEMKAYYERRLEMGKSKMSTINIIRNKLVARAFAVIARGTPYVNTMGYFS

SEQ ID NO: 11451 - protein, 360 aa, unidentified
  source 1..360: note = protein_3ff0c40
  REGION 38..190: note = RuvC_domain
  SITE 41: note = RuvC_P1
  SITE 88: note = RuvC_P2
  SITE 126: note = RuvC_P3
  SITE 128: note = RuvC_P4
  SITE 131: note = RuvC_P5
  REGION 231..318: note = Tnp_domain
  SITE 239: note = Tnp_P1
  SITE 269: note = Tnp_P2
  SITE 277: note = Tnp_P3
  SITE 278: note = Tnp_P4
  SITE 291: note = Tnp_P5
MHRTNWNTRLPEPVKGNSLCDIILIAKYKSMKNYEEVVGIDVSKKTIDASCHLSMKHRVFTNDVKGFQSMLNWVTKQTKGVSVFYCFENTGNYSLKLASYLSYKGIAYVEESPIKIKRSSGLVREKTDKIDSEIIARYAWIHREELVSSELKSVVYQELGRLIGLRDQLVRNRAGLLGTLKEIEQLLSSPSTDTSCIVLRRSIENLSKQIKSIESRMDSLLKEDESLSSNYKLLLSIRGIGFVVACQLLYHTENFKRFSSWRKFSSYCGLAPYEYSSGTSIHRRKKCHYLGDRKMKSLLSMASISAIQHDPELRLYYKRKVKEGKPKMIALNNVRNKLLARVFSVVKRGTPYVALNQYAA

SEQ ID NO: 11452 - protein, 323 aa, unidentified
  source 1..323: note = protein_35d48d0
  REGION 8..150: note = RuvC_domain
  SITE 11: note = RuvC_P1
  SITE 52: note = RuvC_P2
  SITE 92: note = RuvC_P3
  SITE 94: note = RuvC_P4
  SITE 97: note = RuvC_P5
  REGION 191..278: note = Tnp_domain
  SITE 199: note = Tnp_P1
  SITE 229: note = Tnp_P2
  SITE 237: note = Tnp_P3
  SITE 238: note = Tnp_P4
  SITE 251: note = Tnp_P5
MNKDTNYYGIDISTDVFDVMDQKGVHYQFKNSQKGFAELLKILTKKSHCVMEATGYYHYQLAYFLLENHICVSLENPLSVKRFIQMKLSKIKTDKSDAKMICEYAQNVELKLWKGNSKDQLECLQIIRMLSVYSKQSTALKNKIHGEKTLGNTKTCVVKSINRSLKSIKKEVDLLEKKLQEIVKKTNQDLLTRLESIPGLGRKTSLMLIVLTDGFERFETANALCSYSGLTPTIRQSGSSIKGRPRISKMGNPKLRNLLFMCSFTACKYSKACKAIYDRIVAKGKSKKLALIAVCNKLLKQAFAIAKSGLIYDETYRSTLVRN

SEQ ID NO: 11453 - protein, 367 aa, unidentified
  source 1..367: note = protein_12b9d36
  REGION 22..165: note = RuvC_domain
  SITE 25: note = RuvC_P1
  SITE 70: note = RuvC_P2
  SITE 105: note = RuvC_P3
  SITE 107: note = RuvC_P4
  SITE 110: note = RuvC_P5
  REGION 229..318: note = Tnp_domain
  SITE 237: note = Tnp_P1
  SITE 267: note = Tnp_P2
  SITE 275: note = Tnp_P3
  SITE 276: note = Tnp_P4
  SITE 288: note = Tnp_P5
MKKHTTGNQSLSPSDLAACTTVAADLAKRVFQIAGEDALGQVLYEERIKSREGFHAFLCKLEPHVVVLMETGPGAQAWARQLQDQGNLARILPAGRVADHRSGAKNDRNDAHAILRAGRDDRISAVPIKNAAELAMQALHRIRQGCVRRRTAVGNQMRGLLLEHGVAMAQGEAAIIQKVPRVLEDATQPLPDMFRELIDELLAEWCHLGERIRGLTGRLEEAAKQDRTTMRLMTIRGVGPIIATAIVAKQTRPERFADARMFAAYFGLVPDQNSSGERVRLGRMTKRGDSYIRSLAIQGAHAVLRQLRHDSDQPDDRRLLQWLNHLGSKKAAAGLANRNLRIIWSLLQNDQTYRREPSNRQETAMSH

SEQ ID NO: 11454 - protein, 444 aa, unidentified
  source 1..444: note = protein_d3ccea1
  REGION 4..161: note = RuvC_domain
  SITE 7: note = RuvC_P1
  SITE 60: note = RuvC_P2
  SITE 100: note = RuvC_P3
  SITE 102: note = RuvC_P4
  SITE 105: note = RuvC_P5
  REGION 311..398: note = Tnp_domain
  SITE 319: note = Tnp_P1
  SITE 349: note = Tnp_P2
  SITE 357: note = Tnp_P3
  SITE 358: note = Tnp_P4
  SITE 371: note = Tnp_P5
MFYCGIDIAKYKHEASVIDINGKTLLDSIPFANDKQGCGKILAVFEKFEIAPDDVIIGMEATGHYWLSVYAFFLELGYTVKVINPIQSEAFRKMYIRQTKNDSKDSYIIAQIMRFGEYSATSLSEENIIALRQLSRYRLALVDACGDCKRRVIALLDQLFPEYDKLFSDTFGSSSTELLLNCPTPEDMLAISTRKLTNILNKASHGKFGKEKAEELKAAAKNTFGIAFAKDAFSFQIKQLMQQVVFLENQLSELKEKAEELKAAAKNTFGIAFAKDAFSFQIKQLMQQVVFLENQLSELEEQISNLLHETNQYITTITGIGDVLGAIIVSEIGDINRFERPNQLVAFAGLDVTVKQSGEFSGTKNKISKRGSPYLRRAIWLAAQRAAFCDPVLSEYYQSLRARGKHHLTAVGGVARKLCNIIFVILKENRPYLPTPTKNPKNLS

SEQ ID NO: 11455 - protein, 391 aa, unidentified
  source 1..391: note = protein_4d64827
  REGION 4..161: note = RuvC_domain
  SITE 7: note = RuvC_P1
  SITE 60: note = RuvC_P2
  SITE 100: note = RuvC_P3
  SITE 102: note = RuvC_P4
  SITE 105: note = RuvC_P5
  REGION 266..353: note = Tnp_domain
  SITE 274: note = Tnp_P1
  SITE 304: note = Tnp_P2
  SITE 312: note = Tnp_P3
  SITE 313: note = Tnp_P4
  SITE 326: note = Tnp_P5
MFYVGIDIAKNNHEASIIDSNGKLVTGSFSFSNSVRGLEKFKRIISSFSLSSNNCIIGMEATGHYWVSLYSFLIDLGFTCIAINPIQSDAFRKMYIRKTKNDSVDSFIIAQILRFGEFSVSHFSDEDTFALRNLSRYRFALVDEVSDWKRKLVAILDQVFPEYSSLFSNIYGVTSKELLSKYPLPEDILSISANELAELLSKCSKGRFGIDKAKEIQDKASNSFGIKFALKSFSFQIKQIINQISFLEDQILDIEEEISSMLNYLCPVITTITGIGDILGASIFSEIGDISRFEKASQLVAYAGLDVAVKQSGNFNATDTKISKRGSPYLRRAIWIAANVAAFKDPALSLYYQKLRQRGKAHGTAIGAVARKLTNIIFAVLRDNKAYIPNI

SEQ ID NO: 11456 - protein, 387 aa, unidentified
  source 1..387: note = protein_532e82c
  REGION 4..163: note = RuvC_domain
  SITE 7: note = RuvC_P1
  SITE 60: note = RuvC_P2
  SITE 101: note = RuvC_P3
  SITE 103: note = RuvC_P4
  SITE 106: note = RuvC_P5
  REGION 266..353: note = Tnp_domain
  SITE 274: note = Tnp_P1
  SITE 304: note = Tnp_P2
  SITE 312: note = Tnp_P3
  SITE 313: note = Tnp_P4
  SITE 326: note = Tnp_P5
MIYVGIDVAKNKHDCFITDSDGAVLFNPFTILNNREGFETLFQTIESLSEDLSKVKVGLEATGHYSYNLLGFLISKGLPTYVINPLHTNLYRKSLSLRKTKTDKVDSRTIATMMMSDMNLKSYSDTSYHNEELKSLTRYRFDKVKERAKLKSSVSRLVCILFPELEMLVPTLHMASVYALLSEFSGSSAVAAAHLTRLTNLLLEASKGRYGKDMAILFRETARASVGSNMPAKSLEPKHTIKLIEELTTEIDEIESEIKSIMDEISSPILTIPGISYRMGAMIIAEIGDFSRFDSADKILAYAGMSPSTYQSGQLDNCYSHMEKQGSRYLRYALYNATKYVCYWDSSFGKYLEKKRSEGKHYNVALSHATKKTCETDLRNGKIGTAI

SEQ ID NO: 11457 - protein, 314 aa, unidentified
  source 1..314: note = protein_963d267
  REGION 7..151: note = RuvC_domain
  SITE 10: note = RuvC_P1
  SITE 53: note = RuvC_P2
  SITE 93: note = RuvC_P3
  SITE 95: note = RuvC_P4
  SITE 98: note = RuvC_P5
  REGION 189..273: note = Tnp_domain
  SITE 197: note = Tnp_P1
  SITE 226: note = Tnp_P2
  SITE 234: note = Tnp_P3
  SITE 235: note = Tnp_P4
  SITE 246: note = Tnp_P5
MSQPIFVGIDVAKDTVEVACSDASSQSFTNNEAGHAKVLRWLARKSVALLVLEATGGYEQACAVALAAAGLPVSVLNPRQARDFARAMGRLAKTDRIDAGVLAEFAAVLHARGHQPRPLASVEQRELGALVARRRQLVVMLVSERQRLGVAHARAKPSIEAVIELLLKQLADIDDDLKRTLKDRHADLSALLQSVKGVGPTTTSTLIAELPELGALTRKQITSLVGLAPLNRDSGTFRGQRHIFGGRASVRRVLYVAALVASRFNPAVKACYERLLAAGKPKKVALVACMRKLLITLNAIARTKTPWRSDFGST

SEQ ID NO: 11458 - protein, 320 aa, unidentified
  source 1..320: note = protein_f55baba
  REGION 8..163: note = RuvC_domain
  SITE 11: note = RuvC_P1
  SITE 56: note = RuvC_P2
  SITE 96: note = RuvC_P3
  SITE 98: note = RuvC_P4
  SITE 101: note = RuvC_P5
  REGION 195..279: note = Tnp_domain
  SITE 203: note = Tnp_P1
  SITE 232: note = Tnp_P2
  SITE 240: note = Tnp_P3
  SITE 241: note = Tnp_P4
  SITE 252: note = Tnp_P5
MSATSVVVGIDVAKAHVDVAVLGAKFDAQRFDNNAEGHSALATALQPLGVALVAMEATGGYEAALACALQAAGLAVAVVNPRQARDFAKSMGRLAKTDTIDARMLAEFAAVLVRREDLASFIRPLADAQQQALAAMVTRRRQLLTMLLSERQRLQLAIPVVRPSIEAMIEAIRKQLDEVEVQMVTHVHEHYAALDKLLRSASGIGPVASATLIAELPELGRLNRRQIAALVGVAPIANDSGTSRGRRRIQGGRFEIRRVLYMAALTASRRNPAIKPFYERLIAIGKQPKVALVACMRKLLTTLNAMVRTNTPWDYSLHLA

SEQ ID NO: 11459 - protein, 407 aa, unidentified
  source 1..407: note = protein_e85c0c4
  REGION 4..160: note = RuvC_domain
  SITE 7: note = RuvC_P1
  SITE 57: note = RuvC_P2
  SITE 97: note = RuvC_P3
  SITE 99: note = RuvC_P4
  SITE 102: note = RuvC_P5
  REGION 274..361: note = Tnp_domain
  SITE 282: note = Tnp_P1
  SITE 312: note = Tnp_P2
  SITE 320: note = Tnp_P3
  SITE 321: note = Tnp_P4
  SITE 334: note = Tnp_P5
MNAVGSDVSKGKSMVAALRPMGEVAFLPREFLHTDVGLEQMAYAILALGEDTRVIMEATGRYHEPVAAALYEYGIYVCVLNPLFIKQSGGGSIRKVKTDKADAIKIAKYGLDNWVDLREYTPMDTVRQQLKLCSRQYDLYMKTVISLQNNLISLTDKTFPGVNELFSSPERADGHQKWVDFVMTFWHCDCICRISEKAFTERYQKWCKRKGYHFSVEKALEVYAGSCGHFTTLPKNDNTKLLIISAAQQLLAGKMTLAALRAEMTRLARQLPEYDTVRAMYGVGDKTAPALMAEIGDVRRFPRRSSIVGFAGIDPGVDESGKHSAKSVPTTKRGSAHLRKTLYQIVCTYLKKSPADEPVYQFLDKKRSEGKPYFVYMTAAQNKFLRIYYARVKECLEAFDAQTTERK

SEQ ID NO: 11460 - protein, 343 aa, unidentified
  source 1..343: note = protein_9b7ba16
  REGION 6..147: note = RuvC_domain
  SITE 9: note = RuvC_P1
  SITE 52: note = RuvC_P2
  SITE 87: note = RuvC_P3
  SITE 89: note = RuvC_P4
  SITE 92: note = RuvC_P5
  REGION 211..299: note = Tnp_domain
  SITE 219: note = Tnp_P1
  SITE 249: note = Tnp_P2
  SITE 257: note = Tnp_P3
  SITE 258: note = Tnp_P4
  SITE 270: note = Tnp_P5
MEIIRIGLDLAKSVFEVCGVDMRDHVVLRKTLRREAVPQFFAELPPCLIGMEACSSSHYWAKVLTDLGHQVRLIAPQFVTPYVKSNKNDRNDAEAICEAISRPSMRFVPPKSSEQLEIQAVHRIRQRLVSSRTRLVNQIRGLLAEHGVVIGRDISRLRRALSQIVEGADRNLGDLIQELASDIHQELAALDERISSYDRRIRNLFRTNEMCQRIGKIEGIGPITATALVAAVGDQSCFENGRQFAAWLGLVPKQKSSGGKSRLFGISKRGDRYLRTLLIHGARAVLGKAGGKQDARSVWINRMRERRHPNVVAVALANKNARIVWSILSKNEDYRGPETPQAA

SEQ ID NO: 11461 - protein, 291 aa, unidentified
  source 1..291: note = protein_7e3f88c
  REGION 1..126: note = RuvC_domain
  SITE 25: note = RuvC_P2
  SITE 65: note = RuvC_P3
  SITE 67: note = RuvC_P4
  SITE 70: note = RuvC_P5
  REGION 164..248: note = Tnp_domain
  SITE 172: note = Tnp_P1
  SITE 201: note = Tnp_P2
  SITE 209: note = Tnp_P3
  SITE 210: note = Tnp_P4
  SITE 221: note = Tnp_P5
MTLTDGFDAITDELRKYPVVLVLIEATGGLEAAVACLFQAEGFDVAVVNPRQARDFARTMGYLAKTDRINARVLAQMAEVTNRHPGRERFIRAMLDAERQVLAAMVVRRRQLTAMLIAERNRLYPVHPQSRKSINIIIKALEDELARIDEDMNNHIRNHFKELAARLSSIKGVGTMTVAALLAEVSDLGSLSRRAISALVGVAPINRDSGTMRGRRTIFGGRGGVRTALYIAALVATRFNPVIKAFYTRLLAAGKAKKVALVACMRKLLTILNTMLRKNEEWDESYHHVSL

SEQ ID NO: 11462 - protein, 416 aa, unidentified
  source 1..416: note = protein_cb1c22c
  REGION 18..170: note = RuvC_domain
  SITE 21: note = RuvC_P1
  SITE 69: note = RuvC_P2
  SITE 107: note = RuvC_P3
  SITE 109: note = RuvC_P4
  SITE 112: note = RuvC_P5
  REGION 277..363: note = Tnp_domain
  SITE 285: note = Tnp_P1
  SITE 316: note = Tnp_P2
  SITE 324: note = Tnp_P3
  SITE 325: note = Tnp_P4
  SITE 336: note = Tnp_P5
MKYAPPVLAPKPANNMTCGIDWAGRDHAISIVDARGSEIHRSAVEHNAVGLRVLLGLLARMGVSEVAIERPDGPLVEALLDAEVTVVVISPNQLKNLRSRYGSAGNKDDRFDAFVLADTLRTDRTRLRPLVPDTAATTALRTACRARKDLIKHRVALANQLREHLNRVFPGAVGLFSDLDSPISLAFLARFDCQDRADWLTPKRLSAWLASVGYTGGTDPAVLHAHLASAPHGITGEHSRAHAGVTAALVTSLKTLVAQIKVLYRQIGDQLDAHVDAHIFTSLPRSGTVRAAKLVAEIGDCRARFPTPESLACLAGVAPSTRQSGTMRSVGFRWACDKHLRDAVTDFAADSRAANPWAENLYRQARSRGHDHQHAVRILARAWLYVIWHCWQDHTAYNPDRHGALQAFLRSQPPTA

SEQ ID NO: 11463 - protein, 330 aa, unidentified
  source 1..330: note = protein_0997e61
  REGION 8..150: note = RuvC_domain
  SITE 11: note = RuvC_P1
  SITE 59: note = RuvC_P2
  SITE 97: note = RuvC_P3
  SITE 99: note = RuvC_P4
  SITE 102: note = RuvC_P5
  REGION 202..289: note = Tnp_domain
  SITE 210: note = Tnp_P1
  SITE 240: note = Tnp_P2
  SITE 248: note = Tnp_P3
  SITE 249: note = Tnp_P4
  SITE 262: note = Tnp_P5
MKTWNVVLGVDVSKKTVDICWSERKLFVHIDNNSEGFGKFKKWCKTNLIDLRETFIVLEYTGGYEYRFIQFCESQSIAYRRVPGLEIKQSMGMIRGKSDRADAFRIGQYGEDKIKRLEPSKLLDNKILELKTLLSFRKRLVRESAGYQSSVGERKHMYEVSNQDMIVRISNEKRDANSEYIKELESRIMELIKSNEQMYLNYRIITSIKGIGAVNGWMTIAYTENFTSFPDARHYAVYVGVIPFEHTSGTSKKGRRRTSNLAQKELKQELNQAAKTAMQHDPEIRAYAERKMQNKEYGLVLNNIKFKLILRMFSLVKRGEMYVENYRRSA

SEQ ID NO: 11464 - protein, 400 aa, unidentified
  source 1..400: note = protein_d629fb7
  REGION 5..164: note = RuvC_domain
  SITE 8: note = RuvC_P1
  SITE 61: note = RuvC_P2
  SITE 102: note = RuvC_P3
  SITE 104: note = RuvC_P4
  SITE 107: note = RuvC_P5
  REGION 272..357: note = Tnp_domain
  SITE 280: note = Tnp_P1
  SITE 310: note = Tnp_P2
  SITE 318: note = Tnp_P3
  SITE 319: note = Tnp_P4
  SITE 330: note = Tnp_P5
MAVAVGIDVAKEFHWAVLVVAETGKVLVSRRVDNTPAGIQTLIADIEAAQVQHGPATVGVDVLGGIAGLVQAMLLEAGLRVVHVPGLAVNRARRATVGGERKSDPKDARVIADQVRMREDLRPVTGLNQIDAELRLLVGRRRELVADQTRRLGRLRDLLASIFPGLERVVDVTGKAGLWLLTRYVTPGEIRAAGRTRLSRHLVRAGNLKAVTINALVDAALTAAHAQHVTIPGEAVAADIIRDLAREALTTRDRLHQIDQRIEAVLQRHPDAALVRSLPGMGATLTAEFLAEAGGITRFPTADQLASAAGLAPVLKQSGKVRYLQRATAGNKALKRVFYQSAFCAIQRDPTSRAFYARKRAEGKRHHQALIALARRRVNVLHAILRTRQPYQPRPRAAAA

SEQ ID NO: 11465 - protein, 304 aa, unidentified
  source 1..304: note = protein_2a09245
  REGION 7..147: note = RuvC_domain
  SITE 10: note = RuvC_P1
  SITE 53: note = RuvC_P2
  SITE 88: note = RuvC_P3
  SITE 90: note = RuvC_P4
  SITE 93: note = RuvC_P5
  REGION 210..255: note = Tnp_domain
  SITE 218: note = Tnp_P1
  SITE 248: note = Tnp_P2
MEQVSRIGMDTSKHVFQLHGVNASDEVVLRRKLRRKEMVAFFEKLAPTVIAIEACGASHYWARLLRSFGHEVKLIAPQLVKPYVKRGKNDAADAEALCEAMSRPTMRFVPVKTAEQQAALMLMGLREQLVASRTQLSNAIRGYAMEFGLTAAKGKAHLEPLLERIQADESLPILARELFAIQAEGHRRIQAQIDEVDAKLAAWQKSDECSQRLVKIPGVGPIGAALLKMKTPAPELFKSGRQYAAWIGLIPIAISLDLTLPVFAAQFGLHITPRAGVSSYGNWYDAKGPFDRRQGQARRHHPSR

SEQ ID NO: 11466 - protein, 320 aa, unidentified
  source 1..320: note = protein_68dd72b
  REGION 8..150: note = RuvC_domain
  SITE 11: note = RuvC_P1
  SITE 55: note = RuvC_P2
  SITE 95: note = RuvC_P3
  SITE 97: note = RuvC_P4
  SITE 100: note = RuvC_P5
  REGION 190..274: note = Tnp_domain
  SITE 198: note = Tnp_P1
  SITE 227: note = Tnp_P2
  SITE 235: note = Tnp_P3
  SITE 236: note = Tnp_P4
  SITE 247: note = Tnp_P5
MENIGQWVGIDVSKATLDVYIRPMGKAMKVANTEMEISTLVEQLKSYDLKLIVLEATGGLETELIIQLQAGLLPVALINPRQGRNFAKATGRLAKTDAIDAQILAHFGEAMKPQLLAIESESARQLSELISRRRQLVEMQTAEKNRRTRARGKALADIETHIDYLDQRLKQLNQEIEELTENNQQWIDKVNLLKTTPGIGQVISTTLVSDLPELGKLTAKQISRLVGVAPINHDSGQHKGKRMINGGRAHVRATLYMGAVVAMRHNPVIKAFYERLVERGKSKKLALTACVRKMLVILNAMVRDNLPWRICDNCHTIAPV

SEQ ID NO: 11467 - protein, 403 aa, unidentified
  source 1..403: note = protein_98f91c5
  REGION 4..160: note = RuvC_domain
  SITE 7: note = RuvC_P1
  SITE 57: note = RuvC_P2
  SITE 97: note = RuvC_P3
  SITE 99: note = RuvC_P4
  SITE 102: note = RuvC_P5
  REGION 274..361: note = Tnp_domain
  SITE 282: note = Tnp_P1
  SITE 312: note = Tnp_P2
  SITE 320: note = Tnp_P3
  SITE 321: note = Tnp_P4
  SITE 334: note = Tnp_P5
MNAVGIDVSKGKSMVAIMRPFGEIVVSPFEIKHTSSDINSLIELIHSVDGESRIVMEHTGRYYEALAHELSAANLFVSAINPKLIKDFDNDSLRKVKSDKADSVKIARYALDKWQNLKQYSVMDELRIQLKTMNRQFGFYMKHKTAMKNNLIGILDQTYPGLNAYFDSPARSDGSQKWVDFAATYWHVDCVRKMSLYAFTCHYQKWCKRKKYNFSQSKAEEIYGKAKEFVPVLPKDEITKLIIKQAVEQLNNASATVEELRALMNETASKLPEYSIVMNMKGVGPSLGPQLMAEIGDVSRFTHKGAITAFAGVDPGVNESGTYEQRSVPTSKRGSSNLRKTLFQVMDVLIKTMPQDDPVYQFLDKKRAQGKPYYVYMTAGANKFLRIYYGRVKEYLATLPESN

SEQ ID NO: 11468 - protein, 318 aa, unidentified
  source 1..318: note = protein_3eb3463
  REGION 7..155: note = RuvC_domain
  SITE 10: note = RuvC_P1
  SITE 54: note = RuvC_P2
  SITE 94: note = RuvC_P3
  SITE 96: note = RuvC_P4
  SITE 99: note = RuvC_P5
  REGION 193..277: note = Tnp_domain
  SITE 201: note = Tnp_P1
  SITE 230: note = Tnp_P2
  SITE 238: note = Tnp_P3
  SITE 239: note = Tnp_P4
  SITE 250: note = Tnp_P5
MSDSVFVGTDVSSQTLEVASTVAAKTWQVSNDAAGIEQLACQLTALGPELVVLEATGGYEFEAACSLQAAGLAVAVVNPRTARDFARAMGALAKTDALDARMLALFARTLHQRPDRERFVKPLADAELQRLQALVLRRRQLVQMLTAERQRMRLSHAAAKPSIERVIEFLKCELGDSDADVAAHVRRHHAELAGALSSVPGIGAASVAVLLAELPELGTLDRRRAAALVGVAPLNRDSGQMRGQRAIWGGRAEVRRTLYMATLVAVRHCSAFRVFYERLLANGKRKKVALVATMRKLVGVLNAIAKQRSRWIPMLHDA

SEQ ID NO: 11469 - protein, 284 aa, unidentified
  source 1..284: note = protein_0aaa4ec
  REGION 1..54: note = RuvC_domain
  REGION 157..244: note = Tnp_domain
  SITE 165: note = Tnp_P1
  SITE 195: note = Tnp_P2
  SITE 203: note = Tnp_P3
  SITE 204: note = Tnp_P4
  SITE 217: note = Tnp_P5
MISSNHRNKPYRVTKLNRFDLYEQKQLTRHHHNLKEELNTYKNRLQKCIDIVFPEFNSLFHSKYGIVYMNILKIFSSAKAIANADIRSIRKCFEFKGKGKRISLSAEQLKLIAKSSIGIPSVAEEIQIRHLVSQIELLKKQISEIDKRIEEFSLKNNSPILTIPGISHFSGTSIISELGEICNYTKASQIIKFAGVAPYHYESSQFTAQHTAITKKGSKYLRKTLYQIILPVISNNEVFHAYYTKKLNEGKGHRCAQGHCIRKLLRVIYHILSTGQPFNPELLV

SEQ ID NO: 11470 - protein, 425 aa, unidentified
  source 1..425: note = protein_4397a62
  REGION 4..157: note = RuvC_domain
  SITE 7: note = RuvC_P1
  SITE 57: note = RuvC_P2
  SITE 94: note = RuvC_P3
  SITE 96: note = RuvC_P4
  SITE 99: note = RuvC_P5
  REGION 284..371: note = Tnp_domain
  SITE 292: note = Tnp_P1
  SITE 323: note = Tnp_P2
  SITE 331: note = Tnp_P3
  SITE 332: note = Tnp_P4
  SITE 344: note = Tnp_P5
MLGVGIDWSEEFHLVALGKPGEGVIDIGRVEHSPKAVDALVAKIAALEPDPVEVRVVIENRHGMLVERLIDAGYVVVPVNPDLVARRRGPAKKKDDTEDARIACLIALDRFERLRPLIPHGDLAGELRAIARDDARAARDERRLLNRLRQDLITTFPTALAIAGDDLGAPSFLRMLERWPTANFLAEAPRDELVAFARSCKHGWPERFADKVEAALAHDHFVARDYLVRAKADTIRLAATQLLAIGAQRRAWERRMGELLLGAPRRGRAKQPREDELGQGFPGGEIYLSFPGLGDRLAARIAGEIGDHPEQFETPNSLQCYGGKAPVTRRSGKSELVVACRLAHNRYLGDAVQQWAFCSLKRSGWAREFYDGQRAKGKGHHAALRALGNRWLEVLWHCLRKGVLYDESVHVANRNRALGRTAKAA

SEQ ID NO: 11471 - protein, 343 aa, unidentified
  source 1..343: note = protein_a426858
  REGION 6..148: note = RuvC_domain
  SITE 9: note = RuvC_P1
  SITE 52: note = RuvC_P2
  SITE 87: note = RuvC_P3
  SITE 89: note = RuvC_P4
  SITE 92: note = RuvC_P5
  REGION 211..299: note = Tnp_domain
  SITE 219: note = Tnp_P1
  SITE 249: note = Tnp_P2
  SITE 257: note = Tnp_P3
  SITE 258: note = Tnp_P4
  SITE 270: note = Tnp_P5
MQIVRIGLDLAKYIFEVHGVDAHGKVVLRKTLRRNAVSSFFANLPPCLIGMEASNGAHYWARVLSGFGHQVRLISPQFVAPYVKSNKNDRNDAEAICEAAGRPTMRFVPVKSVDQLAVQALHRIRSRLVSGRTRLANQIRGILAEHGIVIARNIAKLRQNLTYMIEGDGNGLSSLVRALVGELKDELAELDQRIAAYDRRIRELYRNNELCQRLGKIEGVGPLSATALMAAVGDRQGFKNGRQFAAWLGLVPKQRSSGGRDRLFGISKRGDRYLRTLLIHGARASLTRAKGKQDPRSRWLEKLRERRHPNIAAVALANKNARIAWALLSSGEAYNPSLSVGST

SEQ ID NO: 11472 - protein, 342 aa, unidentified
  source 1..342: note = protein_7fa25e5
  REGION 6..147: note = RuvC_domain
  SITE 9: note = RuvC_P1
  SITE 52: note = RuvC_P2
  SITE 87: note = RuvC_P3
  SITE 89: note = RuvC_P4
  SITE 92: note = RuvC_P5
  REGION 211..296: note = Tnp_domain
  SITE 219: note = Tnp_P1
  SITE 249: note = Tnp_P2
  SITE 257: note = Tnp_P3
  SITE 258: note = Tnp_P4
  SITE 270: note = Tnp_P5
MTIVMIGIDLGKNSCSLAGLDESGAVVLRRRMQPATIVSFAAKQPHCTIAMEACCGAHYLGRLLSSQGHTVKLMAPEYVRPYVKAQKNDDRDAEAIAEAATRPTMRFVDLKTQEQLDIQSLHRVRSRLVGARTSLINQLRAVLLERGMTAPQGRRKFEQAIEGLLNDPERLPEGRVRQLVVDMREEWLGLDARIGNLDTEFVALARADETARRLTSIPGIGALNATALLAAAGNAEGFDHARDFGAWLGLVPRQHTTGGRPRLLGISKRGNTYLRTLLIHGARAALPTLEKTDSALGQWLRDLLARRHRNAVVVALANKMARIVWALIRHKAVFSLKPAIVA

SEQ ID NO: 11473 - protein, 406 aa, unidentified
  source 1..406: note = protein_d488d05
  REGION 19..178: note = RuvC_domain
  SITE 22: note = RuvC_P1
  SITE 75: note = RuvC_P2
  SITE 116: note = RuvC_P3
  SITE 118: note = RuvC_P4
  SITE 121: note = RuvC_P5
  REGION 281..368: note = Tnp_domain
  SITE 289: note = Tnp_P1
  SITE 319: note = Tnp_P2
  SITE 327: note = Tnp_P3
  SITE 328: note = Tnp_P4
  SITE 341: note = Tnp_P5
MVLKQYQIISNEVLPMILVGIDVAKDKHDCFIMNSDGEILAKAFTFSNTLEGFNFLYEKICSVSSHQDKIKVGLEATGHYSYNILGFLLDKGLPTFVINPLHTNLYRKSLSLRKTKTDKVDSRTIAMMLLSDVDLKPYSETSYHNEQLKSLSRYRFTKVKERAKLKTSVSRLVQILFPELGQLVSTLHMASVYRLLEEYPGASYIASAHLSRLTNIIFESSKGKYNRDTAITFREVARKSIGSVIPAKLLELKHTIKLIRELSSEIDEIDAEIKIMMEEIASPITTIPGIGYNMGAMIISEIGDFSRFSSPDKILAYAGVSPSTYQSGKIDNCYSHMEKRGSRYLRYALFIAAQKVCHWDNTFSEYLSKKRSEGKHYYVAISHAVKKLVRVIFHLERTRQPYLKAA

SEQ ID NO: 11474 - protein, 439 aa, unidentified
  source 1..439: note = protein_710f947
  REGION 37..200: note = RuvC_domain
  SITE 40: note = RuvC_P1
  SITE 94: note = RuvC_P2
  SITE 140: note = RuvC_P3
  SITE 142: note = RuvC_P4
  SITE 145: note = RuvC_P5
  REGION 312..398: note = Tnp_domain
  SITE 319: note = Tnp_P1
  SITE 349: note = Tnp_P2
  SITE 357: note = Tnp_P3
  SITE 358: note = Tnp_P4
  SITE 371: note = Tnp_P5
MILIREVADAPVIMGISKPAGLKSPYREVKIVNPLFVGIDVSSRSNVVYLMNPDGSKYSSFSVQNNLGGAKLLSEKIVSALSSMQLSDVVIGLEATSIYGDSLVYALREDGSLGRFQRKIHILNPKQVKKFKEAYPDLPKNDWVDAFVIADHLRFGRIAKEVYLDDYRYHAPKTLTRARFDVIQNLTREKQRFANYLFLKCSGMAQDKDIPNTSATTIALMEHFESVDELANTDLNELTAFISETGHGRFADPAATAKAVRAAASGSYRLPKTVNDTVNQAMAISIASMRALEKQVKVLDKAIDQQFEIIPNTLTSIPGIGRIYSAGIIAELGDIHRFDSQASVAKFAGLVWHKNQSGDFEAEHSRMIKSGNRYLRYYLLEAANSVRRCDSEFRRYYDLKFKEVNKYQHKRALAFTARKLVRLIFRLLKDNRLYIPPEG

SEQ ID NO: 11475 - protein, 404 aa, unidentified
  source 1..404: note = protein_815c20d
  REGION 4..157: note = RuvC_domain
  SITE 7: note = RuvC_P1
  SITE 56: note = RuvC_P2
  SITE 94: note = RuvC_P3
  SITE 96: note = RuvC_P4
  SITE 99: note = RuvC_P5
  REGION 265..351: note = Tnp_domain
  SITE 273: note = Tnp_P1
  SITE 304: note = Tnp_P2
  SITE 312: note = Tnp_P3
  SITE 313: note = Tnp_P4
MWYVGLDWADTHHDVEVLDEAGKRVGVRRFAHSHAGLHELQAFLLGIAASPEELMCIVETTHGLLISFLLEAGIPVYPVNPKTANQLRKAAGAKTDQIDAHLLAKLGRLDLAELRRLAPDSETVQELKTLTRDQDALIQTQTRLVNQLTACLKDYYPAALNLFAKLQQRSTLVFLQAYPTPQAAQAASVEELTATLRAGKHTNPTKAAPKIFEELHRPQLVASEVIVRAKSRLMLSLVKQLLVVIQEIASYDKAISPLFLTHDDHEIWRSLPGAGKRLAPRLLAEWGEDRSRYADASSVQTLAGTAPVPFESGNYAKAHKRFACVKPLRNALHQFAWQSTRQEAWALAYYQRKRAEGKTHSMAIRALANVWVRIIYRMWVNKTSYQTATFEAARLAHAPRPHAA

SEQ ID NO: 11476 - protein, 391 aa, unidentified
  source 1..391: note = protein_dfc10f1
  REGION 4..163: note = RuvC_domain
  SITE 7: note = RuvC_P1
  SITE 60: note = RuvC_P2
  SITE 101: note = RuvC_P3
  SITE 103: note = RuvC_P4
  SITE 106: note = RuvC_P5
  REGION 266..353: note = Tnp_domain
  SITE 274: note = Tnp_P1
  SITE 304: note = Tnp_P2
  SITE 312: note = Tnp_P3
  SITE 313: note = Tnp_P4
  SITE 326: note = Tnp_P5
MIYVGIDVAKDKHDCFITNSNGEVLFKAFTISNSQDGFNDLYQRIESVMEDITKVKVGLEATGHYNYNLLGYLIDKGLTTYVINPLHTNLYRKSLSLRLTKTDKVDARTIAYMLMSDVNLKSYSDTSYHNEELKSLTRYRFDKVKERAKLKTSVSRLVCILFPELEKLVPTLHMTSIYALLSEFPGAKYVAGAHLTRLTNLLSDASKGRYGKDTAITFREAARASIGSNMPAKSLELKHTIKLILELASEIDEIENEIKIIMDEINSPILSIPGINYRMGAMIIAEIGDFSRFDSPDKILAYSGFSPSTYQSGQLDSAYSHMEKRGSKYLRYALYNAAKYVCHWDSTFARYLTKKRAEGKHYNVAISHAVKKLVRVIYHLVKSNQQYIKVA

SEQ ID NO: 11477 - protein, 340 aa, unidentified
  source 1..340: note = protein_6ada746
  REGION 7..148: note = RuvC_domain
  SITE 10: note = RuvC_P1
  SITE 53: note = RuvC_P2
  SITE 88: note = RuvC_P3
  SITE 90: note = RuvC_P4
  SITE 93: note = RuvC_P5
  REGION 212..299: note = Tnp_domain
  SITE 220: note = Tnp_P1
  SITE 250: note = Tnp_P2
  SITE 258: note = Tnp_P3
  SITE 259: note = Tnp_P4
  SITE 271: note = Tnp_P5
MGQVVTIGLDIAKSVFQVHGVDAEGIVVVRQKLPRARLLPFFAKLEPCLVGIEACGASHHWARELIQLGHEARLMPPSYVKPYLKRQKNDMADAEAICEAVTRPTMRFVPVKSPEQQGVMVLHRTRLVLTRQRTQLSNAIRGHMAEFGLAAAIGREGLGKLIAVILDGADERVTREARVCLTMLVDQLRLVNVQILENDRLIRTNARATEVGRRLMEIPGVGPLLASAMVAAVADPAAFKTGRNLAAWIGLVPRQNSSGGKERLGGITKQGDRYLRQMLVVGALAVVRYAQRNGTRRPWLLQLLSRRTPKVAAVALANKNARMIWAIMTSGERYREPLAA

SEQ ID NO: 11478 - protein, 379 aa, unidentified
  source 1..379: note = protein_93adf37
  REGION 11..175: note = RuvC_domain
  SITE 14: note = RuvC_P1
  SITE 71: note = RuvC_P2
  SITE 111: note = RuvC_P3
  SITE 113: note = RuvC_P4
  SITE 116: note = RuvC_P5
  REGION 213..299: note = Tnp_domain
  SITE 221: note = Tnp_P1
  SITE 251: note = Tnp_P2
  SITE 259: note = Tnp_P3
  SITE 260: note = Tnp_P4
  SITE 272: note = Tnp_P5
MTLDKYFRQCVGIDISKDKFTACLYMYDMASDAGCCTESIDFPNNRTGFNQMVKWSRKESQKGFPLVYLMEPTGSYYEPLAYHLHKIGQTLYVVLPNKARKFCEYEGIKTKTDAMDARCLALMGCKNRKLRPWEPPLPIYRELRQLTRLRADLVKMQTQMLNHMESIDHMEDVAPEVRKSYEKLLDTIEKQLEKNEKDIAAKLAQDKELETKVKRIATAKGIRVGTVTCIVAETQGFHLISNRKQLTSFAGLDVKARQSGKDDPRHHITKKGNAHIRAALYMPALSAAHCNRQMAQAYGRICAKHPDVKMIGVTAIMRKMLLLVYSLWKSGEEYDETRDNTHTPRKKEPQPTNSPEDCLKPNAAPPDWNAADKEGNPPF

SEQ ID NO: 11479 - protein, 344 aa, unidentified
  source 1..344: note = protein_b36f033
  REGION 5..152: note = RuvC_domain
  SITE 8: note = RuvC_P1
  SITE 55: note = RuvC_P2
  SITE 92: note = RuvC_P3
  SITE 94: note = RuvC_P4
  SITE 97: note = RuvC_P5
  REGION 213..300: note = Tnp_domain
  SITE 221: note = Tnp_P1
  SITE 251: note = Tnp_P2
  SITE 259: note = Tnp_P3
  SITE 260: note = Tnp_P4
  SITE 272: note = Tnp_P5
MEYFAGLDVSLRSCAICVVDAKGKVMLERELPCEVGDIADCLNTSGYPIERIGFEAGTLSQHLFYGLTSEGFDVVCMEARQVNAALSAMRNKTDKNDARGIAHVLRTGWFSPVHMKSREAHGVRALLSTRRALLNKTIDLANEVRGLLKIFGLRLPKTVQHGNFDGLVRPVIEMDEILAHAIIPLLDARRVLYQHFLELDRRVKRAAARDEVCLRMMTVPGVGPIAALTFKAAVDDPARFKRARTVAAHFGLTPRRYQSGEHDSPGRISKAGDRDVRATLYAAANALLMRTMAGSQIKSWGMRLMRTKGRRRAVVAVARKLAVLLHRMWSDGTEFRPAEVEGTA

SEQ ID NO: 11480 - protein, 475 aa, unidentified
  source 1..475: note = protein_3947597
  REGION 40..189: note = RuvC_domain
  SITE 43: note = RuvC_P1
  SITE 94: note = RuvC_P2
  SITE 129: note = RuvC_P3
  SITE 131: note = RuvC_P4
  SITE 134: note = RuvC_P5
  REGION 321..407: note = Tnp_domain
  SITE 329: note = Tnp_P1
  SITE 360: note = Tnp_P2
  SITE 368: note = Tnp_P3
  SITE 369: note = Tnp_P4
  SITE 380: note = Tnp_P5
MEKTSKNKLEDVTRLLALQKIRDVKDLESYKLSVCHPHSAGIDLGSREIYVAIDPRIAAEMGIPIVHVFNTFTSGLQDCRKLLMNCGIQTVAMESTSIYWTTIYSILVSAGFEVCLVNPKKFRMVPGRKTDVLDCQWLQTLHLYGLLRGSFHPEEKIACLRSYMRERNLIIKDRSRHVNRMQKAMTKMNLLLTNSLSDITNKTGISIIKAIIAGERDPEKLASLRSVRCKFTQEEIAESLNGYYKEDQLFLLKTNYEAFCFFDSQLYEIDKKITDLLETFPLKKGKDEISPPSQKSKYQRKNKNDIRTDKNLKDMLYRILGTDVTSVTGLQSNTILQIISEVGIDMSKFPTCNHFASYLGFVPHNKITGGEIKSSKTDRIKSTAAQAFRKVVPAISRTDSELAGFYKRIVPRIGTGKAVVAVCRKLAIIFYNTLVYGNEYVEYGLEKYKEQIKERERKLVMKLARKNNWDISCSL

SEQ ID NO: 11481 - protein, 250 aa, unidentified
  source 1..250: note = protein_ea299fa
  REGION 1..90: note = RuvC_domain
  SITE 25: note = RuvC_P3
  SITE 27: note = RuvC_P4
  SITE 30: note = RuvC_P5
  REGION 120..204: note = Tnp_domain
  SITE 128: note = Tnp_P1
  SITE 157: note = Tnp_P2
  SITE 165: note = Tnp_P3
  SITE 166: note = Tnp_P4
  SITE 178: note = Tnp_P5
MGHDVYVIDGSRLNKYRDGIGMKAKTDTLDAELLARYLSRESDRLRIWNPPPKAYTQMKSLLRRRAQLVRACVALKQSWKNESLLKEHFNQLLAAIAQFEKMIQKTLKEIAEEGGIDDQVKRCQAIEGVGLLTATAAATAFMRGEFANSDEYVAFLGMDPRVRQSGQKDQKRRLSKRGDSEFRRLFHNSAMAASRSPTWKPYYERYLARGLKGTQALVILARKLARVMFALMKNQTEYKPNSMFGCSPQT

SEQ ID NO: 11482 - protein, 364 aa, unidentified
  source 1..364: note = protein_aecbaa8
  REGION 4..105: note = RuvC_domain
  SITE 7: note = RuvC_P1
  SITE 60: note = RuvC_P2
  SITE 101: note = RuvC_P3
  SITE 103: note = RuvC_P4
  REGION 239..326: note = Tnp_domain
  SITE 247: note = Tnp_P1
  SITE 277: note = Tnp_P2
  SITE 285: note = Tnp_P3
  SITE 286: note = Tnp_P4
  SITE 299: note = Tnp_P5
MILVGIDVSKDKHDCFISTSDGEVLFDVFTIANTMDGFSDLYEKISSVADDFSKVKVGLEATGHYSYNILGFVLNKGLTTYVINPLHTNLFRKGQSLRKTKTDRILKSLTRYRFIKVQERAKYKTSVARLVNILFPELEDVVSSLHMKSVYTLLSEFPGASHIASAHLTHLTHLLYVESKGHYGRDKAIEIREAARSSIGSVMPAKSLELSHTINLINILSNEIDEIEAEIKCIMNEIDSPILSIPGISYRMGAMIIAEIGDFDRFSSPDQILAYAGMSPSTYQSGQLTSSHAHMEKRGSKYLRYALFNATIYVCNWDPTFSAYLAKKRAEGKHYYVAITHAAKKLVRLIYALESSGEQYRIAA

SEQ ID NO: 11483 - protein, 416 aa, unidentified
  source 1..416: note = protein_3eeb818
  REGION 4..170: note = RuvC_domain
  SITE 7: note = RuvC_P1
  SITE 67: note = RuvC_P2
  SITE 107: note = RuvC_P3
  SITE 109: note = RuvC_P4
  SITE 112: note = RuvC_P5
  REGION 278..364: note = Tnp_domain
  SITE 286: note = Tnp_P1
  SITE 317: note = Tnp_P2
  SITE 325: note = Tnp_P3
  SITE 326: note = Tnp_P4
MLFIGDDWAEDHHDLEIENQDGHRLARSRLPEGLEGITRLHALVAEHAPPEWADLPPEQIAGQVIVGIETDRGPWVTALRAAGYQVFAINPLSAARYRQRHSTSGAKSDAGDAHVLAEIVRLDRAHHRAVAGDSDLADAIKLLARAHQSAVWERTRQVLRMRSTLLEYFPVAVQAFTDLAAPDALALLGRAPDPDRAAKLTRSQLVSALRAARRHHVEAKADVLLAVLRAAALRQPATLQGAYATVVSGQVGIIAALNEQIAGLNEVMAEHFGRHPDADIYLSQPGFAVVLAARTLGEFGDDEDRFASSRARKNYSGQSPITRASGKKSVVLARYATNRRLGAALHLQAFAALGASPGARAYYDALRARDINHHAALRQLANRLVGILHGCLKTGAVYDENIAWQHRQITTQTVAA

SEQ ID NO: 11484 - protein, 340 aa, unidentified
  source 1..340: note = protein_90029e6
  REGION 6..157: note = RuvC_domain
  SITE 9: note = RuvC_P1
  SITE 63: note = RuvC_P2
  SITE 101: note = RuvC_P3
  SITE 103: note = RuvC_P4
  SITE 106: note = RuvC_P5
  REGION 207..294: note = Tnp_domain
  SITE 215: note = Tnp_P1
  SITE 245: note = Tnp_P2
  SITE 253: note = Tnp_P3
  SITE 254: note = Tnp_P4
  SITE 267: note = Tnp_P5
MKKFFVGIDFSKLKFDAAIYNGEKNDNANYQVFDNDTNGFKEFVKWVESQTKMDRTDWLICGEHTGLYSYALSLFLSENGIDIWLESGLQIKNSQGIQRGKTDKIDAFRIAEYAYRYNDKAKVFKPLSKSLDGLKDLLAYRERLVEAKKVFVISSKELKRVKRERTITDFIITESSLEIQSIELKIKTCEKKIEEIIQSEIDLCTNYKLLTSIKGIGMVNAVMVLTVTANFTLFTDPRKFGCYCGVVPFKHDSGTSVKGRTKISPLANRKIKTLLTQAARTCVMHDLEMKTYYQRKRAEGKSDKIVINNVRNKLIHRMFAVVMNGNMYNPNYLNPLKQVA

SEQ ID NO: 11485 - protein, 387 aa, unidentified
  source 1..387: note = protein_d17877e
  REGION 4..161: note = RuvC_domain
  SITE 7: note = RuvC_P1
  SITE 59: note = RuvC_P2
  SITE 100: note = RuvC_P3
  SITE 102: note = RuvC_P4
  SITE 105: note = RuvC_P5
  REGION 262..347: note = Tnp_domain
  SITE 269: note = Tnp_P1
  SITE 299: note = Tnp_P2
  SITE 307: note = Tnp_P3
  SITE 308: note = Tnp_P4
  SITE 320: note = Tnp_P5
MYFVGIDISKYKHDCFICTETGEVIESNFSFPNTSDGFEQLLNLLKSIDNFKEIRIGFEATGHYGMNLKLFLEKNNYSFMEFNPKLVKEFISGQTLRKTKTDKKDAYQITKYLISADYKPHPKQFYHKYSLKSLSRMREKLVKQRSYYEVALTNVLDHIFPEYKPFFNNTFSASSIFILSKYKSPDKIKNMKDYDSIRKISRGKFTSAQFFLLKDLAKNTIGTSNEIFELELETLLILRSQIEFEIKKLESNIEEIIKELNPPILSIKGIGYILGAGIVSEYGDVSRFKSADAMVAFAGIEPSICQSGTESHTGHMVKHGSGHLRYYLLNAADCIFLHDPIFTEFYYKKRNEGKSHRVALNHVAKKLIRIIYKLETENITFDSSKVK

SEQ ID NO: 11486 - protein, 389 aa, unidentified
  source 1..389: note = protein_7356aba
  REGION 4..161: note = RuvC_domain
  SITE 7: note = RuvC_P1
  SITE 59: note = RuvC_P2
  SITE 99: note = RuvC_P3
  SITE 101: note = RuvC_P4
  SITE 104: note = RuvC_P5
  REGION 265..352: note = Tnp_domain
  SITE 273: note = Tnp_P1
  SITE 303: note = Tnp_P2
  SITE 311: note = Tnp_P3
  SITE 312: note = Tnp_P4
  SITE 325: note = Tnp_P5
MIYVGIDIAKLNHFASAVSSDGEILIEPFKFTNDGDGFQLLVSKLNSLNAEPDIIIGLESTAHYGDNLIRYLVAESFQVCVLNPIKTSTMRKNNIRKTKTDKVDTYIIAKTLMMQDSYRFYTFYDLDLMDLKTMGRFYQKTVKQRTRLKIQLTAYVDEVFPELQYFFKSGLHQKSVYALLKEAPTPEAIASMHMTHLANLLVKTSHGHFNRDNAKELRVLARKSVGTSDSALSIQITHSIAQIELLDSQLQKIEDEMAEIMKFNDSVIMTIPGIGCINGGMILGEIGDIHRFSNPCKLLAFAGLDPTVYQSGNFQARRTRMSKRGSKVLRYALINAAHNVVKNNSTFKAYYDAKMAEGRTHYNALGHCAGKLVRVIWKMMTDDVEFNLD

SEQ ID NO: 11487 - protein, 343 aa, unidentified
  source 1..343: note = protein_59569c3
  REGION 6..147: note = RuvC_domain
  SITE 9: note = RuvC_P1
  SITE 52: note = RuvC_P2
  SITE 87: note = RuvC_P3
  SITE 89: note = RuvC_P4
  SITE 92: note = RuvC_P5
  REGION 212..300: note = Tnp_domain
  SITE 220: note = Tnp_P1
  SITE 250: note = Tnp_P2
  SITE 258: note = Tnp_P3
  SITE 259: note = Tnp_P4
  SITE 271: note = Tnp_P5
MQISTIGVDLAKNVFQIHGVDSAGKVVLTKQLRRPKMLEFFGNLAPYLIGMEACATAHHWARELRKLGHEVKLIPPSYVKAYVKRQKNDAADAAAICEALTRPSMRFVPVKTVEQQAALSVHRIRALLINQRTQLTNALRAHLAELGLVADHGRDGLARLIAMLREENTLQLLPFAMLGALRALISQLGSVQQQIGEFDRCIHDQHRASAVSRRLESIPGVGVIGATALAATVTDPSSFKSGRDLAAWIGLVPRQYSTGGKERLGGISKQGDRYLRRLLVAGAMAVVQHARRHPDKRPRVTKLLARKPAKVVAIAIANKTARIAWAIMVNGGTYRAPAITASA

SEQ ID NO: 11488 - protein, 368 aa, unidentified
  source 1..368: note = protein_39c35e4
  REGION 6..147: note = RuvC_domain
  SITE 9: note = RuvC_P1
  SITE 52: note = RuvC_P2
  SITE 87: note = RuvC_P3
  SITE 89: note = RuvC_P4
  SITE 92: note = RuvC_P5
  REGION 210..296: note = Tnp_domain
  SITE 218: note = Tnp_P1
  SITE 247: note = Tnp_P2
  SITE 255: note = Tnp_P3
  SITE 256: note = Tnp_P4
  SITE 268: note = Tnp_P5
MNFKRIGLDTSKAVFTLHDVDHDEKAILRCNLRRAEMEAFFAKLPPTHVALEACGGSHHWGRRLVALGHSVQLIPPQYVKPFVRRGKNDRNDAEAISEAAARPGMPSVAVRLAEQQAEAIVLSARELLVRQRTQLVNAVRGHAAEFGIVAANNTSQLPALLEAVAAGEAVPDAAKEMLAFLGGQMAQLDARIGELERRMKQQQHKTNPVSQLLAEVPGIGPIGALSLALMIDPGRFQSGRHFAAWLGLVPKEHSTGGRQRLGGISRAGNERLRQLLVLGATAVIQYARPGSKTASAWLLALLERKPRKLAAVALANKMARIVWAKLVKVPTDRLRSVGMPAEGMMATGEAYRGSKKVATQAAGAAATA

SEQ ID NO: 11489 - protein, 341 aa, unidentified
  source 1..341: note = protein_df70ebb
  REGION 7..148: note = RuvC_domain
  SITE 10: note = RuvC_P1
  SITE 53: note = RuvC_P2
  SITE 88: note = RuvC_P3
  SITE 90: note = RuvC_P4
  SITE 93: note = RuvC_P5
  REGION 209..294: note = Tnp_domain
  SITE 217: note = Tnp_P1
  SITE 247: note = Tnp_P2
  SITE 255: note = Tnp_P3
  SITE 256: note = Tnp_P4
  SITE 268: note = Tnp_P5
MSSVSLIGIDIGKHTFHLHAQDKFGKEVMRKKCSRQQMMRFLANHPPCTVVMEACAGSHCLAREIKAMDHEAKLISPQFVKPFVKSNKNDFVDAQAICEAASRPSMRFVTPKSPEQQTLSVSHRMRESLIRDRTKTVNQMHGFLLEFGVSLPTGLAVVKRLASVLEEHDLPIRLVALLQRLHDHFVYLSEQIKVLDKELESQLADDDLGSRLLSMPCVGPITASLLAVEMGDARQYGSSRDFAASVGLVPRQYSTGGRPALLGISKRGDKNLRHLLVLCARVYMLRLKYQKGPLADWVRSLLARRHSNVVACALANKLARIAWAIATRHTQYKTEPDAINA

SEQ ID NO: 11490 - protein, 322 aa, unidentified
  source 1..322: note = protein_834a7c0
  REGION 4..148: note = RuvC_domain
  SITE 7: note = RuvC_P1
  SITE 53: note = RuvC_P2
  SITE 93: note = RuvC_P3
  SITE 95: note = RuvC_P4
  SITE 98: note = RuvC_P5
  REGION 192..279: note = Tnp_domain
  SITE 200: note = Tnp_P1
  SITE 230: note = Tnp_P2
  SITE 238: note = Tnp_P3
  SITE 239: note = Tnp_P4
  SITE 252: note = Tnp_P5
MKYIGIDVSKATFVAAYSSDRCGETRTFDNTAAGIKKFIGTLSGITDAHCVMEATGNYSAMLLYLLDSAGIPVSMENPLKIKNFARAMLSVVKTDVLDARLIALYGEKMNPAPFRIQSEAILRLKQKRTVMRQLHKQRTALSNLKGSIECLPVPDKGAIHAVDETLACIDKRLAGLQKELTELVGDEFGKQLALLTSIKGIGVTLAAALIITTGGFTYFQNAKQVSRYLGLCPTYEQSGTSVNVRGHINRNGDSYTRGLLYIAAWPASRFNAQCRDTYTRLRKRGKPGKLAMVAVANKLVRQAFAVVSQQKEYVDGFVSKRH

SEQ ID NO: 11491 - protein, 342 aa, unidentified
  source 1..342: note = protein_74277e7
  REGION 6..148: note = RuvC_domain
  SITE 9: note = RuvC_P1
  SITE 52: note = RuvC_P2
  SITE 87: note = RuvC_P3
  SITE 89: note = RuvC_P4
  SITE 92: note = RuvC_P5
  REGION 212..302: note = Tnp_domain
  SITE 219: note = Tnp_P1
  SITE 249: note = Tnp_P2
  SITE 257: note = Tnp_P3
  SITE 258: note = Tnp_P4
  SITE 270: note = Tnp_P5
MKITTIGIDLAKNVFQVHGVDARAKTVLKKQLKRDQVTTFFINLEPCLIGMEACGSAHYWSRKLQAMGHTVRLMAPQFVKPYVKTNKHDVADAEAICEAVARPNMRFVATKTADQQSVLALHRARQGFVKARTAQANQIRGMLAEYGVVLPLGIHHIPQRVPELIEDGEVELPGQFRLLIQRLVEHFKELNRQVLELETQIKAWHRANPSSCKLEKIPGIGPITASALVASIGDARHFANGRQVAAWLGLVPKQSSTGGKTMLLGISKRGDTYLRTLLIHGARAVLSHAGRRADQDSWLHKLVQRRNANVAAVALANKNARMIWALLAHDREFRADYVSVAP

SEQ ID NO: 11492 - protein, 418 aa, unidentified
  source 1..418: note = protein_41fe91d
  REGION 19..171: note = RuvC_domain
  SITE 22: note = RuvC_P1
  SITE 70: note = RuvC_P2
  SITE 108: note = RuvC_P3
  SITE 110: note = RuvC_P4
  SITE 113: note = RuvC_P5
  REGION 278..364: note = Tnp_domain
  SITE 286: note = Tnp_P1
  SITE 317: note = Tnp_P2
  SITE 325: note = Tnp_P3
  SITE 326: note = Tnp_P4
  SITE 337: note = Tnp_P5
MESTAETTLRDEPQNGVTGGIDWARDDHAVSIVDARGREVRRATIEHNAAGLRELLELLNRAGVREVAIERPDGPVVDTLLEAGLTVVVISPNQLKNLRGRYGSAGNKDDRFDAFVLADTLRTDRSRLRPLLPDTAATATLRRTCRARKDLVGHRVALANQLRAHLRIVFPGVVGLFADIDSPISLAFLTRFDCQDRADWLSVKRLAAWLAAAGYCGRVDPAVLHGRLTGAPRGVTGEDGAANAHITRALLAALTSIATQIKALDAQIAEQLALHADAHIFTSLPRSGTVRAARLLAEIGDCRARFPTPESLACLAGVPPPPRQSGKVTHVGFRWAADKQLRDAVCDFAGDSRRANPWAADLYNRARARGHDHPHAVRILARAWLYVIWHCWQDGVAYDPTQHRALQALRNQVRQTAA

SEQ ID NO: 11493 - protein, 329 aa, unidentified
  source 1..329: note = protein_071aa7f
  REGION 6..158: note = RuvC_domain
  SITE 9: note = RuvC_P1
  SITE 60: note = RuvC_P2
  SITE 98: note = RuvC_P3
  SITE 100: note = RuvC_P4
  SITE 103: note = RuvC_P5
  REGION 204..290: note = Tnp_domain
  SITE 211: note = Tnp_P1
  SITE 241: note = Tnp_P2
  SITE 249: note = Tnp_P3
  SITE 250: note = Tnp_P4
  SITE 263: note = Tnp_P5
MKKLFVGIDVSKDVFDFCALNENGDIETSKEVFENSKKGIVAFCKSLKRWDDYDVWICLEHTGHYGYLLASEFSERTIKYTLLNPLEIKNSIGMTRGKNDAIDAYRIAYYGFTHVRKLKRHIIPIHDIQKLRTLMSMRDGYVKINVQLKNSFKALEIIHQSINIRPQLNDHRLLIKRQEKSIDKVELQIMEILNNNEELKKTFKKVNTVIGVGMLTAVKCIIETDNFTKFNDGRKFSCHCGLAPFDYKSGSSVRGKTRTSPLSNKGLKSILFKAASTAIQHDPQLKNYYSRKVGEGKHKLSVLNAVANKIVLRIFAVANRDEPFVKLAA

SEQ ID NO: 11494 - protein, 408 aa, unidentified
  source 1..408: note = protein_9dc7834
  REGION 5..161: note = RuvC_domain
  SITE 8: note = RuvC_P1
  SITE 58: note = RuvC_P2
  SITE 98: note = RuvC_P3
  SITE 100: note = RuvC_P4
  SITE 103: note = RuvC_P5
  REGION 270..356: note = Tnp_domain
  SITE 278: note = Tnp_P1
  SITE 309: note = Tnp_P2
  SITE 317: note = Tnp_P3
  SITE 318: note = Tnp_P4
MKVFVGDDWAEAHHDVHLMGETGEKLAAKRLPEGLDGIAGLHALIAEHTTDPTEVIVGIETERGLWVQALIAAEYQVYAINPLSVSRYRDRHNVAGAKSDPGDAKLLADLVRTDRHNHRPVAGDTDQADGLKVLARAHQNLIWDRTRHTNRLRNDLREFFPAALFAFESLADRDTIAVLTKAPHPDQARRLSIAQIRSALRKGGRQRNLDRRASEIQQALRTPQLDAPPAVTTAFAATTKALVEVIAGLNTSIAELETELAAHFDEHPDADIYLSLPGLGVVLGARVLAEFGDDPDRYDNAKSRRNYAGTSPLTIASGKKHAVLARHVRNRRLYDAIDQWAFCAITASPGCREFYDQHRAAGDLHHQALRALGNRLVGYLHGCLRTRTHYDEHTAWAHRQPAQTQIAA

SEQ ID NO: 11495 - protein, 322 aa, unidentified
  source 1..322: note = protein_6183dcb
  REGION 9..157: note = RuvC_domain
  SITE 12: note = RuvC_P1
  SITE 56: note = RuvC_P2
  SITE 96: note = RuvC_P3
  SITE 98: note = RuvC_P4
  SITE 101: note = RuvC_P5
  REGION 195..279: note = Tnp_domain
  SITE 203: note = Tnp_P1
  SITE 232: note = Tnp_P2
  SITE 240: note = Tnp_P3
  SITE 241: note = Tnp_P4
  SITE 252: note = Tnp_P5
MSQPGSLCVDIDVSKAILDIAASSAIEQFSVGNDSDGFDAIIAELRMYAIALVLMKATGGLETAIVCALQAEGFELAVVNPRQARDFARAMGYLAKTDSIDARVLSQMAEVLNRHPERERFIRALPDTECQVLTAMVVRRRQLITMLVAERNRLHPAHPLNRKSINIIIKALEDELARLDADMNSHIHSHFKELAKRLSSIKGVGTMTAAALLAEVPEQGNLSRREISALVGMVPVNRDSGTMRGRRTIFGGRAGVRTALYMAALVATRFNPVIKVFYMRLLAAGKPKKVALVTCIRKLLTILNAMLRKNEEWNESYHHVAP

SEQ ID NO: 11496 - protein, 328 aa, unidentified
  source 1..328: note = protein_f7b22df
  REGION 4..158: note = RuvC_domain
  SITE 7: note = RuvC_P1
  SITE 60: note = RuvC_P2
  SITE 100: note = RuvC_P3
  SITE 102: note = RuvC_P4
  SITE 105: note = RuvC_P5
  REGION 200..286: note = Tnp_domain
  SITE 208: note = Tnp_P1
  SITE 237: note = Tnp_P2
  SITE 245: note = Tnp_P3
  SITE 246: note = Tnp_P4
  SITE 259: note = Tnp_P5
MFYLGIDVAKAKIDCCLILDNSTSKKKTKTFSNTQNGFEQLQIWLNHHAATSMQTITLMEATSIYHELLAQYLFKAGYQVCVTNPARARYFAQSMSKLNKTDKVDSEVLARFAMTADLHFWQPLPEHIQLLNALLERRAVLYDDLQREKNRLEKAKSTFTMEPVLESIHNSITQLNKHIQNIDQQIDNHIDQNPDLKNDKDLLSSIPAIADRTSLLMLSFLRSHTFEKASQAAAFIGLVPIQKQSGSSIRGRSHLSKAGSSKIRAGLYMAAVVATRHNPHIKEMNERLLANGKTKMMVIGAAMRKLVHLCYGVLKHQQPYQANYCINS

SEQ ID NO: 11497 - protein, 326 aa, unidentified
  source 1..326: note = protein_374b7d1
  REGION 8..149: note = RuvC_domain
  SITE 11: note = RuvC_P1
  SITE 52: note = RuvC_P2
  SITE 92: note = RuvC_P3
  SITE 94: note = RuvC_P4
  SITE 97: note = RuvC_P5
  REGION 193..280: note = Tnp_domain
  SITE 201: note = Tnp_P1
  SITE 231: note = Tnp_P2
  SITE 239: note = Tnp_P3
  SITE 240: note = Tnp_P4
  SITE 253: note = Tnp_P5
MSENTNYFGIDISKDVFDVSGADGKHYQFKNDLSGFKKLLNLTNEFSHCVMESTGVYHLRLSYYLEEKGVAVSVENPLSIKRFIQMRLTKIKTDKKDSQMIYEYAVNSGVELRLWKGQSKTQIACSQIISLTNLYTKQTTALKNKLQTEEAMGSPCTLVIQSLKRSLKHLKKEIDKLEDTLLELVKLDNQDLLTRVESIPGIGRKSSMLLIVLTGGFERFNNASELCSFAGLTPMIRQSGSSIRSRSRISKMGNRRLRKTLFMCSLSAKKHNKACREIFDRIVAKGKSKKLALIAVCNKLLKQAFALAKSGLIYDENYKSVLMNLN

SEQ ID NO: 11498 - protein, 343 aa, unidentified
  source 1..343: note = protein_898fee0
  REGION 7..148: note = RuvC_domain
  SITE 10: note = RuvC_P1
  SITE 53: note = RuvC_P2
  SITE 88: note = RuvC_P3
  SITE 90: note = RuvC_P4
  SITE 93: note = RuvC_P5
  REGION 211..296: note = Tnp_domain
  SITE 219: note = Tnp_P1
  SITE 249: note = Tnp_P2
  SITE 257: note = Tnp_P3
  SITE 258: note = Tnp_P4
  SITE 270: note = Tnp_P5
MEECNIVGIDLAKNVFQVHASDEVGRRLFSKKVSRGQLLKLMSTIRPCVVALEACASAHHWGRQIAKLGHEVKLIPPIYVKPFVKRQKNDAADAEAIVEAASRPTMRFVAVKSADQQAAGMAFKTRDLFVRQRTQLINALRGHLAEHGVVAPQGVVHLKRLRAALADETTGLPTAVVLHAGMILDQISVLQSRIEKLEKEIFAVSRKEDLAVRLMTIPGVGPITAAALLAFAPDPATFRRGRDFSAWMGLTPRQHSSGGKERMGRTSKMGHRDLRRLLITGAMAVVRWAARKGAQAGSWLARMLDRKPKMLIAVALANRMGRIIWALMANGGTYNSHRDTAQA

SEQ ID NO: 11499 - protein, 299 aa, unidentified
  source 1..299: note = protein_d1662dd
  REGION 32..108: note = RuvC_domain
  SITE 47: note = RuvC_P3
  SITE 49: note = RuvC_P4
  SITE 52: note = RuvC_P5
  REGION 171..256: note = Tnp_domain
  SITE 179: note = Tnp_P1
  SITE 209: note = Tnp_P2
  SITE 217: note = Tnp_P3
  SITE 218: note = Tnp_P4
  SITE 230: note = Tnp_P5
MSSQFFCGVDLAKHHFSLHAVDDRGKVILHKSVSRAKYVAPYRTKGKNDLNDAIAICEAVQRHATRFVPVKSPERQAILSIHRMREHWVQERTALINRIRALLAEFGIVIPTGRHAIQRDVPLILEAADYGLPDIARAVLGDSFEHLQVLNQRIDDTELCFDIVTKASPNAQRILKVRGIGPQTATAIIATIGKGEQFDSGRDFAAWLGLVPKQYSTGGKPRLGRISKRGDKYLRTLLVHGARAVITNLGEKQDRLSVWGRNILERRGMNRAIVALAGKNARIIWALLHNQTDYQDYAA

SEQ ID NO: 11500 - protein, 330 aa, unidentified
  source 1..330: note = protein_66533e8
  REGION 5..154: note = RuvC_domain
  SITE 8: note = RuvC_P1
  SITE 55: note = RuvC_P2
  SITE 95: note = RuvC_P3
  SITE 97: note = RuvC_P4
  SITE 100: note = RuvC_P5
  REGION 196..283: note = Tnp_domain
  SITE 204: note = Tnp_P1
  SITE 234: note = Tnp_P2
  SITE 242: note = Tnp_P3
  SITE 243: note = Tnp_P4
  SITE 256: note = Tnp_P5
MSVFVGVDISAKTFDLVSRKAGHSSKTEQFKQTPDGHAKAIKRLTALQPTVIVLEATGIYYLDLAVALVQAGLPVAVINPKSFRHFAELMLTGSKTDGIDAALLAEYGERMRPRLWTPPDEACLALRDLGRQINRLTATRTQAKNRLHALQSKRSTMPLLIEDEQEGIDLLDRRIERLSKAALALIAQNRTLSRSLENMRAAKGIGEASAIAILAELCVLPQHLKAPQVSRFAGLDVRLTQSGTSVNRPARLSKAGNAYLRAALYMPAMSAVRHDPRAKAFYEALVSRGKKKIQAQCAVMRKYLTGLWACIQTEAAFDSTLLFSDEHMNA

SEQ ID NO: 11501 - protein, 343 aa, unidentified
  source 1..343: note = protein_b4504e4
  REGION 6..146: note = RuvC_domain
  SITE 9: note = RuvC_P1
  SITE 52: note = RuvC_P2
  SITE 87: note = RuvC_P3
  SITE 89: note = RuvC_P4
  SITE 92: note = RuvC_P5
  REGION 211..296: note = Tnp_domain
  SITE 219: note = Tnp_P1
  SITE 249: note = Tnp_P2
  SITE 257: note = Tnp_P3
  SITE 258: note = Tnp_P4
  SITE 270: note = Tnp_P5
MKLHVLGIDLGKTVFHLVGLDSTGKVVIRKRCSRRQLLAFTANLQVQLIGMESCSGAHFLGRALRDQGHEVRLMPAQYVKPYVQTNKSDYIDAEAIAEAVQRPRMRFVPIKSEEQLDLQALHRVRERWVMRRTAVVNQIRSLLLERGLTLPKGRRYVEEALPRILEDAELPLSGSFRLLLAQLKLELEQLSARIDQLDMAILERAREDEACQRLTTIPGVGPVTATAVIAAVGNGSAFGRGRDLAAWIGMVPGEHSSGGKQTLLGISKRGNSYLRRLFVQGARSVLQQRHRQAPGLSSWLAQLLARKHQNVVIVALANKLVRMAWAVLCKGERYRAPVLAVST

SEQ ID NO: 11502 - protein, 332 aa, unidentified
  source 1..332: note = protein_ec57995
  REGION 24..165: note = RuvC_domain
  SITE 27: note = RuvC_P1
  SITE 71: note = RuvC_P2
  SITE 111: note = RuvC_P3
  SITE 113: note = RuvC_P4
  SITE 116: note = RuvC_P5
  REGION 206..291: note = Tnp_domain
  SITE 214: note = Tnp_P1
  SITE 243: note = Tnp_P2
  SITE 251: note = Tnp_P3
  SITE 252: note = Tnp_P4
  SITE 263: note = Tnp_P5
MVAGTNGSLNKAGSTKMTQISTTAGIDTSKAKLDVALAGRVERWQVDNTLAGWRRLAAEFSKTGVTRVGIEASGGYESGVVGYLRDKGFTVLVLQPLQVKAYARVHLRRAKNDKLDAVLIAACTATIDRPRIEPDGRLAKLAQHLTFIEQIEEDIARFKVRLEHVGEPRLRRLVVADIARLKQRRATELLRIVTALRAHDDLAHRLDLVLSIPGLGERTASALIIRMPELGRVSREEAAALAGLAPYDDDSGKHKGQRHIAGGRGRLRRSLFAAALPAAFHWNKALIDLYRRLTARGKAHNAALIACARKLLIYANTVVYRGTPWVERTAAT

SEQ ID NO: 11503 - protein, 402 aa, unidentified
  source 1..402: note = protein_09f1b8f
  REGION 10..164: note = RuvC_domain
  SITE 13: note = RuvC_P1
  SITE 61: note = RuvC_P2
  SITE 101: note = RuvC_P3
  SITE 103: note = RuvC_P4
  SITE 106: note = RuvC_P5
  REGION 271..356: note = Tnp_domain
  SITE 279: note = Tnp_P1
  SITE 308: note = Tnp_P2
  SITE 316: note = Tnp_P3
  SITE 317: note = Tnp_P4
  SITE 329: note = Tnp_P5
MINEDIDIFLGLDVGKTDHWACGVDRQGKQLWNRTLPNDETKLVELYQQLSAKGQVLVVVDQPATIGALAVAVAQHLGLPIAYLPGLSMRRIADMYPGTAKTDQKDAFIIAEAARTMPHTLRALTVSDEDEATLGMLKGFDQDLARQITQTSNRIRGLYTQIHPPLERVLGPWLDHDAVLAVVAAWPTPAQLQRAGQARIAAKLKKHGARRHTAWAGEIMTALRKQTVTVVGTEAAAMVLPHLANQLVSLHAQRADVAASVERIVEQHPLYPVLTSMPGVAVRTAAIIIAETSGKTFLTAAALAAYAGLAPTTRQSGTSIRSERVSHSGNKRLKRALFLSAFASIRSDPISRDYYDRKRAQGKRHNQALIALAHRRSTVLFAMMRDGTLYDAPEPRPLALAA

SEQ ID NO: 11504 - protein, 342 aa, unidentified
  source 1..342: note = protein_3080f47
  REGION 7..148: note = RuvC_domain
  SITE 10: note = RuvC_P1
  SITE 53: note = RuvC_P2
  SITE 88: note = RuvC_P3
  SITE 90: note = RuvC_P4
  SITE 93: note = RuvC_P5
  REGION 211..295: note = Tnp_domain
  SITE 219: note = Tnp_P1
  SITE 249: note = Tnp_P2
  SITE 257: note = Tnp_P3
  SITE 258: note = Tnp_P4
  SITE 270: note = Tnp_P5
MGEISIIGLDLAKQVFQVHGARVDGSVVLRKKLTRGQLLAFFSKLPPCIVAMEACSTAHYWAREIAEFGHEIRLVPPAYVKPFVKRQKNDVADAEAIAEAATRPTMRFVEPKTPEQQARAMVFRTRELFVRQRTQTINALRAHLAEHGLIAPKGLWNLSSIRQLIDQAEDTVDGLIVETARIYLEQIETFSTRILSLEAVLKKEAARSDASSRMMTMPGLGPITAMAIEAFAPTLTVFRRSRDFAAWLGLVPRQHSSGGKQILGRTSKMGQRDIRRLLIIGAMSIIRWASKKAPVPGTWLHAMLLRKPRMIVAIALANKMARSLWAMQTKKEDYRDPLLTVA

SEQ ID NO: 11505 - protein, 347 aa, unidentified
  source 1..347: note = protein_48be619
  REGION 6..147: note = RuvC_domain
  SITE 9: note = RuvC_P1
  SITE 52: note = RuvC_P2
  SITE 87: note = RuvC_P3
  SITE 89: note = RuvC_P4
  SITE 92: note = RuvC_P5
  REGION 211..297: note = Tnp_domain
  SITE 219: note = Tnp_P1
  SITE 249: note = Tnp_P2
  SITE 257: note = Tnp_P3
  SITE 258: note = Tnp_P4
  SITE 270: note = Tnp_P5
MNITQVGFDLAKNVFQVHGIDERGKGALRKQLKRPQVIRFFTQLPPCLIGMEACGGAHFWARKLTALGHTVKLIAPQFVKPFVKSNKNDAADAEAICEAVGRPNMRFVPIKNTEQQALLGLHRARQGFVIGRTAQVNQIRGLLAEFGLVIPVGIRSIGSKLPEILEDAENGLSGASRALFARLFEHFRALDRQVDELEREINAWHREDTASQRLQAIPGIGPLTASALVASVGDAKAFHNARQFAAWLGLVPRQNSSGGKTTLLGISKRGDTYLRTLLIHGARSVLLQLKRHPDQAEGWLARVAARRNPNIAAVALANKNARTVWALLAHGREYRAGYRSAAIAAAI

SEQ ID NO: 11506 - protein, 344 aa, unidentified
  source 1..344: note = protein_7566e73
  REGION 7..149: note = RuvC_domain
  SITE 10: note = RuvC_P1
  SITE 53: note = RuvC_P2
  SITE 88: note = RuvC_P3
  SITE 90: note = RuvC_P4
  SITE 93: note = RuvC_P5
  REGION 212..305: note = Tnp_domain
  SITE 220: note = Tnp_P1
  SITE 250: note = Tnp_P2
  SITE 258: note = Tnp_P3
  SITE 259: note = Tnp_P4
  SITE 272: note = Tnp_P5
MQKYNVIAIDLAKNVFQACKLGPQGKVIYNREISSSKLKELLIKEKVSLVAMESCSSAHYWARYAKAAGHQVKVINARTVKGFQTKQKTDKNDALAIATAASLQHIQSVRVQSVDEQAMQSMERARNLALTHQIAQSNHIRGLLSEFGVILPQGLSSLRAGIPFVLEDAENGLPDQFRTILLRLWEHLLIQIEHVDDLTRQLEIAIRDNDVCQQLMKLEGVGPIGALGLALQLGKGENFSSGRNASACIGLTPKQHSSGGKEHIGHISKRSADMRLRSTLFQGALSVVSLVVNRPARTNKEQWLKALIERRGKKVAAIALANKTVRTAYALLKNDSVYQLEKLA

SEQ ID NO: 11507 - protein, 331 aa, unidentified
  source 1..331: note = protein_e5f29a3
  REGION 7..159: note = RuvC_domain
  SITE 10: note = RuvC_P1
  SITE 59: note = RuvC_P2
  SITE 97: note = RuvC_P3
  SITE 99: note = RuvC_P4
  SITE 102: note = RuvC_P5
  REGION 202..289: note = Tnp_domain
  SITE 210: note = Tnp_P1
  SITE 240: note = Tnp_P2
  SITE 248: note = Tnp_P3
  SITE 249: note = Tnp_P4
  SITE 262: note = Tnp_P5
MKIIDVVGIDVSKLTIDAIVHQSKSYRQFENSNKGFSILCKWALSQSKVDKDNLLFVFEHTGLYSYQLATYLATKEFHFVIVPGLEIKRSLGIARGKDDKIDAAKIARYAYRLRDEIKLTILPSEEIQHLKSLLTLRDRMVKQRAGYKASLKEMKRVLKIKDNKVLFDTQKKIISSLDKQITKIEVQMNEIIMSNDKLKKFYKLMVTITGIGPQTALYMIVLTSGFTKFNSSRAFASYSGIAPFPNSSGTSIRGKTKISNLANKKMKSLLDMAAKTAIQYNQEMKLYYNKRIEEGKPKMSTINIIRNKLVARIFAVINRGTPYVNTMKYAA

SEQ ID NO: 11508 - protein, 301 aa, unidentified
  source 1..301: note = protein_69bc491
  REGION 6..147: note = RuvC_domain
  SITE 9: note = RuvC_P1
  SITE 52: note = RuvC_P2
  SITE 87: note = RuvC_P3
  SITE 89: note = RuvC_P4
  SITE 92: note = RuvC_P5
  REGION 211..273: note = Tnp_domain
  SITE 219: note = Tnp_P1
  SITE 249: note = Tnp_P2
  SITE 257: note = Tnp_P3
  SITE 258: note = Tnp_P4
MEIHTIGIDLAKTVFHLVGLNAHGDVVVQRKCSRSQLLRFTSNLRVCLIGMEACGGAHFLGRALRDQGHDVRLMPAQYVKPYVKTNKNDYIDAEAIAEAVGRPRMRFVPIKTDDQLDLQSLHRIRERWVVRRTAVINQIRGLLLERGITIRKGRLYIEASLPAILEDADNRLSGILRALLAQLQLEMQYLGRQIEESDKLILEIAKGMDSCRRLIAIPGIGPLTATATIAAIGNGVAFKKGRGFAAWLGVVPGEHSTGGKQKLTGHQQAWEQVSAQTVRAGSAHGLAAEEQAIGWPEYVVG

SEQ ID NO: 11509 - protein, 375 aa, unidentified
  source 1..375: note = protein_e432eb4
  REGION 4..160: note = RuvC_domain
  SITE 7: note = RuvC_P1
  SITE 58: note = RuvC_P2
  SITE 98: note = RuvC_P3
  SITE 100: note = RuvC_P4
  SITE 103: note = RuvC_P5
  REGION 264..351: note = Tnp_domain
  SITE 272: note = Tnp_P1
  SITE 302: note = Tnp_P2
  SITE 310: note = Tnp_P3
  SITE 311: note = Tnp_P4
  SITE 324: note = Tnp_P5
MIYVGINIAKFNHFSATISSSGEILIEPFKFSNGYDGFYLLLSNLAPLDQDSIIIGLESTAHYGDNLVRFLIYKDFKVRVLNPIMTSSMRKNNIRKTKTDKVDTFVIVKTVLMQNSLRFLTLKDLDYIELKELGRFRQKTIKQRTRLKIQLTSYLYQVFPELQYFFKSGLHQKSVYALLKEAPTPNAITSMHMTHLAHILENVSHGHFNKDTARELRILAQRSVGVNDSSFSIQITQTIEQIELLDSQLFHTELEMANLVTCLHSVIMTIPGIGSTNGGMILGEIGDIHRFSSPSKLLAFAGSNPSVYQFGNFQAKKTSMSKRGSRVLRYTLVNTAHNVVKNNATFKAYYDSKRDEGRSHYNVLGHCAGKLVRVI

SEQ ID NO: 11510 - protein, 312 aa, unidentified
  source 1..312: note = protein_db9a146
  REGION 6..161: note = RuvC_domain
  SITE 9: note = RuvC_P1
  SITE 60: note = RuvC_P2
  SITE 100: note = RuvC_P3
  SITE 102: note = RuvC_P4
  SITE 105: note = RuvC_P5
  REGION 265..309: note = Tnp_domain
  SITE 273: note = Tnp_P1
  SITE 303: note = Tnp_P2
MYSYFVGIDIAKHTHWASIMSSDGEIISDPFSFSNDIEGFKKFTSSLFSLPKEKILIGLESTAHYGENIISYLFSLDFNIGVINPIQTASLRKSNIRKTKNDKVDTFIIIKALTLNNYSLVTSRDINILKLKGLCRSRRNLVTMRSKTKIQLVSYVDQIFPKLSKFFKGNIHLNVSYQLLKQFSSPNEIKSLHLTRLTNILHNNSRGRYSKQDAIYLKQLANCSVGINNPSICLQIKHAISQIELYNLQIQEVENLYKQIIDEMNTKLLTIPGMSYNQAAVILSSIGDIKRFNKSCQILAYARFRSFCYSIW

SEQ ID NO: 11511 - protein, 360 aa, unidentified
  source 1..360: note = protein_303224f
  REGION 11..165: note = RuvC_domain
  SITE 14: note = RuvC_P1
  SITE 62: note = RuvC_P2
  SITE 102: note = RuvC_P3
  SITE 104: note = RuvC_P4
  SITE 107: note = RuvC_P5
  REGION 273..357: note = Tnp_domain
  SITE 281: note = Tnp_P1
  SITE 311: note = Tnp_P2
  SITE 319: note = Tnp_P3
  SITE 320: note = Tnp_P4
  SITE 332: note = Tnp_P5
MSQELSIDIFLGLDVGKSEHHACALDRDGNKVFDKPLPQLESELASVFHQLQEHGTVLVVVDQPNTIGALPIAVARACGCEVGYLPGLAMRKAADLYPGRAKTDKRDAFIIADTARTMPHTLRAVDRSNEVLSALKMLSGFDDDIARDCTRTVNRLRSILTQIYPSLERVFAGSTLTRTPVLDLLIHYKGPQGLKRAGYHRVLNWMIKHTRKDPTPLVDEIFAALKAQTVTVPGSDAAELVIPQLAANIKALKEQRNTIAEQVEGMLDDFPLCEVLMSIPGVGIKTAAQILLAIGDGSDFDSAGHLAAYAGIAPVTRRSGSSIRGEFPARSGNKRLKNALFYSAFAGYSQPRTITPVLRT

SEQ ID NO: 11512 - protein, 342 aa, unidentified
  source 1..342: note = protein_614fa62
  REGION 7..148: note = RuvC_domain
  SITE 10: note = RuvC_P1
  SITE 53: note = RuvC_P2
  SITE 88: note = RuvC_P3
  SITE 90: note = RuvC_P4
  SITE 93: note = RuvC_P5
  REGION 212..299: note = Tnp_domain
  SITE 220: note = Tnp_P1
  SITE 250: note = Tnp_P2
  SITE 258: note = Tnp_P3
  SITE 259: note = Tnp_P4
  SITE 271: note = Tnp_P5
MGQVVRVGLDIAKSVFQVHGVDTNGEVVLRRRLTRARVLPFFAGLGPCRIGIEACATAHFWAREIGRLGHDVKLMPPSYVKPYVKRQKNDSADAEAICEAVSRPSMRFVEAKTPTQQSTLVLHRTRLMLMRQRTQLSNAMRGHMAEFGVVAPIGRKGLQKLVLIIADEADERVPAAARACLRMLAGQLELVNAQVLDIDRRVMASARATDAGRRLMSIPGVGPVLASALVASVPDPFAFRNGRNLAAWIGLVPKQNSSGGKERLGGITKQGNRYLRQMLVLGAMAVIRYAERHGTRRPWLVKLMARRTTKVAAVALANKMARMAWAIMTSGQPYREPVLQAA

SEQ ID NO: 11513 - protein, 404 aa, unidentified
  source 1..404: note = protein_1860e04
  REGION 17..176: note = RuvC_domain
  SITE 20: note = RuvC_P1
  SITE 73: note = RuvC_P2
  SITE 114: note = RuvC_P3
  SITE 116: note = RuvC_P4
  SITE 119: note = RuvC_P5
  REGION 279..366: note = Tnp_domain
  SITE 287: note = Tnp_P1
  SITE 317: note = Tnp_P2
  SITE 325: note = Tnp_P3
  SITE 326: note = Tnp_P4
  SITE 339: note = Tnp_P5
MQHHIFSLEVFVMMISVGVDVSKDKHDCFIQSSEGEVLADVFTIPNNAEGFHFLLQRIRDCTTPQDKIKVGLEATGHYSYNLLGFLLDNGLATYVLNPLRTNLYRKGFSLRKTKTDRVDARTIAAMLLSDTGLKPYTNTAYHNEELKSLTRYRFDKVKERAKLKSSISRLVCILFPELEKLVPSLHITSVYALLEEFPGAKQIANAHLARLKALLESSSRGRYKRDMTVEIRDAARNSIGSRMPAKSLELQHTIRLIRELDVEIAEIEEQIQSLMEELNSPITTIPGLGFRMAAMILAEVGDFTRFDSPDKLLAFAGMSPSTYQSGQLKNCYPHMEKRGSRYLRYALYNATKYVCHWDPTFAAYLAKKRAEGKHYNIAISHAAKKLVRLIFAMEKSRTTYHLAT

SEQ ID NO: 11514 - protein, 341 aa, unidentified
  source 1..341: note = protein_4f1f7b9
  REGION 6..148: note = RuvC_domain
  SITE 9: note = RuvC_P1
  SITE 52: note = RuvC_P2
  SITE 87: note = RuvC_P3
  SITE 89: note = RuvC_P4
  SITE 92: note = RuvC_P5
  REGION 211..300: note = Tnp_domain
  SITE 219: note = Tnp_P1
  SITE 249: note = Tnp_P2
  SITE 257: note = Tnp_P3
  SITE 258: note = Tnp_P4
  SITE 270: note = Tnp_P5
MNIKRVGIDLAKDVFQIHGVDSQEKVIVRKQLRRSQMLAYFGKIQPCLIGMEACGGAHYWARELQKQGHTVKLMAPQFVKPYVKSNKNDANDAEAICEAVARPTMRFVAIKTLAQQDIQAIHRIRSELIRHRTAKVNQIRGLLAEYGLTVGRRVDVLRNALPLLLEDAINGLTLDFRMLLEDLRQDLVQLDQRVDDMDAKIKLLASSHSEAKRLLAIPGIGPITATALICAIGDGSQFKRGRDFAAWLGLTPKQHSSGGKERLLGISKRGDSYLRTLLIHGARSVLRVAGNKDDPRSRWLQSLCARRNKNIAAVALANKNARIVWALIARQTDFLPEAKPA

SEQ ID NO: 11515 - protein, 318 aa, unidentified
  source 1..318: note = protein_fe2ffda
  REGION 8..150: note = RuvC_domain
  SITE 11: note = RuvC_P1
  SITE 55: note = RuvC_P2
  SITE 95: note = RuvC_P3
  SITE 97: note = RuvC_P4
  SITE 100: note = RuvC_P5
  REGION 190..274: note = Tnp_domain
  SITE 198: note = Tnp_P1
  SITE 227: note = Tnp_P2
  SITE 235: note = Tnp_P3
  SITE 236: note = Tnp_P4
  SITE 247: note = Tnp_P5
MENTSQWIGIDVSKATLDVYIRPIGKALKVANTESGIVDLVEQLLSYDLNIIVIEATGGLETELIIQLQAALLPVALINPRQGRDFAKATGKLAKTDAIDAQILAHFGEAMKPQILAIESESARQLSELISRRRQLVEMQTAEKNRSARARGKALLDVEEHIKHLDERLEKLNQEIEQLTQNNQQWIDKANLLKTTPGIGKVISTTLVSDLPELGQLTSKQISRLVGVAPINHDSGQHKGKRMINGGRAHVRATLYMGALVAIRHNPIIKAFYDRLVERGKPKKLAITACVHKMLVILNAMVRESKPWSAAQDNLQTT

SEQ ID NO: 11516 - protein, 415 aa, unidentified
  source 1..415: note = protein_c5d056e
  REGION 11..159: note = RuvC_domain
  SITE 14: note = RuvC_P1
  SITE 65: note = RuvC_P2
  SITE 99: note = RuvC_P3
  SITE 101: note = RuvC_P4
  SITE 104: note = RuvC_P5
  REGION 255..344: note = Tnp_domain
  SITE 263: note = Tnp_P1
  SITE 295: note = Tnp_P2
  SITE 303: note = Tnp_P3
  SITE 304: note = Tnp_P4
  SITE 316: note = Tnp_P5
MALKIVYKICCGIDVHKTFVVACIASTDKHGVTSYERHRFSTYTKGLKNLLQWLLEHNCKDVCMESTGKYWIPVYNILEKDCSIVLAHPKYVKAIRGKKTDKKDAKWIADLFKHDLVAGSFMPPADIRQLRDLMRYRFKLTCFKSSEKNRLQNCLTVSNIQLGNVVSDTFGKSAQAILDKILENPEDTSFDLEPLVFKSLKKKLPELRDAIDGYITPEQAGKLKIIKAHYESLESRKAELEELILALAAPYQQELAILQTAPGISSDFTAIGIISEIGTNMEAFPSAKHLCSWAGLAPTNNESAGKKKSVRVSKAGCYIKPLLVQCANAVVKSSKHPEMRNRYLRLKKRRGHKKAIIAIARMLLTALYHMLKNGENYNAELYRKSDLPPVDREITVEQAILIARNQGYKIKSATA

SEQ ID NO: 11517 - protein, 325 aa, unidentified
  source 1..325: note = protein_cf0e426
  REGION 6..157: note = RuvC_domain
  SITE 9: note = RuvC_P1
  SITE 55: note = RuvC_P2
  SITE 93: note = RuvC_P3
  SITE 95: note = RuvC_P4
  SITE 98: note = RuvC_P5
  REGION 197..284: note = Tnp_domain
  SITE 205: note = Tnp_P1
  SITE 235: note = Tnp_P2
  SITE 243: note = Tnp_P3
  SITE 244: note = Tnp_P4
  SITE 257: note = Tnp_P5
MEKIVIGIDVSKLTLDICIQENGVNRFDTIANTEKAIKSFLKQFVKRQNILIGMENTGRFNILLYNVLIQHSFAVYVINPLHLKKSMGLVRGKNDKIDSERIAVFLLKNYMDLQQWKPNSKVIEKIKLLNAERKHRVKIRAGLLAQAKDEQFLKSTMDKAVLRLNTKLIDVLTKQINEIEERIYQLINEDEQLHNHYKRIQSIPGVGKVLAFNMLIKTDGFTTINTPRQMACYAGIAPFDFQSGTSIRRKPKVSSMADKDLKKLLHLAAMSAIRLDNDLAIYYHRKVEEGKNKMSVLNAVRNKIIHRIYALIKNQNIYKNNLVLS

SEQ ID NO: 11518 - protein, 313 aa, unidentified
  source 1..313: note = protein_e8c63b4
  REGION 8..150: note = RuvC_domain
  SITE 11: note = RuvC_P1
  SITE 53: note = RuvC_P2
  SITE 93: note = RuvC_P3
  SITE 95: note = RuvC_P4
  SITE 98: note = RuvC_P5
  REGION 189..273: note = Tnp_domain
  SITE 197: note = Tnp_P1
  SITE 226: note = Tnp_P2
  SITE 234: note = Tnp_P3
  SITE 235: note = Tnp_P4
  SITE 246: note = Tnp_P5
MIIPLRCVGIDVSKHHLDIFDEAIGASERIDNATQAITQLVARWRCDTLVVFEATGVYDLELREALRQAGVRFARINPARARDFARASGQLAKTDPIDARMLAAFARAMTPATEQVATPARNALARLAKRRDQLVSMRAQEKNRRSEAEDRAMAERIGRLIAVLDDEIAEIEAEISALIKAEQEIAEDAQLMRSLPGIGPVACMQLLAQMPELGRVGPKQVAALAGLAPFNVDSGTYRGKRKIGGGRKRIRDALYMAALNAVRRADPFKAFYERLRKAGKPAKLALIAVARKLLTVLNAMMRDRKPYMIAPST

SEQ ID NO: 11519 - protein, 293 aa, unidentified
  source 1..293: note = protein_02d8d27
  REGION 6..101: note = RuvC_domain
  SITE 41: note = RuvC_P3
  SITE 43: note = RuvC_P4
  SITE 46: note = RuvC_P5
  REGION 164..252: note = Tnp_domain
  SITE 172: note = Tnp_P1
  SITE 202: note = Tnp_P2
  SITE 210: note = Tnp_P3
  SITE 211: note = Tnp_P4
  SITE 223: note = Tnp_P5
MPDWHGGLWGLSALARELKKLGHEVRLLQARFIKAFVMGNKNDVMDARAIWMAVQQPSKEIAVKTEEQQSVLVLHRSRRQLVKFRTAQINALHGTLLEFGETLHKGRAAMDRELPAALERMKTKLPPYLITVLEDQYTRLSELDMLIDDLEKQLNSVARQSETCKRLMEIPGVGPLIATAAVATMGKASAFKSGREFAAYVGLVPKQTGSGGKVRMLGISKRGDTYLRTLFIHGARSAALLTKEPDPWITELKKRRPTGVAIVAMANKLARTVWAIVAHDRKYDKNHVSIRPY

SEQ ID NO: 11520 - protein, 396 aa, unidentified
  source 1..396: note = protein_4707936
  REGION 6..160: note = RuvC_domain
  SITE 9: note = RuvC_P1
  SITE 58: note = RuvC_P2
  SITE 98: note = RuvC_P3
  SITE 100: note = RuvC_P4
  SITE 103: note = RuvC_P5
  REGION 265..352: note = Tnp_domain
  SITE 273: note = Tnp_P1
  SITE 304: note = Tnp_P2
  SITE 312: note = Tnp_P3
  SITE 313: note = Tnp_P4
  SITE 325: note = Tnp_P5
MPQIWAGVDIGKEHHHCVVIDAQGNRLLSRRVLNDETVLLELIADVLALSEDVLWAVDINHGGAALLIGLLLDHGQPMAYLTGLAVHQASAGYRGQGKTDAKDAFVIADQARMRNDLGRLRPGDEIAVDLRTLTRRRTDLVCDRTRQINRLRAQLLEIFPALERTLTVTNRGPIMLLTAYQTPAAIRRSGVKRIETWLRNRKVRNAAAIAATAVEAAVGQQASLPGEKLAAAMVARLAKAIIALDEEIAELDALIEARFREHPHAEIIRSMPGMGTLLGAEFIAATGGDMAAFGTPDRLAGFAGLAPVPRDSGRVSGNMRRPHRYHRGLLRAFYLSSMASIKSCPASRVYYQRKRHEGKGHKQAVLALARRRANVLWAMIRDGAFYQPAPSVTLAA

SEQ ID NO: 11521 - protein, 398 aa, unidentified
  source 1..398: note = protein_8566a05
  REGION 6..162: note = RuvC_domain
  SITE 9: note = RuvC_P1
  SITE 60: note = RuvC_P2
  SITE 100: note = RuvC_P3
  SITE 102: note = RuvC_P4
  SITE 105: note = RuvC_P5
  REGION 267..354: note = Tnp_domain
  SITE 275: note = Tnp_P1
  SITE 306: note = Tnp_P2
  SITE 314: note = Tnp_P3
  SITE 315: note = Tnp_P4
  SITE 327: note = Tnp_P5
MSRIWAGTDCGKTHHHTLVLDVEGNTLLSRRVANDEPELLQLVADVLDLADGGAVTWAMDMTGGETGLLINLLANHGQELLYIPGVAVNRAADSYRGQGKTDARDAHVIADQARMRRDLLPVRLDDEGIIELRLLTEHRADLVGERTRVTNRLRALLTSMFPALERTLDLGNAGPLRLLTGYQTPAAIRRSGTKRLTTWLRNRKVYGAEALAAKTVEAAERQHTAVAGEKAIAQMVHTLAEEVIALNEKIAETDKLVEGRFREHELAEVITSMPGVGSTLGAEFLAAIGGSLAAFPTADRLAAFAGVTPAPKDSGKVSGNLHRPQRYHRGLQRVFYTSALISIQRDPNSRTYYDRKRAEGKRHVQAVLALARRRVNVLWALIRDGRCYQIAPPVTEAA

SEQ ID NO: 11522 - protein, 309 aa, unidentified
  source 1..309: note = protein_3d517cf
  REGION 5..155: note = RuvC_domain
  SITE 8: note = RuvC_P1
  SITE 52: note = RuvC_P2
  SITE 92: note = RuvC_P3
  SITE 94: note = RuvC_P4
  SITE 97: note = RuvC_P5
  REGION 186..270: note = Tnp_domain
  SITE 194: note = Tnp_P1
  SITE 223: note = Tnp_P2
  SITE 231: note = Tnp_P3
  SITE 232: note = Tnp_P4
  SITE 243: note = Tnp_P5
MIAYAGIDISKESLQVALYPLSENLSVPNTAEGAARILDWFAGIQVERVLVEATGGYEKRVVKALAKAGFKVLRINPVRAHQFARAMGMRAKTDPIDARMLAMFAASLEREVAVVPDDAREALSELVSQREAFIQQRDDNRRRIQQAQLPEVLDAYRGLNDKLNTMIRSLDKQITVRSQLIDAPLMERLRAVKGIGPVTIASLFCYLPELGDMSRSQVAALVGVAPYNNDSGAKRGVRRIYGGRSKLRRVVYMCVLAMVRHNEDFKTRYANLRARGKCAKVALVACMRVLMVRLNAMVRDNTPWRDQPT

SEQ ID NO: 11523 - protein, 344 aa, unidentified
  source 1..344: note = protein_59c3ca5
  REGION 6..147: note = RuvC_domain
  SITE 9: note = RuvC_P1
  SITE 52: note = RuvC_P2
  SITE 87: note = RuvC_P3
  SITE 89: note = RuvC_P4
  SITE 92: note = RuvC_P5
  REGION 211..297: note = Tnp_domain
  SITE 219: note = Tnp_P1
  SITE 249: note = Tnp_P2
  SITE 257: note = Tnp_P3
  SITE 258: note = Tnp_P4
  SITE 270: note = Tnp_P5
MQIRSIGIDLGKTTFHLIALGSRAQVVARKKFSRSQLLAYTANLPSALISMEAGVGSHFLGRALREQGHEVRLIPAQFVRPFVKSNKNDYRDAEAIAEAVERENMRFVAIKTEDQLDLQALHRVRDRLVARRTSVINQIRAFLLERGISFRKGPASLRRQLPEILENGEEQLSPRMRGLLDFLWQEWKGLQAQIESLNEDLERIASNDPACVRLQQIPGVGPLIATAVVSAIGNGAAFHKGREFAAWLGLVPRQWSTGGKPKLLGISKRGNPYLRKMFIHGARAAVLRVKRERSSLGKWMGQLETRTARNVVIVATANKLARISWAVLASGNNYHPLPKAAFSN

SEQ ID NO: 11524 - protein, 396 aa, unidentified
  source 1..396: note = protein_d911f90
  REGION 4..158: note = RuvC_domain
  SITE 7: note = RuvC_P1
  SITE 59: note = RuvC_P2
  SITE 99: note = RuvC_P3
  SITE 101: note = RuvC_P4
  SITE 104: note = RuvC_P5
  REGION 264..354: note = Tnp_domain
  SITE 272: note = Tnp_P1
  SITE 302: note = Tnp_P2
  SITE 310: note = Tnp_P3
  SITE 311: note = Tnp_P4
  SITE 327: note = Tnp_P5
MTMIGIDIGGRTHVVARCRDGQARADREILRVSQDRAGFATLDAWLKRQPEDVTLITMESSGHYWMPLASHLRRREIPVAVVNPLAAKYFAKSRLGRTKSDPADARSLAEMAMRDTPPAREPLAGVELRQAARFAMTLVTEQAKVCQRLIRLVDLGFPGLGELFDDPTCRTAREVLRIAPTARAATRRRTATLANANASPGHRRLGTAKAERLQAAAADSIAVPELDAEVAFEVGLLLDQFDLLERQIEEADRRVATLLDGETARRLQTIPGVGPSIVATLLAEIGDIERFTDFDQLLAYAGVHPAERSSGNKGSNPETSWHMSKAGNSHLRAAAYRMAVVGVQHNPVIAVHYARKRAAGKSKMNALGHCMRKALSIVWGVWRNGHDFDPNWGVEA

SEQ ID NO: 11525 - protein, 407 aa, unidentified
  source 1..407: note = protein_241594e
  REGION 6..165: note = RuvC_domain
  SITE 9: note = RuvC_P1
  SITE 62: note = RuvC_P2
  SITE 102: note = RuvC_P3
  SITE 104: note = RuvC_P4
  SITE 107: note = RuvC_P5
  REGION 273..359: note = Tnp_domain
  SITE 281: note = Tnp_P1
  SITE 312: note = Tnp_P2
  SITE 320: note = Tnp_P3
  SITE 321: note = Tnp_P4
MLRLFVGDDWAEDHHDVEVMDASGRRLVKARLPEGVDGIARLHAMIGEHSGDDPDGIEVLVGIETDRGPWVAALVAAGYTVFAINPLQASRFRARHAVSGAKSDAADAHMLADMVRTDAHQLRPVAGDTATAEAVKVVTRTHKTLIWERTRHTQRLRHALRDYFPAALVAFDDLDAADTLELLAKAPTPAQATRLTISQISAALRRARRRDIPAKAAAIQAVLRAEHLGQPDVVTGAYAVSVRALVAVLTVLDGQVKALQGQVEEHFGRHPAAEIIRSQPGLGPVLGARVLAEFGDDPDRYTTAKARKNYAGTSPITRASGKKRTVAARYVHNDRLVDALMTQAFSSLQASPGARAYYDRQRARGASHNAALRQLANRLVGILHGCIKTGSPYDETTAWPSAEQIAA

SEQ ID NO: 11526 - protein, 338 aa, unidentified
  source 1..338: note = protein_df3b170
  REGION 6..152: note = RuvC_domain
  SITE 9: note = RuvC_P1
  SITE 53: note = RuvC_P2
  SITE 91: note = RuvC_P3
  SITE 93: note = RuvC_P4
  SITE 96: note = RuvC_P5
  REGION 211..298: note = Tnp_domain
  SITE 219: note = Tnp_P1
  SITE 249: note = Tnp_P2
  SITE 257: note = Tnp_P3
  SITE 258: note = Tnp_P4
  SITE 270: note = Tnp_P5
MAILTVGIDLAKNVFAVHGVNEAGKAELVRPTVARDKLHELMSSLPPCIIGMEACSGAHHWARLFQASGHTVRLVAPKFVTPYRMSGRRGKNDAADAAAICEAVQRPHMRFVPAKSLQQQSHLMVHRARQGFVEQRTATLNRIRGLLSEFGIVLPLKAATVRRRACECLEDLPGYANTVIGDLLSEVSRLDERIAQYDQHIKAMAKEDARAKRLMQLSGVGETTATCLLAMIGSGHDFDCGRQFAAWLGLAPGQYSSGGKTRLGRITKAGDAYLRTLLILGARALLVAAKNKTDAVSRWAVALAERRGYWKAVVAIAAKNARMAWAVLRKGEDFVLPA

SEQ ID NO: 11527 - protein, 423 aa, unidentified
  source 1..423: note = protein_c1ae03f
  REGION 33..187: note = RuvC_domain
  SITE 36: note = RuvC_P1
  SITE 84: note = RuvC_P2
  SITE 124: note = RuvC_P3
  SITE 126: note = RuvC_P4
  SITE 129: note = RuvC_P5
  REGION 294..378: note = Tnp_domain
  SITE 302: note = Tnp_P1
  SITE 331: note = Tnp_P2
  SITE 339: note = Tnp_P3
  SITE 340: note = Tnp_P4
  SITE 352: note = Tnp_P5
MDVRLDTAALTNITVQRREYIMMENYESADVFVGVDVGKGEHHAVAYDRAGKVLFDKALPNDETKLREVIRKLKKHGQVLFVVDQPATIGALPVAVAQAENVLVAYLPGLAMRRIADLHPGEAKTDARDAAIIAQAARTLPHALRSIQLADEQVAELSMLCGFDDDVLGQIVATSNRIRGLLTQIHPALERVLGPHLAHPAVLDLLQKYPSPASMKTAGTLRLGNRLIKRAPRMGRRLAAEITQALSEQTVVVVGTNAANTVLPRLAEQLAALRQQREEIAVEVEKLVDAHPLQPILISMPGVGVRTAARLLTEVSGKDFATAGHLASYAGLAPVTRRSGSSIRGEHSSRRGNKVLKRALFLSAFAALHDPASRAYYDRKIAEGKRHNQALLALARRRCNVIYAMMRDGTLYENEPKKHVLAA

SEQ ID NO: 11528 - protein, 407 aa, unidentified
  source 1..407: note = protein_4b045ec
  REGION 4..160: note = RuvC_domain
  SITE 7: note = RuvC_P1
  SITE 57: note = RuvC_P2
  SITE 97: note = RuvC_P3
  SITE 99: note = RuvC_P4
  SITE 102: note = RuvC_P5
  REGION 274..361: note = Tnp_domain
  SITE 282: note = Tnp_P1
  SITE 312: note = Tnp_P2
  SITE 320: note = Tnp_P3
  SITE 321: note = Tnp_P4
  SITE 334: note = Tnp_P5
MNAVGIDVSKGKSMMMALRPMNKVVLKPKEYPHTGVGLEQMAVAILGLGEDTRVLMEATGWYHEPVAAALHGYGIHVTVMNPLFIKQSGGGSIRKVKTDKADARKIAKYALDNWAALREYAPMEAIREQLKLSSRQYNLYMKNVVALQNNLISLTDKVFPGVNELFSSPDRADGSQKWVDFVMTFWHCECVNLASEMAFTERYRKWCKRKGYHFSQGKAAELYMDSMGYITTLPRNSNTKLLITTAAKELASAKATLAVLRAEMDRLARQLPEYDTVRALYGVGERTAPQLIAEIGDVRRFPRRSSIVSFAGVDPAVDESGKHVSKSNPTTKRGSPHLRKTLYQIVCTYLKKSPADEPVYQFLDKKRAEGKPYFVYMTAAQNKFLRIYYARVKESLAAADVREPDEN

SEQ ID NO: 11529 - protein, 401 aa, unidentified
  source 1..401: note = protein_83cf144
  REGION 5..164: note = RuvC_domain
  SITE 8: note = RuvC_P1
  SITE 62: note = RuvC_P2
  SITE 103: note = RuvC_P3
  SITE 105: note = RuvC_P4
  SITE 108: note = RuvC_P5
  REGION 274..363: note = Tnp_domain
  SITE 282: note = Tnp_P1
  SITE 312: note = Tnp_P2
  SITE 320: note = Tnp_P3
  SITE 321: note = Tnp_P4
  SITE 334: note = Tnp_P5
MNPVIGLDIAKGESQGQAFLDKGRPYGKSFTVHHTQEGLEAFHSFLKLIEEESKQQPMVILESTGHYHLPVTRFLEDHNFLFVVVNPILSYQAKKSSSLRKVKTDAVDAYALCELFYKEDFQHHKIRGIQLLNLRNLTRQHDAVTGLYIQIKLQFQAVLDQVFPEYKGVFGDLHSAVSLRTLLEYPTSDAVLKAGKAKISEKIASLCMRRSESWAMDKADSLLAAAERNPFRKAPFQSHLISLEMYVSMLLHYREHLTALEKQIDALANEIEEYKIIQSIPGIGEKIAATIISEVGEIDRFNHPKKLVAFAGVDPSVHMSGKFTATINRITKRGSSRLRHTLFLAVLCSLRRSGSKKLKAYYDKKISEGKPHKVAMIACVNKLLHWIFALLRRKESFLDMA

SEQ ID NO: 11530 - protein, 345 aa, unidentified
  source 1..345: note = protein_527c93c
  REGION 6..147: note = RuvC_domain
  SITE 9: note = RuvC_P1
  SITE 52: note = RuvC_P2
  SITE 87: note = RuvC_P3
  SITE 89: note = RuvC_P4
  SITE 92: note = RuvC_P5
  REGION 211..297: note = Tnp_domain
  SITE 219: note = Tnp_P1
  SITE 249: note = Tnp_P2
  SITE 257: note = Tnp_P3
  SITE 258: note = Tnp_P4
  SITE 270: note = Tnp_P5
MNVTAVVIDLAKNVLQVHGIDARGKVVLRRQLRRDLVMAFFAQLPPCLIGMEACASAHHWGRSLERFGHTVRLMAAQFVKPYVKANKNDVADAEAICEAVTRPNMRFVPIKSIEQQAVLSLHRVRQGFVKARTAQANQIRGLLGEFGLIIPKGIWHIAQRVPELLQDASNELPLALRQLIDRLTCHLKELDRQVRELEREILAWHRTSDLSRKLEQIPGIGPLAATALVASIANARSFDNGRQVSAWLGLVPRQKSSGGKPTLLGISKRGDVYLRTLLIHGARSAILAARRRNDSKNGWLTALLNRRHPNIAAVALAYKNVRTVWALLAHGRDFRPDYVPLRTAA

SEQ ID NO: 11531 - protein, 408 aa, unidentified
  source 1..408: note = protein_4456f09
  REGION 11..167: note = RuvC_domain
  SITE 14: note = RuvC_P1
  SITE 63: note = RuvC_P2
  SITE 104: note = RuvC_P3
  SITE 106: note = RuvC_P4
  SITE 109: note = RuvC_P5
  REGION 274..358: note = Tnp_domain
  SITE 282: note = Tnp_P1
  SITE 311: note = Tnp_P2
  SITE 319: note = Tnp_P3
  SITE 320: note = Tnp_P4
  SITE 332: note = Tnp_P5
MSAQQTPAVFIGLDVGKSEHHAVALTAAGKKVYDKALPNDQTRLREVLAELTTTHGPTLLVVDQPATIGALPVAVAQTCEGVEVAYLPGLAMRRIADLHPGAAKTDAKDAAIIAEAARAMPHTLRSIRADEEQIAELAMLAGFDDDLVAQLTATSNRLRGLLTQIHPSLERVLGPKITHPAVADLLSRYPTPAQLKTAGPGHVRARLRKHAPRLAASLTEQIFHALDEQSVVVAGTQAAATVIPILAEQLAGLTRQRAGLASQVEAVVEAHPLHPVLISMPGVGIRTAARILTEVVGKDFADAGHLASYAGIAPVTRRSGTSIRGERTPRGGNKRLKRALFLSAFASLSHPASRAYYERKRAQGKRHNQALIALARRRTDVLYAMLRDGTLYQDPGTPTATPSVALAA

SEQ ID NO: 11532 - protein, 323 aa, unidentified
  source 1..323: note = protein_da9767d
  REGION 5..155: note = RuvC_domain
  SITE 8: note = RuvC_P1
  SITE 58: note = RuvC_P2
  SITE 98: note = RuvC_P3
  SITE 100: note = RuvC_P4
  SITE 103: note = RuvC_P5
  REGION 195..281: note = Tnp_domain
  SITE 203: note = Tnp_P1
  SITE 233: note = Tnp_P2
  SITE 241: note = Tnp_P3
  SITE 242: note = Tnp_P4
  SITE 254: note = Tnp_P5
MTAVVGVDIAKRTFDLAILQPNGKHRTKSKLGNDTAGFAVFADWLQRHAEPGAWVVMEATGIYHEALAEHFHGLGYRIAVLNPAQIARYAQSQLQRSKTDELDAKLIATYGQLHVDHLRAWQPEPMSVRQLRALTRRLEDLQSLRQMELNRLDVSPTNVQDSIQAVLQRLDEQIAWTIEQIKRHIDDDPDLRGKRDLLVSIDGIAEKTAALILAELGHIQRFADARAVTAFAGLDPRLQESGVYRGHTSISRTGSARLRTALYLPAVTALTYNPAIKAQAERLRAKGKKGKQTVCAAMRKLLGIAYGVLKSGKPFDPVLAIAR

SEQ ID NO: 11533 - protein, 377 aa, unidentified
  source 1..377: note = protein_6c71ae9
  REGION 4..163: note = RuvC_domain
  SITE 7: note = RuvC_P1
  SITE 60: note = RuvC_P2
  SITE 101: note = RuvC_P3
  SITE 103: note = RuvC_P4
  SITE 106: note = RuvC_P5
  REGION 266..317: note = Tnp_domain
  SITE 274: note = Tnp_P1
  SITE 304: note = Tnp_P2
MICVGIDVAKDKHDCFILSSEGEALADVFTIQNNAEGFDRLLQTIRRCTRPEDKIKVGLEATGHYSYNILGFLLDKGLPTYVINPLHTNLYRKSLSLRKTKTDRVDARTIAAMLMSDVDLKSYTDTAYHNEELKSLTRYRFDKVRERAKLKQSVFRLVTILFPELEKLVPTLHMASVYALLSEFPGAKQVAEAHLTHLKAVLYGASKGRYGRDMATTLRDAARCSVGSVMPAKSLELQHTIRLIRELDAEIEDIETAIQSMMDEIQSPITTIPGIGVRMGAMILAEIGDFSRFDSPDKILAYAACRPLLTSPGIFLCLEPIRTWKSEAPGICATHFTTPPNMFAFGTRPLLLTSLRSGARESTTMLQFLMRQRNWCV

SEQ ID NO: 11534 - protein, 315 aa, unidentified
  source 1..315: note = protein_6d840b1
  REGION 5..152: note = RuvC_domain
  SITE 8: note = RuvC_P1
  SITE 52: note = RuvC_P2
  SITE 92: note = RuvC_P3
  SITE 94: note = RuvC_P4
  SITE 97: note = RuvC_P5
  REGION 186..270: note = Tnp_domain
  SITE 194: note = Tnp_P1
  SITE 223: note = Tnp_P2
  SITE 231: note = Tnp_P3
  SITE 232: note = Tnp_P4
  SITE 243: note = Tnp_P5
MASFLGIDVSSRSLDALVRPQGIKIHVSNDRAGFEELQRSLGGRSIKRVLLEATGGYERDVMHFLQDGGYKVIRVNPRRARAFAESIGVKAKTDAIDAEVLAHYAEVIPDQSTLRISPERALLRELLQQRDRLVQQRDDDLRRLKQAQSRVVSDFLKANLQHFKSQIKLVEQAISQQAEALKDERVTQLVQVKGIGLVTAGKLVTLLPELGRVESREIASLVGVAPFNHDSGKFVGKRSISGGRFEARRSLYMSCLVAMKYNPALKARYEALRERGKVAKVAIVACMRVFLVRLNAMLRTGEPWLDLVLPQPKRT

SEQ ID NO: 11535 - protein, 341 aa, unidentified
  source 1..341: note = protein_aee3633
  REGION 7..148: note = RuvC_domain
  SITE 10: note = RuvC_P1
  SITE 53: note = RuvC_P2
  SITE 88: note = RuvC_P3
  SITE 90: note = RuvC_P4
  SITE 93: note = RuvC_P5
  REGION 211..298: note = Tnp_domain
  SITE 219: note = Tnp_P1
  SITE 249: note = Tnp_P2
  SITE 257: note = Tnp_P3
  SITE 258: note = Tnp_P4
  SITE 270: note = Tnp_P5
MDQAVTIGLDIAKSVFQVHGVDRSGTVVVRRQVRRAQLLPFFAKLPACLIGIEACATAHHWARELIKLGHQVRLMPPSYVKPYVKRQKNDAADAEAICEAVTRPTMRFVEVKSVDQQGILVLHRVRLMLMRQRVQLSNAIRGHMAEFGLAAPIGREGLGALIRLIADKDERVPAEAQMCLGRLAAQLALINDQILETDRRIRTNARATEIGRRLMGVPGVGPLLASALVATIPDPKAFRSGRNWAAWIGLVPRQNSSGGKERLGGITKQGDRYLRQLLVVGALAVVRYAQRNGTRRPWLVQLLARRTTKIATVALANKTARMVWAIMTTGEAYREPVSRAA

SEQ ID NO: 11536 - protein, 387 aa, unidentified
  source 1..387: note = protein_201be81
  REGION 4..159: note = RuvC_domain
  SITE 7: note = RuvC_P1
  SITE 58: note = RuvC_P2
  SITE 98: note = RuvC_P3
  SITE 100: note = RuvC_P4
  SITE 103: note = RuvC_P5
  REGION 263..350: note = Tnp_domain
  SITE 271: note = Tnp_P1
  SITE 301: note = Tnp_P2
  SITE 309: note = Tnp_P3
  SITE 310: note = Tnp_P4
  SITE 323: note = Tnp_P5
MYYAGIDIAKLNHFASVVSADGEVLVKPFKFTNDNDGFCRLLSALASYDRSSLIIGLESTAHYADNLVEFLVSKRYQVCVINPIQTSTMRKNNIRKTKTDKVDTLVIARTLITQPHRFFSQEDIDLMHFKNLGRFRQKSIKERTRLKIQLTAYVDRVFPELQYFFKSGLHQKAVYALLKEAPTPELIASMHLTHLVHLLEVASHGHFNKEQAKELRILAQKSVGSSDRALSLQVTQSVEQIELLDRQVKDIESQMTEIMLGLDSVIMTIPGIGYVNGGMILGEIGDIHRFQKPCQLLAFAGLDPSVYQSGNFNASHTRMSKRGSRVLRYALINAAHNVVKNNSTFKAYYDAKIAEGRTHYNALGHCAGKLVRVIFKLLTDDVAFNLE

SEQ ID NO: 11537 - protein, 343 aa, unidentified
  source 1..343: note = protein_67d77ad
  REGION 7..149: note = RuvC_domain
  SITE 10: note = RuvC_P1
  SITE 53: note = RuvC_P2
  SITE 88: note = RuvC_P3
  SITE 90: note = RuvC_P4
  SITE 93: note = RuvC_P5
  REGION 212..304: note = Tnp_domain
  SITE 220: note = Tnp_P1
  SITE 250: note = Tnp_P2
  SITE 258: note = Tnp_P3
  SITE 259: note = Tnp_P4
  SITE 271: note = Tnp_P5
MQAVTTIGFDIAKSVFQVHGIDADGQGVIRQRLKRSRVLGFFRKLSPCVVGIEACASSHHWSRELQALGHTVRLMPPAYVKPYVKRQKNDAADAEAICEAVQRPSMRFVPTKTPDQQACLMLHRTRHLFIRQQTALINAIRAHLAEFGIVAPVGRNGVEKLLDVVADPDDGRVPEIARECLEALGRQLWQLKRQILTFDQHINAWHRSNETSRRLDELPGVGPALATALVASIPDPRAFRSGRDFSAWIGLVPKQNSSGGRERLGNITKQGDRYLRSLFCAGALAVIRYAKIHGTKHRPWLAKLLERRPTKVAAIAFANKIARMAWAMMAKGERYREPVALAR

SEQ ID NO: 11538 - protein, 349 aa, unidentified
  source 1..349: note = protein_e7f4fb0
  REGION 7..149: note = RuvC_domain
  SITE 10: note = RuvC_P1
  SITE 53: note = RuvC_P2
  SITE 88: note = RuvC_P3
  SITE 90: note = RuvC_P4
  SITE 93: note = RuvC_P5
  REGION 212..300: note = Tnp_domain
  SITE 220: note = Tnp_P1
  SITE 250: note = Tnp_P2
  SITE 258: note = Tnp_P3
  SITE 259: note = Tnp_P4
  SITE 271: note = Tnp_P5
MSEIATIGLDIAKNVFQLHGVDRTGKIVLRRTLRRSQVPGFFSTLPSCLIGLEACATAHHWARTLIAFGHEVRLIPPAYVKPYLRRQKNDAADAAAICEAVTRPSMRFVPVKTPQQQSTLMLHGARDLLIGQRTALINALRGHFAELGIVVAQGARNTRQLIAFLHEEANPDFPAAARTALQPLAAMLLGIEAQIAKLDKAILAAHRSDPVSLRLATIPGIGPIVASCLSASISDASLFQGSREFAAYLGLVPRQNSTGGKPRLGSISKMGNRHLRKLLVVGAHAALYSMKSGKTRTVLADWARSLLVKKPFKVVAVALANKIARIAWAVMAKSTAYEPGSTGAAASAA

SEQ ID NO: 11539 - protein, 403 aa, unidentified
  source 1..403: note = protein_7359fc9
  REGION 4..160: note = RuvC_domain
  SITE 7: note = RuvC_P1
  SITE 57: note = RuvC_P2
  SITE 97: note = RuvC_P3
  SITE 99: note = RuvC_P4
  SITE 102: note = RuvC_P5
  REGION 274..361: note = Tnp_domain
  SITE 282: note = Tnp_P1
  SITE 312: note = Tnp_P2
  SITE 320: note = Tnp_P3
  SITE 321: note = Tnp_P4
  SITE 334: note = Tnp_P5
MNSVGIDISKGRSTIAVMRPFGEVVISPFEVRHTDSELSELARQLKSLNGETRVVMEATGNYHASVAKLLHDAGLYVSVINAKLVHGYGNNDLRRVKTDRKDAVKLANYGLDRWLTLPRYVPEEDTRLLLKNCYRQYRQYSKVQTVLKNNLISLLDTVFPNVNRLFSSPARADGSEKWVDFVAKFWHCECICERSEKAFVSKYQKWCKKHGYNFGEEKACAIYAEASGHIGVMPKSETTKLLVEQAVSQLRATSAALAALKHEMQSLASVLPEYPAVMDMFGVGPTLGPQLIAEIGDVRRFYSKKALVAYAGLDAPPNDSGDVTGRHKSMSKIGASSLRRTLFLVMSVYLQNAPLDEPVYQFMDKKRAEGKPYRVYMMASANKFLRIYYATVKAYLESLEHTA

SEQ ID NO: 11540 - protein, 394 aa, unidentified
  source 1..394: note = protein_fd765b7
  REGION 26..177: note = RuvC_domain
  SITE 29: note = RuvC_P1
  SITE 80: note = RuvC_P2
  SITE 117: note = RuvC_P3
  SITE 119: note = RuvC_P4
  SITE 122: note = RuvC_P5
  REGION 243..329: note = Tnp_domain
  SITE 251: note = Tnp_P1
  SITE 281: note = Tnp_P2
  SITE 289: note = Tnp_P3
  SITE 290: note = Tnp_P4
  SITE 302: note = Tnp_P5
MKNTNAINGKAREIFENEAPEYPAYVGLDVHKETIVAAIAREGRGKPESLGTIANKPKEVAKLVERLSREFGGEVLLYCYEAGPCGYVLYRQLVEMGQECHVVAPSKIPKKPGDRIKTDRRDARKLARLLRSGDLTAVWVPGEEQEAMRDLARARNDFKIQERKARQQLSAFMLRHGHSWPKGKTRWTKGHFEWMETRKFPHEWQYVVLQGYIRAVNAAEKRVADITAEMSMALPHWSMAPVVYSLMAFRGIDMVSAMGLLAELGDLTRFDSPKQLMGFLGLVPSIHASGPTKREGEITKTGNSRARRLLVEAAWAYRHPARMTAHLRRKAKNASEEAREISWKAQKRLCGRYRSLVYSGKNKNQTTVAVARELSGFIWDVTRVEMARFETPAR

SEQ ID NO: 11541 - protein, 406 aa, unidentified
  source 1..406: note = protein_f734f89
  REGION 4..161: note = RuvC_domain
  SITE 7: note = RuvC_P1
  SITE 57: note = RuvC_P2
  SITE 98: note = RuvC_P3
  SITE 100: note = RuvC_P4
  SITE 103: note = RuvC_P5
  REGION 275..362: note = Tnp_domain
  SITE 283: note = Tnp_P1
  SITE 313: note = Tnp_P2
  SITE 321: note = Tnp_P3
  SITE 322: note = Tnp_P4
  SITE 335: note = Tnp_P5
MNAVGIDVSKGKSTVTIRRPGDEVILPPCDIRHTRSAIDALISEIKSLNGETKVCMECTGRYYEPMATWLTDAGIFVSTVNPILIKAYSDDDSLRAPKTDKADSKKIAKYTLDRWAKLKQYGRMDEIRNQLKTMNRQFGFYMDQKTSMKNNLIALLDQTFPGANDFFDSPARSDGSQKWVDFVYTYWHVDCVTGKTLDAFTDHYHKWCSRKGYNFSSAKAKAIYDVSKELIAVFPKDDVTKMIVHQAVHLLNAASKNVEMLRAKMDESASKLPEYPIVMNMNGVGSTLGPQLMAEIGDVMRFEKRGSLTAFAGVDPGKNESGQYVQKSVRTSKKGSPNLRKTLFQIMDSLIQRAPAGDAVYDFMDKKRAQGKPYYVYMTAGANKFLRIYYGRVKEYLESLDANQTE

SEQ ID NO: 11542 - protein, 321 aa, unidentified
  source 1..321: note = protein_b8df121
  REGION 4..147: note = RuvC_domain
  SITE 7: note = RuvC_P1
  SITE 52: note = RuvC_P2
  SITE 92: note = RuvC_P3
  SITE 94: note = RuvC_P4
  SITE 97: note = RuvC_P5
  REGION 191..278: note = Tnp_domain
  SITE 199: note = Tnp_P1
  SITE 229: note = Tnp_P2
  SITE 237: note = Tnp_P3
  SITE 238: note = Tnp_P4
  SITE 251: note = Tnp_P5
MTYVGIDVSKATFVVAYSSAKSSKTKTFKNTTKGVHEFIQTLSADDYHCVLEATGNYSSLLVYLLSQAGITVSLENPLKIKNFARVMLSVTKTDETDARLIALYGEKMHPAPYKLRSDAILILKQKRTVIRQLKKQLIATRNLKGSMEVLPFFDSKCKKTIEKTIAFLERQVKDLEEELANLAQGEYRKQMGLLTSVKGIGVTLAAALIMATGGFAYFDNAKQLTRYLGLSPTYQQSGTSVNVKGHINRNGDSSLRSLLYVAAMASLRCNAECKECVNRLRSNGKPGKVAVVAVANKLVRQAFAVVTQEKPYIDGFKSAKP

SEQ ID NO: 11543 - protein, 396 aa, unidentified
  source 1..396: note = protein_9feebd8
  REGION 6..160: note = RuvC_domain
  SITE 9: note = RuvC_P1
  SITE 58: note = RuvC_P2
  SITE 98: note = RuvC_P3
  SITE 100: note = RuvC_P4
  SITE 103: note = RuvC_P5
  REGION 266..352: note = Tnp_domain
  SITE 273: note = Tnp_P1
  SITE 304: note = Tnp_P2
  SITE 312: note = Tnp_P3
  SITE 313: note = Tnp_P4
  SITE 325: note = Tnp_P5
MAAIWAGIDAGKTHHHCVAIDESGRRLLSRRVANDESDLLELLTDVLALGNQVTWGIDLADGGAALAIAILLNHDQLVHYISGRAIHRVSESYRGEGKTDAKDAAVIADQVRIRRDLQPLRAGNETVTDLKILTGRRMDLVADRTRTVNRLRAQLSGLFPGLERALDLTNTGPLTLLTGYRTPAALRRLGTKRLATWLRNRSVRNADQLAQTACEAAERQHTSLPGERLIAQMVHTLAKEVMALNLQVSELDKLIEARFRDHHHFDVITSMPGLGVILGAEFLAATGGDMSVFGTSDRLGSFGGAAPVPRDSGKVNGNLRRPQRYNRRLQRVFYTSALFSIRRCEESRRFYDRKRAEGKRHTQAVLALARRRVNVLWALLHEQRCYEPIPPTALAA

SEQ ID NO: 11544 - protein, 401 aa, unidentified
  source 1..401: note = protein_519c895
  REGION 10..165: note = RuvC_domain
  SITE 13: note = RuvC_P1
  SITE 62: note = RuvC_P2
  SITE 102: note = RuvC_P3
  SITE 104: note = RuvC_P4
  SITE 107: note = RuvC_P5
  REGION 271..357: note = Tnp_domain
  SITE 279: note = Tnp_P1
  SITE 309: note = Tnp_P2
  SITE 317: note = Tnp_P3
  SITE 318: note = Tnp_P4
  SITE 330: note = Tnp_P5
MSTSHTRIWVGIDAGKGHHWAVAVDADGETLFSTKVINDESQILALIDTARERADEVRWAVDISGRASTLLLALLIAHGQQVVYVPGRTVNRMSGAYRGEGKTDAKDARVIADQARMRPKDFAPLNTPPELVTTLQVLTNYRADLIADRVRLINRLRDLLVGICPALERAFDYSAAKGPIVMLTEYQTPAALRRIGVKRLTTWLERRKVRSADTVATKAVEAAQSQMTVLPGEKRAAKLVCDLAHQLLTLDERIKDNDREIRETFRDDDRAEVIESMPGMGPILGAEFVAIVGDLSGYRDAGRLASHAGLAPVARDSGRRSGNYHRPKRYNRRLRHIFYLAAQTAMMRPGPSRDYYLKKRSEGLLHTQALLALARRRVDVLWAMLRDKRPFTPAPPVTQAA

SEQ ID NO: 11545 - protein, 323 aa, unidentified
  source 1..323: note = protein_27d9c80
  REGION 4..152: note = RuvC_domain
  SITE 7: note = RuvC_P1
  SITE 57: note = RuvC_P2
  SITE 97: note = RuvC_P3
  SITE 99: note = RuvC_P4
  SITE 102: note = RuvC_P5
  REGION 197..283: note = Tnp_domain
  SITE 205: note = Tnp_P1
  SITE 234: note = Tnp_P2
  SITE 242: note = Tnp_P3
  SITE 243: note = Tnp_P4
  SITE 256: note = Tnp_P5
MFYLGVDVAKAKLDCMLLDTSSGKLKSKSLTNTPAGFTQLLDWLDKQKVVKPHVVMEPTGMYHENAALALADAGLVVSLVNPAQLRAFAQGLGVKTKTDKADSAVLARYGATQNPAPWQPPSQSARRLKALLTRRDAVADDLQRERNRQEANNFSPAPEAVGESIAQSIAFHEAELKRLEKMIAEHIDNDPDLRNKKDLLETIPGVGPRVSGHMTALFAGRTFERAEQLAAYLGLVPVEWQSGSSVRGRPRLSKAGPAYLRKVLYMPAVVARRCNPHIKALNDRLLAKGKSKMAAIGAAMRKLAHLCFGVLHSGKPYDPKFAM

SEQ ID NO: 11546 - protein, 356 aa, unidentified
  source 1..356: note = protein_cbf69cd
  REGION 12..167: note = RuvC_domain
  SITE 15: note = RuvC_P1
  SITE 68: note = RuvC_P2
  SITE 104: note = RuvC_P3
  SITE 106: note = RuvC_P4
  SITE 109: note = RuvC_P5
  REGION 233..318: note = Tnp_domain
  SITE 241: note = Tnp_P1
  SITE 271: note = Tnp_P2
  SITE 279: note = Tnp_P3
  SITE 280: note = Tnp_P4
  SITE 291: note = Tnp_P5
MTIVSQTHQYVVGVDTHAKKHVYAIIAATTGEHIDTRDFPTSSAGITRALNWVGKRTLGDAGVLWVIEGCASYGAILAGTVSSAGYQVAEAPRMGAKARHGVGKSDSLDALRIAAAVLPLQSNQLRTPRLNDGVRAALRVLLAARDSMTTERTSSVNALTALLHTYELGMDARKALTTAKITEAAKWRERNEDLALSVARAEAIRLAQNIVALDEQLQDNMLQLTELVTVSEAAPLLDMTGCGPVTAAVALTTWSHRNRVRSEVAFASLAGVNPIPASSGNTVRHRLNRGGDRRLNKALHMVAVTRMVHDKETRIYAEKRKAEGKTVKEVRRCIKRDLARRIYRILNATVPAPSST

SEQ ID NO: 11547 - protein, 395 aa, unidentified
  source 1..395: note = protein_69edc10
  REGION 4..162: note = RuvC_domain
  SITE 7: note = RuvC_P1
  SITE 60: note = RuvC_P2
  SITE 101: note = RuvC_P3
  SITE 103: note = RuvC_P4
  SITE 106: note = RuvC_P5
  REGION 268..354: note = Tnp_domain
  SITE 275: note = Tnp_P1
  SITE 305: note = Tnp_P2
  SITE 313: note = Tnp_P3
  SITE 314: note = Tnp_P4
  SITE 327: note = Tnp_P5
MHYLGIDIGKNTHVASLIDKNGKTLFKAFSFSNSTSGGESLLKTVGNFIASPSDLAIGMEATGHYWLSLYSFLVEQDFLIHVINPIQTDGWRKGVEIRKRKTDIIDSLLIADLIRYGDFFETSLADENTLALRNLCRFRNYLVGSISDLKRKTICILDQIFPEYAGVFSDIFGQTSKEILKNFSLLSDFEAVSCEQLASILSEIKLKKFAASKINQIADLSRDSFGIKFALDSFHLQLKILVEQIDFIQLQITELDNQISTIVEKFNSPIFTIPGIGPVTGATILSEIGDIERFSTPAKLVAYAGIDASVNQSGEYSSNNNHMSKRGSPYLRKAIFQASLVASHHDPVFKAYYQKKRAEGKHHLTALGAVSRKMCYTIHAILKNNIAYKVQLRKE

SEQ ID NO: 11548 - protein, 342 aa, unidentified
  source 1..342: note = protein_fbfef73
  REGION 7..149: note = RuvC_domain
  SITE 10: note = RuvC_P1
  SITE 53: note = RuvC_P2
  SITE 88: note = RuvC_P3
  SITE 90: note = RuvC_P4
  SITE 93: note = RuvC_P5
  REGION 211..296: note = Tnp_domain
  SITE 219: note = Tnp_P1
  SITE 249: note = Tnp_P2
  SITE 257: note = Tnp_P3
  SITE 258: note = Tnp_P4
  SITE 270: note = Tnp_P5
MSKITTIGLDLAKHVFQAHGADAFGQAVLRKKLRRDHVLEFFSQLPPCVVAMEACGGAHFWGREISKLGHEVRLIPPAYVKPFVKRQKNDAADAEAICEAAQRPTMRFVPVKSEETQGAAMVFRVRELLIRQRTQAINALRGHLGEFGQIVPQGAANTARLIAIVEDPESGLPADAIATLTVLVAALRHLQTEIGQLDVEIARHAKENEVARRLMTVPGIGPLIATAIAVLAPPPETFRRARDFAAWLGLTPRQHSTGGKQRLGATTKMGERSLRRLLILGANSIIIKRHVHAAARPGTWLAGMLMRKPPMLVRVALANKMARIVWALMRRGGVYRAPAVAA

SEQ ID NO: 11549 - protein, 399 aa, unidentified
  source 1..399: note = protein_f6b21d2
  REGION 1..134: note = RuvC_domain
  SITE 36: note = RuvC_P2
  SITE 71: note = RuvC_P3
  SITE 73: note = RuvC_P4
  SITE 76: note = RuvC_P5
  REGION 261..348: note = Tnp_domain
  SITE 269: note = Tnp_P1
  SITE 300: note = Tnp_P2
  SITE 308: note = Tnp_P3
  SITE 309: note = Tnp_P4
  SITE 321: note = Tnp_P5
MIQQFRIEHSPAGVERLVTRCLALEADPAEVRVVLETRHGLLVEALIDAGFTVVPVNPDLVARRRGPARKKDDAEDARICCLLALDRHTTLRQLIPHGQIAGELRAIARDDERAARDHVRLLNRLRADLQITYPAALILAAGDLGAPTMLRLLQRWPTQPELAKVTREELVGFARASHHGWPERFAERIAEALAAPALPVREHLVRAKATGIRLAATQLLALHGARRSWERRMAELLLGGPRSGVEHTVKDPDPGKAFPGGEIYLSMPGLGDRLAARVAGEIGDAIHQYQTPSALQCYAGTAPVTRRSGKSDFVVARRLAHNQYLGDAVHQWAFSSLTRSAWAREFYDEKITAGKSHHNALRTLSNRWLEILWHCLTKGIVYDEATHQANRNRARGHAA

SEQ ID NO: 11550 - protein, 345 aa, unidentified
  source 1..345: note = protein_d32a399
  REGION 4..157: note = RuvC_domain
  SITE 7: note = RuvC_P1
  SITE 55: note = RuvC_P2
  SITE 96: note = RuvC_P3
  SITE 98: note = RuvC_P4
  SITE 101: note = RuvC_P5
  REGION 219..305: note = Tnp_domain
  SITE 227: note = Tnp_P1
  SITE 257: note = Tnp_P2
  SITE 265: note = Tnp_P3
  SITE 266: note = Tnp_P4
  SITE 277: note = Tnp_P5
MILIGVDPHKSSHTAVAVDAAGHHVAQRRFVVNAGTFRQLMRWCEQWPERRFAIEGARGLGRTLAQQLAATGENVVDVPSTLSARARLLATGGDRKTDANDARHVAQVALFRQDLRPVEPEDQTTILRLLTERHDDLVHERTRVLNRLHAVLRDLLPGGAPTGLSADKAAAAMKGIRPLTATDACRRDIARDLLADLRRLDRQVKDNEAEMRDALAATHTTLTTLPGLGTVLAAKTIGHVGDITRFPTEHHFASYTGSAPLDASSSNNVRHRLNTGGNRALNSVLHVIAVCQIRDGGGRGQEYYLRKIAEGTTPAEARSALKRRLSNVVYRIMKRDQRNRLAQAA

SEQ ID NO: 11551 - protein, 320 aa, unidentified
  source 1..320: note = protein_2ec4b7f
  REGION 1..77: note = RuvC_domain
  SITE 14: note = RuvC_P3
  SITE 16: note = RuvC_P4
  SITE 19: note = RuvC_P5
  REGION 191..278: note = Tnp_domain
  SITE 199: note = Tnp_P1
  SITE 229: note = Tnp_P2
  SITE 237: note = Tnp_P3
  SITE 238: note = Tnp_P4
  SITE 251: note = Tnp_P5
MVKDFNNDSLRKIKSDKADSVKIARYALDKWQSLEPYSITDELRAQLKVMNRQFHFYVKQKTAMKNNLIGLIDQTYPNANTYFNSPTRSDGSQKWVDFVSTYWHVDCIRKMSLNAFVEHYQNWCKRKKYAFNKSKAEEIYTKTKELVPVFPKNEITKHIIRQAIDQLNSTSVTVETIRTLMNETASKLPEYSIVMQFKGIGPSLGPQLMAEIGDVTRFTHKGALTTFAGVDPGVNESGSYAQKSVPTSKRGSSNLRKTLFQVMDVLIKTMPQDDPVYQFMDRKRTQGKPYYVYMTAGANKFLRIYYGRVKEYLSVLPDPS

SEQ ID NO: 11552 - protein, 345 aa, unidentified
  source 1..345: note = protein_70a0a48
  REGION 6..148: note = RuvC_domain
  SITE 9: note = RuvC_P1
  SITE 52: note = RuvC_P2
  SITE 87: note = RuvC_P3
  SITE 89: note = RuvC_P4
  SITE 92: note = RuvC_P5
  REGION 211..298: note = Tnp_domain
  SITE 219: note = Tnp_P1
  SITE 249: note = Tnp_P2
  SITE 257: note = Tnp_P3
  SITE 258: note = Tnp_P4
  SITE 270: note = Tnp_P5
MKTTTVGLDLAKNVFQVHTIDEAGAVIVRKALRRRQMMPFFEGLEPCLIGMEACGTSHYWARELSGLGHEVKLMPPAYVKPYVKRGKTDAGDAAAICEAVTRPTMRFVAIKSPEQQSLLALHRARDLLIRQRTQLVNLIRGQLAEFGIVLAKGIQHVLRLVARLVDGETLDIPEQASKVVIILAEQLRDLQVRIGGLEKDLKNWCRGNQAVKRLKTIPGIGTITASALVASVTDPHQFTSGRQFAAWLGLTPRANSSGGKARSGRISKMGDQYLRRLLVSGMTSQLRSVRRHPDRHPWTTSLLHKKPAKLVAVAMANKTARIAWVVMTREETYRAPQPLNQEAAE

SEQ ID NO: 11553 - protein, 366 aa, unidentified
  source 1..366: note = protein_13c4e78
  REGION 33..175: note = RuvC_domain
  SITE 36: note = RuvC_P1
  SITE 79: note = RuvC_P2
  SITE 114: note = RuvC_P3
  SITE 116: note = RuvC_P4
  SITE 119: note = RuvC_P5
  REGION 237..323: note = Tnp_domain
  SITE 245: note = Tnp_P1
  SITE 275: note = Tnp_P2
  SITE 283: note = Tnp_P3
  SITE 284: note = Tnp_P4
  SITE 296: note = Tnp_P5
MRWSARYENPGKSKVIGVLTYLRRPLMDTLELLGLDIGKSTFHLIGHDGKGHEVLRKKFNRNRLLEFAAKLKPCTIVMESCGGSHWLARKLISFGHQVKLIAPQHVKPYVTGNKNDYIDAAAICEAASRPRTRYVAIKTVEQQVLSTQHRLREALVGHRTQTINRIHGFLLEFGIALPATKAAMNQIHQILDDPVAELPQQLKCDIEYLLEEIKRLTGEIKAIDRSIKEQVAADDAGTRLMSIPGIGPIIASALLADIGDASNFHSARDFAASLGLVPRQYSTGDQTVLLNISKRGDKYLRKLLVQGSRAVLVRIDKRNDALGRWCRDLLARKHPNKVACALANKLARIVWAVLARGGSYNAQLVT

SEQ ID NO: 11554 - protein, 341 aa, unidentified
  source 1..341: note = protein_142a225
  REGION 12..166: note = RuvC_domain
  SITE 15: note = RuvC_P1
  SITE 67: note = RuvC_P2
  SITE 105: note = RuvC_P3
  SITE 107: note = RuvC_P4
  SITE 110: note = RuvC_P5
  REGION 210..298: note = Tnp_domain
  SITE 218: note = Tnp_P1
  SITE 248: note = Tnp_P2
  SITE 256: note = Tnp_P3
  SITE 257: note = Tnp_P4
  SITE 270: note = Tnp_P5
MFKNKSMKVFYLGVDVSKKKLDLCLRSNGKDILYDVIPNDLSSIKSWLTRTFEKFFLSEDSLVVCAEHTGQYTYPLVCATKSIGVYLCLEDAAKIKYCHGIPRGKNDKIDACRIAMYAERYNDCLQPYTASELIIQKLKNLSTERSMLVADRAKYQSQLKDQVDYMEHSIYIAKCNRVEGIINTFTDYIAQIDLEIKELINQAPVIAHQMDLLMSVDGVGERIALKMIMETDAFTSFTDPRKFCCHAGVVPFVYVSGSSQRSKNRVSNRADKSIKHLLHMAALSVSQVKNSPLKKYYDRKVEEGKNKMSVLNAVRAKLVTIMFAVIRTDAFFSRNYQNSLA

SEQ ID NO: 11555 - protein, 295 aa, unidentified
  source 1..295: note = protein_cd6ad0d
  REGION 6..160: note = RuvC_domain
  SITE 9: note = RuvC_P1
  SITE 61: note = RuvC_P2
  SITE 99: note = RuvC_P3
  SITE 101: note = RuvC_P4
  SITE 104: note = RuvC_P5
  REGION 204..292: note = Tnp_domain
  SITE 212: note = Tnp_P1
  SITE 242: note = Tnp_P2
  SITE 250: note = Tnp_P3
  SITE 251: note = Tnp_P4
  SITE 264: note = Tnp_P5
MKVFYLGVDVSKKKLDLCLRSNGKDILYDVIPNDLSSIKSWLTRTFEKFFLSEDSLVVCAEHTGQYTYPLVCATKSIGVYLCLEDAAKIKYCHGIPRGKNDKIDACRIAMYAERYNDCLQPYTASELIIQKLKNLSTERSMLVADRAKYQSQLKDQVDYMEHSIYIAKCNRVEGIINTFTDYIAQIDLEIKELINQAPVIAHQMDLLMSVDGVGERVALKMIMETDAFTSFTDPRKFCCHAGVVPFVYVSGSSQRSKNRVSNRADKSIKHLLHMAALSVSQVKNSPLKKYYDRKV

SEQ ID NO: 11556 - protein, 421 aa, unidentified
  source 1..421: note = protein_3156789
  REGION 22..174: note = RuvC_domain
  SITE 25: note = RuvC_P1
  SITE 73: note = RuvC_P2
  SITE 111: note = RuvC_P3
  SITE 113: note = RuvC_P4
  SITE 116: note = RuvC_P5
  REGION 281..367: note = Tnp_domain
  SITE 289: note = Tnp_P1
  SITE 320: note = Tnp_P2
  SITE 328: note = Tnp_P3
  SITE 329: note = Tnp_P4
  SITE 340: note = Tnp_P5
MKSARNTLPNALPEEPVNAVTGGIDWARDDHAVSVVNNRGREIDRCTVEHSTAGLRDLITMLGSNGVGEVAIERPDGPVVDALLEAGITVVVISPNQVKNLRGRYGSAGNKDDRFDAFVLADTLRTDRARLAPLTPDSPATVALRRACRARKDLIGHRVAAANQLRAHLRNAFPGAVGLFAEIDSPISLAFLTRFDTQDRADWLSPKRLAAWLASVGYSGKKDPAVLHAHLTAAPRGPVGTDADLNAQITHALVAVLTTLVEQIKTLTGQISDQLTTHTDQHIFTSLPRSGRVRAARLLSEIGDCRARFPTPEALACLAGAAPSTRQSGKLRTVGFRWACDKQLRDAVTDFAADTRHANPWAADLYQRARTRGHDHPHAVRILARAWLFVIWHCWQNNTTYDPTQHNALQRILNPTEHQAG

SEQ ID NO: 11557 - protein, 343 aa, unidentified
  source 1..343: note = protein_3918348
  REGION 5..153: note = RuvC_domain
  SITE 8: note = RuvC_P1
  SITE 55: note = RuvC_P2
  SITE 92: note = RuvC_P3
  SITE 94: note = RuvC_P4
  SITE 97: note = RuvC_P5
  REGION 212..300: note = Tnp_domain
  SITE 220: note = Tnp_P1
  SITE 250: note = Tnp_P2
  SITE 258: note = Tnp_P3
  SITE 259: note = Tnp_P4
  SITE 271: note = Tnp_P5
MDYYAGIDVSLEQSSICVVDGSGKIVREVKVASEPEALLQLFADLELPIVTIGLEAGPLSQWLRAALVEAGQDVVLLETRHVKAALSAMTVKTDRKDARGIAQLLRMGWYRPVHAKSANAQDVRALLVGRKLLQAKLLDVELSIRGILRGYGLKVGEVSRGRFEARIRELIEGHEMLGTVIGAMLQARGALWNEFTRLHRAMLKITRADPVCQRLMSAPGVGALVAITYRSAVDDPGRFEKSRTVGAYFGLTPKKYQSGETDIDGGVTKVGDAMVRTALYEAAHIMLTRATRFSALKRWALDVAKRRGMKRAKVALARKLATVLHRMWVDVSAFRWGKDTVAP

SEQ ID NO: 11558 - protein, 291 aa, unidentified
  source 1..291: note = protein_87ddeaf
  REGION 10..133: note = RuvC_domain
  SITE 13: note = RuvC_P1
  SITE 56: note = RuvC_P2
  SITE 96: note = RuvC_P3
  SITE 98: note = RuvC_P4
  SITE 101: note = RuvC_P5
  REGION 178..262: note = Tnp_domain
  SITE 186: note = Tnp_P1
  SITE 215: note = Tnp_P2
  SITE 223: note = Tnp_P3
  SITE 224: note = Tnp_P4
  SITE 235: note = Tnp_P5
MDTVTQATIIGIDVSRDWLDIHCLPAGKCARFPNKVKGHEQVAQLACELGALVCFEATGGQEWQLWVALDDAGIATRQLPPAQIKAFAASRGTRAKTDRIDAELIARFMAFRPDAGRALPHRKLRLLAQIKAQGKLGSAEMFAAMDEDLKGLLDRQIAELEAQIEDIIATDECLATTADILRSVPGIGPVASTMLLAEMPELGQINGEQAAALTGLAPIAHDSGAMRGKRAIGGGRRLLRRVMFQAALVASHHNPVLKIFANRLRAAGKPHKVVITAVARKLVTIVNALCK

SEQ ID NO: 11559 - protein, 360 aa, unidentified
  source 1..360: note = protein_b942663
  REGION 28..175: note = RuvC_domain
  SITE 31: note = RuvC_P1
  SITE 79: note = RuvC_P2
  SITE 120: note = RuvC_P3
  SITE 122: note = RuvC_P4
  SITE 125: note = RuvC_P5
  REGION 221..308: note = Tnp_domain
  SITE 229: note = Tnp_P1
  SITE 259: note = Tnp_P2
  SITE 267: note = Tnp_P3
  SITE 268: note = Tnp_P4
  SITE 281: note = Tnp_P5
MSKQIVSIVRPVLSDNKLTDSRQASVFCGIDVSAETLAAAVIEAGRPMEQREFSNTASGHKRLIAWLGRSKALARVSMEATGIYSMDLALALDAAEGIEVAVLNPKRAHDFAKSMMRRSKTDRADAAVLAEFSLRMEFVAWQRPSLSALSLRSVTRYTEALSREHTRGLNRLHTAQGSRGTPRCVVEDLKRALATLKRRIVKQRRAARRMIDSDAQTREQFRLLLGMPGVGEISALQILGELVLLAPDLKARQWVARSGLDPVHEDSGSSVHKPAHISRAGSRHLRRALFMPALAAVRCDPHLKAFYETLLARHKSKLQALIAVARKMLHAIYGVFKSGQPYEGKLLFPNIRLEVESIAG

SEQ ID NO: 11560 - protein, 344 aa, unidentified
  source 1..344: note = protein_14e832f
  REGION 5..153: note = RuvC_domain
  SITE 8: note = RuvC_P1
  SITE 54: note = RuvC_P2
  SITE 92: note = RuvC_P3
  SITE 94: note = RuvC_P4
  SITE 97: note = RuvC_P5
  REGION 213..300: note = Tnp_domain
  SITE 221: note = Tnp_P1
  SITE 251: note = Tnp_P2
  SITE 259: note = Tnp_P3
  SITE 260: note = Tnp_P4
  SITE 272: note = Tnp_P5
MEYFAGIDVSLRSCALCIVDGKGNVLLERELPCEVSDIAECLRAFPYPIERVGFEAGTMSQHLFFGLTKVGFDVVCMEARQVNAALSAMRNKTDKNDARGIAQVLRTGWFSPVHMKSREAHGVRALLSTRKALLKKTMDLANEVRGLLKVFGIRLPMTVKHGSFDGVVRPLIEMDEVLVHALVPLLDARVALYEHFLELDRRVKRAASQDEVCMRMMTVPGVGPIASLTFKAAVDDPTRFKRSRTVGAHFGLTPRRYQSGEHDNPGRISKAGDRDVRATLYAAANALLMRTMAGSQIKSWGMRLVRTKGRRRAVVAVARKLAVLLHRMWTDGTEFRQENVGGMA

SEQ ID NO: 11561 - protein, 338 aa, unidentified
  source 1..338: note = protein_70c1701
  REGION 7..149: note = RuvC_domain
  SITE 10: note = RuvC_P1
  SITE 53: note = RuvC_P2
  SITE 88: note = RuvC_P3
  SITE 90: note = RuvC_P4
  SITE 93: note = RuvC_P5
  REGION 211..297: note = Tnp_domain
  SITE 219: note = Tnp_P1
  SITE 249: note = Tnp_P2
  SITE 257: note = Tnp_P3
  SITE 258: note = Tnp_P4
  SITE 270: note = Tnp_P5
MSVVKIIGIDLGKSTFHLIGHDYSGREQYRHKLSRSKMIQFISTHEPVTIAMEACCGAHWLARKCQEFGHEVKLIPAQYVKPYVKSHKNDFIDADAIAEAATRPNMRFVSPKSENAQVGVVIRRIRSGYIRERTSCMNRIGSILLEFGVSFPRGHANMKNLFQWLADRQILVPPLLILELRDQLEYYNQLNEHISAQDQKLVQLNKDNELFTLLQTVPGIGPMTASCCLSAVGNVNDFANGRNFAAWIGLVPFQHSTGGKPRLLGISKRGNKELRELFVHAARAVMWRDSSAERYFGSWLIELKRRKSFNVAVVALANKLARIAWSVMKSHKAFEVKA

SEQ ID NO: 11562 - protein, 399 aa, unidentified
  source 1..399: note = protein_02d1b0d
  REGION 10..164: note = RuvC_domain
  SITE 13: note = RuvC_P1
  SITE 62: note = RuvC_P2
  SITE 102: note = RuvC_P3
  SITE 104: note = RuvC_P4
  SITE 107: note = RuvC_P5
  REGION 270..356: note = Tnp_domain
  SITE 278: note = Tnp_P1
  SITE 308: note = Tnp_P2
  SITE 316: note = Tnp_P3
  SITE 317: note = Tnp_P4
  SITE 329: note = Tnp_P5
MSERRTLAWAGVDAGKGHHWAAVVDGAGTTLWSKKVDNDESAILTALGEILELADEVRWAVDICGTASALLLAMLAAHGQQVVYVPGRTVNRMSGAYRGEAKTDARDAYVIAETARHRRDFTTIDVPAQLAADLALLTSHRSDLVADRVRMINRLRDVLTGVFPALERAFDYSAHKGALVLLTGYQTPAALRGRGPARLTAWLAKRGVRNPGTVASVAAEAAAAQHTVLPGEDVAAAIVADLATQILALDERIKRVDKQIAEVFRTHPQAGIIESMPGIGPILGAELVVAAGDLAAYADAGHLASAAGLVPVPRDSGRRTGNMHRPKRYSRRLRRVFYMSAQTSIVNDGPNRDFYLKKRAEGCRHVQAVIALARRRVSVLWALLRDGRLFTPVPATQAA

SEQ ID NO: 11563 - protein, 323 aa, unidentified
  source 1..323: note = protein_5487394
  REGION 5..155: note = RuvC_domain
  SITE 8: note = RuvC_P1
  SITE 58: note = RuvC_P2
  SITE 98: note = RuvC_P3
  SITE 100: note = RuvC_P4
  SITE 103: note = RuvC_P5
  REGION 195..281: note = Tnp_domain
  SITE 203: note = Tnp_P1
  SITE 233: note = Tnp_P2
  SITE 241: note = Tnp_P3
  SITE 242: note = Tnp_P4
  SITE 254: note = Tnp_P5
MSPIVGIDVAKHSVALAIELDNGKHRTKAKLANDPKGFATLHAWLCTHAQPDSWVVMEATGIYHQALAEFLYAHGYRVCVLNPAQVALYARRQLQRVKTDRSDAKLIASYGLRHRDQLRAWHPDPPALKTLKALVRRRDDLLQMLQMERNRLEVAQANGQPSIQGLIDHLHARISEIQQAIEDHIDQDPDLRRQRSLLTSIDGIGDISAALLLAELGPVKRLADAAAVTAVAGLNRRLHESGRYQGKVCICRTGSARLRAGLYMPALVAMRHNPVVTALKQRLHARGKHGKQIVCAAMRKLLHLAYGVLKSGTAFDPHNALAR

SEQ ID NO: 11564 - protein, 331 aa, unidentified
  source 1..331: note = protein_18854b4
  REGION 7..158: note = RuvC_domain
  SITE 10: note = RuvC_P1
  SITE 59: note = RuvC_P2
  SITE 97: note = RuvC_P3
  SITE 99: note = RuvC_P4
  SITE 102: note = RuvC_P5
  REGION 202..289: note = Tnp_domain
  SITE 210: note = Tnp_P1
  SITE 240: note = Tnp_P2
  SITE 248: note = Tnp_P3
  SITE 249: note = Tnp_P4
  SITE 262: note = Tnp_P5
MKTNEIIGIDVSKLLIDVCIYSKQIVEQFENNKSGFKSMLKWVFKNSSFSKEETMFIFEHTGMYSHLLSVFLTEQKTSFFIASGLEIKRSIGIARGKDDQIDAKRIAQYGYRLKEELKPSNLPNSNILQLKSLLSLRTKLNKQRAGFKVTLKEQKRIYKAKEYKIIFDVQQKMIVELTKQINKINTQMQSIIDQDISLKETYKLVTSVKGIGMQTAIMIIVFTDNFSKFENWRKFASYCGIAPFPYQSGTSIKGRTKVSHLANKKLKAIINMCAISAIQHNPEMKVYYQKRVEQGKSKMSTVNIIRNKLIARVFAVVKRQTPYVDILKYAA

SEQ ID NO: 11565 - protein, 351 aa, unidentified
  source 1..351: note = protein_a708c35
  REGION 6..147: note = RuvC_domain
  SITE 9: note = RuvC_P1
  SITE 52: note = RuvC_P2
  SITE 87: note = RuvC_P3
  SITE 89: note = RuvC_P4
  SITE 92: note = RuvC_P5
  REGION 210..297: note = Tnp_domain
  SITE 218: note = Tnp_P1
  SITE 248: note = Tnp_P2
  SITE 256: note = Tnp_P3
  SITE 257: note = Tnp_P4
  SITE 269: note = Tnp_P5
MTCTTVGVDIAKNVFQVHYIDEETGEIVNKPIRRAKFMEHFVNRAPCLIGMEACSGAHHWARQLTKMGHQVKLMPAAFVKAFNIRNKNDAADARAIWLAVQQPSKPIAVKTEVQQAMLALHRTREQLVKFRTMQINSLRGLLTEYGEVMGRGRAALDKAIPDVLARVAERLPATLIDTLREQWTGLAKLDQQIGAIERRMRMGVKEDRAVRAISDIPGVGMLTATAAVSMIGDAKVFRSGREFAAWAGLGPKQTGSGGKTNLHGISKRGDTYLRTLLIHGARSGLTHSKEPSQWLEQISKRRPPNVVIVALANKMARTIWAVLAHDRPYQRGYMSLKPAPTVALGKESTFR

SEQ ID NO: 11566 - protein, 356 aa, unidentified
  source 1..356: note = protein_419bd13
  REGION 7..162: note = RuvC_domain
  SITE 10: note = RuvC_P1
  SITE 59: note = RuvC_P2
  SITE 99: note = RuvC_P3
  SITE 101: note = RuvC_P4
  SITE 104: note = RuvC_P5
  REGION 271..344: note = Tnp_domain
  SITE 279: note = Tnp_P1
  SITE 309: note = Tnp_P2
  SITE 317: note = Tnp_P3
  SITE 318: note = Tnp_P4
  SITE 330: note = Tnp_P5
MTYDYVIGMDACKYFHHACVLDIDGTQVLSKRINQNEQSLRALFSAFSAYDHKVLVVVDQPNNIGRLTVAVAQDIGIDVRYLPGLAMRQLSRIHAGNAKTDIRDAYIIAHAAKNLPESLRSVDRVEEAFLQLKVLNGIDEDLARSYTRLINQIRSALVGCYPQFEQALRGQIIHRKWVLHLLARYGGPTKIKRLGKAKAAAVCVDDIRHEIPEPVLDAIFAAISEQTVTIAGAHYAEMGVAMSAKDALLKLEHRQQIEKEVIELINDIPHTQFLLSMPGIGPKTAAQILMTAGDMSDFPSAGHLASYAGLSPRTNQSGTSIMSNSLNRAGNKKIKERPMAIIFCIHQIPRAFPAIL

SEQ ID NO: 11567 - protein, 394 aa, unidentified
  source 1..394: note = protein_401d5ae
  REGION 4..164: note = RuvC_domain
  SITE 7: note = RuvC_P1
  SITE 59: note = RuvC_P2
  SITE 99: note = RuvC_P3
  SITE 101: note = RuvC_P4
  SITE 104: note = RuvC_P5
  REGION 267..354: note = Tnp_domain
  SITE 275: note = Tnp_P1
  SITE 305: note = Tnp_P2
  SITE 313: note = Tnp_P3
  SITE 314: note = Tnp_P4
  SITE 327: note = Tnp_P5
MILVGIDIGKLSHMFCVMDSSTGEFLVNPISFKNNKQGFDSFMDSINSFSKKDVLIGMEDTGHYHFNLLKFLLDSGYAVALINPITTDMTRKMQLGATKDDDLDARLICDVLASNQRRKGYRISKIDSFDLYEQKRLTREHHDLKEQLNVYTNKLQECIDIVFPEFNSLFRSKYESVYMNVLKTFGSADSIAHADIRNIRKCFEANRKGRRISLTPEELKEAARNSIGFPSKAEVIELRHLIDIIELINVQISEVDKKIEEFSVQNNSPILTIPGISHFSGTSILAELGDLRNYSKASQVIKFAGVSPSKYKSSQYEAQHTAITKKGSRYLRKTLYQVILPVIRYNPVFNAFYRHKLSQGKGHRCAQGHCVRKLLRIIYHLVTTDQSFDPKLLR

SEQ ID NO: 11568 - protein, 401 aa, unidentified
  source 1..401: note = protein_d6b007e
  REGION 11..166: note = RuvC_domain
  SITE 14: note = RuvC_P1
  SITE 63: note = RuvC_P2
  SITE 103: note = RuvC_P3
  SITE 105: note = RuvC_P4
  SITE 108: note = RuvC_P5
  REGION 273..358: note = Tnp_domain
  SITE 281: note = Tnp_P1
  SITE 311: note = Tnp_P2
  SITE 319: note = Tnp_P3
  SITE 320: note = Tnp_P4
  SITE 332: note = Tnp_P5
MIDISDIGVYLGLDVGKGEHHAHGLRPDGKTVVDKPLPNSEPKLRAMLDKLAAKYGTVLVVVDQPASIGALPLAVARDAGRKVAYLPGLTMRRIADLYPGEGKTDTRDAAIIADAARTMPHTLRSIELDDETVAELHMIVGFDDDLAGEVTRVANRLRGLLTQIHPSLERVPGPRIQHPAVLWLLERFGSPKAIRKAGRRQLITILRPKAPRMAERLVEDIFTALDEQTVVVPGTDAAAVIVPKLAANLSALLDQRRQLASSIEELLEAHPLSKLLTSMPSIGVRTGARILIDVGDGSAFPTAGHLAAYAGLAPVTRRSGSSIRGESPSRRGNKHLKRAFFVSAFAALADPASRAYYERKKAEGKRHKQALMCLARRRVDVLFAMLRDGTFFEPHSAPQTA

SEQ ID NO: 11569 - protein, 339 aa, unidentified
  source 1..339: note = protein_9830376
  REGION 6..147: note = RuvC_domain
  SITE 9: note = RuvC_P1
  SITE 52: note = RuvC_P2
  SITE 87: note = RuvC_P3
  SITE 89: note = RuvC_P4
  SITE 92: note = RuvC_P5
  REGION 210..298: note = Tnp_domain
  SITE 218: note = Tnp_P1
  SITE 248: note = Tnp_P2
  SITE 256: note = Tnp_P3
  SITE 257: note = Tnp_P4
  SITE 269: note = Tnp_P5
MNIKRIGLDLAKQVFQLHAVDHHERVVLRKTLHRSQMLSFFIRLEPCLIGIEACGSSHYWARELTRLGHRVLIIPPQFVKPYLKGNKNDANDAEAICEAVSRPGIRYVAIKSEAQQSMQAEHRVRARLLRDRTALSNEIRGMLAEFGLALPVGLAALRRALPEILCQQEQWDDRFIRLLCELAEELQVLDARLERYDRRLRQQGQEDDRIRRLQTIGGIGPVTASALVAAVGDAGQFKSGREMAAWLGLVPRQHSSGGKTRLGHISKRGDSYLRTLLIHGARAVLNASGHKEDRRSKWLQSVAERRNRNVATVALAALANKNVRIAWAVLSRGEEYRVV

SEQ ID NO: 11570 - protein, 353 aa, unidentified
  source 1..353: note = protein_4f6ab98
  REGION 12..152: note = RuvC_domain
  SITE 15: note = RuvC_P1
  SITE 58: note = RuvC_P2
  SITE 93: note = RuvC_P3
  SITE 95: note = RuvC_P4
  SITE 98: note = RuvC_P5
  REGION 217..302: note = Tnp_domain
  SITE 225: note = Tnp_P1
  SITE 255: note = Tnp_P2
  SITE 263: note = Tnp_P3
  SITE 264: note = Tnp_P4
  SITE 276: note = Tnp_P5
MSQILNAAIVVIGIDIGKNSFHVVGLDQRGAIVLRQKWSRGQVNARFANMPPCLIGMEACVGAHHLSRELKAFGHDARLMPARYVRPYSKGQKNDFRDAETIAEAVQRPTMKFVATKTADQLDLQALHRVRERLVSQRTGIINQIRAFLLERGVAVRQGLRFLRAELPRILASPPDVLSPRMVRVIEDLAGDWRRLDELVESLSSEIETIARQDAGCGRLMSVPGIGPIISSAMVAAIGTGDAFSKGRDFAAWLGLVPKQISTGDRTILGKISKRGNRYLRVLFVQAAWVVLIKPKSWERHGLKAWLEAAKKRLHHNVLAIALANKLARIAWSVLARGRVFEVKSTKAATQSA

SEQ ID NO: 11571 - protein, 408 aa, unidentified
  source 1..408: note = protein_fb6a5c6
  REGION 4..163: note = RuvC_domain
  SITE 7: note = RuvC_P1
  SITE 60: note = RuvC_P2
  SITE 100: note = RuvC_P3
  SITE 102: note = RuvC_P4
  SITE 105: note = RuvC_P5
  REGION 273..359: note = Tnp_domain
  SITE 281: note = Tnp_P1
  SITE 312: note = Tnp_P2
  SITE 320: note = Tnp_P3
  SITE 321: note = Tnp_P4
MIFVGVDWAEVHHNVCILDEGGDVLARKRIPDALDGVNQLHAMIAEHLGEENEAASVIVGIETERGLLVTALVAAGYQLFAVNPLAASRYRERHHVSGAKSDPGDAKVLADLVRTDRHNHRAIAGDSVLSDAIKLLARNHQNTIWECQRQVNTLRSALKDYYPGALEAFGTELSGLDAVAILAIAPTPAKARALTKVRIETALRKAGRRRLLNERVNRIYEVLQREQLHQPALLEDVYGVTTEATVANIAQLNASIAKLEASLSTHFEQHPSAKVILSLPGMGTVLGARVLGEFGDDPNRYADAKSRKNYAGTSPVTRASGKSHVVLARHSRNKRLASALDQWAFSSLLPSPGARAYYDELKGRDKHHRKAIRQLANRWVGILHGCLENDTPYDEEIAWSHHRPDVAA

SEQ ID NO: 11572 - protein, 382 aa, unidentified
  source 1..382: note = protein_bfe42c7
  REGION 5..153: note = RuvC_domain
  SITE 51: note = RuvC_P2
  SITE 90: note = RuvC_P3
  SITE 92: note = RuvC_P4
  SITE 95: note = RuvC_P5
  REGION 255..342: note = Tnp_domain
  SITE 263: note = Tnp_P1
  SITE 293: note = Tnp_P2
  SITE 301: note = Tnp_P3
  SITE 302: note = Tnp_P4
  SITE 315: note = Tnp_P5
MAILAIDVSKNYLSFFSDFIGSGTVENSPQGIVELFNKAFASSSDFSLVLESTGVFSFNVANFFFQNNVPVFWVKTDNIKLYRKILNRPKTDKIDAELIFSIASKFPESLVPFVNNSYIISELRNLTRLYLKFNEDIARLKLRLYSYVSLYFPKLDFKLNKTFECLLKDYTIEEIANMPIEELFEYIAKISRHNVSSQVLAEKLQTLAKDALRLSVNPSNTLRISIVSTIDLIQHYEKQIELVKKEISKLLKVISNTLTTVKGIGEITAAGIIAEIGDINRFEKASALASYAGLVWTINQSGNYKSENNQLTKKGNKYLRTYLVMAANGVKTYDPVYKEYYRKKYAEATTHKHMRALILTARKLVNLVYYLLKNNVPYVPMK

SEQ ID NO: 11573 - protein, 346 aa, unidentified
  source 1..346: note = protein_e43fe83
  REGION 9..150: note = RuvC_domain
  SITE 12: note = RuvC_P1
  SITE 55: note = RuvC_P2
  SITE 90: note = RuvC_P3
  SITE 92: note = RuvC_P4
  SITE 95: note = RuvC_P5
  REGION 214..300: note = Tnp_domain
  SITE 222: note = Tnp_P1
  SITE 252: note = Tnp_P2
  SITE 260: note = Tnp_P3
  SITE 261: note = Tnp_P4
  SITE 273: note = Tnp_P5
MAKSSIAVLGIDLGKNSCSLVGFDAAGVVVLRRRARRETVVGLTAKLPACVVGMEACCGAHHLGRLLVAQGHTVRLISPEYVRPYVKAQKNDDRDAEAIAEAATRPTMRFVPLKEQEQLDMQSLHRVRSRLVSMRTMLMNQLRAILLERGLTFPQGRRKFEMAIGALMQDPEAQIGPRIRSLIGEVRDEWTDLDRRIAALDREFVEHARADEAARRLVSIPGIGTMTATALRAAVDDGSTFTRARDLAAWLGLVPRQHTTGGKPKLLGISKRGNSYLRGLFIHGARAALPSMAKAEDATGQWLRGLLARAHYNAVVVALAAKLARIAWATLRKGVSFERQPEPAHA

SEQ ID NO: 11574 - protein, 493 aa, unidentified
  source 1..493: note = protein_51a6399
  REGION 6..167: note = RuvC_domain
  SITE 9: note = RuvC_P1
  SITE 62: note = RuvC_P2
  SITE 104: note = RuvC_P3
  SITE 106: note = RuvC_P4
  SITE 109: note = RuvC_P5
  REGION 288..375: note = Tnp_domain
  SITE 296: note = Tnp_P1
  SITE 326: note = Tnp_P2
  SITE 334: note = Tnp_P3
  SITE 335: note = Tnp_P4
  SITE 348: note = Tnp_P5
MIGYSIGIDLSINGAHDCTVLDATGQLVQRFTFDSSSAGLQQLEQRIRAIDPSHGAPVVVMEPTGLAWFLPCLYLYAQLPDVRVVRIKTSKVAALRRYLKQDAKSDRLDSLTLAKMPLVDPEKLYAVDFPSAALQGLDRMTRQRARLVESLIGRKNRLQALLRGYLPGLIAAAGKPWEPVFRALLTVSLNPFTLAGAGRNITELREALQDKFARKALPENLLPQLRTACEHLTRLYRPIIEAGLLTEAFFDDVCDEVARELRLMDAEEQEVKDLETAIARRYQEVAPQDHLGTMPGLGAVTAPTMLAAVGTPQRFQNQAAFRGWTGIVPHASESADSQAKGLPMTKAGPKRVKLALYQAAQFARLWDPQLAKIYYDQMVHKGKPHHKAMGAVMSHLASRIHAVLTEQRDYVLRDMDGREITAREARIIVQTQYQVPAEIRAERRTSRRRKRDVSTGLHRGSAKRSSQRSSPSSQQHSTRSQAMDQTGAVVISR

SEQ ID NO: 11575 - protein, 292 aa, unidentified
  source 1..292: note = protein_d36d837
  REGION 8..155: note = RuvC_domain
  SITE 11: note = RuvC_P1
  SITE 60: note = RuvC_P2
  SITE 100: note = RuvC_P3
  SITE 102: note = RuvC_P4
  SITE 105: note = RuvC_P5
  REGION 195..283: note = Tnp_domain
  SITE 203: note = Tnp_P1
  SITE 233: note = Tnp_P2
  SITE 241: note = Tnp_P3
  SITE 242: note = Tnp_P4
  SITE 255: note = Tnp_P5
MEHELHYIGIDTAKEKLDVDVLRPDGRHRTKKFANTTKGHDELVSWLKGHKIDHAHICIEATGTYMEPVAECLYDAGYIVSVINPALGKAFAQSEGLRNKTDTVDARMLAEFCRQKRPAAWEAPHPLERALRALVVRHQALTDMHTQELNRTETAREVQRPSIDAHLLWLEAELKRLEKQIKDLTDDDPDMKHRRKLLESIPGIGEKTSAVLLAYIGLKDRFAHARQFAAFAGLTPRRYESGSSVRGASRMSKAGHVSLRRALYMPAMVATVRLSGDGRSATVWRLMARKER

SEQ ID NO: 11576 - protein, 411 aa, unidentified
  source 1..411: note = protein_2ff39a9
  REGION 5..163: note = RuvC_domain
  SITE 8: note = RuvC_P1
  SITE 62: note = RuvC_P2
  SITE 102: note = RuvC_P3
  SITE 104: note = RuvC_P4
  SITE 107: note = RuvC_P5
  REGION 273..373: note = Tnp_domain
  SITE 281: note = Tnp_P1
  SITE 311: note = Tnp_P2
  SITE 319: note = Tnp_P3
  SITE 320: note = Tnp_P4
  SITE 333: note = Tnp_P5
MDPVVGLDVAKGESQVQMFLDKKMPYKNSVKVEHTVEGLEELHSYLLDLERQTGMKPPVVLESTGHYHAPIVQFLEAREYIVIIVNPLVSYRAKSSSLRKTKTDAIDAYHLGEMYYKEDLEPQKKRGIQLLNLRHLTRQHENMTGVMVQTKLQFQAVLDQVFPEYKGVFGSLYADISLKTLQNFPTSKSVLGAGVEEITQFINMHCKARSLEWAHKKTEELIEAAKRNPFQSTLYHSLLVSLNMYIDLLQAYQQQLSTLEREIDQLAVQLEEYELLQTIPGVGEKIAATIISEIGEIDRFSHPKKLVAFAGLDPSVFESGRFKGTKNHITKRGSARLRRMLYTAVRCSIRDSRKKKTTDETIARNKRLRAFYDLKREEGKPYRVAIIACANKLLHWIYAMLKTKTAFQESI

SEQ ID NO: 11577 - protein, 340 aa, unidentified
  source 1..340: note = protein_ab6804b
  REGION 6..148: note = RuvC_domain
  SITE 9: note = RuvC_P1
  SITE 52: note = RuvC_P2
  SITE 87: note = RuvC_P3
  SITE 89: note = RuvC_P4
  SITE 92: note = RuvC_P5
  REGION 210..300: note = Tnp_domain
  SITE 218: note = Tnp_P1
  SITE 248: note = Tnp_P2
  SITE 256: note = Tnp_P3
  SITE 257: note = Tnp_P4
  SITE 269: note = Tnp_P5
MAITTIGLDLAKSVFQAHGVDENGVTVLVKRLHRKQMLPFFSKLSPCLIGVEACGTAHYWARTLAAMGHEVRLIPPSYVKAYVKRGKSDALDAEAICEAVQRPTMRFVPVKTVEQQGILMTHRARSLLVRQRTMLANALRAHLAELGFVANPGIANLAKLAEQALADKNALPAYARTALEIFVRQVMSISGEIAMLDQQLIAWHAESEASRRLAAIPGLGIVTATAIAATVTDPDQFRSGRQFAAWLGLTPQQHSTGGKTRLGGISKQGDRYLRRLLVVGATAVMRHIKDKPTPMADWIRKLAEKKPFRLVSVALANKLARIAWVVLTRKEAYRPYQLAA

SEQ ID NO: 11578 - protein, 356 aa, unidentified
  source 1..356: note = protein_e8ab40d
  REGION 12..153: note = RuvC_domain
  SITE 15: note = RuvC_P1
  SITE 58: note = RuvC_P2
  SITE 93: note = RuvC_P3
  SITE 95: note = RuvC_P4
  SITE 98: note = RuvC_P5
  REGION 217..304: note = Tnp_domain
  SITE 225: note = Tnp_P1
  SITE 255: note = Tnp_P2
  SITE 263: note = Tnp_P3
  SITE 264: note = Tnp_P4
  SITE 276: note = Tnp_P5
MLQKLNSEIAVIGIDIGKNSFHIVGQDQRGAIVLRQKWSRGQVESRLANLLPCLIGMEACVGAHHLSRKLTALGHDARLMPGKYVRPYSKGQKNDYRDAEAIAEAVQRPTMKFVATKTAEQLDLQAMHRVRERLVGQRTGVINQIRAFLLERGIAVRQGLRFLRAELPGILATRTDVLSPRILRIVEDLMGDWHRLDERIEGLSGEIETLARQDQGCARLMSVPGIGPIISSAMVAAIGSGDAFSKGRDFGAWLGLVPKQMSTGDRTILGSISKRGNRYLRALFVQAAWVVLVKLGPKQWDRYGLKSWIEAAKKRLHHNVLAIALANKLARIAWAVLHNGRAFECVRTNETASQPA

SEQ ID NO: 11579 - protein, 417 aa, unidentified
  source 1..417: note = protein_8dfa82f
  REGION 12..172: note = RuvC_domain
  SITE 15: note = RuvC_P1
  SITE 69: note = RuvC_P2
  SITE 109: note = RuvC_P3
  SITE 111: note = RuvC_P4
  SITE 114: note = RuvC_P5
  REGION 280..366: note = Tnp_domain
  SITE 288: note = Tnp_P1
  SITE 319: note = Tnp_P2
  SITE 327: note = Tnp_P3
  SITE 328: note = Tnp_P4
MVRRARELLLLVGDDWAEDHHDVELQDETGRRLGRARLPEGIAGMARLHAMIGGHVGEDDDEPVQVIVGIETERGPWVQALIAAGYLVYAINPLQVARYRERHGVSGAKSDAGDAHTLADMVRTDRHQLRPVAGDSDLAEAVKVITRAHKTLIWDKTRHLLRLRRALLDFFPAAAAAYDDLAAPDVLQLLDTAPDPVSAAALGTEQIAAALRGARRRDIPGKTAKIQAALRAPHLSLPGVVAGAYAATVRTQVAILTVLAAQIEAMQGQVEAHFGQHPDAEIYRSQPGLGVLLGARVLAEFGDDKTRYVDAKARKNYAGTSPITRQSGKKKIVLARYVHNDRLIDALGLQAFAALGGSPGARAYHDQQQARGAGHRAALRQLGNRLVGILHGCLKTGTTYDEDTAWAHHQKDHELAA

SEQ ID NO: 11580 - protein, 346 aa, unidentified
  source 1..346: note = protein_fe7d2c4
  REGION 5..152: note = RuvC_domain
  SITE 8: note = RuvC_P1
  SITE 55: note = RuvC_P2
  SITE 92: note = RuvC_P3
  SITE 94: note = RuvC_P4
  SITE 97: note = RuvC_P5
  REGION 212..300: note = Tnp_domain
  SITE 220: note = Tnp_P1
  SITE 250: note = Tnp_P2
  SITE 258: note = Tnp_P3
  SITE 259: note = Tnp_P4
  SITE 271: note = Tnp_P5
MKHYAGLDVSVKETSVCIVDETGRICRETKVPSHPDDLAQVLHDPAWRLERIGLEAGPLSQWLFSGLAEAGLPIVCIETRHTKAFLKAQVNKSDRNDARGIAQMMRVNLFRPVHVKTLTSQKRRALLTARKLLQEKAIAFENDIRGLLRNFGLKVGIVGAAKFDIRIRELLDCLPDLAEIIEPLLASRRKLREEFERLHRKLLSIVRDDGVCRRLMTIPGVGPVVALAYASTIDVPARFRNSKAVGASLGLTPVLHQSGESNRIGRVSLCGDGMMRTLLYEAAQVMLTNVHVKWSWLKAWAMNIAKRRGGRKAIVALARRLGVIMHRIWSDGTVFRWTRESIPAAV

SEQ ID NO: 11581 - protein, 315 aa, unidentified
  source 1..315: note = protein_e0cabf5
  REGION 12..162: note = RuvC_domain
  SITE 15: note = RuvC_P1
  SITE 57: note = RuvC_P2
  SITE 97: note = RuvC_P3
  SITE 99: note = RuvC_P4
  SITE 102: note = RuvC_P5
  REGION 192..276: note = Tnp_domain
  SITE 200: note = Tnp_P1
  SITE 229: note = Tnp_P2
  SITE 237: note = Tnp_P3
  SITE 238: note = Tnp_P4
  SITE 250: note = Tnp_P5
MAMPVAVTQPIVGVDVAKDELVIYHAESDRLETIPNTKAAIKKWLKALPTPVDVAIEATNIYHQEFADLAYAQGCVIYMIGGYELSHYRKGVKVRAKTDALDARLLARYLTNEGHQLHPWTPPSPLYCRLISLFRRRAALVQARVSLTQSWANEPLLKSAFKTQIAAMQRLEVLLEKTIQTQLEEADLGAQLKRCMKVEGIGLLSGARLLTSFQRGDFRNADAFIAFLGMDLRISDSGKKKGRRCLTKRGDPEARRLMHNAAMSASRTAAWKGFYEALRARGFSTTQALVALARKLARVVFALLKNQSEYLPKGI

SEQ ID NO: 11582 - protein, 379 aa, unidentified
  source 1..379: note = protein_5a7c4a9
  REGION 19..174: note = RuvC_domain
  SITE 22: note = RuvC_P1
  SITE 73: note = RuvC_P2
  SITE 111: note = RuvC_P3
  SITE 113: note = RuvC_P4
  SITE 116: note = RuvC_P5
  REGION 281..367: note = Tnp_domain
  SITE 289: note = Tnp_P1
  SITE 320: note = Tnp_P2
  SITE 328: note = Tnp_P3
  SITE 329: note = Tnp_P4
  SITE 340: note = Tnp_P5
MKCTAETTLPDEPPNAVTCGIDWARDDHAVSIVDARGREVRRVTIEHNAAGLRELRELFELLSRAGACEVAIELPSGPVVDTLLQAGITIVVISPNQLKNLRGRYGSPGNKDDRFDAFVLADTLRTDRSRLRPLLPDTAATATLRRTCRARKDRVGHRVALANQLRAHLRVVFPGVVGPFADIDSPISLAFLTRLDCQNRANWLSVTRLAAWLAGAGYCGRVDPAVLYGRLTGAPHGATGDNGAANAHLTRALVAALTSVAAQIKALDAQIAQQLALHADAHIFTSLPRSGTVRAAWLLAEIGDCRARFPTPESLACLAGVAPCTRQSGKVTHVGFRWAADKQLRDAATDFAGDSRRANPWATDLYNRAIPRGHDHPTP

SEQ ID NO: 11583 - protein, 346 aa, unidentified
  source 1..346: note = protein_5fbacae
  REGION 5..152: note = RuvC_domain
  SITE 8: note = RuvC_P1
  SITE 55: note = RuvC_P2
  SITE 92: note = RuvC_P3
  SITE 94: note = RuvC_P4
  SITE 97: note = RuvC_P5
  REGION 212..299: note = Tnp_domain
  SITE 220: note = Tnp_P1
  SITE 250: note = Tnp_P2
  SITE 258: note = Tnp_P3
  SITE 259: note = Tnp_P4
  SITE 271: note = Tnp_P5
MKHYSGLDVSVKETSICIVDETGRICREIKAVSHPDDLVAVLRDPAWNLERIGLEAGPLSQWLFEGLAVAGLPVICIETRHTKAFLKAQPNKSDRNDARGIAQMMRVNLFRPVHVKTLISQKRRALLTARKLLQGKAIAIENDIRGLLRNFGLKVGIVGAIKFEERIRELVDDISDIGEIMEPLLAARQKLRDEFSRLHKKVLDIARNDLECRRLMTIPGVGPVVSLAFTSTIDIPQRFRNSKVVGAVLGLTPKLNESGESKRIGHISCCGDAMMRVLLHEAAQSLLSVTRKWSWLKAWAMNVAKRRGRQKAITALARRLAVIMHRMWSDGTEFRWSKEGLPTVHA

SEQ ID NO: 11584 - protein, 400 aa, unidentified
  source 1..400: note = protein_1a37236
  REGION 4..160: note = RuvC_domain
  SITE 7: note = RuvC_P1
  SITE 57: note = RuvC_P2
  SITE 97: note = RuvC_P3
  SITE 99: note = RuvC_P4
  SITE 102: note = RuvC_P5
  REGION 275..362: note = Tnp_domain
  SITE 283: note = Tnp_P1
  SITE 313: note = Tnp_P2
  SITE 321: note = Tnp_P3
  SITE 322: note = Tnp_P4
  SITE 335: note = Tnp_P5
MNAVGIDVSKGKSTVAVIQPFGIVIAEPFDVIHTDSGLKELVSFIKSLSGETKVVMEYTGTYYEPVANALHNAGIFVSVVNPLLIDDYDTNRVRKVKTDKIDALKIASYALDKWMKLRKYEPAETVRKTLQIMNRQCIKLNKILVMQKNSLIALLDCCFPNVNTLFTSPRRASDGHEKWVDFVAKFPHVDSVAKLSLSAFKTKYQSWCKKEHYKYSESKAEQIHSYAKTIVSTLPMTDAVKKIVSEAAKHLNSTLEAIGTLQAEMDTLASQLPEYETVMNMYGVGKVFCSQLIAEIGDVTKLKCGKSLVALAGIDPPPNQSGKDDPKSRCISKRGSPALRKTLFFIMTIYLQRQPNDEPVYQFLDKKRAEGKPYKVYMIAAAHKFLRIYYARVKDVMPAQ

SEQ ID NO: 11585 - protein, 332 aa, unidentified
  source 1..332: note = protein_0d255f0
  REGION 6..165: note = RuvC_domain
  SITE 9: note = RuvC_P1
  SITE 64: note = RuvC_P2
  SITE 102: note = RuvC_P3
  SITE 104: note = RuvC_P4
  SITE 107: note = RuvC_P5
  REGION 208..295: note = Tnp_domain
  SITE 216: note = Tnp_P1
  SITE 246: note = Tnp_P2
  SITE 254: note = Tnp_P3
  SITE 255: note = Tnp_P4
  SITE 268: note = Tnp_P5
MNKLFIGIDFSKKKVDVSVIEKENMSSGVHREFSNDVAGHESLLAWLCESYPQTGKDQMLFCGENTGLYSVCLSNTLAHEGYTLWLEHPYSIKHSSGMQRGKNDKSDSLLIAQYACRFEDMAKVYAPNTETIRALHSFFTFRDLLVKMKNEALVHAKELHSVLKGNRATDYIYQHSLTQVKNLTREIKDVEKEIMDLINSEEEIKNNYERITSIKGVAFVNALALIVYTENFTCFDDPRKLACYAGVVPFQRTSGSSVKGNAKTSGFANKKLNTLLTQAARTAAIHDPILREYYRRKREEGKHHNLVINNIRNKLIHRICALVRNQTFDQAA

SEQ ID NO: 11586 - protein, 428 aa, unidentified
  source 1..428: note = protein_03f89f2
  REGION 20..181: note = RuvC_domain
  SITE 23: note = RuvC_P1
  SITE 79: note = RuvC_P2
  SITE 120: note = RuvC_P3
  SITE 122: note = RuvC_P4
  SITE 125: note = RuvC_P5
  REGION 288..377: note = Tnp_domain
  SITE 296: note = Tnp_P1
  SITE 326: note = Tnp_P2
  SITE 334: note = Tnp_P3
  SITE 335: note = Tnp_P4
  SITE 347: note = Tnp_P5
MNYNIQNAKIASITEKTLIVGIDVGSETHYARAFDWRNYEFTKKPLAFSNTEAGFLTFKAWVEDLQEKYGKTAVIAGMEPTGHYWFALGKFLQDNGMKPVHVNPHHVKKSKELDDNNPNKNDRKDPKTIAALVNEGRFSYPYIPTGIYAEIRSLSNLRFQTQEEVTRIKNRIARWFSIYFPEYKDVYGDVKAVSGRMVLKKAPLPEDIKKLGVEGVNKIWRDAKQRGAGMKRAKTLVSAAEHSVGSKEAPEAARIELKHLLGDMDVYTARLEELVEKLENKLKEIPYIDKLLEIKGIGMITVSGFIAEVGDIGRFDNPKQLQKLAGYAIVANDSGKHNGESRISYRGRKRLRYVLYEAAISLVGKNTEFRAIHEYYRTRKENPLKKMQSVVAVACKVIRVFYTILTKGVDYDAGKLLGDIRHRKVQAA

SEQ ID NO: 11587 - protein, 322 aa, unidentified
  source 1..322: note = protein_4d9f5d6
  REGION 9..160: note = RuvC_domain
  SITE 12: note = RuvC_P1
  SITE 56: note = RuvC_P2
  SITE 96: note = RuvC_P3
  SITE 98: note = RuvC_P4
  SITE 101: note = RuvC_P5
  REGION 195..279: note = Tnp_domain
  SITE 203: note = Tnp_P1
  SITE 232: note = Tnp_P2
  SITE 240: note = Tnp_P3
  SITE 241: note = Tnp_P4
  SITE 252: note = Tnp_P5
MSQPNPLCVGIDVSKATLDIAASSYIEQFTVGNDSDGFDAIITELRQHSVELILMEATGGLEAAVACSLQSEGFDVTVINPRQARDFARAMGYLAKTDRIDARVLAQMAEVINRHPERKRFIRILPEAERQVLAAMVVRRRQLIAMLVAERNRLYSAHPQSKKSISIIINALEDELARIDDGMNNHIKSHFKDLTARLSSIKGVGTITAAALLAEVPELGSLSRRAISALVGVAPINRDSGTMRGRRTIFGGRDGVRTTLYMAALVATRFNPVIKNFYMRLLAAGKVKKVALVACMRKLLTILNAMLRKNEEWDESYHHVAQ

SEQ ID NO: 11588 - protein, 347 aa, unidentified
  source 1..347: note = protein_9f85b00
  REGION 11..154: note = RuvC_domain
  SITE 58: note = RuvC_P2
  SITE 94: note = RuvC_P3
  SITE 96: note = RuvC_P4
  SITE 99: note = RuvC_P5
  REGION 226..310: note = Tnp_domain
  SITE 232: note = Tnp_P1
  SITE 263: note = Tnp_P2
  SITE 271: note = Tnp_P3
  SITE 272: note = Tnp_P4
  SITE 283: note = Tnp_P5
MAAKKRSVIGGIDTHRAAIIDSTGGLLGDAEFPATTAGYADLLAWMRSFGRVAAVGVEGTGSYGAGLARYLTSKKMAVVEVDRPDRRARRAKGKSDSIDAVAAARATLGGTAMGTPKTRTWPVEAIRALRVARRGAVKARTAALNQMRGLVAAAPEPLRAHLTRVSAAVLVSRSAALTYDPARLHEPKHATAAALVGLARRVTTLTEEITTLDRQVTPIVQKAAPRTTALFGVSPDVAAQLLTTAGDNPDRLHSEAALAHLCGAAPIPASSGRVRRHRLHRGGDRGANHALHTIALCRMRYDQRTRAYQQRRTTEGLSNQELLRCLKRYIVRDVYTALRADFAALTP

SEQ ID NO: 11589 - protein, 356 aa, unidentified
  source 1..356: note = protein_89dbda5
  REGION 15..163: note = RuvC_domain
  SITE 18: note = RuvC_P1
  SITE 67: note = RuvC_P2
  SITE 103: note = RuvC_P3
  SITE 105: note = RuvC_P4
  SITE 108: note = RuvC_P5
  REGION 235..319: note = Tnp_domain
  SITE 241: note = Tnp_P1
  SITE 272: note = Tnp_P2
  SITE 280: note = Tnp_P3
  SITE 281: note = Tnp_P4
  SITE 292: note = Tnp_P5
MPSITPDDTVIEVFGGVDTHQDTHTAAVIDQVGRVLGTHEFPATAAGYADLLAWIRGHGRLSRVGVEGTGAYGAGLARLLRDEHADVIEVDRPDRKTRRFQGKSDPIDAIQAARAALAGERTGTPKQRDGRVEALRNLRVARRSAVEQRADTQRQMKTLIVTAPDELRARLRGLSVKQLVVTCANLRPERADAATPLTAVKLALRSLARRHQQLSAEITDLDELLEPVVAAINPGLLAANGVGAEIAGQLLVSAGENHDRLASEAAFAMLCGVAPIPASSGKTTRHRLNRGGDRQANAALYRVVLCRLRWDPRTRDYMQRRTKEGMSKKEIIRCLKRYVARELYQLIRMNDLELAA

SEQ ID NO: 11590 - protein, 311 aa, unidentified
  source 1..311: note = protein_ad3508f
  REGION 5..155: note = RuvC_domain
  SITE 8: note = RuvC_P1
  SITE 52: note = RuvC_P2
  SITE 92: note = RuvC_P3
  SITE 94: note = RuvC_P4
  SITE 97: note = RuvC_P5
  REGION 186..270: note = Tnp_domain
  SITE 194: note = Tnp_P1
  SITE 223: note = Tnp_P2
  SITE 231: note = Tnp_P3
  SITE 232: note = Tnp_P4
  SITE 243: note = Tnp_P5
MASFLGIDVSSLSLDALVRPQGIKISVRNDPAGFEELVKSLRGLSIKRVLLEATGGYERDVMRFLQDASYKVIRVNPTRARSFADSLGIKAKTDAIDAAVLAHFAEVIPDKPTLKTSPERALLRELLQQRDRLVQQRDDDRRRLKQAQSAMVAIFLNTNLQHFASQIKLVEQAIKQQATALNDERIAKLDEVKGIGMVTATKLVALLPELGHVESREIASLVGVAPFNHDSGKSVGKRFISGGRFEVRRALYMACLVAVKHNPTLKARYEALRGRGKLAKVAIVACMRIFIVRLNAMLRSGTPWRDDLPQP

SEQ ID NO: 11591 - protein, 355 aa, unidentified
  source 1..355: note = protein_cfe00d9
  REGION 19..161: note = RuvC_domain
  SITE 22: note = RuvC_P1
  SITE 65: note = RuvC_P2
  SITE 100: note = RuvC_P3
  SITE 102: note = RuvC_P4
  SITE 105: note = RuvC_P5
  REGION 245..309: note = Tnp_domain
  SITE 262: note = Tnp_P2
  SITE 270: note = Tnp_P3
  SITE 271: note = Tnp_P4
  SITE 283: note = Tnp_P5
MEVLNTPLEEPSKSEVITIGLDIAKNVFHAHGSDASGRALFRRKISRTTLLEFFARQPRCLVALEACGGAHHWARELTLLGHEVKLIPPAYVKPFVKRNKNDGVDAEAICEAAQRPSMRFVAIKSEAQQASALVLRTRDLLVRQRTQLINAIRGHLTEYGWVAPKGPSHVAVLGDMIEGAMGSSLPEAAKPMFRTMLDLLDQLNTRSANWTRRSRVGPARTRSPDGSRRYRAWARSRPPRLRPLPPPAETFAKGRDFAAWLGLAPRQLSTGGKQKLGSITKMGERTLRRLLISGCSAVVLQASKRGASAGSWLEQMMARKPRMLVTVALANRTARIVWALLLKQEDYKAPVAAGA

SEQ ID NO: 11592 - protein, 341 aa, unidentified
  source 1..341: note = protein_bdd35df
  REGION 5..147: note = RuvC_domain
  SITE 8: note = RuvC_P1
  SITE 51: note = RuvC_P2
  SITE 86: note = RuvC_P3
  SITE 88: note = RuvC_P4
  SITE 91: note = RuvC_P5
  REGION 209..292: note = Tnp_domain
  SITE 217: note = Tnp_P1
  SITE 247: note = Tnp_P2
  SITE 255: note = Tnp_P3
  SITE 256: note = Tnp_P4
  SITE 268: note = Tnp_P5
MDTVIGVDLAKNVFQLHGASMAGHLKFRKKLSRLQFRKFMAGHPSAVVVMEACGSAHYWAREMVKLGHEVKLIAPQYVKPFVKRQKNDAADAEAIVIAAQRPEMRFVEPKSEEQQARAVLFRARKRLVHQRTDLVNALRSVLYEFGHIIPQGIEQLKRIDAILEDPNSDLPELVREECRSLIDQIAYKTERIDAKAEQLKKLATRTVTAQRLQTMPGVGPLTALAIEAFAPDMAAFRRGRDFAAWLGLVPRQHSSGGKERLGRVSKEGQADIRQLLIVGAMSRLNWLGRKSIPSGSWLAQMLARKPRMLVAIALANKMARTIWAMLTRKEDYRNPAQAVTA

SEQ ID NO: 11593 - protein, 341 aa, unidentified
  source 1..341: note = protein_17f717d
  REGION 7..148: note = RuvC_domain
  SITE 10: note = RuvC_P1
  SITE 53: note = RuvC_P2
  SITE 88: note = RuvC_P3
  SITE 90: note = RuvC_P4
  SITE 93: note = RuvC_P5
  REGION 211..296: note = Tnp_domain
  SITE 219: note = Tnp_P1
  SITE 249: note = Tnp_P2
  SITE 257: note = Tnp_P3
  SITE 258: note = Tnp_P4
  SITE 270: note = Tnp_P5
MDNISIIGLDLAKRVFQAHGARADGSVGFRKKLGRSQVLGFFAKQPRCIVAMEACATAHEWGRAIGELGHEVRLIPPIYVKPFVKRQKNDAADAEAIAEAAGRPTMRFVAVKSEAQQAKAMAFRTRDLLVKQRTQLINALRGHLAEHGLIAPQGPAHVKVLADALEAAGSRLETLVIELGRLYLEQIELLSGRIADLDKVLKREAAREEDTARLMTMPGVGPLTAMAVQTFAPPMETFRRGRDFAAWTGLVPVQRSTGGKQILGRTSKMGQRDIRRLLIIGAMSVVRWAVRKGAPEGSWLARMLARKPRMVVAIALANKMARGIWAMSTRGENFRGPVAAV

SEQ ID NO: 11594 - protein, 323 aa, unidentified
  source 1..323: note = protein_5885b45
  REGION 8..150: note = RuvC_domain
  SITE 11: note = RuvC_P1
  SITE 52: note = RuvC_P2
  SITE 92: note = RuvC_P3
  SITE 94: note = RuvC_P4
  SITE 97: note = RuvC_P5
  REGION 191..278: note = Tnp_domain
  SITE 199: note = Tnp_P1
  SITE 229: note = Tnp_P2
  SITE 237: note = Tnp_P3
  SITE 238: note = Tnp_P4
  SITE 251: note = Tnp_P5
MNKDIKYFGIDISHLVFDVTDSEGNYYQFKNTISGFKKLVKLLDVNSHCVMEATGYYHYQLAYYLLESGIKVSVENPLAVKRFIQMKLSKIKTDKSDSKLICAYAKQVELKLWKGNSKHQTECLQMTRLLSVYTKQSTMLKNKIHGEAVLGNPSKVVVSSLNRSLKQVQKELKILEDKLLILVKEVHQDLLTRVKTIPGIGAKTSLMLVVLTDGFERFTSGSELCSYAGLTPVIRKSGSSVNGRSRISKIGNQKLRNLLFMCSFNACKYNQACKALYDRLVAKGKSKKLALIAVCNKLLKQAFAIAKSGLTYDNNYRSTLVKN

SEQ ID NO: 11595 - protein, 392 aa, unidentified
  source 1..392: note = protein_2f4e71f
  REGION 4..163: note = RuvC_domain
  SITE 7: note = RuvC_P1
  SITE 60: note = RuvC_P2
  SITE 101: note = RuvC_P3
  SITE 103: note = RuvC_P4
  SITE 106: note = RuvC_P5
  REGION 266..353: note = Tnp_domain
  SITE 274: note = Tnp_P1
  SITE 304: note = Tnp_P2
  SITE 312: note = Tnp_P3
  SITE 313: note = Tnp_P4
  SITE 326: note = Tnp_P5
MIYLGIDVSKDKHDCCILSQDRDLLTKPFSVPNSREGYEKLFSLVSSFENNPEKVKVGLEATGHYSFAILGYLLEKGFNCFVFNPLHTNLYRKALSLRKTKTDKVDSKTIANMLFSSVGLKPYSKALYHNEQLKSLSRYRFSKVRERAKLKQQLARLVNILFPELEKLVPTLHISSVYALLEQFPGASFVANAHLTKLTNLLTTASKGHYKKEKAIQIRVSAASSVGCFMPAKSLELKHTITLIRVLSNEIAEIESEIKKLMDESHSPITSIPGMSYRMAAMILSEIGDFSNFDSPDKILAFAGLSPSTYQSGKLDNAYSHMEKRGSRYLRYALYTATSYVCVWDKSFAVYLHKKISEGKHYYVAISHAIKKLVRLIYALQTSGQQYIPAVA

SEQ ID NO: 11596 - protein, 346 aa, unidentified
  source 1..346: note = protein_1d75879
  REGION 5..152: note = RuvC_domain
  SITE 8: note = RuvC_P1
  SITE 55: note = RuvC_P2
  SITE 92: note = RuvC_P3
  SITE 94: note = RuvC_P4
  SITE 97: note = RuvC_P5
  REGION 212..300: note = Tnp_domain
  SITE 220: note = Tnp_P1
  SITE 250: note = Tnp_P2
  SITE 258: note = Tnp_P3
  SITE 259: note = Tnp_P4
  SITE 271: note = Tnp_P5
MKHYAGLDVSVKETSVCIVDETGEICRERKVVSHPDDLIELLCDPRWNLERIGLEAGPLSQWLYEGLARAGLPVICIETRHTKAFLKAIPNKTDRNDARGIAQMMRVHLFRPVHVKTLTSQKRRALLTARTLLQGKAIAIENDLRGLLRNFGLKVGMVGKVKYEDRIRELTEGMPELAEIVEPLLAARQKLREEFAKLDRKVREEVRTDPVCRRLMTVPGVGAIVALAYAATIDIPARFRSSRSVGAVLGLTPVLNQSGESNRRGRVSRCGDGMLRSLLYEAAQVLLIRVRKWSWLKAWAMNVAKRRGLQKAIVALARRLAVILHRIWSDGTEFHWTREDAIAIAA

SEQ ID NO: 11597 - protein, 343 aa, unidentified
  source 1..343: note = protein_2243b6b
  REGION 7..149: note = RuvC_domain
  SITE 10: note = RuvC_P1
  SITE 53: note = RuvC_P2
  SITE 88: note = RuvC_P3
  SITE 90: note = RuvC_P4
  SITE 93: note = RuvC_P5
  REGION 211..295: note = Tnp_domain
  SITE 219: note = Tnp_P1
  SITE 249: note = Tnp_P2
  SITE 257: note = Tnp_P3
  SITE 258: note = Tnp_P4
  SITE 270: note = Tnp_P5
MMTDTMIGIDLAKNVFQVHGASLTGQIRFRRKLSRLQFRRFMAEQPAAVVVMEACGSAHSWAREMAKYGHEVKLIAPQYVRPFVKRQKNDAADAEAIVIAAQRPEMRFVAPKAEAQQARALLFRGRERLVHQRTELVNALRSHLYEFGHTTPQGIGNMKRVEAIIEDEACDLPELVREECRDLLLQISEKTQRIQTKTKQISSLAAQTDATRRLQTMPGIGPMSALAVEAFAPPMESFRRARDFAAWLGLVPRQHSSGGKERLGRVSKAGQADIRRLLIIGAMSRLNWLGRKTIPDGSWLARMLDRKPRMLVAIALANKMARAIWAMLTKKEDYRYPVQTVAA

SEQ ID NO: 11598 - protein, 342 aa, unidentified
  source 1..342: note = protein_a27e43e
  REGION 6..150: note = RuvC_domain
  SITE 9: note = RuvC_P1
  SITE 54: note = RuvC_P2
  SITE 89: note = RuvC_P3
  SITE 91: note = RuvC_P4
  SITE 94: note = RuvC_P5
  REGION 212..299: note = Tnp_domain
  SITE 220: note = Tnp_P1
  SITE 250: note = Tnp_P2
  SITE 258: note = Tnp_P3
  SITE 259: note = Tnp_P4
  SITE 271: note = Tnp_P5
MKIIRVGVDLAKNIFQVHGVDRNEKPVWQRKLKRDEWLKVLLDKIEPGCEIGMEACGGAHHWARKLEAQGYTVKLIAPQFVKPYVKSNKNDALDAEAICEAMSRPNMRFVTIKTVEQQDAQAVHRIRAELMAQRIAKANQIRGLVSEYGIVATKEISHLRAAIPEWLEEAENGLTSRFRQLLHGLWGDLKLLDTRVQELDQEIAALAENPVAQRLQQLRGVGPMISTALLATVGDASQFTNGRQMAASLGLTPRQNSSGGKERLLGISKRGDAYVRCLLVHGARSMIFSSKVKNDRLSQWVKRIATTRHPNVAAVAMANKTARIAWAMIRNGSDYQPDYATA

SEQ ID NO: 11599 - protein, 391 aa, unidentified
  source 1..391: note = protein_1ac1e9a
  REGION 4..163: note = RuvC_domain
  SITE 7: note = RuvC_P1
  SITE 60: note = RuvC_P2
  SITE 101: note = RuvC_P3
  SITE 103: note = RuvC_P4
  SITE 106: note = RuvC_P5
  REGION 266..353: note = Tnp_domain
  SITE 274: note = Tnp_P1
  SITE 304: note = Tnp_P2
  SITE 312: note = Tnp_P3
  SITE 313: note = Tnp_P4
  SITE 326: note = Tnp_P5
MIYAGIDVAKDKHDCFITNSDGEVLFKSFTIPNNREGFETLFQKILSVSDDLTKVKVGLEATGHYSYNLLGFLLNKGLTTFVINPLHTNLYRKSLSLRQTKTDKVDARTIASMLMSDVNLKSYSDISYHNEELKSLTRYRFDKVQERAKLKTSVSRLICILFPELEKLVPTLHMTSVYAMLSEFPGAKHVANAHLTKLSNLLSEASKGHYGKETAITFREAARISIGSNMPAKSLELKHTIKLIQELTSEIDEIENEIKIIMDKINSPILSIPGINYRMGAMIIAEIGDFSRFDSPDKILAYAGFSPSTYQSGQLDGAYSHMEKRGSRYLRYALYNATKYVCHWDSTFAEYLAKKRAEGKHYNVAISHAVKKLVRVIYHLEKTNQQYIKVA

SEQ ID NO: 11600 - protein, 320 aa, unidentified
  source 1..320: note = protein_c0b4bff
  REGION 8..163: note = RuvC_domain
  SITE 11: note = RuvC_P1
  SITE 56: note = RuvC_P2
  SITE 96: note = RuvC_P3
  SITE 98: note = RuvC_P4
  SITE 101: note = RuvC_P5
  REGION 195..279: note = Tnp_domain
  SITE 203: note = Tnp_P1
  SITE 232: note = Tnp_P2
  SITE 240: note = Tnp_P3
  SITE 241: note = Tnp_P4
  SITE 252: note = Tnp_P5
MSAFSLTVGIDVAKAHVDVCVLGADSGAQRFSNDPDGHSALAASLLPLGVDLVVMEATGGYEAALACALQASGLPVAVLNPRQARDFARSMGRLAKTDAVDARMLAEMAAVLVRREDLARFLRPVADECQQWLAALVTRRRQLLAMLGSERQRLQITPTKLHPSIEAIIAAIKAQLHDLEAQMVGHVREHFSELDGLLQSTNGIGPVASATLIAQLPELGRLNRREIAALVGVAPMSNDSGNRKGRRRVQGGRFEIRRVLYMATLTATRYNPVIRAFYERLKAAGKLPKVALVACMRKLLTMLNAMVRTGKPWDASLHRA

SEQ ID NO: 11601 - protein, 337 aa, unidentified
  source 1..337: note = protein_a86e31e
  REGION 7..149: note = RuvC_domain
  SITE 10: note = RuvC_P1
  SITE 53: note = RuvC_P2
  SITE 88: note = RuvC_P3
  SITE 90: note = RuvC_P4
  SITE 93: note = RuvC_P5
  REGION 209..293: note = Tnp_domain
  SITE 217: note = Tnp_P1
  SITE 247: note = Tnp_P2
  SITE 255: note = Tnp_P3
  SITE 256: note = Tnp_P4
  SITE 268: note = Tnp_P5
MNEITTIGIDLAKSVFQLHGVDPKGTPVLRRQLRRSQMLEFFQHLPGCLIGMEACSGAHYWARELTRLGHDVRLMQPSYVKGYVKRGKTDQADAEAICEAVTRPSMRFVPVKSEKTQSQLITHKAREFLVRQQTQIVNAIRAHLGEFGIVIAKGIQNTGRLIEASDKATLPGAARKALNLLADQLVDTQKKIEDLTADVASDAASNEAARRLQTIPGVGPITASALVAALPAVSDFKSGRDLSAWIGLTPKPHSSGGKERLGRISKMGNRYLRRLLYLGAMAQVSARRRGAPGDDWLWKITQRKKPKQAAIALANRMARTVYALLKNGTKYQAAWAA

SEQ ID NO: 11602 - protein, 352 aa, unidentified
  source 1..352: note = protein_b375eb1
  REGION 7..148: note = RuvC_domain
  SITE 10: note = RuvC_P1
  SITE 53: note = RuvC_P2
  SITE 88: note = RuvC_P3
  SITE 90: note = RuvC_P4
  SITE 93: note = RuvC_P5
  REGION 212..296: note = Tnp_domain
  SITE 220: note = Tnp_P1
  SITE 250: note = Tnp_P2
  SITE 258: note = Tnp_P3
  SITE 259: note = Tnp_P4
  SITE 271: note = Tnp_P5
MERISIIGLDLAKRVFQVHGVSEKHEVVTQKKLSRSELLIWFTKLEPCLVGMEACATAHYWGRELKKLGHEVRLIPPAYVKPYVKRQKNDRADAAAICEAVSRPAMRFVAIKDKDQQAVQVLHRTRSLLIRQRVQLGNALRAHMAEFGWVFPLGMAGVTQASSAVRETPDADLPALARQVLLGLVDQIDVVKKQISSLDRQMVVWHRDHAESQRLATIPGIGVVTASAIVATLGDGKQFRSGRDFAASIGLVPRQNSSGGNDRLGRISKQGNPYLRQMLILCAISQLSGRCREKPAGGVWFEQLLKRKPARVAAAALANKMARVAWAVHTKGENYRVARTVISPEGVVTMAA

SEQ ID NO: 11603 - protein, 342 aa, unidentified
  source 1..342: note = protein_3b2f077
  REGION 7..149: note = RuvC_domain
  SITE 10: note = RuvC_P1
  SITE 53: note = RuvC_P2
  SITE 88: note = RuvC_P3
  SITE 90: note = RuvC_P4
  SITE 93: note = RuvC_P5
  REGION 209..292: note = Tnp_domain
  SITE 217: note = Tnp_P1
  SITE 247: note = Tnp_P2
  SITE 255: note = Tnp_P3
  SITE 256: note = Tnp_P4
  SITE 268: note = Tnp_P5
MEEVTLVGIDLGKHSFHLHAQDRKGKEIFRRKVTRRQLVELFVNFPACTIAMEACAGAHFMARTLAGFGHQVRLIAPHLVRPFVKSNKNDFADAEAICEAASRPSMRFVTPRTEPQQTLSALHRVRESFVRERVCTGNQVHGILLEFGISLPVGCTVLKRLPAIIAQYSLPPRLVVLLERLHAHYKYLDEQIAELDKDLVCQLGEDDLGQRLLTIPGVGPITASVLSSEVGDGKQYRSSRDFAASIGLVPRQHSTGGKANLLGISKRGDKNIRRLLVQCARSYMRDVARRAGPLADWVRTLLARRHSSVVACALANKLARIAWAIAARHTVFETAGYQLQKG

SEQ ID NO: 11604 - protein, 404 aa, unidentified
  source 1..404: note = protein_29902aa
  REGION 6..162: note = RuvC_domain
  SITE 9: note = RuvC_P1
  SITE 60: note = RuvC_P2
  SITE 100: note = RuvC_P3
  SITE 102: note = RuvC_P4
  SITE 105: note = RuvC_P5
  REGION 271..358: note = Tnp_domain
  SITE 279: note = Tnp_P1
  SITE 310: note = Tnp_P2
  SITE 318: note = Tnp_P3
  SITE 319: note = Tnp_P4
  SITE 331: note = Tnp_P5
MPELWAGTDAGKAEHHCTVIDKDATVYLTRRVPNNENELLKLLDDILGLAEGEPVTWAVDLNAGGAALWIALLVSHGQRLLYIPGRSVHHASGVYRGSGKTDAKDAFVIADQARMRRDLQPVQDMNEIAVDLKILTGRRMDLAADRTRAINRLRAQLLEYFPALERAFDYSTSKTALVLLTKYQTPAAMRRIGRARLATWLKNHGVRTLTIAKNAADTAVTAGEAQHTAVPGEKTAAKMVHTLAREVMALDQEIAELEALIEGRFREHPDADVITSMPGIGDTLGAEFIAATGGDMSVFGSPDRLAGVAGLAPVPRDSGKVSGNLRRPRRYSRRLLRMFYLSAQTAAVHCPESQRFYQRKRAEGKNHRQAVLALARRRLNVLWALIRDHRTFERATPNIGAVLP

SEQ ID NO: 11605 - protein, 348 aa, unidentified
  source 1..348: note = protein_0919758
  REGION 10..152: note = RuvC_domain
  SITE 13: note = RuvC_P1
  SITE 56: note = RuvC_P2
  SITE 91: note = RuvC_P3
  SITE 93: note = RuvC_P4
  SITE 96: note = RuvC_P5
  REGION 217..304: note = Tnp_domain
  SITE 225: note = Tnp_P1
  SITE 255: note = Tnp_P2
  SITE 263: note = Tnp_P3
  SITE 264: note = Tnp_P4
  SITE 276: note = Tnp_P5
MQFTSALPVIGMDIAKNVFQIHVVDVETGEIGRHKLKRERVTAFFANRQKSLVAMEACGGAHHWARTLQALGHEVKLLPAKHVRPFVLRDKTDARDAQGIWVAAQQLQIKAVPVKSEQQQACLALHRMRAQLMKMRIMQTNALRCLLYEFGIVLPEGHRILLDRIQGELGKAQERGRLPAVVVLSVQEQLKRIEGLQADIDQLDKRLASLAKHNQQMQALLAIPGIGPLTATAVVSTATDITSFESGRQFAAWLGLTPRQTGTGGKTRQLGISKRGDAYVRTMLMHGARAVIARSRHGGWIESLLQRRPYNVVVAALANKLARTAWAVLAKGKAFDPLQWNPTEITPA

SEQ ID NO: 11606 - protein, 338 aa, unidentified
  source 1..338: note = protein_ee27b5d
  REGION 7..149: note = RuvC_domain
  SITE 10: note = RuvC_P1
  SITE 53: note = RuvC_P2
  SITE 88: note = RuvC_P3
  SITE 90: note = RuvC_P4
  SITE 93: note = RuvC_P5
  REGION 211..295: note = Tnp_domain
  SITE 219: note = Tnp_P1
  SITE 249: note = Tnp_P2
  SITE 257: note = Tnp_P3
  SITE 258: note = Tnp_P4
  SITE 270: note = Tnp_P5
MQEVAVVGLDLAKNVFQVHGVASDGAVLVRRQLRRTQVLDFFRALSPCLVGIEACASAHHWGRELIALGHEVRLMPPAYVKAYLKRGKTDAADAEAIAEAVTRPTMRFVAVKSRDQQAVLMLHKARDLLVRQRTMLINALRGHLGEFGIIAAQGAAGVEAAKRALREDPGQLPELAQLALMGLADQLDRLTAEIANLERRILTWHRQDAVSQRLASIPGIGPITASAMAASAPDPALFRSGRQFAAWLGLTPRAHSSGGKERQAGISKMGDSYLRRLLVVGATAVLRQSRQKASGGTWIQGLLDRKKPKVAAVALANKTARIAWVLMSRGESYRPATA

SEQ ID NO: 11607 - protein, 345 aa, unidentified
  source 1..345: note = protein_d6ab413
  REGION 7..148: note = RuvC_domain
  SITE 10: note = RuvC_P1
  SITE 53: note = RuvC_P2
  SITE 88: note = RuvC_P3
  SITE 90: note = RuvC_P4
  SITE 93: note = RuvC_P5
  REGION 211..295: note = Tnp_domain
  SITE 219: note = Tnp_P1
  SITE 249: note = Tnp_P2
  SITE 257: note = Tnp_P3
  SITE 258: note = Tnp_P4
  SITE 270: note = Tnp_P5
MEQDTMIGVDLAKSVFQLHGATMTGHVKFRKKLSRQQFRKFKTDHPSASVVMEACGSAHYWAREMTHLGHEVKLIAPQYVRPFVKRQKNDVADAEAIVIAAQRPEMRFVEPKCEDQQARAVLFRARERLVHQRTELVNALRAVLYEFGKIVPQGIRHLKRIDAMPEDPSSSLPMLVCEECRDLMAQIAEKTARIVAKTKKVKELAEQTVMARRLQTMPGVGPMTALAIEAFAPDMKIFRRGRDFSAWLGLVPRQHSSGGKERLGRISKAGQTDIRRLLIIGAMSRLNWMGRRSIPEGSWLAEMLSRKPRMLVAIALANKMARALWAMLTNNEGYRDPTFAKAAGA

SEQ ID NO: 11608 - protein, 342 aa, unidentified
  source 1..342: note = protein_918052c
  REGION 4..156: note = RuvC_domain
  SITE 7: note = RuvC_P1
  SITE 55: note = RuvC_P2
  SITE 96: note = RuvC_P3
  SITE 98: note = RuvC_P4
  SITE 101: note = RuvC_P5
  REGION 219..304: note = Tnp_domain
  SITE 227: note = Tnp_P1
  SITE 257: note = Tnp_P2
  SITE 265: note = Tnp_P3
  SITE 266: note = Tnp_P4
  SITE 277: note = Tnp_P5
MTMIGIDPHKQSHTVVAIDDHEIVLDEFKLRASSVQADRLREWAARFDSCQWAVESANGLGYLLAQQLVAAGETVFDVPPVLASRVRVLGSGRSQKNDPNDARSVAIAAMRSDRLGRVRADDHARVLRLLAKRHRDMAQLRNKHCTRLHALLGELAAGGIGTELTVSKANAVLDTVVVDSEVLRHRVLIATELIDDIARLDTILKASKKRVERAVSASGTTLCSIVGIGPINAATILGYSGDIARFATKAQFASYNGTAPIEASSGGRVRHRLNPRGNRKINHALHVAAICQLRYDGEGRTYFDRKVAEGKSSKEAIRALKRRISDRVFRVIIDDTRRSGLD

SEQ ID NO: 11609 - protein, 399 aa, unidentified
  source 1..399: note = protein_6248544
  REGION 5..163: note = RuvC_domain
  SITE 8: note = RuvC_P1
  SITE 62: note = RuvC_P2
  SITE 102: note = RuvC_P3
  SITE 104: note = RuvC_P4
  SITE 107: note = RuvC_P5
  REGION 273..362: note = Tnp_domain
  SITE 281: note = Tnp_P1
  SITE 311: note = Tnp_P2
  SITE 319: note = Tnp_P3
  SITE 320: note = Tnp_P4
  SITE 333: note = Tnp_P5
MDPVIGLDVAKGESQVQAFLQRKKTYKKSFKFAHDLQGLGMFYEFFREVKQVSGQSPAVIFESTGHYHEPVLQYLEEHGITYYLINPMVAHKAKQTSLRKVKTDKMDAFHLGELYYKEDLEAFQKKTVKTLNLRQLTRQHSALTESYVGIKLQFQTILDQVFPEYHHVFSNLYGNISLKTLLQYSTSYDVKNTTQEQLATDMYQIGAKRSYAWFLDKAQQLKDAAERNPFQERIYHGHLISLRMYIQMIFQYQEHLSKMREEIDALAATFEDYKLIQSIPGVGGKIAATIISEIGEIDQFPHPKKLAAYAGIDPEVFESGKFKATINCITKRGSSRLRQSLYSAVQCGIAKNRNTKLRAFYDRKREEGKPHKVTVIACANKLIHWIHAMLKRKEVFVDQ

SEQ ID NO: 11610 - protein, 345 aa, unidentified
  source 1..345: note = protein_52eee75
  REGION 6..147: note = RuvC_domain
  SITE 9: note = RuvC_P1
  SITE 52: note = RuvC_P2
  SITE 87: note = RuvC_P3
  SITE 89: note = RuvC_P4
  SITE 92: note = RuvC_P5
  REGION 211..298: note = Tnp_domain
  SITE 219: note = Tnp_P1
  SITE 249: note = Tnp_P2
  SITE 257: note = Tnp_P3
  SITE 258: note = Tnp_P4
  SITE 270: note = Tnp_P5
MDIASIGIDLGKTTFHLVALGERSKVLLRKKFSRSQLLVYTAMLPHSLIGLEACSGAHFLGGKLREQGHHVRLIPAQFVKPYRKSNKNDFLDAEAIAEAVTKQNMRFAQLKTQEQLDWQALHRVRDRLVQRRTALINEIRGFLLERGIAFAAQPIHLRKNLPGVIEDAEQNLSPRLRWLLDRMWQEWKQIEIDVAAVTEEIERISKDDARCRQLRQIPGFGPLISTATVAAIGNGCAFRRGRDFAAWVGVVPRQHSTGGKQKLYGISKRGNVYLRRMLIHGARSVLFRVKYNTGGFGQWVRRLAQRAPSNKVVVAIANKLARIAWAVLSSGRDYRHQPLQQLAAA

SEQ ID NO: 11611 - protein, 403 aa, unidentified
  source 1..403: note = protein_c7c7dd5
  REGION 4..160: note = RuvC_domain
  SITE 7: note = RuvC_P1
  SITE 57: note = RuvC_P2
  SITE 97: note = RuvC_P3
  SITE 99: note = RuvC_P4
  SITE 102: note = RuvC_P5
  REGION 269..355: note = Tnp_domain
  SITE 277: note = Tnp_P1
  SITE 308: note = Tnp_P2
  SITE 316: note = Tnp_P3
  SITE 317: note = Tnp_P4
MIFIGDDWAEDHHDVYLMDAAGLRLASRRLPEGLIGIRQLHELIARYAQDPRDVAVGIETDRGLWVTALTAAGYQLWAINPMAVARYRGRHHVSGAKSDASDAKLLADLVRTDRHNHRSIAGDSADAEAIKVLARAHQSLIWARTRHANALRSALREYYPAALEAFEDLTDRDALAILGRAPTPAQAARLSLTKISSALKQGGRQRNIDATAREIQDTLRGEHLNAPEAVATAFGATTRATVTILVELNNQIRELESNLADHFEKHPDADIYRSLPGLGVVLGARVLGEFGDDPNRYTTAKSRKNYAGTAPLTIASGKKRAVLARHVRKRRLYDAIDQWAFCALNTSPGARVFYDQHRAAGDSHHQALRALGNRLVGILHGCLNHHTHYNEHTAWAHRMPAAA

SEQ ID NO: 11612 - protein, 403 aa, unidentified
  source 1..403: note = protein_607e27e
  REGION 4..160: note = RuvC_domain
  SITE 7: note = RuvC_P1
  SITE 57: note = RuvC_P2
  SITE 97: note = RuvC_P3
  SITE 99: note = RuvC_P4
  SITE 102: note = RuvC_P5
  REGION 271..358: note = Tnp_domain
  SITE 279: note = Tnp_P1
  SITE 309: note = Tnp_P2
  SITE 317: note = Tnp_P3
  SITE 318: note = Tnp_P4
  SITE 331: note = Tnp_P5
MISVGIDVSKGKSTVCIMKPGGEVLSAPFEITHTKSELLDLINIIKSQNEEVRVVMEDTGHYHLPVATLLVDNDIFVCSVNALRMKKYCSQSIRRAKTDKIDSVHIASYGIAYWNELQSIPCSDDIYKELQLLARQYYQSVALLVKAKVNFSNLLDRVMPNIQSIITDNSSNSKLTDFVARYWHFSRILEMGEKRFISDYCKWAKKKGYRMCECNAKEIFALAQNGIPVLPSSQSTKIVITEAVRVIHELESSRDTILAQMQSFAKTLPEYSVVREMPCIGDVLAPRIIAEIGDVRRFKNKHSLIAYAGIDAPPYQSGSFNATERHISKRGNSYLRKTGYEIMQSLIKHKPENDSVYDFIVKKRCEGKCAKEVMIAGLNKFLRVYYGKVTELYDNLEYCNLTA

SEQ ID NO: 11613 - protein, 388 aa, unidentified
  source 1..388: note = protein_be51a46
  REGION 4..160: note = RuvC_domain
  SITE 7: note = RuvC_P1
  SITE 58: note = RuvC_P2
  SITE 98: note = RuvC_P3
  SITE 100: note = RuvC_P4
  SITE 103: note = RuvC_P5
  REGION 264..351: note = Tnp_domain
  SITE 272: note = Tnp_P1
  SITE 302: note = Tnp_P2
  SITE 310: note = Tnp_P3
  SITE 311: note = Tnp_P4
  SITE 324: note = Tnp_P5
MIYVGIDIAKLNHYASAIDSDGVVLIEPFEFLNDNAGFYTLLSKLNSFELDDIIIGLESTAHYGNNLVSFLVTKGLHVCVINPIQTATLRKNNIRKTKTDKVDTLVIAKAIALMDHPRFVTLYDIALMQLKNLGRFRMNLVKQRSRTKIQLTAYLDQVFPELQYFFKSGIHQKTVYAILKEAPSAIQIASMHLTHLKNLLVSNSHGHFKNETALELRVLAQKSVGTADRSLSIQITQSIAQIELLDSQIDAVESEMKDIVTSLDSVIMTIPGIGPINGGMILGEIGDINRFSKPRKLLAFAGLDPSVYQSGNFTAKKTKMSKRGSSALRYALMNAAHNIVKYNQTFKEYYDSKRAEGRGHYNALGHCAGKLVRIIYKMLKDDVEFNLD

SEQ ID NO: 11614 - protein, 402 aa, unidentified
  source 1..402: note = protein_34947e1
  REGION 5..158: note = RuvC_domain
  SITE 8: note = RuvC_P1
  SITE 56: note = RuvC_P2
  SITE 97: note = RuvC_P3
  SITE 99: note = RuvC_P4
  SITE 102: note = RuvC_P5
  REGION 220..305: note = Tnp_domain
  SITE 228: note = Tnp_P1
  SITE 258: note = Tnp_P2
  SITE 266: note = Tnp_P3
  SITE 267: note = Tnp_P4
  SITE 278: note = Tnp_P5
MKVFIGVDPHKLSATIEVVDKYETVLASGRFDTDKVGYAAMKKHVVAWPDRIWAVEGSGGAGRPMAQRLLADGERVVDVPPKLSARARLFDTGHNRKTDAHDAHAVAAVAVRTKGLRVLARDDDLEVLRMLSDRRSELVSQRVQTVNRLHRLLSELIPGQAKLNLTAPQAREILSRRRPRDLAGKTCKRLALEQLEDLVVIDRRIKASEKELKTLVIASGSKLMDLPGIGPIGAARILADVGDVHRFADRNRFASWTGTAPLDASSGEQIRHRLSRAGNRKINHMLHMAALSQVRLDTDGRAYYRRKRAAGKTHLEALRCLKRRISDAVYRQLLHDATDATDAAAGASPGGHCGASLTSSAADSHPLISTSDQPLPDPRPRRYAATPPPRKSQHGRPLEHAG

SEQ ID NO: 11615 - protein, 310 aa, unidentified
  source 1..310: note = protein_5661329
  REGION 5..164: note = RuvC_domain
  SITE 8: note = RuvC_P1
  SITE 63: note = RuvC_P2
  SITE 103: note = RuvC_P3
  SITE 105: note = RuvC_P4
  SITE 108: note = RuvC_P5
  REGION 274..305: note = Tnp_domain
  SITE 282: note = Tnp_P1
MNPVVGLDVSKGESQVQAFLDKSQPFRKSFSVKHTVEGFEYLLGFLKEIERVADGKKPSVILESTGHYHSPVIQFLEEQQYVYIIVNPLISHRARSTSLRKVKTDAVDAYHLCELFYKEEVEPYKKRGLQLLNLRNLTRQQEIITGISTQTKVQLLTVLDQVFPEFRGVFGDLYSKVSLQTLSLFPTSEHVLNTTESVLTNKIASLCTRRSEKWAKEKAQKLIEAALRNPFQNNLYESHIFNLKMLITIVLQYQEHLSQLEAEIDTLAKEIEEYKIIQSIPGIGEKIAATIISEIGEIDRFNHPSISSIF

SEQ ID NO: 11616 - protein, 280 aa, unidentified
  source 1..280: note = protein_2a77b52
  REGION 1..50: note = RuvC_domain
  REGION 153..240: note = Tnp_domain
  SITE 161: note = Tnp_P1
  SITE 191: note = Tnp_P2
  SITE 199: note = Tnp_P3
  SITE 200: note = Tnp_P4
  SITE 213: note = Tnp_P5
MLVSDNLKPYIPVSYHISELKSLTRHRFRLAKENSKFKTSLVRLVDIVFPELPKIVSSVAQKSCLALLYELPSAKDIAECNLTHLTHLLSDNSNKKFDREKALQIRDLARKSIGLNSNSVSFELKQTISIIQFIQEQLDDVEKRIKEILKEINSPILTIPGISFKTAGSILAEIGDISRFDSPAKLLAFAGLDPSMYQSGKFFSTHSVMVKRGSKYLRFALMTAARMVCLNDATFCAFKDRKMAEGKHYMVTMGHVTKKLVRVIYYLLKTNNVYQASKVA

SEQ ID NO: 11617 - protein, 317 aa, unidentified
  source 1..317: note = protein_716b11c
  REGION 9..150: note = RuvC_domain
  SITE 12: note = RuvC_P1
  SITE 56: note = RuvC_P2
  SITE 96: note = RuvC_P3
  SITE 98: note = RuvC_P4
  SITE 101: note = RuvC_P5
  REGION 191..276: note = Tnp_domain
  SITE 199: note = Tnp_P1
  SITE 228: note = Tnp_P2
  SITE 236: note = Tnp_P3
  SITE 237: note = Tnp_P4
  SITE 248: note = Tnp_P5
MTQTITMTAGIDTSKSKLDIAIHGRPERWQVANTPAGWRMLTNKLTKAGVGRVGIEATGGYERGVVQHLRAAGFTVQVLQPVQVKAFGRVHLRRAKNDVLDAVMIAACMATLDQVRDAPDPRLAELAEHLTFLEQLEEDIKRFKTRLEHIDDPRLRRMVLGDIAQRKARRLTQIRYIAKQLRAHRNLAARLDLVLSIPGIGERTALALLIRMPELGRISREEAAALAGLAPFDNDSGQHKGQRHIAGGRARLRRSLFAATLPAAFRWNTALIALYKRLTAAGKAHNAALIACARKLLIYANTVVQRGTPWTERALAV

SEQ ID NO: 11618 - protein, 411 aa, unidentified
  source 1..411: note = protein_78a6711
  REGION 16..170: note = RuvC_domain
  SITE 19: note = RuvC_P1
  SITE 67: note = RuvC_P2
  SITE 107: note = RuvC_P3
  SITE 109: note = RuvC_P4
  SITE 112: note = RuvC_P5
  REGION 277..362: note = Tnp_domain
  SITE 285: note = Tnp_P1
  SITE 315: note = Tnp_P2
  SITE 323: note = Tnp_P3
  SITE 324: note = Tnp_P4
  SITE 336: note = Tnp_P5
MPDPDQPPTTGYAVFCGLDVGKSEHHACAIDTTGTRLHDKPLPNDETALRAVFTALAEHGRVLVVVDQPASIGALAVALARHMGVDVAYLPGLAMRRIADLHPGQAKTDARDAHVIAEAARTMPHTLRRVGTDDETLAELTVLAGYDDDLAGQSTRLTNRLRDAMLHVHPALERLIGPRLDRGRVLDLLAVAPTPQALRELGVDGIAEVMRPRSPRLARTLPTQILAALDAQTLIVPGTAAFARVVTGVATQLREVHRERDDLATELKARLEAHPLGPVLTSMPGVGVRTAIKILTIVGDGRAFPTAGHLAAYAGLAPVTRRSGSSIKGETRSQRGNHALKSALFLSAFASLGDPASRAYYDRKRAQGKRHNAALICLTRRRTDVIYAMLRDRRPYTPPTLSEPDPGLIAA

SEQ ID NO: 11619 - protein, 394 aa, unidentified
  source 1..394: note = protein_9bbaf6f
  REGION 4..166: note = RuvC_domain
  SITE 7: note = RuvC_P1
  SITE 62: note = RuvC_P2
  SITE 103: note = RuvC_P3
  SITE 105: note = RuvC_P4
  SITE 108: note = RuvC_P5
  REGION 269..355: note = Tnp_domain
  SITE 277: note = Tnp_P1
  SITE 307: note = Tnp_P2
  SITE 315: note = Tnp_P3
  SITE 316: note = Tnp_P4
  SITE 328: note = Tnp_P5
MIYVGIDVASTKHDIVILNESGEIFKKAFSIKNDLDGYKKLLSEISFAKEFFNDQNVRIGLESTGHYSRNILHFLILAGFEVMFINPLLTNMDRKANSVRKTKTDAIDAKAICMFLIRNQNDFKPYTLSSYHIDELKTLVRQRKSLKTQINKEMNLLHAYVIQAFPEYYKIFKKINSKASMEVLSRYASLSEFKRVRLETLKELIRKSSKGHHGIREAQMLKDLNSSSIGIDSSALSFSIKQTIKRILMIKEQICDIEHEIKHHVDESHTTLLSVPGIGYTTGAIILAEIGDIHRFKTNDQLLAYAGLDPSVYQSGNFEGSYKISKRGSSILRFAIYHVAQAAVKFDPVFKAYYLKKKAEGKRHRVIIGHVTKKILRVIRSILKNNSTYSINTH

SEQ ID NO: 11620 - protein, 398 aa, unidentified
  source 1..398: note = protein_b58d0a5
  REGION 6..161: note = RuvC_domain
  SITE 9: note = RuvC_P1
  SITE 59: note = RuvC_P2
  SITE 100: note = RuvC_P3
  SITE 102: note = RuvC_P4
  SITE 105: note = RuvC_P5
  REGION 268..355: note = Tnp_domain
  SITE 276: note = Tnp_P1
  SITE 306: note = Tnp_P2
  SITE 314: note = Tnp_P3
  SITE 315: note = Tnp_P4
  SITE 328: note = Tnp_P5
MYQYFLGIDISKDSFDFCFIDSNEKLLDKNHYLMSYEDFTNLGDILSSFSKDEILICIEATGIYHLNLLSFLLELNFNVCVINPLFVNAFTKSITIRKTKTDSKDAYTISLFAKRNSSTLRLSKLSDLETIKPIIREKEKLTNQISAIKTDIKALVNQLFPEFLKNTNIFSKSSLNLLLQAPSKQAIRNLKEKKIASLLNKDNQRGAKAKISANDILLLAQNSIGINNPSLEKILISKIKQLEFLQIQLDEYIKIIEEFVDEHHNDDIEILTSIAGVGKDSASSFLAEIGNIKNFESPKQIIAFAGTDPAIYQSGSSVNIRGSISKRGNSHLRRTIWHMARAATVWNETLKSYYDKKRNEGKTFKQSVIAVANKLIRIIFKMLKNNTKFESNHTNLAI

SEQ ID NO: 11621 - protein, 343 aa, unidentified
  source 1..343: note = protein_eedffe3
  REGION 6..147: note = RuvC_domain
  SITE 9: note = RuvC_P1
  SITE 52: note = RuvC_P2
  SITE 87: note = RuvC_P3
  SITE 89: note = RuvC_P4
  SITE 92: note = RuvC_P5
  REGION 211..296: note = Tnp_domain
  SITE 219: note = Tnp_P1
  SITE 249: note = Tnp_P2
  SITE 257: note = Tnp_P3
  SITE 258: note = Tnp_P4
  SITE 270: note = Tnp_P5
MQIRSIGIDLGKTTFHLVALDQQGKVVLKKKFSRKELLLYTSNLAASLIGMEACCGAHFLGTALRKQGHDVRLIPAQFVKPFVKSNKNDYLDAEAIAEAVQRDNMRFVPIKTDDQLDLQALHRVRDRLVSRRTAVINQLRAFLLERGITFRQGRAHLRQQIPAILEDDMLNLTPLMRRLLDHLWEEWKSLELQIEAESGKIERIAHADAACQRLREIPGIGPLVATAIVAAIGNGSAFRKGREFAAWLGLVPRQHSTGGKSRLLGISKRGNPYLRRVFIHGARSVVSSTKREKHAIGDWMNRLESRAPHNVLVVALANKLARIAWAVLAQGENYRATSETLVA

SEQ ID NO: 11622 - protein, 398 aa, unidentified
  source 1..398: note = protein_818cf33
  REGION 4..160: note = RuvC_domain
  SITE 7: note = RuvC_P1
  SITE 57: note = RuvC_P2
  SITE 97: note = RuvC_P3
  SITE 99: note = RuvC_P4
  SITE 102: note = RuvC_P5
  REGION 275..362: note = Tnp_domain
  SITE 283: note = Tnp_P1
  SITE 313: note = Tnp_P2
  SITE 321: note = Tnp_P3
  SITE 322: note = Tnp_P4
  SITE 335: note = Tnp_P5
MNAVGIDVSKGKSTVAVIQPFGVVIAEPFDVSHTESDLNKLVQLIKSLSGETKVVMEYTGAYYEPIANALHNQGIFVSVVNPLLIDDYGTKRVRKVKTDKQDSLKIASFAIDKWLDLREYIPANDIRKTLKILNRQYVQYNKILVMQKNNLISLLDSCFPNANTLFTSPRRESDGHEKWVDFVLKFPHIHSISKLSLSAFKVKYQSWCRKNNYNYSDKKVADIHSYCKTQISVLPMTDSVIKIITEAAVMLNSTLETLCMFRDEMDRLSSTLPEYNAVMGIYGVGKVLCSQLIAEIGDVRKLNNSKSLVAMAGIDPPPNQSGKVDTKSRSISKRGSPVLRKTLFQIMTIIIQNKPVDDPVYQFLNKKRSEGKPYRVYMIAAAHKFLRIYYARVMQALN

SEQ ID NO: 11623 - protein, 295 aa, unidentified
  source 1..295: note = protein_c29a96b
  REGION 1..54: note = RuvC_domain
  REGION 163..250: note = Tnp_domain
  SITE 171: note = Tnp_P1
  SITE 201: note = Tnp_P2
  SITE 209: note = Tnp_P3
  SITE 210: note = Tnp_P4
  SITE 223: note = Tnp_P5
MIAQVIRLDLPDKTELPAEDIFRLKQLERFRYGLVDRCSDLKRKILACLDQVFPEYDQIFSDVFGCSSTQVLLNSPIPEDLLEIDDERLIETINTASEKRLGTARSEEKVIKLKEAAAHSFGISIASDVFKLEIQIMLEQIQLLDSQIKIIEAEIQEIVSKQENYLTTITGIGDITAAVLMAEVGDIKRFERPNQLLAFAGLDASVHQSGDFTGTKTRLSKRGSPYLRRAIWQAAFVAAFKDPALSLYYQKLRKRGKSHGTAIGAVARKLVNIIFAVWTQNKPYEVHFPEDISEK

SEQ ID NO: 11624 - protein, 369 aa, unidentified
  source 1..369: note = protein_2810db2
  REGION 14..158: note = RuvC_domain
  SITE 17: note = RuvC_P1
  SITE 60: note = RuvC_P2
  SITE 97: note = RuvC_P3
  SITE 99: note = RuvC_P4
  SITE 102: note = RuvC_P5
  REGION 223..308: note = Tnp_domain
  SITE 231: note = Tnp_P1
  SITE 261: note = Tnp_P2
  SITE 269: note = Tnp_P3
  SITE 270: note = Tnp_P4
  SITE 282: note = Tnp_P5
MIVNEVAKNVEKIIYIDTAKNSFQVLVVNQKTGKKKNTKVQRSKFVEYILKQGPCLIFMESCSASQHWARLFESFGFTVKLIAAQHVKAFLRNRRVKNDERDAEAIYKCGIQPDTKFVRIKTVEEQTVALLHTLRKAAVSQRVELSNRIRGILAEFGIVVARGRGRGSFNSEIEALFNECEKIHDVNLRAAISSLFEDYHYLEQREKELSEKIESLNKDNELVKIALTCPGVGPLTASAIVAEVGDASQFRNGREMATWNGVVPSQHSTGGRSTLGGITKTGNRYLRALLAQCACAVIQNASRHLEQGKDTHLDRFALRLKLNGKPAKKIMITVANKIIRILWAMLTQRKTFENKAEETSDTSAELQLA

SEQ ID NO: 11625 - protein, 269 aa, unidentified
  source 1..269: note = protein_e0865d9
  REGION 1..41: note = RuvC_domain
  REGION 145..232: note = Tnp_domain
  SITE 153: note = Tnp_P1
  SITE 183: note = Tnp_P2
  SITE 191: note = Tnp_P3
  SITE 192: note = Tnp_P4
  SITE 205: note = Tnp_P5
MTLDDLDYIELKELGRFRQKLVKQRTRLKIQLTSYVDQVFPELQYFFKSGLHQNSVYALLKEAPTPTAIASMHMTHLAHLLEVASHGHFGKEKARELRVLAQKSVGVNDSSLSIQITHTIEQIELLDSQLFHTELEMANLVTCLHSVIMTIPGIGFINGGMILGEIGDIHHFSEPKKLLAFAGLDPSVHQSGNFQAQRTRMSKRGSRVLRYALINAAHNVVKNNATFKAYYDAKRAEGRTHYNALGHCAGKLVRVIWKMLTDEVEFNLE

SEQ ID NO: 11626 - protein, 392 aa, unidentified
  source 1..392: note = protein_250426d
  REGION 4..164: note = RuvC_domain
  SITE 7: note = RuvC_P1
  SITE 62: note = RuvC_P2
  SITE 103: note = RuvC_P3
  SITE 105: note = RuvC_P4
  SITE 108: note = RuvC_P5
  REGION 267..354: note = Tnp_domain
  SITE 275: note = Tnp_P1
  SITE 305: note = Tnp_P2
  SITE 313: note = Tnp_P3
  SITE 314: note = Tnp_P4
  SITE 327: note = Tnp_P5
MIYIGIDIAKNKHDCCIIDSDGVVYNDSLRISNSRQGFELLYSSILSILPDKDISNVKIGLESTGHYSTDLQNFLYAKGFKLSILNPLATNLFRKAQSLRKTKTDKTDALVIAKMLFSDDTKSYSPVSYQIQELKSLTRHRYRLIGYRSKLKTSVNRLVDIIFPELPDLFWSIHQSSSYALLSILPSPKDIAGCHLTKLTNILNTASRGKYGKDKAISLKESAANSIGTNSRSLSFELKQTIRLIQSVQHEIDSLELLIKEIVVEINSPLISIPGISYTLAAIILAEIGDIKRFTTPCKLLAFAGLDPSTYQSGKYTASHTPMVKRGSAYLRWAILMAGRTVSMRDATFSAYLSKKRSEGKHYYVAMSHVAKKLIRIIFHLLKTNATFAPQI

SEQ ID NO: 11627 - protein, 338 aa, unidentified
  source 1..338: note = protein_e0d4df0
  REGION 7..148: note = RuvC_domain
  SITE 10: note = RuvC_P1
  SITE 53: note = RuvC_P2
  SITE 88: note = RuvC_P3
  SITE 90: note = RuvC_P4
  SITE 93: note = RuvC_P5
  REGION 211..296: note = Tnp_domain
  SITE 219: note = Tnp_P1
  SITE 249: note = Tnp_P2
  SITE 257: note = Tnp_P3
  SITE 258: note = Tnp_P4
  SITE 270: note = Tnp_P5
MFNIKVIGIDLGKSSFHLVAHDYAGREQYRKRLTRVKLLEHLANIPRTIIAMESCGGSHWLARQCQKFGHEVKLIPPQYVKPYVKTNKNDYIDADAIAEAAMRPNMRFVSIKTESAQVISVIQKIRSGYIKERTACMSRIGAILLEFGLSLPTGHSKMKSLFQWLAEKNVPLPPMLMQELIEHHEYYQYLNERIVKQDEKLKKLVDSNSHAQLLMSIPGVGTLTAAQCLSDIPNINEFKNGRHLAAWLGLVPRQYSTGGKPTLLGISKRGNKSLRTLFIHGARAILSRLDKAESVFGQWVMELRAKKPFNVAVVALANKLSRIAWSVLKTQKAFEVRL

SEQ ID NO: 11628 - protein, 407 aa, unidentified
  source 1..407: note = protein_6962339
  REGION 5..161: note = RuvC_domain
  SITE 8: note = RuvC_P1
  SITE 58: note = RuvC_P2
  SITE 98: note = RuvC_P3
  SITE 100: note = RuvC_P4
  SITE 103: note = RuvC_P5
  REGION 275..362: note = Tnp_domain
  SITE 283: note = Tnp_P1
  SITE 313: note = Tnp_P2
  SITE 321: note = Tnp_P3
  SITE 322: note = Tnp_P4
  SITE 335: note = Tnp_P5
MNTAVGIDVSKGRSVVAAMRPFGEVALPPREFLHTSEGLSALSEALRLIDGNTRVILEATGRYHEPVVMALQEAGFFVSAVNPKLIKDFGNNSLRKVKTDKADAVKIARYGLEYWEEMREYTETDTTRQQLKLFSRQYNLHMKTVVSLQNNLISLLDSVFPGINELFTSPVREDGRQKWVDFVCTFYHRDCVSSVSIAAFSERYRKWCKRKGYNFSTAKASEIYTTSRNMVVTMPKDALTKALITSAAGQLVAATATLATLKAEFVRLAATLPEYEVVRSMYGVGEVTGVQLMAEIGDVRRFANRGALIAFAGVDPGVNESGKHSSQSVRTTKRGSPHLRRTLFQIVSTHLKQSPLDEPVYQFLDRKRAEGKPFLVYMTAAANKFLRIYHAKVRDHLNALEQVDSNT

SEQ ID NO: 11629 - protein, 343 aa, unidentified
  source 1..343: note = protein_b614316
  REGION 7..149: note = RuvC_domain
  SITE 10: note = RuvC_P1
  SITE 53: note = RuvC_P2
  SITE 88: note = RuvC_P3
  SITE 90: note = RuvC_P4
  SITE 93: note = RuvC_P5
  REGION 212..298: note = Tnp_domain
  SITE 220: note = Tnp_P1
  SITE 250: note = Tnp_P2
  SITE 258: note = Tnp_P3
  SITE 259: note = Tnp_P4
  SITE 271: note = Tnp_P5
MGDVITIGLDIAKSVFQIHGVDADGAVVIRKRVSRAKVLEFFAAVPRCLVGIEACPSAHYWSRKLEVLGHTVRLMPPSYVKAYLKRSKNDANDAAAICEAVTRPSMRFVSTKSEQQQSGLMLHHSRRLFVRQRTMLSNAIRGHMAELGIISAKGRNGTAELLEVIANAKDNCIPAAARFSLEVLARQYIAIATEIGVLEKRIHAWHRSCEESRRLEEIPGVGPIVATALIAEVGDWKAFASGRSLAAWIGLVPKQHSTGGKERLGGISKQGNRYLRWLLVAGAMAVIRYARRHGTKRLWLTRMMERRPIKVAAVALANKIARMAWAIIVRGERFREPRLLLAA

SEQ ID NO: 11630 - protein, 342 aa, unidentified
  source 1..342: note = protein_689eb57
  REGION 6..148: note = RuvC_domain
  SITE 9: note = RuvC_P1
  SITE 52: note = RuvC_P2
  SITE 87: note = RuvC_P3
  SITE 89: note = RuvC_P4
  SITE 92: note = RuvC_P5
  REGION 211..296: note = Tnp_domain
  SITE 219: note = Tnp_P1
  SITE 249: note = Tnp_P2
  SITE 257: note = Tnp_P3
  SITE 258: note = Tnp_P4
  SITE 270: note = Tnp_P5
MKITTVGLDLAKNVFQVHGIDDHGKVLLKKQLRRHQVSGFFVNLPPCLIGMEACGSAHHWARKLQGLGHTVRLISPQFVKPYVKTNKNDAADAEAICEAVGRPNMRFVPIKSVEQQGALALHRVRQGFVKARTAQANQIRGLLAEFGVIIPQGIAQLFRKLSEVLEDATNELPDSVRALIQRLLEHLKELDRQAKEIEAQIAAWHGQNELSRKLAEIPGIGLLGASALAATVGNAKSFSSGRQLAAWLGLVPRQSSSGGKNVLLGMSKRGDAYLRTLLIHGARAVIYRARQNPQGSGWLHKLIGRRNANVAAVALANKNARIAWALLARDRQYRADYAAASV

SEQ ID NO: 11631 - protein, 340 aa, unidentified
  source 1..340: note = protein_c46bf72
  REGION 6..147: note = RuvC_domain
  SITE 9: note = RuvC_P1
  SITE 52: note = RuvC_P2
  SITE 87: note = RuvC_P3
  SITE 89: note = RuvC_P4
  SITE 92: note = RuvC_P5
  REGION 211..301: note = Tnp_domain
  SITE 219: note = Tnp_P1
  SITE 249: note = Tnp_P2
  SITE 257: note = Tnp_P3
  SITE 258: note = Tnp_P4
  SITE 270: note = Tnp_P5
MQVTTIGIDLAKSVFQVHGVTANGEVVFNRALRRAQVLMFFAKLELCVVGMEACGTSHYWARELSKLGHEVRLMPPAYVKPYVKRGKTDAADAEAICEAVMRPTMRFVPIKTPEQQALLCQHRARQLMIGQRTQLSNMIRGLIGEFGHVVAKGLHHITAFAEEVGGRNDSDLPEAARNVIVSLCEQLLKVHHRIKALEVEIFAASQKDRRIKLLKTIPGIGPVTASAIAATVGSPEQFRSGREFAAWLGLTPLNRSSGGKERLGRISKMGDRYLRQLLVNGMTSCVRVARMHPDRTEPWLASLLERKPTRLATVAMANKTARIIWAVLTRDEPYKQTAAA

SEQ ID NO: 11632 - protein, 401 aa, unidentified
  source 1..401: note = protein_9c4949a
  REGION 4..160: note = RuvC_domain
  SITE 7: note = RuvC_P1
  SITE 57: note = RuvC_P2
  SITE 97: note = RuvC_P3
  SITE 99: note = RuvC_P4
  SITE 102: note = RuvC_P5
  REGION 274..361: note = Tnp_domain
  SITE 282: note = Tnp_P1
  SITE 312: note = Tnp_P2
  SITE 320: note = Tnp_P3
  SITE 321: note = Tnp_P4
  SITE 334: note = Tnp_P5
MNAVGIDVSKGKSMVAILRPYGEIVSSPFEIHHTSSDIHSLIKQITSIDGDSRIVMEHTGHYYEPLAHELSQAHLFVSAINPKLIKDFGNNSLRKVKSDKADAIKIARYALDNWTDLKQYCLMDKLRNQLKTMNRQFSFYMKHKTAMKNNFIKILDQTYPGVNTYFDSPTRTDGSQKWVDFATTYWHVDCVRKLSLNTFIDHYQKWCKRKKYNFSRLKAVEIYEIAKELVPVLPKDNLTKLIVKQAVEQLNSTSKTVEELRVLMNETASKLPEYPIVMEMSGVGPSLGPQLMAEIGDVTRFTHKGALSAFAGVDPGVNESGTYSQKSVPASKRGSSNLRKTLFQVMDALIKNMPQDDAVYKFMDKKRSQGKPYYVYMTAGANKFLRIYYGRLKEYFASLPQ

SEQ ID NO: 11633 - protein, 277 aa, unidentified
  source 1..277: note = protein_44a6a9c
  REGION 1..82: note = RuvC_domain
  SITE 21: note = RuvC_P3
  SITE 23: note = RuvC_P4
  SITE 26: note = RuvC_P5
  REGION 144..230: note = Tnp_domain
  SITE 152: note = Tnp_P1
  SITE 182: note = Tnp_P2
  SITE 190: note = Tnp_P3
  SITE 191: note = Tnp_P4
  SITE 203: note = Tnp_P5
MGHKVRLIPPQYVKPFVKSNKNDFIDAEAICEASIRPNMRFVSVKSEEAQVISAIHKARHGYIKDRTACMSRIGSLLLEFGIALPTGHSVMKQLFNWLAQQRQVLPMLLMQELMELHEYYLFLNGNIEKQDKKLKQLVETNSIGQLLKTIPGIGDMTASLCLANISSATDFKNGRNMAAWLGLIPAQYSTGGKPKLLGISKRGNKALRTLFIHAARAVMSRPDKTGKVYGEWLINLRATKPFNVVTVALANKLARIAWAVMKTKQAFNSKALAPSLQ

SEQ ID NO: 11634 - protein, 392 aa, unidentified
  source 1..392: note = protein_be412fe
  REGION 4..159: note = RuvC_domain
  SITE 7: note = RuvC_P1
  SITE 57: note = RuvC_P2
  SITE 98: note = RuvC_P3
  SITE 100: note = RuvC_P4
  SITE 103: note = RuvC_P5
  REGION 264..351: note = Tnp_domain
  SITE 272: note = Tnp_P1
  SITE 302: note = Tnp_P2
  SITE 310: note = Tnp_P3
  SITE 311: note = Tnp_P4
  SITE 324: note = Tnp_P5
MFFLGIDIGKNTHVASLIDDNGKTVFKAFSFPNSTIGATSLLDKLTPFSNEIEIGMEATGHYWLALYSFLVEHGFVIHVINPIQTDGWRNATEIRKHKTDIIDSLIIADFIRYGEFLETSLANEDILSLRNLTRFRNYLVSSIGDLKRKTICILDQIFPEYESVFSNIFGKTSKEILLHFSSPAEFESITSEQLETALEQVSFKKFASKKISYISNIAKTSFGITFAVQSLTLQLKLLIKQINFIEQQVHDVEIQIKQLLHKINTPITTIPGIGDIIGATILGEIGDIERFSNPSKLVAYAGIDASVHQSGDYISTNNKMSKRGSPYLRTALFRAALIASVHDPVFKAYYQKKRSEGKHHLTCLGAVARKLCYTIHAILKNNCEYKVQLPTE

SEQ ID NO: 11635 - protein, 350 aa, unidentified
  source 1..350: note = protein_91fba6f
  REGION 6..160: note = RuvC_domain
  SITE 9: note = RuvC_P1
  SITE 63: note = RuvC_P2
  SITE 102: note = RuvC_P3
  SITE 104: note = RuvC_P4
  SITE 107: note = RuvC_P5
  REGION 208..296: note = Tnp_domain
  SITE 216: note = Tnp_P1
  SITE 247: note = Tnp_P2
  SITE 255: note = Tnp_P3
  SITE 256: note = Tnp_P4
  SITE 269: note = Tnp_P5
MKKISIGIDFAKEKFDATVMNMETGTSVWRQFPNTRGGGRDLVRMVKRQANGIPTDQWLFCGEDTGNYSRLISDYLAEKGYFMWLQNPYCIKKSEGIIRRGKDDRADSAVIAEYAIRYADKATRYERPPEVISQIKALLSARDSLVKTRMALANTVSEIPKADRQGEAVTLIKSSTKRLIKDVETEIERMEQKIDELLQKDEDISHNSEILHSFKGIGRINAAYFIAFTNNFRKFDLDPRKIATYWGVAPFARQSGTALNTKPHVSKFCNKKLKAAISNSANSAIMWNKPFREYYLRLMERGKCEGIAKNNVKNKIIQTLTAMIRKGEKYNPDFMLTTKASVKCVNSLGS

SEQ ID NO: 11636 - protein, 405 aa, unidentified
  source 1..405: note = protein_c999ab8
  REGION 4..160: note = RuvC_domain
  SITE 7: note = RuvC_P1
  SITE 57: note = RuvC_P2
  SITE 97: note = RuvC_P3
  SITE 99: note = RuvC_P4
  SITE 102: note = RuvC_P5
  REGION 274..361: note = Tnp_domain
  SITE 282: note = Tnp_P1
  SITE 312: note = Tnp_P2
  SITE 320: note = Tnp_P3
  SITE 321: note = Tnp_P4
  SITE 334: note = Tnp_P5
MNAVGIDVSKGKSTVTIRRPGDVVVMPPRDIPHTQSEINALIEQIKGLDGETKVCMEHTGRYFEPVATWLSGAGIFVSAVNPVLIRDFGDDSLRTPKTDKADSKKIARYTLDRWTKLRQYGNMDKIRNQLKTMNRQFGFYMNQKTAMKNNLIALIDQTYPGANDFFDSPARSDGSQKWVDFVHTYWHVDCVRSKSPVAFTEHYRNWCRRKGYNFSAAKAENIYRLSSDMIAVFPKDDSTKLLIRQAVAMLNAASATVESLRLKMDETASSLPEYPVVMAMNGVGPTLGPQLMAEIGDVTRFTHRGALTAFAGVDPGKNDSGQHIQKSVPTTKKGSPYLRKTLFQIMDGLIKRSPADDAVYAFMDKKRAQGKPYYVYMTAGANKFLRIYYGRVKEYLSTVAETEET

SEQ ID NO: 11637 - protein, 338 aa, unidentified
  source 1..338: note = protein_be22b34
  REGION 6..148: note = RuvC_domain
  SITE 9: note = RuvC_P1
  SITE 52: note = RuvC_P2
  SITE 87: note = RuvC_P3
  SITE 89: note = RuvC_P4
  SITE 92: note = RuvC_P5
  REGION 211..298: note = Tnp_domain
  SITE 219: note = Tnp_P1
  SITE 249: note = Tnp_P2
  SITE 257: note = Tnp_P3
  SITE 258: note = Tnp_P4
  SITE 270: note = Tnp_P5
MHTTILGIDVAKNVFQLHGVDARGRAVLSRRVKRQQLLETVANLPACVIGMEACGSAQHWGRAFEQLGHTVKLMHPKYVKPYVKTNKNDGRDAEAICEAVSRPTMRFVSIKTVEQADMQAVHRTRSLFVKHRTAVINQIRGLLAEYGLVIAPSPGKVRPTLVRFLDDAASGLTACARDTFAELSAQLTELDSRIERVTHRIECVYRTHPVCQKLAAVPGIGPLTATALVATVGRPQAFQNGRHLAAWLGLVPRQYSSGGKERLGGISKRGSRYLRTLLIHGARAVVQRAARRTDTQGRWLCALMRRKGTNVAAVALANKNARVIWALLAHDDVYRQPA

SEQ ID NO: 11638 - protein, 407 aa, unidentified
  source 1..407: note = protein_3c144c4
  REGION 4..163: note = RuvC_domain
  SITE 7: note = RuvC_P1
  SITE 60: note = RuvC_P2
  SITE 100: note = RuvC_P3
  SITE 102: note = RuvC_P4
  SITE 105: note = RuvC_P5
  REGION 273..359: note = Tnp_domain
  SITE 281: note = Tnp_P1
  SITE 312: note = Tnp_P2
  SITE 320: note = Tnp_P3
  SITE 321: note = Tnp_P4
MIFVGVDWAEAHHDVCVLNTEGKVLGRKRIADTLAGVGELHALVADFLDDDDDAQNVVVGIEKDRGLIVTALIAANYQVIAINPLAAARYRERHHVSGAKSDPGDAKMLADLVRTDAHNHRVVAGDSSLVEAVKLLARAHQNAIWSRQRQVNALRSSLKDYFPGALEAFGTDLASVDAVAVLGVASTPSLARTLSRAKIVSALKRAGRQRNLEARAEAIQSVLRKEQLAQPTVLENAYGITTKASVAVIVQMNATVAELEAALAEHFEQHPDAKIIHSLPGMGTVLGARVLGEFGDDSNRYADAKSRRNYAGTSPVTKASGRSRVVLARHSRNKRLADALDQWAFCSTNWSPGARAYYDELRARNKHHRKAIRQLANRWVGILHTCLERGCLYDEEIAWPTKKEIAA

SEQ ID NO: 11639 - protein, 343 aa, unidentified
  source 1..343: note = protein_bc5f268
  REGION 7..149: note = RuvC_domain
  SITE 10: note = RuvC_P1
  SITE 53: note = RuvC_P2
  SITE 88: note = RuvC_P3
  SITE 90: note = RuvC_P4
  SITE 93: note = RuvC_P5
  REGION 212..304: note = Tnp_domain
  SITE 220: note = Tnp_P1
  SITE 250: note = Tnp_P2
  SITE 258: note = Tnp_P3
  SITE 259: note = Tnp_P4
  SITE 271: note = Tnp_P5
MNEVTTIGLDLAKNVFQVHGIDASGQVVVRRQLRRSQVLSFFERQHPCLVGIEACATSHHWAREIAKLGHDVRLMPARYVKPYVKRNKNDAADAEAICEAVMRPTMRFVAVKTEEQQSVLMLHRTRQLFVRQRTTLINAIRAHMAEFGIVAGVGRNGVERLLRLIDEGSDERVPPVARECLQALRAQLMLVKRQILEADRRILAWHRSNELSRRLETIPGVGPLIATALVASIPDPHAFGSARDVPAWIGLVPKQNSTGGKERLGSISKAGNRYLRSLLVVGALSVIRRAKQVGYTRRPWLAELMARRPVKVAAIALANKIARVAWALMVSGTRYREPVPQAV

SEQ ID NO: 11640 - protein, 321 aa, unidentified
  source 1..321: note = protein_7ec263c
  REGION 9..158: note = RuvC_domain
  SITE 12: note = RuvC_P1
  SITE 57: note = RuvC_P2
  SITE 97: note = RuvC_P3
  SITE 99: note = RuvC_P4
  SITE 102: note = RuvC_P5
  REGION 196..280: note = Tnp_domain
  SITE 204: note = Tnp_P1
  SITE 233: note = Tnp_P2
  SITE 241: note = Tnp_P3
  SITE 242: note = Tnp_P4
  SITE 253: note = Tnp_P5
MSAPSLVTVGIDVAKDHVDVSVLGAHLDAQRFDNDAEGHSALAVALQPLDVALVVMEATGGYEAEMACALQSAGLPVAVVNPRQARDFARSMGRLAKTDRIDARMLAELASVLVRREDLSRLLRPVPDERQQWLAALLTRRRQLLTMLLSERQRLQITPVGLHPSLLAIIAAVQAQLDDIDAQMVGHVREHFSELDRLLQSTHGIGPVSSACLIAELPELGKLSRRQIAALVGVAPIACDSGSRNGRRRVQGGRFEIRRVLYMATLTATRHNPAIKTFYQRLKAAGKLPKVALVACMRKLLTILNAMVRSNTPWDDSLHKA

SEQ ID NO: 11641 - protein, 262 aa, unidentified
  source 1..262: note = protein_902161c
  REGION 1..70: note = RuvC_domain
  SITE 9: note = RuvC_P3
  SITE 11: note = RuvC_P4
  SITE 14: note = RuvC_P5
  REGION 133..218: note = Tnp_domain
  SITE 141: note = Tnp_P1
  SITE 171: note = Tnp_P2
  SITE 179: note = Tnp_P3
  SITE 180: note = Tnp_P4
  SITE 192: note = Tnp_P5
MKPYVKRQKNDAADAEAICEAVTRPNMRFVAVKTEEQQGVLVLHRSRDLLMRQRTMILNAIRAHFAEFGIITAQGPRKVIDLVSRLRDDDSLGLPDVVRSALLALAIQLDSLAVEARNIERRLMAWHKQSVASQRLETIPGVGILTATALAASVPDPSVFKSGRQFAAYLGLVPRQNSSGGKDRLGHISKMGNGYLRKLLVVGATSVTRRAPTIDTRTGVWVRSLLKCKPIRVVTVAIANKAARIAWALLTKEEAYKAASAS

SEQ ID NO: 11642 - protein, 349 aa, unidentified
  source 1..349: note = protein_8bf2598
  REGION 7..148: note = RuvC_domain
  SITE 10: note = RuvC_P1
  SITE 53: note = RuvC_P2
  SITE 88: note = RuvC_P3
  SITE 90: note = RuvC_P4
  SITE 93: note = RuvC_P5
  REGION 213..299: note = Tnp_domain
  SITE 221: note = Tnp_P1
  SITE 251: note = Tnp_P2
  SITE 259: note = Tnp_P3
  SITE 260: note = Tnp_P4
  SITE 272: note = Tnp_P5
MNDVTTYGLDLAKRVFQVHWVDVQSGEVHRKTLPRTQVSVFFARAPRGVVAMEACGSAHHWGRLLQTMGHAVKLIAAQFVRPFVKTNKTDAADAQAIWEAAQRPEMRFVALKSEQQQAVLSLHRLRAQWVKVRTLQANQIRGLLYEFGVVVPLGWRALLNVATEQLTDPTEGSVPVLLRDELLKQLQALRDATARIVALEKQLASWQRTAAECQRIMAIPGVGLLTATAVVASVADAQQFRSARQFAAYLGLVPRQSGTGGRVKLLGISKRGDTYLRTLLIHGARSVLLSQSRHGRSVDPWLGALLQRRPSNVVVVALANKMARTIWALLAQRRTFDANWHRGAIHGVA

SEQ ID NO: 11643 - protein, 283 aa, unidentified
  source 1..283: note = protein_7360296
  REGION 1..55: note = RuvC_domain
  REGION 159..246: note = Tnp_domain
  SITE 167: note = Tnp_P1
  SITE 197: note = Tnp_P2
  SITE 205: note = Tnp_P3
  SITE 206: note = Tnp_P4
  SITE 219: note = Tnp_P5
MIAKAIALMENPRFITLYDIALMQLKNLGRFRLKLVKQRTRTKIQLTSYVDQTFPEIQYFFKSGLHQKAVYAILKEAPCASQIASMHLTHLKHLLTSNSHGHFKKESALELRVLAQKSVGNSDRSLSLQITQSIALIELLDKQINAVETDIRDIVESLDSVIMSIPGIGPINGGMILGEIGDISRFSKSRKLLAFAGLDPSVYQSGNFSAKKTRMSKRGSSALRYALMNAAHNVVKNNATFKEYYDSKRAEGRSHYNALGHCAGKLVRVIYKMLTDDVKFNLD

SEQ ID NO: 11644 - protein, 340 aa, unidentified
  source 1..340: note = protein_06fe798
  REGION 7..149: note = RuvC_domain
  SITE 10: note = RuvC_P1
  SITE 53: note = RuvC_P2
  SITE 88: note = RuvC_P3
  SITE 90: note = RuvC_P4
  SITE 93: note = RuvC_P5
  REGION 212..297: note = Tnp_domain
  SITE 220: note = Tnp_P1
  SITE 250: note = Tnp_P2
  SITE 258: note = Tnp_P3
  SITE 259: note = Tnp_P4
  SITE 271: note = Tnp_P5
MSEITTVGLDLAKHVFQVHGIDAEGTTVLRRRLRRNQVLAFFSRLRRCVVGMEACATAHYWARELAALGHEVRLMPAQYVKAYVKRNKNDAADAEAICEAVGRPTMRFVSVKTAEQQASQLLHRGREQLVRQRTMLVNALRAHLAEFGIVAAQGLRNVSQLIAIVRDNGNKHLPDVARQVLKVLACQIEQIEAAITALERQLLAWHKSNPVSQRLASIPGIGPIIATAIATSVADPHAFRSGREFAAWLGLVPRQNSTGGKPRLGGITKRGNRYLRRLLINGASANLLRSKATKADPWVIGLRRRRPPLVVAVALANKTARIAWAVMLRQNEYQPRAVAA

SEQ ID NO: 11645 - protein, 345 aa, unidentified
  source 1..345: note = protein_dd3766d
  REGION 5..152: note = RuvC_domain
  SITE 8: note = RuvC_P1
  SITE 55: note = RuvC_P2
  SITE 92: note = RuvC_P3
  SITE 94: note = RuvC_P4
  SITE 97: note = RuvC_P5
  REGION 212..300: note = Tnp_domain
  SITE 220: note = Tnp_P1
  SITE 250: note = Tnp_P2
  SITE 258: note = Tnp_P3
  SITE 259: note = Tnp_P4
  SITE 271: note = Tnp_P5
MNHYVGLDVSVKETSVCIVDEAGTVCKEVKVTSHPDDLIAVLSNSGWRLVRIGLEAGPLSQWLFEGLANAGLPAVCIETRHTKAFLKATVNKTDRNDARGIAQMMRVNLFRPVHVKTVSSQQRRALLTARKLISNKARDIENDIRGLLRNFGLKVGVIGRIGFAARIRELLEGVPELQHIIEPLLEARQQLWETFTTLHRRLLSIVRDDATCRRLMTIPGVGPVVALGFVSTIDIPGRFKNSKAVGPALGLTPVLNQSGESSRVGRVSLCGDEMMRTLLYEAAQVMLTVVRKWSWLKAWAMNIAKRRGHQKAIVALARRLAVIMHRIWSDGTEFQWSKSGRPAKP

SEQ ID NO: 11646 - protein, 394 aa, unidentified
  source 1..394: note = protein_136435d
  REGION 4..162: note = RuvC_domain
  SITE 7: note = RuvC_P1
  SITE 61: note = RuvC_P2
  SITE 101: note = RuvC_P3
  SITE 103: note = RuvC_P4
  SITE 106: note = RuvC_P5
  REGION 268..354: note = Tnp_domain
  SITE 275: note = Tnp_P1
  SITE 305: note = Tnp_P2
  SITE 313: note = Tnp_P3
  SITE 314: note = Tnp_P4
  SITE 327: note = Tnp_P5
MYIIGIDIAKKSHEVCFMNQEGDILDGNTFNIPNTLSGLEKFQKMLNKYGLNSNNVLVGMEATGHYWLVLYSWLIEQEFDVKLINPIVTDAYRKMHIRKTKNDRIDAEVVARVIMLGEYQETPVAEETTLSLRQLCRFRLSQVQTCGDLKRKCIAVLDQVFPEYSNLFTDTFGISSKTILKEYSTPEELASIHTTKLTNLLKKASKGRFGKEKALEVKAVAKQSIGITFATDAFAFQMKQILEQLEFIEEQVKLLDQQIEEYMEKLDSPIITIPGVGPVYGAVILSELGNIHRFPGGKQIVSYAGIDASVNESGSFKGNRASMSKRGSAYLRRAIFGAAFIASWSDPELSEYYKRLRDRGKHHYVAVGAVARKLCYIIYAVLSENRPFEQRPPT

SEQ ID NO: 11647 - protein, 330 aa, unidentified
  source 1..330: note = protein_422a75a
  REGION 8..154: note = RuvC_domain
  SITE 11: note = RuvC_P1
  SITE 59: note = RuvC_P2
  SITE 97: note = RuvC_P3
  SITE 99: note = RuvC_P4
  SITE 102: note = RuvC_P5
  REGION 202..289: note = Tnp_domain
  SITE 210: note = Tnp_P1
  SITE 240: note = Tnp_P2
  SITE 248: note = Tnp_P3
  SITE 249: note = Tnp_P4
  SITE 262: note = Tnp_P5
MKSWNVIFGVDVSKLTLDICCAERSLHVKIDNCSKGFEVFRKWCKAHGIRLGDSLMVMEFTGGYEYRFIQFCQSLSISYCRIPGLEIKQSMGMTRGKSDQADAFRIGQYGEEKSKRLEPSKPLDNNIVKLKQLLSFRKRLVREKAGLESTIKERKCMYTITKADTIIHIARAKIKANEKYIALVEKEIGQIIQSNESMLQNYRIITSLKGIGPVNAWMTIAYTENFTSFTDPRKYAVFVGVIPFEHTSGTSIKGRRRVSHLAHKELKQELNQAAKTAIVHDPEIRAYAERKLKNKQYPLVLNNVKFKLILRMFSLVKRGVKYVENYQKAA

SEQ ID NO: 11648 - protein, 342 aa, unidentified
  source 1..342: note = protein_1e8eb84
  REGION 6..148: note = RuvC_domain
  SITE 9: note = RuvC_P1
  SITE 52: note = RuvC_P2
  SITE 87: note = RuvC_P3
  SITE 89: note = RuvC_P4
  SITE 92: note = RuvC_P5
  REGION 210..296: note = Tnp_domain
  SITE 218: note = Tnp_P1
  SITE 248: note = Tnp_P2
  SITE 256: note = Tnp_P3
  SITE 257: note = Tnp_P4
  SITE 269: note = Tnp_P5
MQVTTIGLDVAKRVFQIHGVEAAGAVVIRRKLRRSELLQFFAHLAPCLVGIEACATAHFWARELGAFGHQVRLVPPSYVKAYLKRGKNDAADAEAICEAVTRPNMRFVPVKTVEQQGVLVLHRARELLVRQRTMLVNGLRAHMAEFGIVVPQGIQRLPELVALLEDEKTGIPQIAHEVLAAMVVQINNLTTSIRQMEKRIVAWCRTNAAARRLSTIPGVGPITASALAATITDPTLFRSGRHLAAWLGLVPRQHSTGGKAKLGRITKMGDQYLRKLLIVGMTAVIRSARRTKAPAFAWVNALLERRPARLVSVALANKAARIAWAILIRGETYRAPAITAAA

SEQ ID NO: 11649 - protein, 391 aa, unidentified
  source 1..391: note = protein_caee69e
  REGION 4..164: note = RuvC_domain
  SITE 7: note = RuvC_P1
  SITE 62: note = RuvC_P2
  SITE 103: note = RuvC_P3
  SITE 105: note = RuvC_P4
  SITE 108: note = RuvC_P5
  REGION 268..354: note = Tnp_domain
  SITE 275: note = Tnp_P1
  SITE 305: note = Tnp_P2
  SITE 313: note = Tnp_P3
  SITE 314: note = Tnp_P4
  SITE 327: note = Tnp_P5
MIFVGIDVSKAKHDCCIIDSNGSVITNSLRVDNSKEGFECLYSTILSALNSKDLRNVKIGLESTGHYSTNITNYLYSKGFQVHTLNPLATNLFRKAGTLRKTKTDKTDAKVIATMLFSDESKSYSPVSYQIQELKSLTRHRFRLIGYRSKLKVSVTRLIDIIFPELPCLFWSIHQASSYALLLELPSPNDIKSCHLTKLNNIITKSSNGRYGKDKALALKELASNSIGSANRSVAFELQQTIRLIHSVQNEIDILDKQIKIVVDEINSPIITIPGIGYTLAAIILAEIGDIERFLTPAKLLAFAGMEPSTYQSGKFSASNTPMVKRGSTYLRWAILQAARLVPMRDSTFSAYLTKKRSEGKHFNVAQSHVGKKLLRVIFYLLKNITFVPQM

SEQ ID NO: 11650 - protein, 407 aa, unidentified
  source 1..407: note = protein_cfdf6ba
  REGION 5..164: note = RuvC_domain
  SITE 8: note = RuvC_P1
  SITE 61: note = RuvC_P2
  SITE 101: note = RuvC_P3
  SITE 103: note = RuvC_P4
  SITE 106: note = RuvC_P5
  REGION 272..358: note = Tnp_domain
  SITE 280: note = Tnp_P1
  SITE 311: note = Tnp_P2
  SITE 319: note = Tnp_P3
  SITE 320: note = Tnp_P4
MQLFVGDDWSEEHHDVELMDAAGRRLSKARLPEGVAGIARLHAMIGDQLSDNVDESEVAIGIETDRGPWVAALVAAGYTVFAVNPLQAARFRERSGVSGAKSDAADAHMLADMVRTDSHQLRPVAGDSPEAEAIKVVARAHKTLIWERTRHTQRLRHALREYFPAALEAFDDLDAVDALELLGKAPDPASAARLTRGQIAAALRNARRHDIETKTDRIQAALRGEHLGRAAVITTAYTATTRSAVAVLSTLNHEIKALQGQVDAHFGRHPDAEIILSQPGMGTQLGPRVLGEFGDDPERYATAKARKNYAATSPITRASGKKKVVAARFVHNDRLVDALNSQAFSALQASPGARAYYDKQRDRGLDHGPALRQLANRLVGILHGCLKTRTRYDEATAWAHHVEKAAA

SEQ ID NO: 11651 - protein, 346 aa, unidentified
  source 1..346: note = protein_26e70d1
  REGION 7..145: note = RuvC_domain
  SITE 10: note = RuvC_P1
  SITE 53: note = RuvC_P2
  SITE 88: note = RuvC_P3
  SITE 90: note = RuvC_P4
  SITE 93: note = RuvC_P5
  REGION 209..297: note = Tnp_domain
  SITE 217: note = Tnp_P1
  SITE 247: note = Tnp_P2
  SITE 255: note = Tnp_P3
  SITE 256: note = Tnp_P4
  SITE 268: note = Tnp_P5
MEKVIRIGMDTSKHVFQLHGVNVTEEPVLRKKLRRREMVRFFERLPATTIALEACGGAHHWARLLSTFGHEVKLIPPQYAKPYVKRGKNDAADAEALCEAMSRPTMRFVPMKTADDQAALMLAGMRERLVRNRTQLANSIRYAAEFGLVAAKGMSNIAPLLERATTDETLPALARELFAQQAKEYTQLQERVAEIEAKLMAWHRSDTRSRRLVKVPGIGPIGAALLVMKTPAPELFRSGRDFAAWIGLTPKDHSTAGKTRLGVITRAGDEALRSVLIVGATAVIQHVRCGRSAASPWLAGLLKRKSPKQAAVALANKIARIAWKLMVSGEHYKAMHTSQPAAAGAA

SEQ ID NO: 11652 - protein, 341 aa, unidentified
  source 1..341: note = protein_cdef819
  REGION 6..148: note = RuvC_domain
  SITE 9: note = RuvC_P1
  SITE 52: note = RuvC_P2
  SITE 87: note = RuvC_P3
  SITE 89: note = RuvC_P4
  SITE 92: note = RuvC_P5
  REGION 211..298: note = Tnp_domain
  SITE 219: note = Tnp_P1
  SITE 249: note = Tnp_P2
  SITE 257: note = Tnp_P3
  SITE 258: note = Tnp_P4
  SITE 270: note = Tnp_P5
MNIKRVGIDLAKQVFQVHGVDYQDKAVLRKQLRRNQLLSFFAMLPPCLIGMEACGGAHHWARELQKLGHTVKLIAPQFVKPYVKSNKNDANDAEAICEAVGRPTMRFVSVKTIAQQDLQAIHRIRSELVRQRTAKINQIRGLLAEYGLVVGRHVATLRRALPELLENAENGLSFDFRGLLEDLRQDLNRLDERVAEMDKKVHALAHSEPAAKRLLSIPGIGPISATAILSAVGDGKQFKRGRDLAAWMGLTPKQHSSGGKDRLLGISKRGDTYLRTLFIHGARAVLKVSDKKEDPRSRWIQNLCSRRNKNIAAVALANKNARIVWALLTKETDFLPEGKPA

SEQ ID NO: 11653 - protein, 398 aa, unidentified
  source 1..398: note = protein_c8d1433
  REGION 4..160: note = RuvC_domain
  SITE 7: note = RuvC_P1
  SITE 57: note = RuvC_P2
  SITE 97: note = RuvC_P3
  SITE 99: note = RuvC_P4
  SITE 102: note = RuvC_P5
  REGION 275..362: note = Tnp_domain
  SITE 283: note = Tnp_P1
  SITE 313: note = Tnp_P2
  SITE 321: note = Tnp_P3
  SITE 322: note = Tnp_P4
  SITE 335: note = Tnp_P5
MISVGIDVSKGKSTICILKPYGEIVSSPFDVEHTDNSLLELSKMLLRLDGETKVVMEATGAYHMPILSYLKDQGLFVSVINPLVMKEYRCKGLRKAKTDQLDAKMIANYGIDHWFHLVDYTPDSEVYQTLRLLGRQYAHYMRMKIESIQVLSNMMDYTMPGIRTLLKGYSDCNGKNKVADFMEYYWHYDNITKKTESQFVKSYISWAKKRGYHQSESKALKIYALAKNGIPTLRSTSPSTKMLVVEAARVLKEIENTLRTILTQMQELARDLPEYPVVRAMNGVGDVIAPRLIAEIGDVRRFYSRKALIAYAGIDAPPYQSGQFTGSNRHITKRGSATLRKIGYEIMQCLKSFKPPEDAVYLFMMKKESEGKAPKVAKMAALNKFLRIYYARVTEVYT

SEQ ID NO: 11654 - protein, 321 aa, unidentified
  source 1..321: note = protein_36ba787
  REGION 8..150: note = RuvC_domain
  SITE 11: note = RuvC_P1
  SITE 52: note = RuvC_P2
  SITE 92: note = RuvC_P3
  SITE 94: note = RuvC_P4
  SITE 97: note = RuvC_P5
  REGION 191..278: note = Tnp_domain
  SITE 199: note = Tnp_P1
  SITE 229: note = Tnp_P2
  SITE 237: note = Tnp_P3
  SITE 238: note = Tnp_P4
  SITE 251: note = Tnp_P5
MDKDKKIYGIDISKKVFDVYTQETGHHQFKNDEKGFVLFAKRLKKGSVVVMEATGYYHYRLAQYLYKKGILVSVVNPLSIKRFIQMKLAKVKTDKSDAKAICEYGQSNELSMYTALTDVQSECLQLFRLLDTYLKKRTATKNKIHGEKVLGEPSKYVFNSLKRDLKHLNKEVKGIEDRLLKLVKKEQQDQLTLLKSIPGMGMKTALFLIVVTDGFKKFDNASQLCSYVGITPTIRQSGSSVKGRSRISKVGNKKLRNLLFLCAFSACKYNKACREIYERIVNKGKSKKLALIAVANKLLKQAFAIAKSGNPYDEKYVSKLS

SEQ ID NO: 11655 - protein, 308 aa, unidentified
  source 1..308: note = protein_cca2ee3
  REGION 1..65: note = RuvC_domain
  SITE 2: note = RuvC_P3
  SITE 4: note = RuvC_P4
  SITE 7: note = RuvC_P5
  REGION 179..266: note = Tnp_domain
  SITE 187: note = Tnp_P1
  SITE 217: note = Tnp_P2
  SITE 225: note = Tnp_P3
  SITE 226: note = Tnp_P4
  SITE 239: note = Tnp_P5
MKSDPADARKIARYTLDNWTELRQYSGMDNTRTQLKTLNSQFSFFMKQKVAAKANLIALLDNTYPGVNKLFDSPTREDGSEKWVDYAYSFWHADCVRKIGLKAFTERYKSFCKKHHYIFQQDKPEKLFNASKELVAVFPKEKTYKLLIQQSIQQLNLASEHVERLRREMNELASTLPEYSTVMGIYGVGKTYGPQLIAEIGDVSRFTHREALTAFAGVDPGVDESGQHKSKSNRASKVGSARLRKTLFQIMTTLLQNAPEADPVYRFLDKKRSQGKPYYVYMTAGANKFLRIYYGKVKECLRNLEQTE

SEQ ID NO: 11656 - protein, 408 aa, unidentified
  source 1..408: note = protein_d8c51bc
  REGION 6..162: note = RuvC_domain
  SITE 9: note = RuvC_P1
  SITE 58: note = RuvC_P2
  SITE 99: note = RuvC_P3
  SITE 101: note = RuvC_P4
  SITE 104: note = RuvC_P5
  REGION 269..356: note = Tnp_domain
  SITE 277: note = Tnp_P1
  SITE 309: note = Tnp_P2
  SITE 317: note = Tnp_P3
  SITE 318: note = Tnp_P4
  SITE 329: note = Tnp_P5
MARYYLGVDWADQSHQLYVSDESGRKIRELEVQQTADGLAELGRWLEESRGQGIELWAAIEKPEGRVVDFLLDHGVVVYPVNPKALDRARDRFRMSPSKSDGFDAYVLAEFLRTDHAHLRALEPNSAEGQELKMLTRDHQRLGRQKTRLLNQIGITLKEYYPVPLEVFESLDTKIALDFLKAYPTPQALSKLTRRGWKRFAKRDHHLSEARCSELWDKLNKPQLAVPAHVVRAKAKLLAALVMQLEASVKAVDSYSQEVQSFFAAMPAAEIAKTLPGGKSGTTVASIWAELGDAPKRWNSFRHLQAEGGAVPVTKASGKSRMVQFRFACNKHLRQAMYWFSFNSLQRSEWAKKYYRNQRAKGHSKHESLRALGAKWLKIIFVMWRDHKPYDENYHLANIARQMMRQAA

SEQ ID NO: 11657 - protein, 401 aa, unidentified
  source 1..401: note = protein_695a9dd
  REGION 4..160: note = RuvC_domain
  SITE 7: note = RuvC_P1
  SITE 57: note = RuvC_P2
  SITE 97: note = RuvC_P3
  SITE 99: note = RuvC_P4
  SITE 102: note = RuvC_P5
  REGION 274..361: note = Tnp_domain
  SITE 282: note = Tnp_P1
  SITE 312: note = Tnp_P2
  SITE 320: note = Tnp_P3
  SITE 321: note = Tnp_P4
  SITE 334: note = Tnp_P5
MNAVGIDISKGKSMVAVARPLGEIIAKPFEVIHSAASINSLITYLHTLEGNTRIVMEHTGRYYEPMAQQLANAGFFVSTVNPKLIKDYGTNSLRKVKTDKADALKIARYTLDNWQDLCQYTSMDTLRNQLKTLNRQFAFYSKHKTAIKNNLIALLDMTYPGVNNLFDSPVRSDGSQKWVDFAASFWHADCVRGIGLKAFTERYRKWCKRHGYNFQAHKPKEIFEASKELISVYPKDESSKLLVKQAIDQLNAVSAAVEHIRTEMNRIASQLPEYPVVMAMCGVGTSLGPQLMAEIGDITRFTRREKLTAFAGVDPGANQSGTYEAQSVATSKKGSPYLRKTLFLIMDCLIQTKPFDDPVYAFMDKKRAEGKPYYVYMTAGANKFLRIYYGRVKEYLSSLPA

SEQ ID NO: 11658 - protein, 330 aa, unidentified
  source 1..330: note = protein_8974eb6
  REGION 8..159: note = RuvC_domain
  SITE 11: note = RuvC_P1
  SITE 59: note = RuvC_P2
  SITE 97: note = RuvC_P3
  SITE 99: note = RuvC_P4
  SITE 102: note = RuvC_P5
  REGION 202..289: note = Tnp_domain
  SITE 210: note = Tnp_P1
  SITE 240: note = Tnp_P2
  SITE 248: note = Tnp_P3
  SITE 249: note = Tnp_P4
  SITE 262: note = Tnp_P5
MKSWNVILGVDVSKLTLDICWAEHHLHIRIANCTKGFTVFKKWCKINQIDLRETLVVMEYTGGYEYRFMQFCESIPVCYCRVPGLEIKQSIGMTRGKSDQADAFRISRYGQEKNKRLEPSAPLNNHILKLKQLLSFRKRLVREKAGMESTVKERKHMYALKRTDAIINIAQSRIKANKKHIDLLEGEIMELIKSDEPMLLNYRIISSIKGIGPVNAWMTIAYTENFASFTDARKYAVFVGVIPFEHTSGTSIKGRKRVSHLAHKELKNELNQAAKTAITHDPEIRAYAERKLKNKAYPLVLNNVKFKLILRMFSLVKRGEMYVENYTRAA

SEQ ID NO: 11659 - protein, 303 aa, unidentified
  source 1..303: note = protein_82788a1
  REGION 9..149: note = RuvC_domain
  SITE 48: note = RuvC_P2
  SITE 88: note = RuvC_P3
  SITE 90: note = RuvC_P4
  SITE 93: note = RuvC_P5
  REGION 184..268: note = Tnp_domain
  SITE 192: note = Tnp_P1
  SITE 221: note = Tnp_P2
  SITE 229: note = Tnp_P3
  SITE 230: note = Tnp_P4
  SITE 241: note = Tnp_P5
MSAATSPSSGSTFFDETSGRLRRIDNQADAIAAYVAGLDPSRDFVVMEATGVHDRLLRHALAKAGVPFSRHNPAHTHHYSKSTRRRAKTDPLDARMLSGYGRRYNPEAEPAPSEEVEQLQSLAGHRDQLVGMRATAKKHLAEAFEEIVITSLEDLIADLDTRIKAFESQIAAVIRQNQDTARDHALMVSVPGVSKGGALSLLALLPELGQRSPKAIAALVGLAPFDNKSGKLNRRSQIQGGRSRVRRALYMAALTAIRTCERFKTFYTALAARSGSKKLAIIAVARKLLVVLNAIIRDKTAFA

SEQ ID NO: 11660 - protein, 312 aa, unidentified
  source 1..312: note = protein_1978234
  REGION 6..157: note = RuvC_domain
  SITE 9: note = RuvC_P1
  SITE 53: note = RuvC_P2
  SITE 93: note = RuvC_P3
  SITE 95: note = RuvC_P4
  SITE 98: note = RuvC_P5
  REGION 189..273: note = Tnp_domain
  SITE 197: note = Tnp_P1
  SITE 226: note = Tnp_P2
  SITE 234: note = Tnp_P3
  SITE 235: note = Tnp_P4
  SITE 246: note = Tnp_P5
MTDITIGVDVSKDTLDICIHPDGDHRQFPNDPKGFKAILRWFGGRSITRLVFEATGPYHRAFERAMGTAGLPLCKVNPLQAKRFGEALGQLAKTDRMDAAMLARFGALIEPEVRAAPSIIISELKDLHVARTALVKDRTAARNREKNLTSSLLKRQTRQRLASIEGHLKQIESAIMALIHSDADLRRKFSILISIPGIAKRSAFALLIDMPELGTLEPQQAAALSGTAPMTRQSGKRMGKALVSGGRVNVRQALYMPALVATRHNPDLKVKYTELTARGKPPKVAITAVMRKLIVLANALIRDDREWTQRLA

SEQ ID NO: 11661 - protein, 322 aa, unidentified
  source 1..322: note = protein_1b42c6c
  REGION 4..164: note = RuvC_domain
  SITE 7: note = RuvC_P1
  SITE 59: note = RuvC_P2
  SITE 99: note = RuvC_P3
  SITE 101: note = RuvC_P4
  SITE 104: note = RuvC_P5
  REGION 267..312: note = Tnp_domain
  SITE 275: note = Tnp_P1
  SITE 305: note = Tnp_P2
MKLVGIDVGKNSHHFCVMDKETGEFNVTPSSFSNNKEGFDFLINSLKPYSKKSILLGMEDTGHYHVALLKFLLSNGYTVALINPKTTDLTRKMEGGITKNDKLDTITICDVLDTPERKKQYRITKVDRFDLYEQRQLTRHHHNLKEELNIYCNRLQKSIDLVFPEFNTLFGSKYGVVYMNLLKTFGSAEAIASTDIRTIRKCFEIKGRGGRISLTAEKLKECAKNSIGISSEVETIQIKHLVSQIMLIKEQIAEIDKKIEEFSIKNNSPILSIPGISHFSGTSILAELGDIGNYSKPSRIIKFAGVAPITMNRVNTTPSTLP

SEQ ID NO: 11662 - protein, 316 aa, unidentified
  source 1..316: note = protein_417ccad
  REGION 4..163: note = RuvC_domain
  SITE 7: note = RuvC_P1
  SITE 60: note = RuvC_P2
  SITE 101: note = RuvC_P3
  SITE 103: note = RuvC_P4
  SITE 106: note = RuvC_P5
  REGION 267..302: note = Tnp_domain
  SITE 275: note = Tnp_P1
MIYIGIDVAKDKHDCFITHSDGEALFNSFTISNNREGFETLFQRIESVSDDLTKVKAGLEATGHYSYNLLGFLPDKGLTTFVINPLHTNLYRKSLSLRKTKTDKVDSRTIATMMMSDMNLKSYSDTSYHNEELKSLTRYRFDKVKERAKLKSSVSRLVCILFPELEKLVPTLHMASIYALLSEFPSANAVAAAHLTRLSHLLSESSKGRYGKDTAIMFREAARSSIGSHMPAKSLELKHTIKLIQELTVEIDEIEAAIKQIMDEEIQSPILSIPGISYRMGAMIIAEIGDFSRFDSADKILLCRNVTIYLSIRTIR

SEQ ID NO: 11663 - protein, 344 aa, unidentified
  source 1..344: note = protein_8a39129
  REGION 7..146: note = RuvC_domain
  SITE 10: note = RuvC_P1
  SITE 53: note = RuvC_P2
  SITE 88: note = RuvC_P3
  SITE 90: note = RuvC_P4
  SITE 93: note = RuvC_P5
  REGION 210..296: note = Tnp_domain
  SITE 218: note = Tnp_P1
  SITE 248: note = Tnp_P2
  SITE 256: note = Tnp_P3
  SITE 257: note = Tnp_P4
  SITE 269: note = Tnp_P5
MEKIIRIGLDTSKHVYQLHGVDSAEEPVLRKKLRRKEMVAFFQKLSPTVIAIEACGGSHHLARSLATFGHEVKLIPPHYVKPYVKRGKNDAADAEALCEAMSRPSMRFVPVKTAEQQAALMLVGLRERLIRNRTQLANSIRGNAAEFGVIAAKGLCRIGPLLERIAADVSLPALARELFAIQAKEYALIEAELKVIDVKLMAWHRDNACSRRLSQIPGVGLVGASMLVMKTPDPRLFRSGRQFAAWLGLTPKDHSTAGKVRLGVITRAGDEALRSTLVVGATALLRRVREGSNRSSSAWLLDLLRRKPPKLVAVALANKIARIAWKLMVSGETYRASFVTVSAA

SEQ ID NO: 11664 - protein, 393 aa, unidentified
  source 1..393: note = protein_0573458
  REGION 4..162: note = RuvC_domain
  SITE 7: note = RuvC_P1
  SITE 61: note = RuvC_P2
  SITE 101: note = RuvC_P3
  SITE 103: note = RuvC_P4
  SITE 106: note = RuvC_P5
  REGION 267..354: note = Tnp_domain
  SITE 275: note = Tnp_P1
  SITE 305: note = Tnp_P2
  SITE 313: note = Tnp_P3
  SITE 314: note = Tnp_P4
  SITE 327: note = Tnp_P5
MFYIGIDIAKKAHEVCFLDANGDVLDGNSFKIPNTASGVEKLQKMFDKYGLTPDNSVAGMEATGHYWMVLYSWITEKGFDVKVINPIVTDAYRNMLIRKTKNDRIDAQVVARVLMLGEYQESPITDEDIISLRQFCRFRLWQIQTCSDLKRKVITLLDQVFPEYEELFSDVFGLTSKEILKSYTSPEEIASINTRKLTNLLEKASRGRFGKEKAMEIKAVAVNSIGIQFAVDSFSFQIRQIIEQLEFIEEQLASLDQQIEAYMEKLDSPITSIPGIGPVYGAVILAEIGSINRFPGGKQLVSYAGIDASVHESGEFTGTQSHISKRGSPYLRRAIFGAAFIASWSDPELSDYYKRLRDRGKHHYVAVGAVARKLCYIIYAVLSENRPFEKRSV

SEQ ID NO: 11665 - protein, 415 aa, unidentified
  source 1..415: note = protein_26c143f
  REGION 19..184: note = RuvC_domain
  SITE 22: note = RuvC_P1
  SITE 75: note = RuvC_P2
  SITE 115: note = RuvC_P3
  SITE 117: note = RuvC_P4
  SITE 120: note = RuvC_P5
  REGION 284..369: note = Tnp_domain
  SITE 292: note = Tnp_P1
  SITE 322: note = Tnp_P2
  SITE 330: note = Tnp_P3
  SITE 331: note = Tnp_P4
  SITE 342: note = Tnp_P5
MRFHQPLKEVTVTDPQIRVGIDVGCKAHRVGIANTTGKILEEFDISHTDAGFQEFFRRIDHHKQVLDLPVAVAMEGFNGYARPLDQLIQQHGYTLYNVNNLKLARFKEVFPGAAKTDPIDTRKILELFHLKDHLPLAKDTLQKVVSAPPVNDRLKRLSRRRRQLVNDKVRVANRIQSDLQAVCPELLAITNKLSNLWFLRFLTCRDDLTQLARLRRSTLLKVRGIGQKYASIIQQWQTKASFSSEVSYVGPMIISDARRILELLNQIHILDEALAALADRSELACRIASIGGFGNTCVAELAGEIGTTERFSGESSLALYVGMSPLSKDSGQHHGSKCPRQVNHRAKGAMMTAVARHINFVPESRVYYDRKRAEGKGHNQAVRALGRHLVRVIWSMVNNQRDYELRTPGGDTNVT

SEQ ID NO: 11666 - protein, 368 aa, unidentified
  source 1..368: note = protein_6651016
  REGION 1..120: note = RuvC_domain
  SITE 17: note = RuvC_P2
  SITE 57: note = RuvC_P3
  SITE 59: note = RuvC_P4
  SITE 62: note = RuvC_P5
  REGION 234..321: note = Tnp_domain
  SITE 242: note = Tnp_P1
  SITE 272: note = Tnp_P2
  SITE 280: note = Tnp_P3
  SITE 281: note = Tnp_P4
  SITE 294: note = Tnp_P5
MAYAIIALGKDTRVVMETTGRYHKPVVAALHEYGIYVCVLNPLFIKQSGSGSIRKVKTDKADAMKIAKYGLDNWVDLREYTPMDTVRQQLKLCSRQYNLYMKTVVSLQNNLISLTDKAFLGVNELFSSPERADGHQKWVDFVMTFWHCDCICRVSKKAFTERYQRWCKRKGYHFSAEKALDVYAGSCDHFTTLPKNDNTKLLITTAAQQLLASKMTLAALRAEMIRLAKQLPEYDTVLAMYGVGETTAAQLMTEIGDVRRFPRRSSIVGFAGVDPAVNQSGKHSAQSVSTTKRGSPHLRKTLYQIICIYLKKVPADEPVYQFLDKKRGEGKPYFVYMTAAQNKFLRIYYARVKECLEAFDAQQNSAQG

SEQ ID NO: 11667 - protein, 335 aa, unidentified
  source 1..335: note = protein_cee041b
  REGION 14..168: note = RuvC_domain
  SITE 17: note = RuvC_P1
  SITE 65: note = RuvC_P2
  SITE 105: note = RuvC_P3
  SITE 107: note = RuvC_P4
  SITE 110: note = RuvC_P5
  REGION 275..335: note = Tnp_domain
  SITE 283: note = Tnp_P1
  SITE 312: note = Tnp_P2
  SITE 320: note = Tnp_P3
  SITE 321: note = Tnp_P4
  SITE 333: note = Tnp_P5
MTESSDYESVQVFIGVDVGKDTHHAVAINRSGKRLFDKALPNDENKLRSLISDLKQHGQILLVVDQPATIGALPVAVARSEGVLVGYLPGLAMRRIADLHAGEAKTDARDAAIIAEAARTLPHALRTLKLADEQIAELSMLCGFDDDLAAQTTQASNRIRGLLTQIHPALERVLGSRLDHPAVLDLLQRYPSPEKLASLDEKKRAARLCKLAPRLGKRLAADIAQALAEQTVVVPGTNAAAVVLPRLALQLITLRKQRDEVALEVEQRVLAHPLYPVLTSMPGVGVRTAARLLTEVACRAFASAAHLAAYAGFAPVTRRSGSSIRGEHPSRRGTG

SEQ ID NO: 11668 - protein, 343 aa, unidentified
  source 1..343: note = protein_37a960a
  REGION 7..149: note = RuvC_domain
  SITE 10: note = RuvC_P1
  SITE 53: note = RuvC_P2
  SITE 88: note = RuvC_P3
  SITE 90: note = RuvC_P4
  SITE 93: note = RuvC_P5
  REGION 212..303: note = Tnp_domain
  SITE 220: note = Tnp_P1
  SITE 250: note = Tnp_P2
  SITE 258: note = Tnp_P3
  SITE 259: note = Tnp_P4
  SITE 271: note = Tnp_P5
MDTVMTIGVDIAKSVFQVHGVDASGEVVIRRQLKRRYVSSFFQKLPPCMVGIEACATAHHWSRELSALGHEVRLMPPAYVKPYVKRHKNDAADAEAICEAVTRKNMRFVATKTMEQQSCLMLHRTRHLFIRQQTSTINAIRAHLAEFGIVAPVGRKGVMALLEIVADSNDTRLPELARSCVAALGVELRMLKTQILEFDRKIMAWHRSNEASKRLDEIPGVGPALATALVGSIADPSAFKSARDFAAWIGLVPKQNSSGGKERLGSISKRGDRYLRSLLTAGALAVIRYAKIHGSEHRPWLTALLARRPTKIAAIALANKIARMAWAMMTKGERYREPGALAR

SEQ ID NO: 11669 - protein, 311 aa, unidentified
  source 1..311: note = protein_b0c6a31
  REGION 5..153: note = RuvC_domain
  SITE 8: note = RuvC_P1
  SITE 52: note = RuvC_P2
  SITE 92: note = RuvC_P3
  SITE 94: note = RuvC_P4
  SITE 97: note = RuvC_P5
  REGION 188..272: note = Tnp_domain
  SITE 196: note = Tnp_P1
  SITE 225: note = Tnp_P2
  SITE 233: note = Tnp_P3
  SITE 234: note = Tnp_P4
  SITE 245: note = Tnp_P5
MNNTIGIDISKDTLDAHRLADGQHKQFLNGKTGHAQLVKWIGKQSDPLIIFEATGAYHRQLERVLCTHIIPFVKVNPKQARRFAQASGKLAKTDRVDCEMLAKMGAALQLMPKPFTAENLYDLKELLSARRALIKDRTAAKARKATVINALIKQQLEKRLRQIKNDIAKIDALMLDVAREDQYMSERLDILFSIPGIGVITALMILVDMPEIGALNNKQVASLAGLAPMSQSSGKWIGKARIQGGRPNLRNAIFMPALVAIRHNADLKTKYDRLVTAGKEKKVAITAVMRKLLVLANALLRDNRKWAEKAA

SEQ ID NO: 11670 - protein, 342 aa, unidentified
  source 1..342: note = protein_2ab53dd
  REGION 6..148: note = RuvC_domain
  SITE 9: note = RuvC_P1
  SITE 52: note = RuvC_P2
  SITE 87: note = RuvC_P3
  SITE 89: note = RuvC_P4
  SITE 92: note = RuvC_P5
  REGION 211..296: note = Tnp_domain
  SITE 219: note = Tnp_P1
  SITE 249: note = Tnp_P2
  SITE 257: note = Tnp_P3
  SITE 258: note = Tnp_P4
  SITE 270: note = Tnp_P5
MKITTIGLDLAKTVFQVHGVDERGKAALKKVLKRAQVLPFFANLQPCLIGMEACGSAHHWARKLEALGHTVKLMAPQFVKAYVKTNKNDAADAEAICEAVTRPTMRFVPIKNGEQQAVLALHRARQGFVKARTAQANQIRGLLAEYGLVIPQGISQIATHLPDILEDGENGLPGVFRQLIDRLGTHLKELDRQVHELEEQIQAWHRANEASRKLAEIPGIGPITASALVASIGDARNFDDGRQLAAWLGLVPRQHSSGGKQTLLGISKRGDTYLRTLLIHGARAVIRVAERKVNHAGSWLAGVMGRRNKNVAAVALANKNARIVWALLAHDRKYACDYVSAA

SEQ ID NO: 11671 - protein, 315 aa, unidentified
  source 1..315: note = protein_ced3a6f
  REGION 6..151: note = RuvC_domain
  SITE 9: note = RuvC_P1
  SITE 54: note = RuvC_P2
  SITE 94: note = RuvC_P3
  SITE 96: note = RuvC_P4
  SITE 99: note = RuvC_P5
  REGION 193..277: note = Tnp_domain
  SITE 201: note = Tnp_P1
  SITE 230: note = Tnp_P2
  SITE 238: note = Tnp_P3
  SITE 239: note = Tnp_P4
  SITE 250: note = Tnp_P5
MYHNFIGIDISKNDFVIAVHRNKKAFKYLNNPKGFNELLKEHPILKNNSFVVLETTGGYEKALLDYLLSHKIAVHRANTRVVKYFIRSTGQLGKSDNIDAIGLARYGHERHKCLTLYKPNKDNLQELVKYTLRKQDLKKQLVAEKNRSQAPDQECTKESHIRVIEFLEQENAIVESLIDDLVKDCEYLTKARDLLVKEVAGLGKATATSLLALMPELGNLNRKQVAFLAGVAPYPYESGKKIGYRKTYGGRADLKPVLFMPAMTASRSNGKLGTFYNKLVENGKKKMVALIAVMRKIIVIANAKIRDLRLKMQIS

SEQ ID NO: 11672 - protein, 390 aa, unidentified
  source 1..390: note = protein_668c931
  REGION 4..163: note = RuvC_domain
  SITE 7: note = RuvC_P1
  SITE 61: note = RuvC_P2
  SITE 102: note = RuvC_P3
  SITE 104: note = RuvC_P4
  SITE 107: note = RuvC_P5
  REGION 266..353: note = Tnp_domain
  SITE 274: note = Tnp_P1
  SITE 304: note = Tnp_P2
  SITE 312: note = Tnp_P3
  SITE 313: note = Tnp_P4
  SITE 326: note = Tnp_P5
MLYVGIDVSKEKHDCHIMNSEGEILCDNFSFENSRSGFNSFLKLLKNCNGNELTDIKVGLESTGHYSDNLIGFLKQSKLYVSIFNPLQITLSRKAKTLRKTKTDKCDARFICRKLVEDAPAPYLPKEYHISELKTLSRFRVRLINDLSKQKTLLVRLVDIIFPELNKLFCKIHLKSVYAMLAELPSAKAIAKCHLTKLTNILSGNSRGRYSKAKAMEIRECARNSIGSQSLSLSFELQETIDNINFLQTKIDRVDSEIKTIMDKIDSPILSILGISYTLGAMIISEIGNINNFDSPAKLLAFAGCEPSKFQSGKYNADHTAMVKRGSKYLRYALFSAARMVSINCDVFADYLAKKRAENKHYFVALSHTVRKLVRVIFHLLTTNTTFVAI

SEQ ID NO: 11673 - protein, 347 aa, unidentified
  source 1..347: note = protein_5e4e603
  REGION 6..148: note = RuvC_domain
  SITE 9: note = RuvC_P1
  SITE 52: note = RuvC_P2
  SITE 87: note = RuvC_P3
  SITE 89: note = RuvC_P4
  SITE 92: note = RuvC_P5
  REGION 211..299: note = Tnp_domain
  SITE 219: note = Tnp_P1
  SITE 249: note = Tnp_P2
  SITE 257: note = Tnp_P3
  SITE 258: note = Tnp_P4
  SITE 270: note = Tnp_P5
MKITRMGIDLAKQIFQVHGVDAQGRQVLRRQLRRHQVLAFFANLPPCLIGMEACASSHYWARKLGEQDHQVRLIAPQFVKPYVKGNKNDANDAEAICEAVGRPNMRFVAVKSVAQQDMQALHRVRTELVRQRTAKVNQIRGLLGEYGIVIAQRVTQLRRALPVLIEDAEAVFSEPFRWLLEGLREDLVYLDERVQTLDGRIARLATEDEAARRLLRLRGVGPITATALVASLGDGRQFKRARDVSAWVGLVPGQYSSGGKQRLLGISKRGDAYLRTLLIHGARAVLRYSADKNDPLSRWVQRLCARRNKNIAAVALANKTMRMAWALLSRGVEYEPMPGTAPQAVAA

SEQ ID NO: 11674 - protein, 341 aa, unidentified
  source 1..341: note = protein_85d8916
  REGION 8..163: note = RuvC_domain
  SITE 11: note = RuvC_P1
  SITE 64: note = RuvC_P2
  SITE 102: note = RuvC_P3
  SITE 104: note = RuvC_P4
  SITE 107: note = RuvC_P5
  REGION 205..292: note = Tnp_domain
  SITE 213: note = Tnp_P1
  SITE 243: note = Tnp_P2
  SITE 251: note = Tnp_P3
  SITE 252: note = Tnp_P4
  SITE 265: note = Tnp_P5
MTKNVHFVGLDIACDDFAASIYQSPKESIITKEGIKNIFEGFNVFVLWLKEHGLSKTNSIICMEATGVYSEAIAHYLVSQGFRVSVEPPLKVKRAFDPIGHKTDAVDSKQIAEYAYRYSDELRFWKPKDEIMEKTKHLLTAREQFVKQSTAIQNAMKSYEKHIVQVSLIVKVHRQTLKEIEKHITEIDKELDRIIRQNPSISKMANQLKSIPGYGLLLSASLITLTGAFSDISHYKTLAAFLGICPYQHQSGKSVYRQPHMRPFGPAYPRKLLTLAARSVATHNDVFKKYYVRKLAEGKDKKLVLNNISNKLIKLACALIKNDSRYTATYRSVNPMFLDIS

SEQ ID NO: 11675 - protein, 391 aa, unidentified
  source 1..391: note = protein_9212000
  REGION 4..163: note = RuvC_domain
  SITE 7: note = RuvC_P1
  SITE 60: note = RuvC_P2
  SITE 101: note = RuvC_P3
  SITE 103: note = RuvC_P4
  SITE 106: note = RuvC_P5
  REGION 266..353: note = Tnp_domain
  SITE 274: note = Tnp_P1
  SITE 304: note = Tnp_P2
  SITE 312: note = Tnp_P3
  SITE 313: note = Tnp_P4
  SITE 326: note = Tnp_P5
MIFVGIDVAKDKHDCFITNSDGEILFDAFTISNTLVGFESLIQKIQSTTEDLSKVKVGLEATGHYSYNLLGYLLDKGLPTYIINPLHSNLYRKSLSLRQTKTDKVDARVIASMMMSDVNLKSYSDTSYHNEELKSLTRYRFKTVADRSKLKVSIKRLVTILFPELEHLVPTLHLASVYALLSEFPSASAIASSHLTHLIHLLEISSRGHYSRDTAILIRDAARSSIGSNMPAKSLELKHTIRHIQELSSEISEIEGIIEAMMDEINSPILSIPGISYRMGAMIIAEIGDFSCFSSPDKILAYAGLSPSTYQSGKFESSYSHLEKRGSRYLRYALFNATKYVCIWDPTFSAYFAKKRAEGKHYNVAISHAAKKLVRIIYHLEKTGQLYIKTA

SEQ ID NO: 11676 - protein, 424 aa, unidentified
  source 1..424: note = protein_493a868
  REGION 19..180: note = RuvC_domain
  SITE 22: note = RuvC_P1
  SITE 78: note = RuvC_P2
  SITE 119: note = RuvC_P3
  SITE 121: note = RuvC_P4
  SITE 124: note = RuvC_P5
  REGION 286..372: note = Tnp_domain
  SITE 294: note = Tnp_P1
  SITE 324: note = Tnp_P2
  SITE 332: note = Tnp_P3
  SITE 333: note = Tnp_P4
  SITE 345: note = Tnp_P5
MNLTQNDRLRQVTSDTLIVGVDVGSQTHFCRAFDWRGFELSRRVFKFSNTGMGFLTFLRWTEELMNKAEMKKVIVGCEPTGCYWLTFQKFLQDHDIQFVTVNPFTVNRSMELDDNSPEKSDLKDPKTIALLVKDGRFSTSYLPSGVYAEIREASVCRDQIMKQHVRLSNQIQGWLQKFFPEYFECYADWDSTSGLMLLKKAPLPQDILRIGAGGINQIWRDAKVRAAGIKRAQTLVEAAQNSVGLEAGEAARLEIWVLVNDYILKAEQLKRLDEYLEEKVKEVPNVEKLLAIKGVGMSTVIGFIAEVGDIGRFTDPKQIQKLAGLEIVKKSSGKKKGQPRISKRGRRKLRRTMYESAKALMLWNPAFQDVFLYYRNRTRNPLGGMQAKIAVACKAIRVFYVVLQTGCDFDEEKFRKDIIRPEAA

SEQ ID NO: 11677 - protein, 381 aa, unidentified
  source 1..381: note = protein_f174fbb
  REGION 24..173: note = RuvC_domain
  SITE 27: note = RuvC_P1
  SITE 77: note = RuvC_P2
  SITE 113: note = RuvC_P3
  SITE 115: note = RuvC_P4
  SITE 118: note = RuvC_P5
  REGION 238..317: note = Tnp_domain
  SITE 246: note = Tnp_P1
  SITE 276: note = Tnp_P2
  SITE 284: note = Tnp_P3
  SITE 285: note = Tnp_P4
  SITE 297: note = Tnp_P5
MQDLHLPQNKKTDRRNVMKRKVYVGMDVHKETIQIAYLTSNTKEMLKEQQIKHNEVHIKKFINKLKTEWNEIHCCYEAGVTGYPLYRYLKSLGVNCILVAPGKIPRQSSDKIKTDKRDAIKLARLLRSGDLESIHVPSEEDEAVRDYLRSRDSLRLDLGRNRQRLMKFLLRKGNVYSTTKYWTVSHYKWLNNLHFENEILHETFNDYYSRVRVQEENLKAMDQKIQEIAKSEAFRERVGILRCFRGVDYLTAMFLLSEVNDFRRFKTAGSFMSFLGLVPGEYSSGSKRKQTGITKTGSPRLRRILTEAAWQHRFPGTGSKIVAARRTGQPALVVALAEKASLRLHKKFRNLQLRGKTPQVMITAVSRELSGFLWAAMNLVA

SEQ ID NO: 11678 - protein, 400 aa, unidentified
  source 1..400: note = protein_6dccb95
  REGION 4..160: note = RuvC_domain
  SITE 7: note = RuvC_P1
  SITE 57: note = RuvC_P2
  SITE 97: note = RuvC_P3
  SITE 99: note = RuvC_P4
  SITE 102: note = RuvC_P5
  REGION 274..361: note = Tnp_domain
  SITE 282: note = Tnp_P1
  SITE 312: note = Tnp_P2
  SITE 320: note = Tnp_P3
  SITE 321: note = Tnp_P4
  SITE 334: note = Tnp_P5
MIAVGIDVSKYKSTVAIISNTGEILLPPKVYTHTYSALLSLVSLLKKQNDDIRIVMEATGHYHYPILKLLLGHHFFVSVVNPYIIKKYNDNNLRKVKTDKQDAIRLAFYALEKSYCLNAYVPAGEKYADLKFLYQQYTQRIHIIQKEKINLCHLLEESMPGLYDMLSTSVRNPSKNLLYSFVKRFKSFNRIKRMGKERFLNSYFKMAAEIGSRRRKNYALDIYEMAKDCIATGSTEPYSTMAQEECLRSLILAEEAANRLCEQMNSIANTLPEYPLVRSMYGVGDKIAPQLIALIGDIRKFKSGKALNAYAGNDAPPYQSGQFESKNRHISKRGSTELRKVCFEIMCCIKVHKSPEDPIYKFMQKKESEGKAKKVAIMAGINKFLRIYYARVSEVYQKAL

SEQ ID NO: 11679 - protein, 343 aa, unidentified
  source 1..343: note = protein_cc049be
  REGION 7..149: note = RuvC_domain
  SITE 10: note = RuvC_P1
  SITE 53: note = RuvC_P2
  SITE 88: note = RuvC_P3
  SITE 90: note = RuvC_P4
  SITE 93: note = RuvC_P5
  REGION 211..295: note = Tnp_domain
  SITE 219: note = Tnp_P1
  SITE 249: note = Tnp_P2
  SITE 257: note = Tnp_P3
  SITE 258: note = Tnp_P4
  SITE 270: note = Tnp_P5
MDKNTMIGVDLAKNIFQLHITTMTGALLSKKKLSRDRFKEFMKSHEPAIVVLEACSSAHYWAETLGDMGHDVKLIAPQYVKPFVKRQKNDAADAEAIVVAAQRPEMRFVAAKTKEQRAKAVLFRSRDRLIHHRTEHVNALRAVLYEYGYVIPQGIASIRRIEDILARPNCDLPDLVCDECRHLLEQISSNTKLINAKTDLIKQLAKQTNMARQLQTIPGIGPMTAMAIDAFAPPMDLFKNGRGLSAWLGLVPRQYSSGGKERLGRVSKAGQADIRRLLIIGAMSRLNWLGRKSIPEESWLGKMLARKPKMLVAIALANKMARTIWAMLTKETDYRDPTISATA

SEQ ID NO: 11680 - protein, 346 aa, unidentified
  source 1..346: note = protein_8a04bec
  REGION 13..155: note = RuvC_domain
  SITE 16: note = RuvC_P1
  SITE 59: note = RuvC_P2
  SITE 94: note = RuvC_P3
  SITE 96: note = RuvC_P4
  SITE 99: note = RuvC_P5
  REGION 218..307: note = Tnp_domain
  SITE 226: note = Tnp_P1
  SITE 256: note = Tnp_P2
  SITE 264: note = Tnp_P3
  SITE 265: note = Tnp_P4
  SITE 277: note = Tnp_P5
MKQSIIKGDIKVVGIDLAKSVFHLHAVDGKGHVVLRKKLSRNQLAEYIAQLSCCLVGMEACGGSHAWARKFREMGHDVRLISPQFVKPYVKSNKNDQVDAEAICEAVQRPTMRFVPIKSVEQQDIQSLHRAREIAIGHRTSQINQIRGLLHEYGIVVGKGPASLRKALPDILENADNELTPMFRELLDGLYQELLHLDRRISEYDAHIALLAEQSDACQRVMSIPGIGPLTATALIAAVGDAKVFQNGREMAAWLGLVPRQHSTGGHPRLLGISKRGDPYLRRLLIHGSRAVLRFASHKQDRRSRWAASLMEHKHMNVAAVAMANKNVRTAWALLTRHEMFEVTMA

SEQ ID NO: 11681 - protein, 323 aa, unidentified
  source 1..323: note = protein_d1ec4eb
  REGION 5..154: note = RuvC_domain
  SITE 8: note = RuvC_P1
  SITE 58: note = RuvC_P2
  SITE 98: note = RuvC_P3
  SITE 100: note = RuvC_P4
  SITE 103: note = RuvC_P5
  REGION 195..281: note = Tnp_domain
  SITE 203: note = Tnp_P1
  SITE 233: note = Tnp_P2
  SITE 241: note = Tnp_P3
  SITE 242: note = Tnp_P4
  SITE 254: note = Tnp_P5
MSSIVGIDIAKHSFDIATLQANGKFRTKSKLSNAAAGFQTLQQWLSKYAEPSAWVVMEATGVYHEALAEYLHQLGYRVCVMNPAQIASYAQSQLQRVKTDRVDAKLIADYGQRHLDKLRAWQPEPLAARRLRALVRRLEDLKEIEQMELNRLEVSDASVQSSIRSVLQHVQEQIADTLKAIQDHIDNDPDLRAKRDLLVSIDGIGDKTAALLLAELGDPLGFKSDRAITAFAGLNPKLQDSGKHKGHVSISRMGSARLRSGLYMPAVAAMIHNPAIKALKERLQARGKAGKQIVCAAMRKLLHIAYGVLKSGEPFDVKKALAR

SEQ ID NO: 11682 - protein, 392 aa, unidentified
  source 1..392: note = protein_8b62cb5
  REGION 4..162: note = RuvC_domain
  SITE 7: note = RuvC_P1
  SITE 60: note = RuvC_P2
  SITE 101: note = RuvC_P3
  SITE 103: note = RuvC_P4
  SITE 106: note = RuvC_P5
  REGION 267..354: note = Tnp_domain
  SITE 275: note = Tnp_P1
  SITE 305: note = Tnp_P2
  SITE 313: note = Tnp_P3
  SITE 314: note = Tnp_P4
  SITE 327: note = Tnp_P5
MIYAGVDVAKANHVIGAVGDDGQPLCKSMEFKNSDAGFERCSAWLEGLAEEPSDVFVGMEATGHYWMALFARLAAEGYSVCVINPMEVRAVRKLKGKSRVKNDRVDALLIAETLRIGEYVETKLASDEVQSLRTLTRYRQAIKEEAAQVKIRLTCVMDSYFPEYAGVFSDMFGSASLAVLEKSPMPSELLRRKAPSLASDISKAARRQIGQAKASELKAAAKSSVGITLGLGAASFEVRSMVSQVRFLEERASEAEERIEELLMGIEPLVLTIPGVSLATGAQIVAEVGDVSRFRSAAALVSYAGLNSSVSQSGQFDSGGGPITKQGDPYLRRAVWLAANRARQHDPALKAFYDKKRAEGKRHRVAVTAVARKLCHIVYAVMRDQVPYDPNR

SEQ ID NO: 11683 - protein, 346 aa, unidentified
  source 1..346: note = protein_038c5c8
  REGION 7..147: note = RuvC_domain
  SITE 10: note = RuvC_P1
  SITE 53: note = RuvC_P2
  SITE 88: note = RuvC_P3
  SITE 90: note = RuvC_P4
  SITE 93: note = RuvC_P5
  REGION 210..295: note = Tnp_domain
  SITE 218: note = Tnp_P1
  SITE 248: note = Tnp_P2
  SITE 256: note = Tnp_P3
  SITE 257: note = Tnp_P4
  SITE 269: note = Tnp_P5
MKQIIRIGMDTSKHFFQLHGVDAAEQVVLRKRLGRKAMVDFFAELPPTVVGMEACGVAHYWARVLGELGHQVKLIAPQHVKPYVKRNKNDGRDAEGVCEAMSRPTMRFVPVKTAEQQAALMLAGIREQLIARRTQLSNTIRGYAAEFGITAAKGLDKIAPLLAQISQDKSLPELTRGLFAMQGCEYAQLQLELKAIEAKLRAWHRANADSRRLAQIPGVGPIGATTLVMKTPDPHAFASGRHFAAWLGLTPKDHSTAGKTRLGKITRAGDERLRSVLVAGATAVIQQAKHGRGHPSPWLVALLKRKPPKLAAVALANKIARIAWKLMATGENYDAARMLGASALAA

SEQ ID NO: 11684 - protein, 406 aa, unidentified
  source 1..406: note = protein_4cf4f86
  REGION 4..160: note = RuvC_domain
  SITE 7: note = RuvC_P1
  SITE 59: note = RuvC_P2
  SITE 97: note = RuvC_P3
  SITE 99: note = RuvC_P4
  SITE 102: note = RuvC_P5
  REGION 270..355: note = Tnp_domain
  SITE 277: note = Tnp_P1
  SITE 308: note = Tnp_P2
  SITE 316: note = Tnp_P3
  SITE 317: note = Tnp_P4
MIFVGDDWAEDHHDVHVMDEAGARLASRRLPEGLAGIRAFHELTAGLAGQAGEVVVGIETDRGLWVDALTGAGYQVYAINPLAVARYRDRHHLSGAKSDAADAKVLADLVRTDRHNHRPIAADSAQAEAVKVLARGHQNLIWARNRHTNALRSALREYYPAALEAFDDLHDRDTLAILGRAPEPAAGAALTLAAIRSALQRGGRRRNVEARARQIHAALHTGQLAAPGPVAAAFAATTRAAIGIIAELNRQIADLETQLAQDFEQHPDAGIYLSLPGLGDVLGARVLGEFGDSPDRYTTAKSRKNYAGTSPLTVASGRKRTVLARHIRNRRLYDAIDQWAFCALRASPGCRAFYDQRRAAGDLHHQALRALGNRLVGILHGCLHHRTLYDEHTAWAHRQQNQQTAA

SEQ ID NO: 11685 - protein, 345 aa, unidentified
  source 1..345: note = protein_cfed46c
  REGION 6..146: note = RuvC_domain
  SITE 9: note = RuvC_P1
  SITE 52: note = RuvC_P2
  SITE 87: note = RuvC_P3
  SITE 89: note = RuvC_P4
  SITE 92: note = RuvC_P5
  REGION 213..295: note = Tnp_domain
  SITE 221: note = Tnp_P1
  SITE 251: note = Tnp_P2
  SITE 259: note = Tnp_P3
  SITE 260: note = Tnp_P4
  SITE 272: note = Tnp_P5
MDIVIVGIDLGKNSCSLAGLDAAGRVVLRRRLRRDSLEKFVSGLGRCIVAMEACCGAHHLGRIFEALGYEVRLMSSEYVRPYVKSQKNDDLDAEAIAEAATRPTMRFVPVKNQDQSDIQALHRARERLVSERTALINHLRALLLERGVVVAQGRRKLEAALETFADEEGDVGSLSPRIRILIEDMRAEWRSLDQRIAKLDAEFVQMARDDEAAQRLISIPGIGTINATALVAAVGNAKAFERGRDMAAWLGLVPRQMTTGGKPRLLGISKRGNRYLRKNLIHGARAALPYLVERETPLGRWARGLLERAHKNVVIVALANKLARIAWAVLAHGRKYDPQFEGMTA

SEQ ID NO: 11686 - protein, 415 aa, unidentified
  source 1..415: note = protein_28c4f26
  REGION 10..165: note = RuvC_domain
  SITE 13: note = RuvC_P1
  SITE 62: note = RuvC_P2
  SITE 102: note = RuvC_P3
  SITE 104: note = RuvC_P4
  SITE 107: note = RuvC_P5
  REGION 273..359: note = Tnp_domain
  SITE 281: note = Tnp_P1
  SITE 312: note = Tnp_P2
  SITE 320: note = Tnp_P3
  SITE 321: note = Tnp_P4
MEGLHPRYVVGIDWASDKHDVCVLAAAGERHLAFPVLHTADGLAELVRRLKRCGAPADLPIAIERPSGVLVDTLVAASFPVVPIHPNALKATRARYRAAPGKSDPGDAYILADLLRTDGHRFRPLRAPSDATKALRAAVRTRDDLVATRVQLANQLRTLLESFWAGAATIFAAVDSPIALDFLDTFPTPDSAARLGATRLDRFLTRAAYCGRRPAAELLARLRAAPASPAGPLERETKGQLVRALVAVLRPLVVQLRELDGLIAAHLAQHPDGSLLQSFPRTGTVNAAQILAELGEDRRRFPTAEHLAAEAGVAPVTHSSGKHRGVACRFACNKRLRQALTTWADNSRHAHPWAHAVYAAARARGCDHPHAIRILARAWVRVLWRCWQDRTRSEPAQHRRALPFLLPQPSISPAA

SEQ ID NO: 11687 - protein, 391 aa, unidentified
  source 1..391: note = protein_c363695
  REGION 4..161: note = RuvC_domain
  SITE 7: note = RuvC_P1
  SITE 60: note = RuvC_P2
  SITE 100: note = RuvC_P3
  SITE 102: note = RuvC_P4
  SITE 105: note = RuvC_P5
  REGION 266..353: note = Tnp_domain
  SITE 274: note = Tnp_P1
  SITE 304: note = Tnp_P2
  SITE 312: note = Tnp_P3
  SITE 313: note = Tnp_P4
  SITE 326: note = Tnp_P5
MYFVGIDIGKRNHEACIIDASGQIRGKTLRFPNTQAGGQKLIQWMRCVDPNLSSTHIAMEATGHYWLVLHSFLRKHGLQPSVINPIQSDAFRNMYIRQTKNDAKDAFIIAEVLRFGRYTTTELASEEVIALRQLSRFRFSLVDTISDLKRQVISILDMLFPEYERVFSDLFGKTSSKLLMEYTTPEEILAVDTEELAAFIAKHSRNRLGLDKAVELKSAAKSSFGIDMALDAYRLQLRLLVQQIRFTEEQLESLNTEIAKRLEAVDSNLVTIPGIGPVLAAAILGEIGDISRFPTGVKLVAYAGIDPTVRQSGEFAGTRNRMSKRGSPYLRRAIWLAASVAKTHNPILREFYEQKRAEGKHPLAATGAVARKLTYIIHAVLRDRQPYEPIA

SEQ ID NO: 11688 - protein, 395 aa, unidentified
  source 1..395: note = protein_1050eee
  REGION 4..161: note = RuvC_domain
  SITE 7: note = RuvC_P1
  SITE 60: note = RuvC_P2
  SITE 100: note = RuvC_P3
  SITE 102: note = RuvC_P4
  SITE 105: note = RuvC_P5
  REGION 266..353: note = Tnp_domain
  SITE 274: note = Tnp_P1
  SITE 304: note = Tnp_P2
  SITE 312: note = Tnp_P3
  SITE 313: note = Tnp_P4
  SITE 326: note = Tnp_P5
MFIVGIDIAKRSHEAVIITENGQTVRKAFNFRNNCTGYNLLLEQVRKLTLVKSQIVFAMESTAHYWLALYARLSKDGYTVMVLNPIQSHSLRELYIRKAKTDTKDSLVIADLVRFGRCKASNVPQDKILALRELCRSRAYLIDMAADLKRKLIALLDRIFPEYESLFDPVFGKASIAVLRKYPTPQKIKNAHLEKLTELLMESSGGHFGEWKARQLKEAAHNSFGIDDSCGVYSALLGMFLEQILSLTDQADSLEKQIASLLKEFDSQLTSIPGVGIVLAATILSEIGDISRFSSSDKLLAYAGLDPSVKQSGEFKSNQNRMSKRGSPYLRRAIWLASTVAVQFDPMFRAYYEKKISDGLHYMNVIGHVSRKMTAVIFAVLRDGQPYQPVLPTAG

SEQ ID NO: 11689 - protein, 318 aa, unidentified
  source 1..318: note = protein_96b3fc3
  REGION 3..147: note = RuvC_domain
  SITE 6: note = RuvC_P1
  SITE 50: note = RuvC_P2
  SITE 90: note = RuvC_P3
  SITE 92: note = RuvC_P4
  SITE 95: note = RuvC_P5
  REGION 189..273: note = Tnp_domain
  SITE 197: note = Tnp_P1
  SITE 226: note = Tnp_P2
  SITE 234: note = Tnp_P3
  SITE 235: note = Tnp_P4
  SITE 246: note = Tnp_P5
MRIGMDVAKAELVVAAHPTGERWTVANDKRGIRTLVERLCGEAPELIVLEATGGYELLCVAALAAVGRPVVVANPRQGRDFAKATGQLAKTDRIDADSLALFAERGRPAVRLWPDAETQELDALRSRRRQLLEMLGAERPRLGQVFGTGKQRVKKRLQAHITYLEREVRIADTDLGDMVRHSPVWRERDALRQRVPGVGPVLSLPRLADLPELGRLARREIAKLVGIAPLSRDSGTMRGRRFVQGGRASVRAVLYMGALVATRRNALICAFYQRLLAAGKPKNLALVACLRKLLTILNTIVRTGQRWSPEYAAVPIPA

SEQ ID NO: 11690 - protein, 327 aa, unidentified
  source 1..327: note = protein_bddc81b
  REGION 6..147: note = RuvC_domain
  SITE 9: note = RuvC_P1
  SITE 52: note = RuvC_P2
  SITE 87: note = RuvC_P3
  SITE 89: note = RuvC_P4
  SITE 92: note = RuvC_P5
  REGION 210..251: note = Tnp_domain
  SITE 218: note = Tnp_P1
MTDTMIGVDLAKTVFQIHAASLTGELLFRKKVRRPQFLQFMASQLPALVVMEACGSAHYWARELMNVGHEVKLIAPQYVRPFVKRQKNDAADAEAIVIAARQPEMRFVVPKSEEQQARAVLFRCRDRLVHQWTELVNALRATLYEFGLIVPKGIAHLKRMEEFVEDESVSLPTIVRKECRDLLEQIDEQSARIMEKTRAMVGLSEESGVAQRLETMPGVGPLTALAVEAFAPSMESFRSGRDFAAWPSFEGRSGRYPTFAHHRRHDARELGEPQAAAARHLAGTDAGPQAPYACGDRPGEQDGADNLGHADEAGELSGSGSVRRSMR

SEQ ID NO: 11691 - protein, 274 aa, unidentified
  source 1..274: note = protein_ba61dc7
  REGION 9..89: note = RuvC_domain
  SITE 28: note = RuvC_P3
  SITE 30: note = RuvC_P4
  SITE 33: note = RuvC_P5
  REGION 149..237: note = Tnp_domain
  SITE 157: note = Tnp_P1
  SITE 187: note = Tnp_P2
  SITE 195: note = Tnp_P3
  SITE 196: note = Tnp_P4
  SITE 208: note = Tnp_P5
MARKLEGLGHSPKLISPQFVRPFVKSNKNDFVDAEAICEAASRPSMRFVQPRTESQQAMRALHRVRESLVQDKVKTTNQMHAFLLEFGISVPRGAAVISRLSTILEDNSLPLYLSQLLLKLQQHYHYLVEQIKDLESQLKRKLDEDEVGQRLLSIPCVGTLTASTISTEIGDGKQYASSRDFAAATGLVPRQYSTGGRTTLLGISKRGNKKIRTLLVQCARVFIQKLEHQSGKLADWVRDLLCRKSNFVVTCALANKLARIAWALTARQQTYVA

SEQ ID NO: 11692 - protein, 342 aa, unidentified
  source 1..342: note = protein_7d8f85a
  REGION 7..148: note = RuvC_domain
  SITE 10: note = RuvC_P1
  SITE 53: note = RuvC_P2
  SITE 88: note = RuvC_P3
  SITE 90: note = RuvC_P4
  SITE 93: note = RuvC_P5
  REGION 211..296: note = Tnp_domain
  SITE 219: note = Tnp_P1
  SITE 249: note = Tnp_P2
  SITE 257: note = Tnp_P3
  SITE 258: note = Tnp_P4
  SITE 270: note = Tnp_P5
MEEVTIIGVDLAKNVFQLHGAAADGSVVFRKKLMRAQFGTFMTDHPACIVAMEACGSDHHWAREMARLGPQPKLLAPGYVKPFIKRHKNDAADAEAIVEAAQRPTMRSVEPKSEEQQCRAIVFRTREQLVNQRTELVNALRAHLYEFGYVAPQGIGHLRRLAEIIQDQNAKLPDLVREICDDLLDRIAHLTGRIEALKKTINALSKEAQRPRRLQTMPGVGPIAALAVETFAPPMETFKCGRDFSAWLGLVPLQKSTGGKQRLGKSSKMGQRDIRRLLILGAMAVVQWASRKGVPNGSWLARMMAKKPRILVAIALANKMARGIWAMLTKQEDYRNPAMVPA

SEQ ID NO: 11693 - protein, 399 aa, unidentified
  source 1..399: note = protein_3b32723
  REGION 5..163: note = RuvC_domain
  SITE 8: note = RuvC_P1
  SITE 62: note = RuvC_P2
  SITE 102: note = RuvC_P3
  SITE 104: note = RuvC_P4
  SITE 107: note = RuvC_P5
  REGION 272..361: note = Tnp_domain
  SITE 280: note = Tnp_P1
  SITE 310: note = Tnp_P2
  SITE 318: note = Tnp_P3
  SITE 319: note = Tnp_P4
  SITE 332: note = Tnp_P5
MNPVVGIDVAKDESEVQAFLEKGKPYGASFSIKHNREELDKFIKFLVEIKSITGSIPIVILESTGHYHTPIIQCLEENEILYILLNPIISYQAKKSSLRKVKTDAFDAYQLCVLYYKEEFEPYKMRGIQLLNLRNLSRQQEIVTNMYVEAKLQFHTILDQVFPEYRKVFGDLSKVSLLILKEYPTSEKVLESNEEELTNSIREYCTSRSALWAREKAKKLIDSAKQNPFRKMMYQSHLFNLNMYIDILFHYQGHLSELESQMISLASEIEEYKIIQSIPGTGEKIAATIISEIGEIDRFNHPKKLVAYAGIDPSVYSSGKFTATTNRITKRGSSRLRHSLYLAVLCGIRSSRNKKLKEFYDKKRSEGKPSKVAIVACINKLLHWIYALLKRKEIFLDLV

SEQ ID NO: 11694 - protein, 337 aa, unidentified
  source 1..337: note = protein_6878015
  REGION 1..89: note = RuvC_domain
  SITE 28: note = RuvC_P3
  SITE 30: note = RuvC_P4
  SITE 33: note = RuvC_P5
  REGION 199..299: note = Tnp_domain
  SITE 207: note = Tnp_P1
  SITE 237: note = Tnp_P2
  SITE 245: note = Tnp_P3
  SITE 246: note = Tnp_P4
  SITE 259: note = Tnp_P5
MEERGYLLIIINPLISYKARGSSLRKVKTDAIDAYLLCELFYKEEFEPYRKRGVQLLNLRNLTRQHENITGVMIQTKLQFQAVLEQVFPEYIGVFGDLYSVVSLLTLSEFPSSEDILKASEETISEKIFQVCKSRSIRWAKEKAIELKAAASRNPFEKTVYQSHILSLGMYISMILQYKEHLSKLESEIDALAKEIEEYNIIKSIPGIGEKIAATIISEIGEIDRFNDPKKLVAFAGVDPSVFESGKFSATKNRITKRGSSRLRHALYMAVRCAIRDCRKKKTTEEIIPRNKRMREYYDKKREEGKPFKVAVIACVNKLLHWIFALLKNKTTFQDIA

SEQ ID NO: 11695 - protein, 404 aa, unidentified
  source 1..404: note = protein_93fa640
  REGION 4..163: note = RuvC_domain
  SITE 7: note = RuvC_P1
  SITE 59: note = RuvC_P2
  SITE 100: note = RuvC_P3
  SITE 102: note = RuvC_P4
  SITE 105: note = RuvC_P5
  REGION 271..359: note = Tnp_domain
  SITE 279: note = Tnp_P1
  SITE 309: note = Tnp_P2
  SITE 317: note = Tnp_P3
  SITE 318: note = Tnp_P4
  SITE 331: note = Tnp_P5
MYSVGIDASKGKSTVCILKETGECILTPRDFNHTKDDLEALDQTIQKLTGKNDVRIVMEATGIYHWPLLLFLKRKGYFVSVINPLRMKLFAKSYNFRGIKTDKYDSTIIAAYGCEKWFSLQQWDFNDDTRDELKRLARSYVSYQKPKISVKQSLDLELEKCMPGIKNLFSDDQKLYSFILFFQHFDKITALSQKKFLNKFDRWAKKKGYRFHSSTPTKIYELASSGIPTVPFDDSCVLIIENLVNTLITIDKGLNDILTRMHQLASSLPEYDVVLNMSGVGYTLAPLIIAEIGDVRLYRSKKSLVCAAGIDVPPYESGQFKASHRVITKKGNSNIRRHLYLVMNSLYVTKPKKDSAVYEFMIRKKAEGKLHKQVIVAGMRKFLHIYYARVKERYQDIGLWQTLS

SEQ ID NO: 11696 - protein, 321 aa, unidentified
  source 1..321: note = protein_06e6c51
  REGION 7..148: note = RuvC_domain
  SITE 10: note = RuvC_P1
  SITE 53: note = RuvC_P2
  SITE 88: note = RuvC_P3
  SITE 90: note = RuvC_P4
  SITE 93: note = RuvC_P5
  REGION 210..273: note = Tnp_domain
  SITE 218: note = Tnp_P1
  SITE 248: note = Tnp_P2
  SITE 256: note = Tnp_P3
  SITE 257: note = Tnp_P4
MDKIIRIGMDTSKHGFQLHGVNTEEKSVLREKMRRKEMIDFFTTCPPTLVAIEACGGSHHWARLLASFGHAVKMIAPQLAKPYVKRNKNDAADAEGLCEAVSRPTMRFVPVKTVDEQAALMLISVRTRLIANRTQLANAIRGYANEFGVSAAKGLAHIPMLLERIQADATVPELAQELFMSQAEEYAQLAKKIADVEAKLKAWQRNDERSRRLSTIPGIGPIGSALLIMKTPVPELFQSGRQFAAWIGLTPKDHSTGGKLRLGGITREPAMKLCGPSWWQEQPLSFITRGDLVRLLNGWRNCSDVSRLNWQLSHLPTRWRA

SEQ ID NO: 11697 - protein, 416 aa, unidentified
  source 1..416: note = protein_a1dc6e5
  REGION 4..160: note = RuvC_domain
  SITE 7: note = RuvC_P1
  SITE 57: note = RuvC_P2
  SITE 97: note = RuvC_P3
  SITE 99: note = RuvC_P4
  SITE 102: note = RuvC_P5
  REGION 274..361: note = Tnp_domain
  SITE 282: note = Tnp_P1
  SITE 312: note = Tnp_P2
  SITE 320: note = Tnp_P3
  SITE 321: note = Tnp_P4
  SITE 334: note = Tnp_P5
MNAVGIDVSSRKSTVAVLRPLGEVVCLPFDVTHDIAGLASLAEKLKALDGETRVVMEHTGRYYEAVEKALHEAGFFVCAVNPLLIKEYGANSLRRVKTDKADAVKIARYALDNWADLRDFTPMDAIRYDLKTLNRQFQLASKQRTASANNLIALLEQSFPGIRKCFDSPVRSDGTQKWVDFAHSFWHVDCVRKQPFPAFCERYRKWCKRHAYFFKLSNAEEVYTLAKRAVVLTPKSKVVKVLVQEAANQLSSISRSVEVYRAEMDRLAAMLPEYPVVMAMYGVGKSYGPQLMAEIGDVRRFERKQALVAFAGIDPMPNQSGDKNVRSNKSSKRGSPYLRKTLFNVIRTYLQCAPQDEPVFQFLNRKQAEGKPFYVYMLAAANKFLRRYYAKLRDYFASLNPLQPVDPIPTILKATL

SEQ ID NO: 11698 - protein, 326 aa, unidentified
  source 1..326: note = protein_1d662b6
  REGION 4..152: note = RuvC_domain
  SITE 7: note = RuvC_P1
  SITE 55: note = RuvC_P2
  SITE 93: note = RuvC_P3
  SITE 95: note = RuvC_P4
  SITE 98: note = RuvC_P5
  REGION 198..285: note = Tnp_domain
  SITE 206: note = Tnp_P1
  SITE 236: note = Tnp_P2
  SITE 244: note = Tnp_P3
  SITE 245: note = Tnp_P4
  SITE 258: note = Tnp_P5
MLFLGVDVSKLTLDICCADQNLHIKIDNCPKGFCVLKKWCKTNEIDLKGTLMVMEYTGGYEYRFLQFCESSFISYCRIPGLEIKQSMGMTRSKSDRADAFRIGEYGEEKIKKLTPSKPLDKNILELKQLLSFRKRIVREKAGLESTVKERKHMYGSKKKDMVAHIARAKIKANGEYILRVEQEIMQVIRGNEAMWLNYRIITSIKGIGPVNGWMTIAYTENFTSFTDTRKYAVYVGVIPFSHTSGTSIKKRTKVSHLAHKELKQELNQAAKTAIQHDPELRAYAERKLKNKCYPLVLNNVKFKLILRMFSLVKRGEKYVESYRRAA

SEQ ID NO: 11699 - protein, 319 aa, unidentified
  source 1..319: note = protein_c4de7a6
  REGION 6..152: note = RuvC_domain
  SITE 9: note = RuvC_P1
  SITE 57: note = RuvC_P2
  SITE 97: note = RuvC_P3
  SITE 99: note = RuvC_P4
  SITE 102: note = RuvC_P5
  REGION 192..278: note = Tnp_domain
  SITE 200: note = Tnp_P1
  SITE 230: note = Tnp_P2
  SITE 238: note = Tnp_P3
  SITE 239: note = Tnp_P4
  SITE 251: note = Tnp_P5
MSQITIGIDIAKLKFDVARLAEGKYKHAKFANIAEGFAEFVAWLCDFGDTDQRLCMEATGAYGVPLAEFLVEQGYLVSVVNPAQIHAFGKSELSRAKTDKADAKLIARYALQASMTAWKPLPTNIRVLQALTRRVEHLLEMQRMERNRLETADSTITSSINTVLSILDAELKATRQAIHDHIDHDPDLKRQSDLLMSIPGIGSATITYLLVALSSHHGYTNAKQVVAQAGLAPAIAQSGQWQGKTRIAKTGDARLRKALYLPALVAWRHNPVIRCQCERLKANGKNGKLIACAAMRKLIHLAFAILKSGKPFDPTFSLA

SEQ ID NO: 11700 - protein, 345 aa, unidentified
  source 1..345: note = protein_ef2e00d
  REGION 6..163: note = RuvC_domain
  SITE 9: note = RuvC_P1
  SITE 70: note = RuvC_P2
  SITE 108: note = RuvC_P3
  SITE 110: note = RuvC_P4
  SITE 113: note = RuvC_P5
  REGION 214..302: note = Tnp_domain
  SITE 222: note = Tnp_P1
  SITE 253: note = Tnp_P2
  SITE 261: note = Tnp_P3
  SITE 262: note = Tnp_P4
  SITE 275: note = Tnp_P5
MKKIIIGIDFSKETFDATLFDCRNSELSEAVQSAVHEKFTNKKEGFQTFVTWIKSSVKKINLDELLLCGEKTGKYSLPLSNFLYAKGYSIWLDSGLRIKRSLGISRGKSDKADSLKIALYAYRYQDMAVCYVPLSKNVSRLKELFLYRQHLVSQMKAMAVRKNVTDDFNKELGDVRFIVNSSTKIIQQIKATIKKCEEKMQELIEEDEELKTTHDSITSVKGISLINAAAFIAYTNNFKDFGGNAKKIATYWGVAAFAQESGTSVHKVARVSKIANKMLKSLLTQAARIAVRWEPKFRQYFEHLISRGKHQGVALNNVKNKLIHLITALAVSQEKYNPAYKCINR

SEQ ID NO: 11701 - protein, 413 aa, unidentified
  source 1..413: note = protein_7742f1c
  REGION 9..154: note = RuvC_domain
  SITE 12: note = RuvC_P1
  SITE 58: note = RuvC_P2
  SITE 93: note = RuvC_P3
  SITE 95: note = RuvC_P4
  SITE 98: note = RuvC_P5
  REGION 255..341: note = Tnp_domain
  SITE 263: note = Tnp_P1
  SITE 294: note = Tnp_P2
  SITE 302: note = Tnp_P3
  SITE 303: note = Tnp_P4
  SITE 314: note = Tnp_P5
MEKVYDKCCGIDVHKKLIVVCFKCGKKQEVREFGATTRELLKLADWLGSGGCEMVAMESTASYWKPLYNILESSGLNAMVVNARHMKAVPGRKTDVRDAEWIADLLQHGLLQASYIPDKDQREVRELVRYRKSLVGERTRELNRLQKMLEGANIKLSGTVSDINGKSARSILEHILTGESFDDAKYDEMYGNKIIAHNLKATKEQIIDDLNGIMSPLQRKMMRTLLKHLDELNSHIHELDDDIDSFMKPEEKQASAAIQDVTGIGNTSAQAVISVIGTDMGRFPDDAHIASWAGLCPGDNESAGKRKSGKTRKGNALLRETLVNCAHAAVKNKKSYFYAQFMRISAHRGKKRAYVAVAHSMLVAIYHILKDGVVFKDLGADYYNQFNKERKIKAYLKKLKALGWEDSAAGQPA

SEQ ID NO: 11702 - protein, 321 aa, unidentified
  source 1..321: note = protein_94ce6d6
  REGION 9..149: note = RuvC_domain
  SITE 12: note = RuvC_P1
  SITE 56: note = RuvC_P2
  SITE 96: note = RuvC_P3
  SITE 98: note = RuvC_P4
  SITE 101: note = RuvC_P5
  REGION 191..276: note = Tnp_domain
  SITE 199: note = Tnp_P1
  SITE 228: note = Tnp_P2
  SITE 236: note = Tnp_P3
  SITE 237: note = Tnp_P4
  SITE 248: note = Tnp_P5
MAKRTTICAGIDTGKRKLDVALDGNSLQLQVENTAEGHKVLLEWLRRHKVKRIGIEASGGYEQPVVAELRRKRFVVVVFQPAQVRAYAKFHLQRAKNDKIDAALIAACTAAVKKIHPAPDPRLQPFAEHLTMIEQIGEDIKLYKNRLETCRDPRIQKVWREEIARLAKRERAELKALVAAIREHRDLAHRLDLIYSVGGAGLPTAVAILVRMPEIGQLSREQVAALAGLAPYDDDSGEQVGARHIHGGRKRLRRALYAAALPASFRWNPQLIALYTRLKAAGKEHKRCLIACARKLLIFVNTVVARGTPWQDEPLPTAATG

SEQ ID NO: 11703 - protein, 412 aa, unidentified
  source 1..412: note = protein_ee6dc4f
  REGION 5..164: note = RuvC_domain
  SITE 8: note = RuvC_P1
  SITE 63: note = RuvC_P2
  SITE 103: note = RuvC_P3
  SITE 105: note = RuvC_P4
  SITE 108: note = RuvC_P5
  REGION 274..374: note = Tnp_domain
  SITE 282: note = Tnp_P1
  SITE 312: note = Tnp_P2
  SITE 320: note = Tnp_P3
  SITE 321: note = Tnp_P4
  SITE 334: note = Tnp_P5
MNPVIGLDVSKGESQVQAFLDKGKPYRKSFSIKHNREGLETFLAFLQEVEQAAQGQPPSVVLESTGHYHLPVIQFLEDQKYVYIVINPLISHRAKSSSLRKVKTDAVDAYHLCELYYKEELEPYKKRGIQLLNLRNLTRQQETIAEVSANTKLQLHSLLDQVFPEYRGVFGSLYSKVSLLTLQAFPTSEAVLQVDESELVEKIASLCKSRSERWAIEKAQKLREAALRNPFQKNLYESHIFNLEMLTNIVLQYQEHLSNIATEIDALAKEIEEYQIIQSIPGIGEKIAATITSEIGEIDRFNHPKKLVAFAGVDPSVYSSGKFTASVNRITKRGSSRLRHALFMAVQCGIRDSRKQKTTDEIIARNKRLREFYDKKREEGKPFRVAVIACVNKLLHWIYALLKSKTPFQDVA

SEQ ID NO: 11704 - protein, 325 aa, unidentified
  source 1..325: note = protein_b29b0f4
  REGION 4..147: note = RuvC_domain
  SITE 7: note = RuvC_P1
  SITE 52: note = RuvC_P2
  SITE 92: note = RuvC_P3
  SITE 94: note = RuvC_P4
  SITE 97: note = RuvC_P5
  REGION 191..278: note = Tnp_domain
  SITE 199: note = Tnp_P1
  SITE 229: note = Tnp_P2
  SITE 237: note = Tnp_P3
  SITE 238: note = Tnp_P4
  SITE 251: note = Tnp_P5
MTYIGIDISKATFVAAFLHGKSYRTDTFPNDAKGIRRFISKLDPAIHHCVMEATGNYCFLLLYLLDKSGIRASLINPKKIKNYARVMMSVTKTDSKDACLIADFGERFKPEPYKFPSEQIMILKQKKTVLRQLQKQLTATKNLLSSLEPLPVKDKKCVNSLKQTITFLEKQIKYMQQEMEAVVAEVFDRQLKLLTSIKGIGVTLATALIIATGGFTYFDNAKQLSRFIGICPTIEQSGTSINIRGHINRNGDETLRSMLYVAAWSASQHNKACKECYQRLRGNGKSGKVAMIAVANKLVRQAFAVVTSNNSYIDGFVSTKPDTTV

SEQ ID NO: 11705 - protein, 368 aa, unidentified
  source 1..368: note = protein_57fd394
  REGION 7..148: note = RuvC_domain
  SITE 10: note = RuvC_P1
  SITE 53: note = RuvC_P2
  SITE 88: note = RuvC_P3
  SITE 90: note = RuvC_P4
  SITE 93: note = RuvC_P5
  REGION 210..302: note = Tnp_domain
  SITE 218: note = Tnp_P1
  SITE 248: note = Tnp_P2
  SITE 256: note = Tnp_P3
  SITE 257: note = Tnp_P4
  SITE 269: note = Tnp_P5
MNDIIRIGVDTSKSVFQLHGVDAAERPVLRKKLRRRNFLSFFAQLPPTQVGLEACGGSHYWARELTALGHEPKLLPAQHVRPYVQRNKNDQRDSDAVCEAMSRPRMSFVRIKSAQEQAAQMLMTTRQRLIDYRTQLINTIRGHAAEFGLTAAKGPAHVEPLLARIAEDGTVPALAKELFAIHGDEYGRLKVELREIEAKLKVWHRQNEMSRRLAEVDAIGPIGGCLLAIKAPDPHAFGCGRDFAAWMGLTPKDHSTAGKMRLGVITRAGDEALRRTLVVGATSVIQQVNKGKAHPSPWLRDLVARKPPKLAAVALANKVARIAWKLMVSGERYDPARAGIVSPRPRVAPCSPRQGRCAPPAAVAFGQP

SEQ ID NO: 11706 - protein, 414 aa, unidentified
  source 1..414: note = protein_907c6c8
  REGION 9..165: note = RuvC_domain
  SITE 12: note = RuvC_P1
  SITE 62: note = RuvC_P2
  SITE 102: note = RuvC_P3
  SITE 104: note = RuvC_P4
  SITE 107: note = RuvC_P5
  REGION 280..367: note = Tnp_domain
  SITE 288: note = Tnp_P1
  SITE 318: note = Tnp_P2
  SITE 326: note = Tnp_P3
  SITE 327: note = Tnp_P4
  SITE 340: note = Tnp_P5
MNYSPITAVGVDVSKSKSTVAIRRPGGEVVRLPFDVQHNTEDIQQLISMLHKVDGEIKIVMEHTGMYWRPLALTLVNAGFFVSVVNAMLIHDFRDNSIRKVKTDKADSMEIANYALTYWAELRPYTSEDETRNMLKIQSRHYERTMNTSIALRNGLIALLDQSFPGVNHLFGSEMRTRSGHLKWIDFSRRFWHKDCVAAVSLNSFADSLQKWCKRTGYHYSYADAERIHRIAKSSIATFPKNDSTKLLITQAVDSLNAVYDALNILRSELVRLASLLPEYDVVTAMQGAGPITGLQLMAEIGDVRRFTHKGALVAFAGMDAPPFQSGTFDSKSRQISKRGSPHLRKVLFTICSIILQHSNPENPVFQFMDKKRSEGKHFYVYMVAGGAKFLRIYYARVKEVLDAQDTLNAQIQS

SEQ ID NO: 11707 - protein, 343 aa, unidentified
  source 1..343: note = protein_a6c8aac
  REGION 7..149: note = RuvC_domain
  SITE 10: note = RuvC_P1
  SITE 53: note = RuvC_P2
  SITE 88: note = RuvC_P3
  SITE 90: note = RuvC_P4
  SITE 93: note = RuvC_P5
  REGION 211..297: note = Tnp_domain
  SITE 219: note = Tnp_P1
  SITE 249: note = Tnp_P2
  SITE 257: note = Tnp_P3
  SITE 258: note = Tnp_P4
  SITE 270: note = Tnp_P5
MSIDTMIGVDLAKSVFQVHGASMNGEMRFQRKLSRQAFPTFMAQQPAAAVVMEACGSAHYWARVLSGFGHEVRLIAPRYVRPFVKRQKNDAADAEAIVVAAQRPEMRFVEPKSEAQQSAAILYRSRQRLVRQRTETVNALRAALYEFGHVIPQGIRHVGRIRAILEAPNSDLPALMREECLAMLEQLAVLSGWIDAKTARIKELAAATPVSKRLQTMPGVGPLVAMAVETFAPDMTSFRNGRDFAAWLGLVPRQFSSGGKERLGRVTKAGQADIRQMLIIGAMSRLNWMGRKAIPESSWLARMMARKPRMLVAIALANKMARQIWAMLTKNEDYKNPMPVMAA

SEQ ID NO: 11708 - protein, 339 aa, unidentified
  source 1..339: note = protein_14fccc0
  REGION 6..147: note = RuvC_domain
  SITE 9: note = RuvC_P1
  SITE 52: note = RuvC_P2
  SITE 87: note = RuvC_P3
  SITE 89: note = RuvC_P4
  SITE 92: note = RuvC_P5
  REGION 210..294: note = Tnp_domain
  SITE 218: note = Tnp_P1
  SITE 248: note = Tnp_P2
  SITE 256: note = Tnp_P3
  SITE 257: note = Tnp_P4
  SITE 269: note = Tnp_P5
MNYTTVGVDIAKNVMQMHWIDPDTGEVVNRSIKRTAFLEHFANRTPCLIGMEACGGAQHWARALTKMGHQVKLMPAKFVKAFNIGNKNDPADARAIWMAAQMPRKSVAVKTEGQQAVLAMHRMRQQLVKFRTMQINSLRGLLTEYGEVMGKARSALNKAIPDVLARLSERLPAMLIDTLREQWKGLTKLDEQIVEIERRLQTWMKEDKASRAIAQIPSVGLLSATAVVATMGDPGSFKSGREFAAWLGLVPGQTGTGGKVQLLGISKRGDTYLRTLLIHGARSVLCNTKQPGIWLEQLKKRRPLKVAAVALANKMARIIWAILAHDRPYSKDHVSIKPA

SEQ ID NO: 11709 - protein, 320 aa, unidentified
  source 1..320: note = protein_8e3be1d
  REGION 8..163: note = RuvC_domain
  SITE 11: note = RuvC_P1
  SITE 56: note = RuvC_P2
  SITE 96: note = RuvC_P3
  SITE 98: note = RuvC_P4
  SITE 101: note = RuvC_P5
  REGION 195..279: note = Tnp_domain
  SITE 203: note = Tnp_P1
  SITE 232: note = Tnp_P2
  SITE 240: note = Tnp_P3
  SITE 241: note = Tnp_P4
  SITE 252: note = Tnp_P5
MSASSVVVGIDVAKVHVDVRVLGAQLEAERFDNEPDAHSALAAALKPLGVALVVMEATGGYEAALACALQAAGLPVAVVNPRQARDFAKSMGQLAKTDRIDARMLAELGATLARRDDLADFIRPLADAQQQALAAMVTRRRQLVTMLLSERQRLQLAIAVVRPSIEAMIEAIRKQLDEVEAQMVGHVQAHYAELDRLLRSASGIGPVASATLIAELPELGKLNRREIAALVGVAPMANDSGSSKGRRRVQGGRFEIRRVLYMATLTATRHNPAIKTFYDRLLAAGKLPKVALIACMRKLLTILNAMVKTKQPWNKSIHGA

SEQ ID NO: 11710 - protein, 353 aa, unidentified
  source 1..353: note = protein_fca4afa
  REGION 17..172: note = RuvC_domain
  SITE 20: note = RuvC_P1
  SITE 70: note = RuvC_P2
  SITE 111: note = RuvC_P3
  SITE 113: note = RuvC_P4
  SITE 116: note = RuvC_P5
  REGION 234..319: note = Tnp_domain
  SITE 242: note = Tnp_P1
  SITE 272: note = Tnp_P2
  SITE 280: note = Tnp_P3
  SITE 281: note = Tnp_P4
  SITE 292: note = Tnp_P5
MAIPCDYDKEVDMVTTIGIDPHKATHTAVAINETETVLGELTVPADRDQTKTLLDWAQNLDGEGRVWAVEAAGGLGYLLSQQLIAHGEHVVDVPPVLASRVRVLGSGRSDKNDPNDARSVAIAALRQPGLAVVRREDHTQVLRMLAKRHLELTALRTQAACRLHAVLAQLRPGGMGRRLSAKQASRMLQGLRIVDPVGEQRRLTARVHLADIRRYDREIKTNKVLISKAVAASKTTVTDVYGVGPIVAALLIGYTGDIGRFASPNHYASYNGTAPVEYSSGGKKKHRLSMRGNRKLNHAIHMAAVTQIRHDTPGRIYYDKKQAEGKTKKEALRALKRRVSDTVYQQLVADQQG

SEQ ID NO: 11711 - protein, 402 aa, unidentified
  source 1..402: note = protein_964d624
  REGION 5..163: note = RuvC_domain
  SITE 8: note = RuvC_P1
  SITE 62: note = RuvC_P2
  SITE 102: note = RuvC_P3
  SITE 104: note = RuvC_P4
  SITE 107: note = RuvC_P5
  REGION 276..365: note = Tnp_domain
  SITE 284: note = Tnp_P1
  SITE 314: note = Tnp_P2
  SITE 322: note = Tnp_P3
  SITE 323: note = Tnp_P4
  SITE 336: note = Tnp_P5
MNPVIGLDISKGESHGQAFLDRGKPYKGTFYFEHTREGLEKLLQTIRDVEHAVGLRPTLILEATGHYQSPVVQFLEEHHYLYIVINPLISNRLRKSHLRKVKTDAADAYLLGDLYYREEFEPFKKRGVQLLNLRYLTRQYETLSKMCVQTKLQFQAVLDQVFPAYKGVFGAMYSNVSLRFLSEFSTSSSVLQADEETLKISIRALLSSKRGRSEAWINERVQRLMNAAKQNPFQQTMYSSHLINLKILITLILQYQEHLADLEQNIDALAKEMKEYDLIQSIPGIGHKIAATILSEIGEVDRFDHPKKLVAFAGIDPSVFASGKFTATRNRITKRGSRQLRYALVMAVQCGLIRSRNTRIKDFYDRKRAEGKPHKVALVACANKLVHWLYAILKSKKSFRLT

SEQ ID NO: 11712 - protein, 424 aa, unidentified
  source 1..424: note = protein_7719b77
  REGION 4..157: note = RuvC_domain
  SITE 7: note = RuvC_P1
  SITE 59: note = RuvC_P2
  SITE 94: note = RuvC_P3
  SITE 96: note = RuvC_P4
  SITE 99: note = RuvC_P5
  REGION 285..371: note = Tnp_domain
  SITE 292: note = Tnp_P1
  SITE 323: note = Tnp_P2
  SITE 331: note = Tnp_P3
  SITE 332: note = Tnp_P4
  SITE 344: note = Tnp_P5
MLGVGIDWAESFHDVALGRPGEGVIEQFRIDHTAAGVGRLVARCLELEPDPADVRIVLETRHGLLVETLADAGFTILPVNPDLVARRRGPAKKKDDADDARICCLLALDQFLELRKLIPHGELAGELRTIARDDERAARDERRLLNRLRADLLATFPAALGIAGDDLGSPVVLRLLTRWPAHDQLAAVDPADLVAFARAGKHGWPDRFAARVADALATDRLPVKDYLVRAKTGTISLTATQLPAIRDQRRTWERRMAELLLGSPRYGRAKQPKEPDPGKAIPGGDIYLSFPGLGDRLAARIAGEIEDDITQFDTPNGLQCYGGTAPVTRRSGRSEFIVARRLAHNHYLGTAVHQRAFCSLSRSVWAREFYDGKIAAGKSHHSALRALANRWLEIFWHCLVKDIRYDETVHVRNRQRALQPPSAA

SEQ ID NO: 11713 - protein, 309 aa, unidentified
  source 1..309: note = protein_d675079
  REGION 7..148: note = RuvC_domain
  SITE 10: note = RuvC_P1
  SITE 53: note = RuvC_P2
  SITE 93: note = RuvC_P3
  SITE 95: note = RuvC_P4
  SITE 98: note = RuvC_P5
  REGION 188..272: note = Tnp_domain
  SITE 196: note = Tnp_P1
  SITE 225: note = Tnp_P2
  SITE 233: note = Tnp_P3
  SITE 234: note = Tnp_P4
  SITE 245: note = Tnp_P5
MIHPVFIGCDVAKAHLDLFDGRTSRHIRIDNTAAAIHAWLQSLEGQEATVILEATGRYDRQLRAALDRQQRPYCRVNPARARDFARATGRLAKTDAIDARLLARMGETLGPATSTPPDPARQALASFHTRRDQLVAMRQQERLRLSSAEPMEHDSLERHLIWLDGEIEAIEKACHAHVRENAELNEQSTRLRSIPGVGPVTAFTLMAHMPELGGSSSKAMAALAGLAPFNADSGIKRGQRHIRGGRKRVRDALYMAALVAYRLKTAFARTAQTMQTKGKPFKVMIIAIARKILVAANAILRDKTVFAKT

SEQ ID NO: 11714 - protein, 319 aa, unidentified
  source 1..319: note = protein_0437385
  REGION 11..152: note = RuvC_domain
  SITE 14: note = RuvC_P1
  SITE 58: note = RuvC_P2
  SITE 98: note = RuvC_P3
  SITE 100: note = RuvC_P4
  SITE 103: note = RuvC_P5
  REGION 193..278: note = Tnp_domain
  SITE 201: note = Tnp_P1
  SITE 230: note = Tnp_P2
  SITE 238: note = Tnp_P3
  SITE 239: note = Tnp_P4
  SITE 250: note = Tnp_P5
MKMTEISTTTAGIDTSKLKLDIAVHGGTERWQVANASPGWRTLAANLAKACVTRVGIEATGGYERGVVEHLRAVGFIVLVLQPIQVKAYARMHLRRAKNDALDAVLIAACAAAIEQPRIAPDPRLMELAGYLTFLEQIEEDIARFKTRLEHIDAPRLRRLVTNDIARLKVRRTAQMLLIERQLRAHHDLARRLDLVLSIPGLAERTVLAIVIRMPELGQVSREEVAALAGLAPFDDDSGRHKGQRHIAGGRGRLRRSLYAAALPAAFRWNKALIALYARLTANGKAHNVALIACARKLIIYANTVVQRGTPWTERSVAT

SEQ ID NO: 11715 - protein, 342 aa, unidentified
  source 1..342: note = protein_73205a0
  REGION 7..148: note = RuvC_domain
  SITE 10: note = RuvC_P1
  SITE 53: note = RuvC_P2
  SITE 88: note = RuvC_P3
  SITE 90: note = RuvC_P4
  SITE 93: note = RuvC_P5
  REGION 211..297: note = Tnp_domain
  SITE 219: note = Tnp_P1
  SITE 249: note = Tnp_P2
  SITE 257: note = Tnp_P3
  SITE 258: note = Tnp_P4
  SITE 270: note = Tnp_P5
MSEIITVGLDLAKNVFQVHGADSGGRAVLRKKLRRAQVLEFFGQLPACVVAMEACGGAHFWGREIGKLGHEVRLIPPAYVKPFVKRQKNDAADAEAICEAALRPTMRFVPVKSEETQGAAMVFRMRELLIRQRTQAINALRGHLSEFGRIVPQGAANAARLIAIVDDPDSGLPADAIPTLNVLVAALAHLETEIAKLDAEITRRAKENELARRLMTVPGIGPLIATAIATLAPPAENFHKARDFAAWLGLTARQHSTGGKQRLGATTKMGERSLRRLLIIGANSVIIKRHTHAAARPGTWLGGMLSRKPPMLVRVALANKMARIVWALMARGGVYQSPAAAA

SEQ ID NO: 11716 - protein, 461 aa, unidentified
  source 1..461: note = protein_402fdec
  REGION 24..170: note = RuvC_domain
  SITE 27: note = RuvC_P1
  SITE 74: note = RuvC_P2
  SITE 109: note = RuvC_P3
  SITE 111: note = RuvC_P4
  SITE 114: note = RuvC_P5
  REGION 303..388: note = Tnp_domain
  SITE 309: note = Tnp_P1
  SITE 341: note = Tnp_P2
  SITE 349: note = Tnp_P3
  SITE 350: note = Tnp_P4
  SITE 361: note = Tnp_P5
MAKKAKKVKTAKGAELRIVNPDAAGIDIADGIMQVCVPADRSKDNNRAFGAYTSDLHAISAWLRECGIKTVAMESTGVYWIPLFCRLQEDGLDVVLTNARDVKNITERKTDESDAEWLMLLHQYGLLKASFQPHNDAKRMRTLTRHRDTLSREASSIVLRMQKAMQQMNIKLTLVLSDITGKSGIRIIEAILAGERDPKRLADLADIQCKTPKEEIAKALEGNWEEDLMFVLRQNYDTFKHYCTQLGECDAELEKLMENYRAEVAKVEDTSYSPAKKRRDYKKTRHTVGFDVERKAYEMWGVNVFEIPGISHLTALELMSELGHDFTRKFPSSKQFCCWCNISPNTKISGGKRISSHVPHRRNNVGLIFRSIASSLANAKNQLGNFYRRIRSRAGGKAAVIATAHKVAEIFFAMVANQTTYNPERVGIDEKVLLEKRITRYKHELERITGTHIEIGNACVP

SEQ ID NO: 11717 - protein, 413 aa, unidentified
  source 1..413: note = protein_e411f56
  REGION 14..166: note = RuvC_domain
  SITE 17: note = RuvC_P1
  SITE 65: note = RuvC_P2
  SITE 103: note = RuvC_P3
  SITE 105: note = RuvC_P4
  SITE 108: note = RuvC_P5
  REGION 273..359: note = Tnp_domain
  SITE 281: note = Tnp_P1
  SITE 312: note = Tnp_P2
  SITE 320: note = Tnp_P3
  SITE 321: note = Tnp_P4
  SITE 332: note = Tnp_P5
MSVTPIHPPMRVCGGIDWAKDDHAVCIVDTDGEAIDRFTITHTAAGLRRMVARLLKAGVEEVGIERGDGPVVDALLAAGFTVLVIAPAQVKNLRSRYGSTGNKDDRFDAYVLADVVRTDRRRLTPLTRSSPATQALRSSVRARRDLVEHRVAAANQLRAHLQIVFPGVVDLFAALDSAISLSFLERFPTQTKADWLTVERLGAWLKKVAYSGRTDPAVLHARLLAAPRGTTGPEADHHATTTLAFVAVLRSLNAQIAVLADSIAEQLDVHPDAHIVKSLPRAGTVRAARLLAEIGDARGRFPTADSLACLAGVAPSTRQSGKVKAVTFRWGADRELRDALCDFAADSRHDNPWAAQLYNRARARNHDHPHAVRILARAWVDIIWRCWQDGLAYDPDQHRALQRVLNEQALAAA

SEQ ID NO: 11718 - protein, 260 aa, unidentified
  source 1..260: note = protein_6dfb807
  REGION 6..148: note = RuvC_domain
  SITE 9: note = RuvC_P1
  SITE 52: note = RuvC_P2
  SITE 87: note = RuvC_P3
  SITE 89: note = RuvC_P4
  SITE 92: note = RuvC_P5
  REGION 211..260: note = Tnp_domain
  SITE 219: note = Tnp_P1
  SITE 249: note = Tnp_P2
  SITE 257: note = Tnp_P3
  SITE 258: note = Tnp_P4
MKITTFGIDLAKNVFQVHGVNEQGKALVRKALRRDQVLEFFIKLGPCLIGMEACASAYYWARKLQAQGHTVKLMAPQYVKPYVKTNKNDAADAEAICEAVGRPNMRFVPIKNVEQQSVLSLHRARQGFVKSRTAQANQIRGLLSEYGIVIQQGICNVTKRLPHILEEYANELPGAFCQLIQRLGDHLKELDRQVGELEVQIKIWHKQNEASKKLEEIPGVGPITATAIVASIGDAKCFKDGRQLAAWLGLVPRQHSSGGK

SEQ ID NO: 11719 - protein, 402 aa, unidentified
  source 1..402: note = protein_e65bc3c
  REGION 5..160: note = RuvC_domain
  SITE 8: note = RuvC_P1
  SITE 57: note = RuvC_P2
  SITE 97: note = RuvC_P3
  SITE 99: note = RuvC_P4
  SITE 102: note = RuvC_P5
  REGION 268..353: note = Tnp_domain
  SITE 276: note = Tnp_P1
  SITE 307: note = Tnp_P2
  SITE 315: note = Tnp_P3
  SITE 316: note = Tnp_P4
  SITE 327: note = Tnp_P5
MTFFVGLDWASPEHAVCVIDDTGRVDWQGSAEHSAAGLAELLRRLARFGPPASLPVAIERPSGLVVDTLMEAGHPVVPIHPNALKASRPRYSAAGSKSDPGDAFILGDLLRTDGHRFRPLQPLSDATRALRALVRGRDDLVAQRVALTNQLRALLDRFWPGAAAIFADVDSPIALAFLSRYPTPHSAERLGEKRLARFLTQHAYCGRRPVPNLLARLRTAPLSQTGDLEAEASGEVVRALVAVLLPLMAQIQQLSAAIAAALPQHPDGPLLQSLPRSGRVNAAQILAELGDDRSRFATDEHLAAEGGVAPVTRESGKHRGVAFRWACNKRLRQALTTFADNSRHGSPWAAAIDVAARRRGCRHPHAIRILARAWIRALWRCWQDRRPYDVTLHRGAQRLVAA

SEQ ID NO: 11720 - protein, 346 aa, unidentified
  source 1..346: note = protein_55ce4b8
  REGION 5..152: note = RuvC_domain
  SITE 8: note = RuvC_P1
  SITE 55: note = RuvC_P2
  SITE 92: note = RuvC_P3
  SITE 94: note = RuvC_P4
  SITE 97: note = RuvC_P5
  REGION 212..300: note = Tnp_domain
  SITE 220: note = Tnp_P1
  SITE 250: note = Tnp_P2
  SITE 258: note = Tnp_P3
  SITE 259: note = Tnp_P4
  SITE 271: note = Tnp_P5
MKHYAGLDVSVKETAICIVDETGKICREMKVPSHPEDLVRVLSDPAWTFERIGLEAGPLSQWLFSGLAEAGLPVICIETRHTKAFLEAQPNKSDPIDARGIAQMMRVNLFRPVHVKTLTSQKRRALLTARKLLQDKAIAIQNDIRGLLRNFGLKVGMVGAVKFEHRIRELTEGMPDLAEIVEPLLEARSKLRENFAALHRKLLAIVRDNEVCRRLTTIPGVGPVVALAYTATIDIPARFRNSKAVGPILGLTPVLHESGESRRIGRISCCGDRMMRTLLYEAAQTLLTRVTKWSWLRAWAMNVARRRGRQKAIVALARRLAVIMQRMWRDGTEFRWTRQDIMPKAA

SEQ ID NO: 11721 - protein, 418 aa, unidentified
  source 1..418: note = protein_4d78b3c
  REGION 5..171: note = RuvC_domain
  SITE 8: note = RuvC_P1
  SITE 68: note = RuvC_P2
  SITE 108: note = RuvC_P3
  SITE 110: note = RuvC_P4
  SITE 113: note = RuvC_P5
  REGION 279..365: note = Tnp_domain
  SITE 287: note = Tnp_P1
  SITE 318: note = Tnp_P2
  SITE 326: note = Tnp_P3
  SITE 327: note = Tnp_P4
MRLFVGDDWAEEHHDVELMDTDGRRLAKARLPEGVAGVRRLHAMVGEQLGVLGERLGQDGEGVEVLVGIETDRGPWVQALVAAGYTVFAVNPLSVDGYRRRHGVSGAKSDAGDAHMLADMVRTDSHQLRPVAGDSPEVEAIKVVARAHKTLIWERTRHTQRLRHALRDYFPAALEAFTDLDAGDTLELLGQAPDPHAAAQLSRSKIRAALKRARRRDIDTKAAAIQAVLRGEHLDRPPVIAAAYAATTRSAVAVLTTLHEQIAALESEVGAYFGRHPDAEIILSQPGLGMITGARVLAEFGDDTDRYDNAKCRKNYAATSPITRASGKKKTVHTRYIHNDRLIDALMSQAFSALRASPGARAYYDQLRARGAGHNPALRQLANRLVGILHGCLKTRTLYNETTAWSHHTNKINNTAAA

SEQ ID NO: 11722 - protein, 413 aa, unidentified
  source 1..413: note = protein_707fc7e
  REGION 4..163: note = RuvC_domain
  SITE 7: note = RuvC_P1
  SITE 60: note = RuvC_P2
  SITE 100: note = RuvC_P3
  SITE 102: note = RuvC_P4
  SITE 105: note = RuvC_P5
  REGION 271..357: note = Tnp_domain
  SITE 279: note = Tnp_P1
  SITE 310: note = Tnp_P2
  SITE 318: note = Tnp_P3
  SITE 319: note = Tnp_P4
MLFVGDDWAEEHHDVELQDETGRRLGKARLEEGVAGIAKLHELIGRHLTEGIEADQVVIGIETDRGPWVQALIAAGYQVYAVNPLSVARYRERHSVSGAKSDAADARTLADMVRTDRHQHRVIAGDTPQGEAIKVVARAHKTLVWERTRHVQRLRHALREYFPAALAAFDDLTRADTLDLLAMAPDPASAAKLTLEQISAVLRRARRRNVADKASAIQVALRAHHLGQPEVVSAAYAASVRAQAAILTTLNEQIKVMEGQVEAHFGRHPDAEIYLSQPGLAHILGARVLGEFGDDPNRYDNAKSRRNYAGTSPITRASGRKKVVLARFVHNDRLIDALGAQAFAALSASPGARAYYDELRAREVAHHAALHQLANRLVGILHGCLKTRTKYDEATAWAHRAGGESKKTSEIAA

SEQ ID NO: 11723 - protein, 343 aa, unidentified
  source 1..343: note = protein_1fda3ef
  REGION 6..147: note = RuvC_domain
  SITE 9: note = RuvC_P1
  SITE 52: note = RuvC_P2
  SITE 87: note = RuvC_P3
  SITE 89: note = RuvC_P4
  SITE 92: note = RuvC_P5
  REGION 211..296: note = Tnp_domain
  SITE 219: note = Tnp_P1
  SITE 249: note = Tnp_P2
  SITE 257: note = Tnp_P3
  SITE 258: note = Tnp_P4
  SITE 270: note = Tnp_P5
MQIHSVGIDLGKTNFHLVALGEAGKVLVRKKFSQRQLLTYTANLQTCLIGLEACSGAHFLGRALRRQGHEVRLIAAQFVKPFVKSNKNDFVDAEAIAEAVERKNMRFVPIKTDDQLDLQAIHRVRDRLICRRTAVINQLRAFLLERGMTFAKTPAKLRSAMPDILENAEADLTPLMRNLIDMLWREWKTVEQQIEELSDELERISAADAGCTRIRQIPGIGPIVATAIVAAIGNGAAFRKGRDFAAWLGVVPRQYSTGGKAKLLGISKRGNVYLRKILIHGARAAVLRIKRDRAPIGAWLDGLDARAPKNVVVVAMANKLARIAWAVLSSGQDYRPSLNVIAA

SEQ ID NO: 11724 - protein, 315 aa, unidentified
  source 1..315: note = protein_da0ae40
  REGION 12..162: note = RuvC_domain
  SITE 15: note = RuvC_P1
  SITE 57: note = RuvC_P2
  SITE 97: note = RuvC_P3
  SITE 99: note = RuvC_P4
  SITE 102: note = RuvC_P5
  REGION 193..276: note = Tnp_domain
  SITE 200: note = Tnp_P1
  SITE 229: note = Tnp_P2
  SITE 237: note = Tnp_P3
  SITE 238: note = Tnp_P4
  SITE 250: note = Tnp_P5
MAMPVSVVKPIVGVDVAKNELVIYQAELDLLETISNDKTAIKKWLKALPAPVDLAIESTNIYHLAFADLAHEAGCTIYMVDGYALSHYRIGVKVRAKTDALDAKLLARYLKNEYEELHPWIPPSPLYRRLLSLFRRRAALVQARVGLVQSWANEPLLKSAFAEQVASMQRLETLVEKMINDQLKEAGLLADLKRCTKVEGIGFLTGARLIATFQRGDFKNADAFIAFLGMDLRVSQSGQKDGRRSLTKRGDPEARRLLHNAAMSASRTPAWKSFYEEQRNRGFSTTQALVILARKLARVVFALLKGQSEYQPKGG

SEQ ID NO: 11725 - protein, 421 aa, unidentified
  source 1..421: note = protein_92c539c
  REGION 14..171: note = RuvC_domain
  SITE 17: note = RuvC_P1
  SITE 67: note = RuvC_P2
  SITE 108: note = RuvC_P3
  SITE 110: note = RuvC_P4
  SITE 113: note = RuvC_P5
  REGION 285..372: note = Tnp_domain
  SITE 293: note = Tnp_P1
  SITE 323: note = Tnp_P2
  SITE 331: note = Tnp_P3
  SITE 332: note = Tnp_P4
  SITE 345: note = Tnp_P5
MNFINQEVFQMNAVGIDVSKGKSTVAILRPMGKVVQTPVDVPHDTVSLERLAYQILSLGENTRVVMEATGRYHEPVAMELHDRGIFVSVVNPLAIHGYCSGGTVRKVKNDQKDSLKIAKFALDHWVDLREYTPMDAVRQQLKIFSRQYNLYMKSRVALQSNLISLTDKVFPGVNEIFTSPERSDGHLKWVDFVTTFWHCECISLVSENAFTERYKKWCKRMGYKFSAAKVSDIYIDSLGHIVTLPKNNNTKLLIQTAAKELTAMNELLAVVKAEMIRLAKELPEYETVHAMFGVGELLAAQLMAEIGDIRNYPRRSSLVGFAGVDPEVNQSGKMNSESNPSTKRGSPHLRKTLFQLMTVYLRLSPADEAVYQFLDKKRSEGKPYYVYMTAGANKFLRIYYARVKECMAKLETPAEIAEENG

SEQ ID NO: 11726 - protein, 327 aa, unidentified
  source 1..327: note = protein_054f327
  REGION 4..158: note = RuvC_domain
  SITE 7: note = RuvC_P1
  SITE 61: note = RuvC_P2
  SITE 101: note = RuvC_P3
  SITE 103: note = RuvC_P4
  SITE 106: note = RuvC_P5
  REGION 203..287: note = Tnp_domain
  SITE 211: note = Tnp_P1
  SITE 240: note = Tnp_P2
  SITE 248: note = Tnp_P3
  SITE 249: note = Tnp_P4
  SITE 261: note = Tnp_P5
MIFAGFDISKEKVDLCCLLDSSNTKVKTKVFRNNLQSFQDIANWLLKTTQSVPANITITMEPTGVYHEPLIHFLYKQGFTILLVNPGKAKKFAESMNLVHKTDKSDAIMLARYGESKHANSMYWQPVNAQVRELQALIRRLDALESNRQREVNRLEASEFSEGSEYVTQSIKNTIHFFDDQIKATKSFIDALIAQYPELKRNQALLESIPGIGPVLSRELTSLFAAKQFKTAKQVAAYCGLIPKLKESGAMKGRTTLSKLGPSRIRCKLYMAAIVAGQHNALIKKQKGNLKKNGKTSMQIIGANMRKLIQICFGVVKNQTEFKHQES

SEQ ID NO: 11727 - protein, 348 aa, unidentified
  source 1..348: note = protein_c0b377f
  REGION 9..151: note = RuvC_domain
  SITE 12: note = RuvC_P1
  SITE 55: note = RuvC_P2
  SITE 90: note = RuvC_P3
  SITE 92: note = RuvC_P4
  SITE 95: note = RuvC_P5
  REGION 214..303: note = Tnp_domain
  SITE 222: note = Tnp_P1
  SITE 252: note = Tnp_P2
  SITE 260: note = Tnp_P3
  SITE 261: note = Tnp_P4
  SITE 273: note = Tnp_P5
MNATPKSVVGVDTAKNVFQVYTVDKETGEVINQQLKRAQFLQWFVNRTSCLVGMEACGGSQHWARELQKLGHEVKLMSGKMVKAFVCGNKNDAADARAIYMAAQQPEVKAVAIKSEAQQAVLAMHRIRQQLVKMRTAQINALRGLLAEYGEVFGQGRKAFDVGIKAALERLGERLPGPLIDALRGQWNELGRLDERIAYIEKSLLAWLRQDRAAKTISAIPGVGLLTATAAVATMGQAKAFRSGREFAAWVGLVPGQTGSGGKVRLLGMSKRGDTYLRTLLIHGARAVLCHTKTPSPWLQQISQRRPPNVVIVALANKIARAIWAVLAHEREYDKDHVSLRPLAAAST

SEQ ID NO: 11728 - protein, 402 aa, unidentified
  source 1..402: note = protein_4a93ef9
  REGION 10..163: note = RuvC_domain
  SITE 13: note = RuvC_P1
  SITE 61: note = RuvC_P2
  SITE 102: note = RuvC_P3
  SITE 104: note = RuvC_P4
  SITE 107: note = RuvC_P5
  REGION 225..310: note = Tnp_domain
  SITE 233: note = Tnp_P1
  SITE 263: note = Tnp_P2
  SITE 271: note = Tnp_P3
  SITE 272: note = Tnp_P4
  SITE 283: note = Tnp_P5
MVQRAEQVIIGVDPHKLSATIEVVDQHEQMLGSGRFTTDRAGYTAMRSYAKTWPDRVWAVEGANGAGRPLAQRLLEDGESVVDVPAKLSARVRLFDTGHNRKTDAHDAHAVAAVAVRTKNLRVLQLDGELEALRMLTDRREALTRRRVQTVDRLQALLAELLPGQAKRDLTTGQAKTMLASVRPRDVAGKTRRRIAAEELAELIAVEAKIKTSTAELKAIVLARGSRLMDLHGVGPVVAARTLADVGDVTRFADRNRFASWTGTAPLDASSGEQNRHRLSRAGNRRMNHMIHIAAMSQIRLDTDGRVYYRRKRAEGKKSLEAIRCLKRRISDAIYRQLVEDAQRAVEDVGTGPGGHCGATLQSSAVDLHPHIDTSDQPLPGPANQTLRPTPPTRKRSLETTG

SEQ ID NO: 11729 - protein, 339 aa, unidentified
  source 1..339: note = protein_40b8565
  REGION 6..147: note = RuvC_domain
  SITE 9: note = RuvC_P1
  SITE 52: note = RuvC_P2
  SITE 87: note = RuvC_P3
  SITE 89: note = RuvC_P4
  SITE 92: note = RuvC_P5
  REGION 211..296: note = Tnp_domain
  SITE 219: note = Tnp_P1
  SITE 249: note = Tnp_P2
  SITE 257: note = Tnp_P3
  SITE 258: note = Tnp_P4
  SITE 270: note = Tnp_P5
MNVTTIGIDLAKNSFSLHGVDARGKTVFRKTVGRAKLLPFLAQQPSSLVGMEACSGAHHWGRHLSALGHRVGIMAPRFVAPYRKGGKNDGNDAEAICEAVARPGMRFVPIKSAEQQAVLCLHRIRQGLIKERTATINQLRGLLSEFGLVMPQGRYPAQHHIPGILEDAENGLPMLARRLLHDVYLRLQAMNEQLLAYDRELEHLAKASAVAQRLIAVPGIGAITATALIASVGDPHQFRNGRQFAAWLGLTPRQYTTGGKIRLGRITKKGDVYLRTLLIHGTRAVLANLKDKSDRISLWLHALIERRGYKRATVALAAKNARILWALMVRGESYQLKAV

SEQ ID NO: 11730 - protein, 331 aa, unidentified
  source 1..331: note = protein_57917dd
  REGION 2..141: note = RuvC_domain
  SITE 43: note = RuvC_P2
  SITE 81: note = RuvC_P3
  SITE 83: note = RuvC_P4
  SITE 86: note = RuvC_P5
  REGION 201..287: note = Tnp_domain
  SITE 209: note = Tnp_P1
  SITE 239: note = Tnp_P2
  SITE 247: note = Tnp_P3
  SITE 248: note = Tnp_P4
  SITE 260: note = Tnp_P5
MKETAVSIRRSGKRIWRGKCASDPKLIASLIQKRAPSVKRVVFETGPLSVWFYHALHAEGLPAICIDARHAKAALDMAANKTDANDADGLAHLAEVGFFREVRVKGFDSMLTRTLVAARTRLVRITTELSNQIRGVMKTFGLLVPAGKGSTFEKNVRNLLVAQNGLSPIVLPMLEAWRSMRVRAAELGRQLVAGARQSRACQILMSIPGVGAITATSFVTAIEEPDNFKKSRSVGAWLGLTTQRYQSGKVDYDGHISRRGDRHLRGLLYEAATVILTRSSADSGLRTWGLKLRERVGFKRAAVAVARKLAATMHAMLKAGEFFDRNAGATA

SEQ ID NO: 11731 - protein, 276 aa, unidentified
  source 1..276: note = protein_718ccbe
  REGION 1..103: note = RuvC_domain
  SITE 2: note = RuvC_P2
  SITE 40: note = RuvC_P3
  SITE 42: note = RuvC_P4
  SITE 45: note = RuvC_P5
  REGION 144..231: note = Tnp_domain
  SITE 152: note = Tnp_P1
  SITE 182: note = Tnp_P2
  SITE 190: note = Tnp_P3
  SITE 191: note = Tnp_P4
  SITE 204: note = Tnp_P5
MENTGRYNWYIYEALKDFSYTVFVINPLHLKRSQGLVRGKNDKIDSERIADFASKNQESLKSWKPDSESIEKVRFLFSERNSKVKLRASLLKQQSNYKLMQSKLAEELLKMNKEEISLLEKHIAILEKDIENVIASHQDLKKKSELLKSVPGIGKVLCWMMLIKTGNFEEITEPRKLACYSGVVPFDHQSGTSIRYKPKLSFYADKSLKSILHMAAMSAIRLENDLREYYLRKVAEGKNKMLVLNNVRNKIIHRAFAVINKQKPYEKNYINNLVTS

SEQ ID NO: 11732 - protein, 282 aa, unidentified
  source 1..282: note = protein_5c05ec7
  REGION 1..48: note = RuvC_domain
  REGION 155..240: note = Tnp_domain
  SITE 163: note = Tnp_P1
  SITE 193: note = Tnp_P2
  SITE 201: note = Tnp_P3
  SITE 202: note = Tnp_P4
  SITE 214: note = Tnp_P5
MPHTLRRVDVGDEALAELGVLVGFDDDLAGEATRISNRIRGLLTGIHPALERVLGPRIAHPAVLEILSKCGGPVGIRKAGKRRLTTLATKHAPRMGSRLAEEILAALDAQTVTVPGSAAAEIVLPKLADSLKEVLQQRKSIAEDVERMLDDHPLSQVLMSMPGIGVRTAARILLEVGDGSAFASAAHLAAYAGIAPVTHRSGSSIRGEHPARSGNRKLKRALFLSAFAALHDPTSRAYYDRKRAEGKKHNAALICLARRRCDVLHAMLKNKTFYRTPAAAAA

SEQ ID NO: 11733 - protein, 402 aa, unidentified
  source 1..402: note = protein_4dde628
  REGION 11..166: note = RuvC_domain
  SITE 14: note = RuvC_P1
  SITE 63: note = RuvC_P2
  SITE 103: note = RuvC_P3
  SITE 105: note = RuvC_P4
  SITE 108: note = RuvC_P5
  REGION 273..358: note = Tnp_domain
  SITE 281: note = Tnp_P1
  SITE 311: note = Tnp_P2
  SITE 319: note = Tnp_P3
  SITE 320: note = Tnp_P4
  SITE 332: note = Tnp_P5
MIDTSGVGVFLGLDVGKSTHHGHGLTPTGKTVFDKQLPNSEPKLRAVFGKLAAKFGTVLVVVDQPASIGALPLAVARDAGCRVAYLPGLAMRRIADLYPGEAKTDAKDAAVIADAARTMPHTLRSLELTDEITAELTVLIGFDQDLAAEATRTSNRIRGLLTQFHPSLERVLGPRLDHQAVTWLLERHGSPTALRTAGRRKLVELIRPKAPRMATRLIDDIFDALDEQTVTVPGTGTLDIVVPSLARSLAAVHEQRRALEAQISELLEAHPLSQVLTSLPGVGVRTAAVLLVTVGDGRSFPSAAHLASYAGLAPATRSSGTSIHGEHAPRSGNRQLKRAMFLSAFAALHDPASRTYYDKCRTRGKTHTQALLRLARHRISVLFAMLRDGTFYDPPQSDAATA

SEQ ID NO: 11734 - protein, 310 aa, unidentified
  source 1..310: note = protein_1eb1ba9
  REGION 5..146: note = RuvC_domain
  SITE 8: note = RuvC_P1
  SITE 51: note = RuvC_P2
  SITE 91: note = RuvC_P3
  SITE 93: note = RuvC_P4
  SITE 96: note = RuvC_P5
  REGION 187..271: note = Tnp_domain
  SITE 195: note = Tnp_P1
  SITE 224: note = Tnp_P2
  SITE 232: note = Tnp_P3
  SITE 233: note = Tnp_P4
  SITE 244: note = Tnp_P5
MTDTIGIDISKTTLDIYRISDGKRARFGNDASGLKAMRKWLGAAPLRVVYEATGRYHRDLEAALAAFGHHNVKVNPARARRFAQATGQGAKTDRVDAEMLARMGTVLGLEATPVKTDELHEIKELHVARVALIKDRTACRNRIGMARNKIVLAQLRARLRQIDTQIAQIDRELRSRIKADPGLARRYEILTSIPGVGPVAAIALIIEMPELGAMSSKEAASLAGLAPITRQSGTWKGKARIGGGRTALRCMLFMPAVIATRFNAPLQQVHRTLIAAGKPWKVAITAVMRKLIVLANALIRDDRKWAEINP

SEQ ID NO: 11735 - protein, 320 aa, unidentified
  source 1..320: note = protein_889db2e
  REGION 5..155: note = RuvC_domain
  SITE 8: note = RuvC_P1
  SITE 57: note = RuvC_P2
  SITE 97: note = RuvC_P3
  SITE 99: note = RuvC_P4
  SITE 102: note = RuvC_P5
  REGION 194..279: note = Tnp_domain
  SITE 202: note = Tnp_P1
  SITE 231: note = Tnp_P2
  SITE 239: note = Tnp_P3
  SITE 240: note = Tnp_P4
  SITE 252: note = Tnp_P5
MDAVLGIDIGKAKFHVTLLLADGTRRRKACGNSPTGCAELLAWMTRHGATHVHAGLEATGTYGELVATTLVDAGHQVSLLNPAIIHHYAKSRLSRAKTDPVDADVIADYTAKEHPPAWTPLPREVRDLQALVRRLDALLGMHTEERNRAQAGALTPAVQQSIDEVLDHLATQIETVRQQIRDHIDQHPSLRASRDLLTTIPGIGQATAALLVAELFHKPFTSARQAAAFAGVVPRPNQSGQHTGRRVMCKLGPGRLRKALYFPAIAAIRFNPSLQPLARRLRAAGKPPMLIIGAAMRKLIHLAFGVLKSGRAYDASLAKA

SEQ ID NO: 11736 - protein, 343 aa, unidentified
  source 1..343: note = protein_d7c5001
  REGION 7..149: note = RuvC_domain
  SITE 10: note = RuvC_P1
  SITE 53: note = RuvC_P2
  SITE 88: note = RuvC_P3
  SITE 90: note = RuvC_P4
  SITE 93: note = RuvC_P5
  REGION 212..303: note = Tnp_domain
  SITE 220: note = Tnp_P1
  SITE 250: note = Tnp_P2
  SITE 258: note = Tnp_P3
  SITE 259: note = Tnp_P4
  SITE 271: note = Tnp_P5
MHTVTTIGLDIAKSVFQVHCVDVTGHVVIRRQLKRRYVLAFFEKLPPCLVGIEACASSHHWSRELQALGHHVRLMPPAYVKPYVKRQKNDMADAEAICEAVTRANMRFVPTKTPEQQSGLVLHRTRHLFIRQQTSVINAIRAHLAEFGVTAPVGRKGIEELLRVIADPNDKRVPDIVRACLAALGSQLLSLKKQILDFDRMILAWHRSDQTSKRLNCIPGVGPLLATALVASVADPKAFRSGRNFSAWIGLVPKQHSSGGRNRLGSISKQGDRYLRSLFVAGAFAVIRYAKLHGTKYRPWLAALLARRPTKVAAIALANKLARMAWAMMARGERYNYPAALRV

SEQ ID NO: 11737 - protein, 341 aa, unidentified
  source 1..341: note = protein_87f48ab
  REGION 5..149: note = RuvC_domain
  SITE 8: note = RuvC_P1
  SITE 55: note = RuvC_P2
  SITE 92: note = RuvC_P3
  SITE 94: note = RuvC_P4
  REGION 209..295: note = Tnp_domain
  SITE 217: note = Tnp_P1
  SITE 247: note = Tnp_P2
  SITE 255: note = Tnp_P3
  SITE 256: note = Tnp_P4
  SITE 268: note = Tnp_P5
MENYAGIDVSLELSSVCVVDAQGKILKEAKVASEPDALVEFFETLGFAVKRIGLEAGPLSQWLHAGLKSAGFETVLLETRHVKAALSAMTVKTDPRGIAQLIRMGWFRPVHAKSVDAQEIRALLIARKQLLGRLIDIELSIRGILRGFGLKVGPLTRRNFEARIRELVAGQSTLERIASAMLSARSALTAEYGRLHRAVLAIVRDDAVCRRLMTVPGVGPLVAATYKSAIDDPRRIVKSKAAGALFGLTPKKYQSGEKDVTGGITLAGDKTVRAVLYEAANVLLSRITRFSKLKRWGMDIAKRRGSKRAKVALARKLAVILHRIWVDGTTYRWTDVGSIAA

SEQ ID NO: 11738 - protein, 392 aa, unidentified
  source 1..392: note = protein_60e239d
  REGION 4..163: note = RuvC_domain
  SITE 7: note = RuvC_P1
  SITE 60: note = RuvC_P2
  SITE 101: note = RuvC_P3
  SITE 103: note = RuvC_P4
  SITE 106: note = RuvC_P5
  REGION 266..355: note = Tnp_domain
  SITE 274: note = Tnp_P1
  SITE 304: note = Tnp_P2
  SITE 312: note = Tnp_P3
  SITE 313: note = Tnp_P4
  SITE 328: note = Tnp_P5
MVFVGIDVAKDKHDCFILNSEGEVLTDVFTVANSREGFELLLKRIRSCTRPADRIKVGLEATGHYSNNIVRFLLDNGLAPVVINPLHTNLYRKSLSLRQTKTDRIDARTIAMMLMSDVDLKSYTDILYHNEELKSLTRYRFDKVHEMSKLKQSVSRLVNILFPELESLVSSLHLTSIYAILSEFPGAKQIADSHLTHFRAVLKNASKGRYGREKADEIHAAAAKSIGSVSQAKSLELKHTIQQIRLLDKEIAETEASIREIMDGMASPILSIPGIGYRMGAMILAEIGDFSKFESADKILAYAGLSPSIYQSGKFNATGAYAHMEKRGSRYLRYALINAAKYVCHWDPVFAAYLEKKRGEGKHYTVAISHATKKLVRVIFALQTTGSSYKAA

SEQ ID NO: 11739 - protein, 341 aa, unidentified
  source 1..341: note = protein_6d95eb6
  REGION 5..151: note = RuvC_domain
  SITE 8: note = RuvC_P1
  SITE 53: note = RuvC_P2
  SITE 91: note = RuvC_P3
  SITE 93: note = RuvC_P4
  SITE 96: note = RuvC_P5
  REGION 211..295: note = Tnp_domain
  SITE 219: note = Tnp_P1
  SITE 249: note = Tnp_P2
  SITE 257: note = Tnp_P3
  SITE 258: note = Tnp_P4
  SITE 270: note = Tnp_P5
MTEYIGLDVSLKETAVSIRRDGKRVWRGKCASDPKTIVDLIRKRAPAAERVVFETGPLSVWFFHALTTMGLPAVCIDARHAKAALDMAANKTDANDADGLAHLAEVGFFREVRVKGFDSMLTRTLVAVRTRLVRISVELSNQIRGIMKTFGLIVRAGKGSRFENSVRELLSDQDELAAVVIPMLQTWSSVRIRAAELTRRLAAMARRSQACRILMSIPGVGTITATSFVTAIEEPSNFRKSRSDGAWLGLTPRRYQSGEVDYEGHISRRGDRHLRGLLYEAATVILTRSSADCDLRVWGLKLREKIGFKRAAVAVARKLAVIMHAMLKTGRPFEQTGQPAA

SEQ ID NO: 11740 - protein, 279 aa, unidentified
  source 1..279: note = protein_d13698d
  REGION 2..77: note = RuvC_domain
  SITE 17: note = RuvC_P3
  SITE 19: note = RuvC_P4
  SITE 22: note = RuvC_P5
  REGION 141..227: note = Tnp_domain
  SITE 149: note = Tnp_P1
  SITE 179: note = Tnp_P2
  SITE 187: note = Tnp_P3
  SITE 188: note = Tnp_P4
  SITE 200: note = Tnp_P5
MRILPAQRVAEHRSGAKNDRNDTHAILRAGRDSSIAAIPIKSTAALAIQALHRVRRGSIKRHTALGNQMRGLLLEHGVSMPQGDAAIIKHVPRCLEDASLPLPDLLRELLDELLADWLSLGERIARLSKRLEATAREDKVAQRLITIRGVGPITATAIVAKQTEPSRFASGRMYSAFFGIVPDQHSSGNKVRLGRMSKRGDGYIRSLMIQGAHAVLSQLKPDSDQPDDRRLLRWLSRLGRKEAAIRLANRNLRIIWALLQSDQVYQRKPNSKPEAAMSL

SEQ ID NO: 11741 - protein, 410 aa, unidentified
  source 1..410: note = protein_30f932d
  REGION 10..164: note = RuvC_domain
  SITE 13: note = RuvC_P1
  SITE 62: note = RuvC_P2
  SITE 102: note = RuvC_P3
  SITE 104: note = RuvC_P4
  SITE 107: note = RuvC_P5
  REGION 270..364: note = Tnp_domain
  SITE 278: note = Tnp_P1
  SITE 316: note = Tnp_P2
  SITE 324: note = Tnp_P3
  SITE 325: note = Tnp_P4
  SITE 337: note = Tnp_P5
MEAARPHVWIGIDVGKTHHWAAAVDANGTQIWSRKITNDEAEILDAIGVGRGLADEVSWAVDISGTSAALLVALLAAHGQQPVYVPGRTVNSMTTGYRGEAKTDARDAFVIAETSRLRRDFAPVQVDTPLVAELALLTAHRTDLVADRIRMINRLRDLLTGTFPALERAFDYAHHKGALVLLTGYQSPDAIRRRGRTRLEAWLRKRGVRGADQVAATALDAAQAQHTTLPGQDVAGAIIADLAAQLLAHDDRLDRLEDQIKTRFADHPQAEVITSVPGIGPILGAEFVVAAGDLGSYAAGDLGSYADAGRLASAAGLVPVPRDSGRRTGNLHRPKRYSRRLRRVFYLSAQTSILGEGPNRDFYLKKRGEGLKHVQALIALARRRVDVLWALLRDNRTWTPSITPGGDTAA

SEQ ID NO: 11742 - protein, 392 aa, unidentified
  source 1..392: note = protein_6d0922a
  REGION 5..164: note = RuvC_domain
  SITE 8: note = RuvC_P1
  SITE 61: note = RuvC_P2
  SITE 102: note = RuvC_P3
  SITE 104: note = RuvC_P4
  SITE 107: note = RuvC_P5
  REGION 267..354: note = Tnp_domain
  SITE 275: note = Tnp_P1
  SITE 305: note = Tnp_P2
  SITE 313: note = Tnp_P3
  SITE 314: note = Tnp_P4
  SITE 327: note = Tnp_P5
MVISVGIDVSKDKHDCFILSSEGETLADGFTIPNTLDGFNFLLRKIQDCTTPQDKIKVGLEATGHYSYNLLGFLLDNGLATYVLNPLRTNLYRKSLSLRKTKTDRVDARTIASMLLSDAGLKPYTSTAYHNEELKSLTRYRFDKVKERAKLKSSISRLVCILFPELEKLVPTLHMVSVYALLEEFPGAKQIAGAHLTRLKALLETASKGRYKRDVALQIREAARNSIGSRMPAKSLELQHTIRLIRELDTEISEIENQIQSIMKELHSPITTIPGVGFRMAAMILAEVGDFTRFASPDKLLAYAGMSPSTYQSGQLKNCYPHMEKRGSRYLRYALYNATKYVCLWDPTFSAYLAKKLTEGKHYNVALSHASKKLVRLIFAMEKSRQPYRVAP

SEQ ID NO: 11743 - protein, 345 aa, unidentified
  source 1..345: note = protein_55ebcbc
  REGION 5..152: note = RuvC_domain
  SITE 8: note = RuvC_P1
  SITE 55: note = RuvC_P2
  SITE 92: note = RuvC_P3
  SITE 94: note = RuvC_P4
  SITE 97: note = RuvC_P5
  REGION 212..300: note = Tnp_domain
  SITE 220: note = Tnp_P1
  SITE 250: note = Tnp_P2
  SITE 258: note = Tnp_P3
  SITE 259: note = Tnp_P4
  SITE 271: note = Tnp_P5
MKYYSGLDVSVKETSVCIIDETGKICREVKVVSHPDDLIAALSHPAWQIERIGLEAGPLSQWLFEGLANAGLPVVCIETRHTKAFLKAQVNKTDRNDARGIAQMMRVNLYRPVHVKTLTSQKRRALLTARKLLQEKAIAIENDIRGLLRNFGLKVGVVGTVGFDDRIRELVDDSPELLEIMEPLLSARQKLHETFMVLHRKLLTIVRDDGACQRLMTIPGVGPVTSLAFISTIDVPARFSKSRAVGPALGLTPVLNQSGESHRVGRVSLCGDGMMRALLYEAAQVMLSRVKKWSWLKAWAMNVAKRRGRQKAIVALARRLAVIMHRMWSDGTEFHWTKESIPAAV

SEQ ID NO: 11744 - protein, 463 aa, unidentified
  source 1..463: note = protein_b2c066c
  REGION 59..214: note = RuvC_domain
  SITE 62: note = RuvC_P1
  SITE 111: note = RuvC_P2
  SITE 151: note = RuvC_P3
  SITE 153: note = RuvC_P4
  SITE 156: note = RuvC_P5
  REGION 322..408: note = Tnp_domain
  SITE 330: note = Tnp_P1
  SITE 361: note = Tnp_P2
  SITE 369: note = Tnp_P3
  SITE 370: note = Tnp_P4
MTLPPPAFAGLQTGNRGTRRRAPVSDRPGASLAAAGPSLPPPLQGVELSLALPEALFFTGIDWAAATHAVCVMDAAGKITAEFTIEHSADGIATLIRRLARYGDPAGMPIGIERPNGQLAGLLLEAGHPMVPVSPNAIKTWREGEVLSGAKSDAGDAAVIAGYLRLRQHRLRVAAPHSDQTKALRTVVHTRDDLVEMRVASINQLSALLEAHWPGAKAIFADVESPVSLAFLTRYPTPDAARHLGEKRIAAFCTAQGYSGKRPAAVLLARLRSAPAGTTGAALTRALRDAVLALVTVLTAQNAAIKSLSRCAAAHLSEHPDGAVFTSLPRSGQINAAQMLAERGDCRQAYDGPDSVAALAGCTPVTKQSGKHRDVHFRWACNKRFRKAMTTFADNSRHASPWAAKIYNDARGNGKDHPHAVRILARAWIRVIWPCWLNTVPYDPARHGAAAALTTQATGQIAA

SEQ ID NO: 11745 - protein, 378 aa, unidentified
  source 1..378: note = protein_5cf9c82
  REGION 9..156: note = RuvC_domain
  SITE 12: note = RuvC_P1
  SITE 62: note = RuvC_P2
  SITE 96: note = RuvC_P3
  SITE 98: note = RuvC_P4
  SITE 101: note = RuvC_P5
  REGION 252..339: note = Tnp_domain
  SITE 260: note = Tnp_P1
  SITE 291: note = Tnp_P2
  SITE 299: note = Tnp_P3
  SITE 300: note = Tnp_P4
  SITE 311: note = Tnp_P5
MDVLYHRCAGLDVHTETIVVCALLGEEDHIQKEIETFPTFTKDLFRLLKWLEDRGITHIAMESTGVYWKPVFNILEDYFDITLANAQRIKNVPGRKTDVSDAEWIAKLLRYGLIEKSFVPPADIRELRDLTRLRKKWIGQLTAEKNRIQKVLECSNIKLSSVISDIFGVSGRKLLERLMKQGYIEEPGIDACIHGRMKGKRQQIQDSLFGTLTEHQLFMIRQSWKHIESLESLLREIEERIDQLLQAYKQEMELLVTIPGVKKETAAVIIAEIGVDIGQFPTSQHLASWAGVAPGNHESAGKRKSTRTTKGNPHIKSALCEAAWALSRCRNQRLAAKYWPLAARRGKKKALVAMAHRMLTIIYCMLSRKEPFREQPTY

SEQ ID NO: 11746 - protein, 330 aa, unidentified
  source 1..330: note = protein_b78b044
  REGION 4..83: note = RuvC_domain
  SITE 22: note = RuvC_P3
  SITE 24: note = RuvC_P4
  SITE 27: note = RuvC_P5
  REGION 145..231: note = Tnp_domain
  SITE 153: note = Tnp_P1
  SITE 183: note = Tnp_P2
  SITE 191: note = Tnp_P3
  SITE 192: note = Tnp_P4
  SITE 203: note = Tnp_P5
MLDVQPKLGARVRLLATGATNKNDPNDARSVAIAALRSATPRRVTAENHAAVLKLWSKRHRDLGRARTQVACRLHAVLCELVPGGISKQITAAQATIFLEQIEPPEAVALARCELATEFLEDLRRIDAQLRDTKKRLTVAVRASGTTITEVFGVGPVIAATMIGYVADASRFPTRDRFAAYNGTAPIEVSSGNRKIHRLSRRGNRRLNHAIHMAAVTQIRQPHSDGRAYYDRKIAEGKTRKEALRCLKRRVSDAIYAHLQADARRAAAAVRTAGPGGQPGSDSVASAAGSHPENRLFGQATPGPDTTLRPLSGRTPARTPAALKKTRKGP

SEQ ID NO: 11747 - protein, 405 aa, unidentified
  source 1..405: note = protein_7e48106
  REGION 6..162: note = RuvC_domain
  SITE 9: note = RuvC_P1
  SITE 59: note = RuvC_P2
  SITE 99: note = RuvC_P3
  SITE 101: note = RuvC_P4
  SITE 104: note = RuvC_P5
  REGION 271..357: note = Tnp_domain
  SITE 279: note = Tnp_P1
  SITE 310: note = Tnp_P2
  SITE 318: note = Tnp_P3
  SITE 319: note = Tnp_P4
MTKVFVGLDWAEDHHDVFIENDVGERVEGGRLADSVDGVGRFHGWVSDLVADPADVVIAVETDRGLFIGALVAAGYTVLAVNPMSTSRYRERHSTSGAKSDPGDAKVLADLARTDAHNHRPVAGDSELGQAVKILARSHQSMIWTRQRQTNQLRSTLREFYPAALEAFDDLASGDALAVLAIAPSPATGRQLSRSKIAAALRRGGRQRRIDERAEEIQTALRTEQLEAPGVIADAMAATVTAVVAVITELVTQITALEAQLADRFEQHPDTKIIRSLPGLGMILGARVLGEFGDDPNRYLDAKSRKNYSGMSPITRASGKHKVVLARYARNKRLADACYMWAFASLTRSPGARAFYDHRRSAGDTHHRALRALANRLVGILHGCLHHHTPYDEHTAWAHRQQLAA

SEQ ID NO: 11748 - protein, 294 aa, unidentified
  source 1..294: note = protein_262f24e
  REGION 1..100: note = RuvC_domain
  SITE 5: note = RuvC_P2
  SITE 40: note = RuvC_P3
  SITE 42: note = RuvC_P4
  SITE 45: note = RuvC_P5
  REGION 164..247: note = Tnp_domain
  SITE 172: note = Tnp_P1
  SITE 202: note = Tnp_P2
  SITE 210: note = Tnp_P3
  SITE 211: note = Tnp_P4
  SITE 223: note = Tnp_P5
MIGLEACSGAHFLARALREQGHDARLIPAQFVKPLVKSNKNDFLDAEAIAEAVDRENMHFVPIKTDDQLDLQALHRVRERLVSRRTSVINPVRAFLLERGITFRKGPAMLRRQMPEILENADEQRSTRIRGLLAMLWQEWKELERQIESLNSAIEGTRRDDAACQRLQQIPGVGPLIASAVVAAIGNGAAFRKGRDFSAWLGLIPKQYSTGGKAKLLGISKRGNPYLRKMFSHGGRAAVLRLRREGTLIGKGMDGLEARAPRNVLIVAMANKLARITWAVRSSGESYRPATLAA

SEQ ID NO: 11749 - protein, 407 aa, unidentified
  source 1..407: note = protein_0cf53fe
  REGION 4..163: note = RuvC_domain
  SITE 7: note = RuvC_P1
  SITE 60: note = RuvC_P2
  SITE 100: note = RuvC_P3
  SITE 102: note = RuvC_P4
  SITE 105: note = RuvC_P5
  REGION 273..359: note = Tnp_domain
  SITE 281: note = Tnp_P1
  SITE 312: note = Tnp_P2
  SITE 320: note = Tnp_P3
  SITE 321: note = Tnp_P4
MIFVGVDWAEAHHDVCVLDTEGAVLARLRIPDSLIGVSELHTLVAEHLGDDDDPQSVIVGIEKDRGLVVTALLAANYQVFAINPLAASRYRERHHVSGAKSDPGDAKVLADLVRTDRHNHRAVAGDSALSDAIKLLARTHQNTIWSRQRHVNSLRSALKDFYPGALEAFGTDLSGLDAVAILAIAPTPTLALRLSRAKITSALRRVGRQRHLEERTERIYEVLQRDQLHQPTTLENAYGVTTETAIANIAQLNASIAKLETSLSEHFKQHPSAKVILSLPGMGTVLGARVLGEFGDDPNRYSDAKSRRNYAGTSPITRASGRSRVVLSRHARNKRLASALDQWAFSSLLPSPGARHYYDELKARDKHHRKAIRQLANKWVGILHGCLESDCPYDENIAWSAREERAA

SEQ ID NO: 11750 - protein, 399 aa, unidentified
  source 1..399: note = protein_7a27021
  REGION 4..160: note = RuvC_domain
  SITE 7: note = RuvC_P1
  SITE 57: note = RuvC_P2
  SITE 97: note = RuvC_P3
  SITE 99: note = RuvC_P4
  SITE 102: note = RuvC_P5
  REGION 274..361: note = Tnp_domain
  SITE 282: note = Tnp_P1
  SITE 312: note = Tnp_P2
  SITE 320: note = Tnp_P3
  SITE 321: note = Tnp_P4
  SITE 334: note = Tnp_P5
MLAVGIDVSKSKSAAAILNSDGTVHTKPFEFRHSQPEMDALIRYIKDQNQPVTILMENTGHYHYPVLKALEAAGLPVCLINAYQMKKYGDMELRKAKTDKKDALRIARYALEKGYSLVPHTSMDQKYEDLRFLARQYDQRMGTLTTNKVFLINLLDETMPGITKLLSLTTRDPETSLTMLFIKRFKSYDRIKKMGRTRFLDSYNKLARKSRNRHAYGYGLAIYELAVNSITTRGENEFTLAAQDQCVDLVSESQKAADAIILNMQTLAETLPEYAVLRSMAGVGDRLGPLILAEIGDIRRFHSGKALNAYAGNDAPPYQSGTFESHNRHISKRGNAALRKYCFEVMQALKLTRPQDDPVYLFLIKKEQEGKPYNVAKMAGVNKFLRIYYARAMEALRLQ

SEQ ID NO: 11751 - protein, 420 aa, unidentified
  source 1..420: note = protein_ded28c5
  REGION 4..158: note = RuvC_domain
  SITE 7: note = RuvC_P1
  SITE 57: note = RuvC_P2
  SITE 98: note = RuvC_P3
  SITE 100: note = RuvC_P4
  SITE 103: note = RuvC_P5
  REGION 269..354: note = Tnp_domain
  SITE 277: note = Tnp_P1
  SITE 306: note = Tnp_P2
  SITE 314: note = Tnp_P3
  SITE 315: note = Tnp_P4
  SITE 327: note = Tnp_P5
MYFVGIDISKNSFHYYISDSGRTKIDSGKFKQNMSGFTTFDKILKKFNKREIIIGMESTSIYHQHLFSYLLKHDYDVHIINPLLLKEFRKSETLRHSKNDNIDSKLISIWLKEKYPDNIPSSKEIDNFTQYSREIINLSEEISRVKNEIKRYVYLLFPELESFQSNIFIKSLMNLLYNFPSARKIATTNKKQLIDAMKIDNQLYFDENKLDQIIELSKNSIASGNDAHELALQKRIELLFKLESDQKLFKEKLKETLNNSSNDVIKNQVELIQSLDGFNETALNIVAETGDINRFYSASALVAFVGIDPRTEESGQMKKGWFINRKGNRYLRKAVYIAAIVAIQNNEYFKNYYMKLRTRGKSHTVAVLAVAGKLLRIIYSLVKSGKKYDSDYHYKLQNQELRAHGNYTAKKLKRKREIVT

SEQ ID NO: 11752 - protein, 313 aa, unidentified
  source 1..313: note = protein_accbebe
  REGION 4..156: note = RuvC_domain
  SITE 7: note = RuvC_P1
  SITE 60: note = RuvC_P2
  SITE 100: note = RuvC_P3
  SITE 102: note = RuvC_P4
  SITE 105: note = RuvC_P5
  REGION 200..286: note = Tnp_domain
  SITE 208: note = Tnp_P1
  SITE 237: note = Tnp_P2
  SITE 245: note = Tnp_P3
  SITE 246: note = Tnp_P4
  SITE 259: note = Tnp_P5
MYTLGIDVSKNKIDLCLLTAGPGGKKKHKVLTNEPAVARKVVDWLNAQKCVPESVTVVLEATGIYHENLAYGLHEAGVSVCMANPCRVREFAHGMDILNKNDAVDAFVLACYGELKSPAVWVPPSPEVRKLRALLRQRDALREDVQRTVNRLEKANSTSTPQEVIRSLERTKSWLNEELARIEKLITDHTDNDPGLKADLDLLKSIKGVKDQVGREMLALLKDGTFKSASQVAAYLGLTPVEKTSGSSVRGRPHMSKTGPSGVRAKLYVAALTASRWNKQAKAIYERLVAKGKAKKAALGAVMRKLVIYALAC

SEQ ID NO: 11753 - protein, 343 aa, unidentified
  source 1..343: note = protein_ef9d5e7
  REGION 7..149: note = RuvC_domain
  SITE 10: note = RuvC_P1
  SITE 53: note = RuvC_P2
  SITE 88: note = RuvC_P3
  SITE 90: note = RuvC_P4
  SITE 93: note = RuvC_P5
  REGION 211..296: note = Tnp_domain
  SITE 219: note = Tnp_P1
  SITE 249: note = Tnp_P2
  SITE 257: note = Tnp_P3
  SITE 258: note = Tnp_P4
  SITE 270: note = Tnp_P5
MMNETMIGVDLAKAVFQVHGASMTGEPRFRKKLSRQSFSEFMAKQPPALVVMEACGSAHHWAREMIRLGHEVKLIAPRYVKPFVKRQKNDAADAEAIVIAARQPEMRFVEVKGAEQQSRAILFRARERLVHQRTELINALRAALYEYGHVVPQGIRQIGRIEEILEAPHSDLPDLMRDECRDLLEQIAEQTVRINARTEKIKALAAEADTARRLQTIPGVGPMTALAVEAFAPPMESFNCGRAFAAWLGLVPRQFSSGGKERLGRTSKAGQADIRRLLIIGAMSRLNWMGRKSIPEDSWLARITSRKPRMLVAIALANKMARTMWAMLTKNEDYRVPAQAGAA

SEQ ID NO: 11754 - protein, 338 aa, unidentified
  source 1..338: note = protein_78600db
  REGION 7..148: note = RuvC_domain
  SITE 10: note = RuvC_P1
  SITE 53: note = RuvC_P2
  SITE 88: note = RuvC_P3
  SITE 90: note = RuvC_P4
  SITE 93: note = RuvC_P5
  REGION 211..297: note = Tnp_domain
  SITE 219: note = Tnp_P1
  SITE 249: note = Tnp_P2
  SITE 257: note = Tnp_P3
  SITE 258: note = Tnp_P4
  SITE 270: note = Tnp_P5
MVITTTIGIDLGKSSFHAVGHDSNGRETFRKKLNRTKLLQFLSAYEPVLIAMESCGGSHWLARKCKSYGHVVKLIPAQYVKPYVKTNKNDFIDADAIAEASTRPTMRFTSPKSEEAQVASIIRKVRSSFMKERTACMNRMGAMLLEFGLSLPRGHSPLKKLFEWIELQNEVLPNSLINELTEQLEYYRYLNERIESQEKKLQLINKDDIRYSLLQTIPGVGPLTAACCVANVADPKDFSSGRNFAAWVGLVPRQHSTGGKSRMLGISKRGNSELRELFVHAARSILRRAETAEKYFGLWLMNLKRTKPFNVAVVALANKIARIAWSVMLTNKEFSLKI

SEQ ID NO: 11755 - protein, 334 aa, unidentified
  source 1..334: note = protein_55d5d87
  REGION 6..147: note = RuvC_domain
  SITE 9: note = RuvC_P1
  SITE 52: note = RuvC_P2
  SITE 87: note = RuvC_P3
  SITE 89: note = RuvC_P4
  SITE 92: note = RuvC_P5
  REGION 210..292: note = Tnp_domain
  SITE 218: note = Tnp_P1
  SITE 243: note = Tnp_P2
  SITE 251: note = Tnp_P3
  SITE 252: note = Tnp_P4
  SITE 264: note = Tnp_P5
MKFTPFGVDIAKHLMQIHFVDEYTGEVIDKQLRRGDFLTFFSNRQPCLIGMEACGGAHYWARELRKLGHEVRLLQARFVKAFRMGNKNDVMDARAIWMAVQQPGKSVAVKNEEQQAILSLHRMRRQLVKFRTAQINALHGLLLEFGETLHKGRASLDKAMPEVLERLREKLAPFLLDLLEEQYHRLNDIDEQIEQVEKQLIAWAKQNADCQRIMKIPGVGILIATMGEASAFRSGREFSAYLGLVPKQTGTGGRTQLWGISKRGDVYLRTLFIHGARAATLLTKTPSPWVTELRKRRPACVAIVGMANKLARTVWALIAHQREYQNDYVSVRPY

SEQ ID NO: 11756 - protein, 402 aa, unidentified
  source 1..402: note = protein_10610fb
  REGION 5..160: note = RuvC_domain
  SITE 8: note = RuvC_P1
  SITE 59: note = RuvC_P2
  SITE 97: note = RuvC_P3
  SITE 99: note = RuvC_P4
  SITE 102: note = RuvC_P5
  REGION 268..354: note = Tnp_domain
  SITE 276: note = Tnp_P1
  SITE 307: note = Tnp_P2
  SITE 315: note = Tnp_P3
  SITE 316: note = Tnp_P4
MPFFVGIDWASQAHAVCVIDETARIHWQGAVAHTAEGLTELLGRLRRLRHRGGLRVALERPSGLLVDTLDAAGLEVVPIRPNALKASRPRYSAAGGKTDPGDAFILADLLRTDGHRFRCLHAPSDETRALRALVRGRDDLVAQRVVLANQLRALLDRFWPGAVAIFADVDSPIALAFVTRYPTPHSAGRLGEKRLAQFLGQHAYCGRRPVAELLARLRRAPASLVGDAEAEASGDLVRALVAVLGPLVAHIQQLTAAIAATLAQHPDGPLLQSLPRSGAVNAAQILAELGDDRARFPTDEQLAAEGGLAPVTHTSGKHHAVVFRWACNKRLRQALTTFADNSRHASRWAALVYQRARGRGCRHPHAIRILARAWVRILWRCWQDRTPYDITRHRAAQTLAAA

SEQ ID NO: 11757 - protein, 399 aa, unidentified
  source 1..399: note = protein_ba12776
  REGION 5..163: note = RuvC_domain
  SITE 8: note = RuvC_P1
  SITE 62: note = RuvC_P2
  SITE 102: note = RuvC_P3
  SITE 104: note = RuvC_P4
  SITE 107: note = RuvC_P5
  REGION 273..362: note = Tnp_domain
  SITE 281: note = Tnp_P1
  SITE 311: note = Tnp_P2
  SITE 319: note = Tnp_P3
  SITE 320: note = Tnp_P4
  SITE 333: note = Tnp_P5
MDPVIGLDIAKGESQVQAFLKRKQTYKQSFKFAHDLQGLHAFYRFYQEVEQVSGQTPAVIFESTGHYHEPVLQFLENHDVTYYLINPVVSYEARKTSLRKVKTDKIDAFHLGELYYKEDLEVFQRKTEQYLNLRQLTRQHSALTDSYVEIKLQFQAALDQIFPEYHGVFSDLYGKMSLNTLLHYPTSVDVQKISQETLATEMRQFGAKRSDAWFRNKAAQLKDAADRNPFQQPVCHGHIVSIQMYIQMLFQYQEHLSKLQKEIDALAESFYDYELIQSIPGIGGKIAATILSETGGMNQFEHPKQLAAYAGVDPSVFESGKFKASINKITKRGSSRLRQTLYTAVQCGLAKNRNKKLIAFYDRKRNEGKPHKVAVIACANKLIHWIHAMLKRQEVFVDQ

SEQ ID NO: 11758 - protein, 344 aa, unidentified
  source 1..344: note = protein_f1eab2e
  REGION 6..147: note = RuvC_domain
  SITE 9: note = RuvC_P1
  SITE 52: note = RuvC_P2
  SITE 87: note = RuvC_P3
  SITE 89: note = RuvC_P4
  SITE 92: note = RuvC_P5
  REGION 211..295: note = Tnp_domain
  SITE 219: note = Tnp_P1
  SITE 249: note = Tnp_P2
  SITE 257: note = Tnp_P3
  SITE 258: note = Tnp_P4
  SITE 270: note = Tnp_P5
MTIVTLGIDLGKNLNSIVGLDAEERVVLRRRVRRATLAELAGKLEPCTVALEACCGAHHVGRLFAAKGHEVRLMSPEHVRPYVRAQKNDDNDAAGIAEAATRPTMRFVELKSQERLDLQTLHRARSRLVAARKALVNQLRAILLERGHTFRQGRRVLEREIEPFLAEPPSDLSVRILVLIADMRAEWRSLDERIDALNDDLTEHARADEAAGRLTSIPGIGILGATALFAAVGNGEAFRRARDIPAWLGLVPKQMTTGGKPRLLSITKRGNRHLRMLLIHGARAALPSLSKQATPLGSWLRGLLSRAHRNVVIVALAAKLARIAWATLRHGVRFEPEKGTVMTA

SEQ ID NO: 11759 - protein, 375 aa, unidentified
  source 1..375: note = protein_bf7f9e0
  REGION 9..158: note = RuvC_domain
  SITE 12: note = RuvC_P1
  SITE 62: note = RuvC_P2
  SITE 98: note = RuvC_P3
  SITE 100: note = RuvC_P4
  SITE 103: note = RuvC_P5
  REGION 223..311: note = Tnp_domain
  SITE 231: note = Tnp_P1
  SITE 261: note = Tnp_P2
  SITE 269: note = Tnp_P3
  SITE 270: note = Tnp_P4
  SITE 282: note = Tnp_P5
MNKYSTKYVGMDVHKETIAVAVAKEGRVDPAYYGEIPNTSEAIRKLVRKVASNGEKVSFCYEAGPCGYDVYRQLIDLGQRCDVVAPSLIPKKSGDRVKTDRRDANTLTRLYRAGELTPVWVPDKEQEAIRDLTRAREDMKAMEGHAKQRLGAFLLRHGKRFSGKCKRTQAYFRWLEEIKFEMPAQQIVLQEYVDAVKHMKGRVEALEEEMRQAMQGWSLAPVVTGLMALRGVELITAMTVVAELGDMSRFDSARQIMAHLGLVPSEHSSGHRQKRGGITKTGNGHARRVLIEASWCYRSPARKTAQIQRRAQKTSETVQAIAWKAQKRLCRRYWYLINKGKRPVEACTAVARELSGFMWAIACEVMGKNYVCAPA

SEQ ID NO: 11760 - protein, 341 aa, unidentified
  source 1..341: note = protein_a3857c6
  REGION 7..149: note = RuvC_domain
  SITE 10: note = RuvC_P1
  SITE 53: note = RuvC_P2
  SITE 88: note = RuvC_P3
  SITE 90: note = RuvC_P4
  SITE 93: note = RuvC_P5
  REGION 209..296: note = Tnp_domain
  SITE 217: note = Tnp_P1
  SITE 247: note = Tnp_P2
  SITE 255: note = Tnp_P3
  SITE 256: note = Tnp_P4
  SITE 268: note = Tnp_P5
MSDLALVGIDLGKHTFHLHGQDKSGRELFRKKLSRQQMMRFFANLSACTVAMEACAGAHFVARELRAMGHQAKLISPQFVKPFVKGNKNDFIDAQAICEAASRPTMRFVSPKTEAQQTLSVLHRLRESLIRDRTKAVNQMHGFLLEFGISLPQGLAVMKRLSDVLAEHELPVRLTMLLQRLHDLLVYLDEQVKGLDKELAGQLADDDLGSRLLSMPCVGPITASLLAVEMGDGQQYGCSRDFAASVGLVPRQYSTGGRANLLGISKRGDKNLRRLLVQCARVYMQRLEHQKGALANWVRSLLMRRHSNVVACALANKLARIAWAIAAHHTQYEAGPDALNT

SEQ ID NO: 11761 - protein, 340 aa, unidentified
  source 1..340: note = protein_92b7595
  REGION 7..149: note = RuvC_domain
  SITE 10: note = RuvC_P1
  SITE 53: note = RuvC_P2
  SITE 88: note = RuvC_P3
  SITE 90: note = RuvC_P4
  SITE 93: note = RuvC_P5
  REGION 211..295: note = Tnp_domain
  SITE 219: note = Tnp_P1
  SITE 249: note = Tnp_P2
  SITE 257: note = Tnp_P3
  SITE 258: note = Tnp_P4
  SITE 270: note = Tnp_P5
MATVALLGIDIGKHTFHLHGQDRKGHQVLRKKFSRSQLLQHLAQLPACTVAMESCGGSHWLARKITALGHRVKLIAPQHVKPFVTGNKNDYIDAEAICETASRPKTRYVAMKTVEQQILSTQHRMRTSLVSHRTATINQIHGFLLEFGICLPVGYAALERVPALLDNPEHDLPLRFKILIQRLLEDIQHLKDEIKTIDAEIKKQLNADDAGNRLLSIPGIGPITASALVADVGDASNFRSARDFAASLGLVPRQHSTGGKTVLLNISKRGDKHLRRLLVQGARAILIRIDKREDLLGVWARELLTRKHPNKVACALANKLARIVWAVLARGGTYNPHPSV

SEQ ID NO: 11762 - protein, 341 aa, unidentified
  source 1..341: note = protein_6889079
  REGION 7..149: note = RuvC_domain
  SITE 10: note = RuvC_P1
  SITE 53: note = RuvC_P2
  SITE 88: note = RuvC_P3
  SITE 90: note = RuvC_P4
  SITE 93: note = RuvC_P5
  REGION 209..295: note = Tnp_domain
  SITE 217: note = Tnp_P1
  SITE 247: note = Tnp_P2
  SITE 255: note = Tnp_P3
  SITE 256: note = Tnp_P4
  SITE 268: note = Tnp_P5
MQDVTLVGIDLGKHSFHLHGQDRKGKAVFRKKASRKQLIEFFANFQACTVVMEACAGAHHMARKLASFGHRVRLISPQFVRPFVKSNKNDFVDAEAMCEAASRPAMRFVTPKTESQQTLSALHRVRESLIRDRTKVINQIHGFLLEFGISLPIGNAVIKRLPTVLAEHSLPPRLVAVLERLHGHFKHLDAQIGEIDRELVRQLSEDDVGQRLLTIPGVGPITASVLAAEMGDGKQFGCSRDFAASIGLVPRQYGTGGKANLLGISKRGDKNIRRLLVQCARAYMMRLDRQTGRLADWVRGMLTRRHSNVVACALANKLARTAWALAAHHATFNPGPARLPA

SEQ ID NO: 11763 - protein, 408 aa, unidentified
  source 1..408: note = protein_495b4cf
  REGION 12..168: note = RuvC_domain
  SITE 15: note = RuvC_P1
  SITE 64: note = RuvC_P2
  SITE 105: note = RuvC_P3
  SITE 107: note = RuvC_P4
  SITE 110: note = RuvC_P5
  REGION 275..359: note = Tnp_domain
  SITE 283: note = Tnp_P1
  SITE 312: note = Tnp_P2
  SITE 320: note = Tnp_P3
  SITE 321: note = Tnp_P4
  SITE 333: note = Tnp_P5
MAFDLRSFALFIGLDVGKSEHHATALTRDGEKVYDKPLPNDETRLRELFAGLTGEHGAALVIVDQPATIGALPVAVAQAVPGIEIAYLPGLTMRRMADLHAGSAKTDARDAFIIAETARTMPAALRSIAVSDEQVAELAVLAGFDDDLLGQMTAARNRLRGLLTQIHPALERAMGPHLHQVGVLDALVTWPTPQRLKSAGRGHVRNRIKKHNPRLAERVTEEIFSALEAQTVVVAGTGAAATIVPILASQLQDLTRQRAGVLAQVEALVEAHPLYRVLTSMPGIGVRTAARILTKVVGKDFKTAGHLASYAGIAPTTRRSGTSIRGEFANRGGNKRLKSSLYNSAFAALHHPPSRAYYDRKVAEGKRHKQAIIALARRRLDTLYAMLRDGTLYQDPAAPIASEHSLAA

SEQ ID NO: 11764 - protein, 326 aa, unidentified
  source 1..326: note = protein_dc3af94
  REGION 4..156: note = RuvC_domain
  SITE 7: note = RuvC_P1
  SITE 61: note = RuvC_P2
  SITE 101: note = RuvC_P3
  SITE 103: note = RuvC_P4
  SITE 106: note = RuvC_P5
  REGION 201..286: note = Tnp_domain
  SITE 209: note = Tnp_P1
  SITE 238: note = Tnp_P2
  SITE 246: note = Tnp_P3
  SITE 247: note = Tnp_P4
  SITE 259: note = Tnp_P5
MHYVGIDVSKAKLDCCWLRDVEKNKVKTKVFKNTLADHDALCGWLKAQTKADPADIRVVIEATGIYHESLAYALYDAGFQICVVNPARTHEFSNSLGSVHKTDAKDSLMLAQYSCRMQPERWQPEAEEIRELKALIARLEALEADLQRETNRLEKAEFNRTSERVIESLTLMIERLQEEKARLEKDIDDHIDRHPQLKKDRELMASIPGVGDVVSRMMLSLIHSRSFNNARQVSAFVGLIPRIQESGQWKGRSRLSKQGPSRIRAKLYMASVVCVQWNPDIKAQYQRLLANGKSKMQALGAAMRKLVQICFGVVKHQSEYRPQVPI

SEQ ID NO: 11765 - protein, 323 aa, unidentified
  source 1..323: note = protein_de219a2
  REGION 6..153: note = RuvC_domain
  SITE 9: note = RuvC_P1
  SITE 58: note = RuvC_P2
  SITE 98: note = RuvC_P3
  SITE 100: note = RuvC_P4
  SITE 103: note = RuvC_P5
  REGION 193..279: note = Tnp_domain
  SITE 201: note = Tnp_P1
  SITE 231: note = Tnp_P2
  SITE 239: note = Tnp_P3
  SITE 240: note = Tnp_P4
  SITE 252: note = Tnp_P5
MYKIVVGVDIAKLKFDVASLTDGKYKHKTFTNDEQGYAAFLSWLLALFANDKPMICMEATGAYSIPLADYMISQGYPVSVVNPAKIKAFANSELSRTKTDKSDAKLIARYAFTMRPSLWTPPPQNIRVLQALVRRVEHLLEMIQMERNRQDTADANVVDSIKIVLATLEAELKATRKAIHDHIDNDPELKKRRDLLITIPGIAEASIAHLLVVLSDHHGFTSAKQVVAFTGLAPLLRESGQWSGKTRIAKNGDAALRKALYMPALSSWRHNPVIRAFCLRLKANGKNGKAIVCAAMRKLIHLSFAILKSGEPFDPNFTLQKLV

SEQ ID NO: 11766 - protein, 289 aa, unidentified
  source 1..289: note = protein_70fba03
  REGION 1..98: note = RuvC_domain
  SITE 37: note = RuvC_P3
  SITE 39: note = RuvC_P4
  SITE 42: note = RuvC_P5
  REGION 161..251: note = Tnp_domain
  SITE 169: note = Tnp_P1
  SITE 199: note = Tnp_P2
  SITE 207: note = Tnp_P3
  SITE 208: note = Tnp_P4
  SITE 220: note = Tnp_P5
MEACGSSQHWARRLSELGHQVKLMPGKLVKAFVTGNKNDVADARAIWAATSQPGIKTVAIKTEAQQAVLALHRMRQQLVIFRRSQSNCLRGLLSEYGEVMALGRAAMSRAMPDVLARLESRLPAVLIDSLREQWQRLSNMDEEIARIERRLRAWLQESDACKAIADIPGVGFLTATAAVAAMGNAKAFKSGREFAAWLGLVPAQIGTGGKVRLLGISKRGDRYLRTLLIHGARSVMKHVKDAESWAAKLRQRRPLNIVIVALANKMARTIWALLAHRCSYRADYTAAIA

SEQ ID NO: 11767 - protein, 322 aa, unidentified
  source 1..322: note = protein_1e5807d
  REGION 9..157: note = RuvC_domain
  SITE 12: note = RuvC_P1
  SITE 56: note = RuvC_P2
  SITE 96: note = RuvC_P3
  SITE 98: note = RuvC_P4
  SITE 101: note = RuvC_P5
  REGION 195..279: note = Tnp_domain
  SITE 203: note = Tnp_P1
  SITE 232: note = Tnp_P2
  SITE 240: note = Tnp_P3
  SITE 241: note = Tnp_P4
  SITE 252: note = Tnp_P5
MSLPKPLCVGIDVSKATLDIAASSVIEQFSVGNDADGFDSIIAELRTREVALVLMEATGGLEAAVASTLQVEGFEIAVVNPRQARDFARAMGYLAKTDRIDARALAQMAEVINRHPERNRFIRALPDAERQVLNAMVVRRRQLIAMLVAERNRLYPAHPQSRKSINIIMKTLDDELARIDEGMNNHIRNHFKELSERLSSIKGVGTMTVAALLAEAPELGRLSRRGISALVGVAPVNRDSGTMRGRRTIFGGRAGVRTALYMAALVATRFNPVIKAFYMRLVSVGKPKKVALVACMRKLLTILNAMLRKNEEWNESYHHVAP

SEQ ID NO: 11768 - protein, 385 aa, unidentified
  source 1..385: note = protein_5eddf1e
  REGION 38..183: note = RuvC_domain
  SITE 41: note = RuvC_P1
  SITE 87: note = RuvC_P2
  SITE 123: note = RuvC_P3
  SITE 125: note = RuvC_P4
  SITE 128: note = RuvC_P5
  REGION 248..334: note = Tnp_domain
  SITE 256: note = Tnp_P1
  SITE 286: note = Tnp_P2
  SITE 294: note = Tnp_P3
  SITE 295: note = Tnp_P4
  SITE 307: note = Tnp_P5
MQMILGQSRFAPFGLPLVGFRELSEGEQSVTAPYDYHIGVDYHKSYSHLVVQDGAGKTLRSGRVKNDRQSLGSFLERYRENSHAVVEATRNWMVMYDWLDDICDDVVLAHPLKVKAIADAKIKTDKIDATVLAHLLRADLVPEAWAPSEKSRELRVALRERMFYVRLRTMTKNRIVTVFDRYPEQIAQLKKLGDLFGKAGRQQLAALNVSEIDRIQINRGLEFIGDIDGRIKQSEATIRAMTKTNSNVKLLKTIPGIGEFFARLIDAEIDDISRFRNPKKLAAYAGLVPSTYSSGGKTYHGKIIKQGNKWLRWAFVEAVAPAVATDPQLRAQYEHLKFRGTNKARVAMARKLLTIAFQILRDQRPYERRGANSEEGASSTTSRLS

SEQ ID NO: 11769 - protein, 345 aa, unidentified
  source 1..345: note = protein_c2fca32
  REGION 7..148: note = RuvC_domain
  SITE 10: note = RuvC_P1
  SITE 53: note = RuvC_P2
  SITE 88: note = RuvC_P3
  SITE 90: note = RuvC_P4
  SITE 93: note = RuvC_P5
  REGION 210..301: note = Tnp_domain
  SITE 218: note = Tnp_P1
  SITE 248: note = Tnp_P2
  SITE 256: note = Tnp_P3
  SITE 257: note = Tnp_P4
  SITE 269: note = Tnp_P5
MDQISRIGMDTSKHVFQLHGVNAAEEVVLRRKLRRKEMVTFFEKLAPTVIAIEACGASHHWARLLHSFGHTVKLIPPQLVKPYVKRGKNDAADAEALCEAMSRPTMRFVPVKTAEQQAALMLTSVRDRLIRNRTQLANAIRGHAAEFGLTAAKGMAHLAPLLERIQADESLPALARELFAAQAKEYEQLQTQSDEIDAQLMARHRADECSRRLAKIPGVGPIGAMLLTMKTPAPELFRSGRQFAAWIGLTPRDHSTAGKVRLGAITRAGDEGLRSVLVVGATAVIQHARRSGKSSPWLGALLKRKSPKLAAVALANKMARIAWKLILTGEAYTATPAPATSAGAV

SEQ ID NO: 11770 - protein, 345 aa, unidentified
  source 1..345: note = protein_6a43fab
  REGION 6..159: note = RuvC_domain
  SITE 9: note = RuvC_P1
  SITE 63: note = RuvC_P2
  SITE 102: note = RuvC_P3
  SITE 104: note = RuvC_P4
  SITE 107: note = RuvC_P5
  REGION 208..296: note = Tnp_domain
  SITE 216: note = Tnp_P1
  SITE 247: note = Tnp_P2
  SITE 255: note = Tnp_P3
  SITE 256: note = Tnp_P4
  SITE 269: note = Tnp_P5
MKKIAIGIDFAKEKFDVTAKNVMTGASEYGQYPNTPSGGRSMIRMVKKFSGGIDSSEWLFCGEDTGYYSQVISRYLTEKGYFMWLQNPYSIKHSEGGIRRGKDDKADSAAIADYAHRYEDKAHKYEIPSKQAEELHLLITRRDAYVRARQVIQSGANEIPKRSKQGDSINLIKASAKHLIMEINNEIDRLEAQMEELVKEEEDMQTNYEILRSFTGIGIVNAMCFIAYTDNFRKFDLNARKIATYWGVAPFGKDSGKSIHVDPHVSHFCNHKLKAILSNAANSAIVWNPVIVPYYERLGKAGKCDGIRKNNVKNKVIQIITAMIRDKKKFDPDYIFTNKNAQQEC

SEQ ID NO: 11771 - protein, 340 aa, unidentified
  source 1..340: note = protein_d546cbf
  REGION 7..148: note = RuvC_domain
  SITE 10: note = RuvC_P1
  SITE 53: note = RuvC_P2
  SITE 88: note = RuvC_P3
  SITE 90: note = RuvC_P4
  SITE 93: note = RuvC_P5
  REGION 212..298: note = Tnp_domain
  SITE 220: note = Tnp_P1
  SITE 250: note = Tnp_P2
  SITE 258: note = Tnp_P3
  SITE 259: note = Tnp_P4
  SITE 271: note = Tnp_P5
MKEVTTIGLDIAKHVFQAHGIAADGAVVFRRKLRRNEVGAFFAGLPSCLIGIEACATAHFWARQLIDLGHQVKLIPAAYVKPYVKRQKNDAADAEAICEAVTRPTMRFVPVKTEEQQSVLMLHRVRELLIRQRTMLVNALRGHLAELGLVTQLGARGVDMLLALVEDEDHDMITTVARTALLPIAQQLRDLDLQVGEVDKQILAWHRSNDLSQRLETIPGIGPITASAIAATVADASLFKSGRQLAAWLGLVPRQNSSGGKERLGKITKQGDPYIRRLLVVGAAAVLRFSKSAKSTTAAWGAGMLSRKPYTVVAVAMANKMARIAWALMVNGTRFNGMTA

SEQ ID NO: 11772 - protein, 423 aa, unidentified
  source 1..423: note = protein_7d47356
  REGION 4..162: note = RuvC_domain
  SITE 7: note = RuvC_P1
  SITE 60: note = RuvC_P2
  SITE 101: note = RuvC_P3
  SITE 103: note = RuvC_P4
  SITE 106: note = RuvC_P5
  REGION 268..355: note = Tnp_domain
  SITE 276: note = Tnp_P1
  SITE 306: note = Tnp_P2
  SITE 314: note = Tnp_P3
  SITE 315: note = Tnp_P4
  SITE 328: note = Tnp_P5
MIYAGVDIAKVDHVIGAVDERGSEACRPMSFKNSASGFERCEAWLEGAAEAPGDVLVGMEATGHYWMALYAFLTSRGYAVAVIDPLQVRAVRGLKGMGGVKNDRVDAGLIAEAMRIGQYDPTRLATDDVMSLRSLTRYHQSLKAELAEVKTQCTCLLDSYFPEFSGVFSDMFCAAGRAVLSRSPLPSELSRRRAGSLQRDISEASRGSRRVDGKGAEVKGLAARSVGIRLGEGAASFQVRSLVRQMDFLDAECAGVEAKVRELLERVEPLVLTIPGVSYTTGAQIVAEVGDVSRFRNASALVSYAGLNSSVHQSGMFDSGGGPITKHGSPYLRRALWLAANQARQCDPSLRGFYERKRAEGKCHRVAVTAVARKLCHIVFAVMRDQAPYDPERPGRDQSKHSVSGSQGTAKSKTETKTEAGKS

SEQ ID NO: 11773 - protein, 378 aa, unidentified
  source 1..378: note = protein_b6143cb
  REGION 6..160: note = RuvC_domain
  SITE 9: note = RuvC_P1
  SITE 58: note = RuvC_P2
  SITE 98: note = RuvC_P3
  SITE 100: note = RuvC_P4
  SITE 103: note = RuvC_P5
  REGION 265..321: note = Tnp_domain
  SITE 273: note = Tnp_P1
  SITE 304: note = Tnp_P2
MPEIWAGVDIGKEHHHCVVINADGERLLSRRVLNDETELLQLIGDVLEISTDVLWAVDLNHGAAALLIGLLLGHGQPMAYLTGLAVHRASVTYKGEGKTDAKDAFVIADQARVRRDLGLLRPGDEIAVDLRTLTARRLDVVFDRTRQINRLRAQLLEVFPALERSLDLVNKGPVMLLTGYQTPAAIRRAGVKRIETWLKNRKVRGAAALAKTAVEAAQAQMTALPGEKLAAAMVVRLAKGVMALDEEIVELDALIEATFREHPHAEVIRSLPGMGPKLGAEFIAATGGDMDAFGSADRLAGFAGLAPGPVTPAASAATCAAPGATTADCCARCTSRRWSASRHAPRPRRTTSGREARGRATSRPCSRSPAAGSTSCGR

SEQ ID NO: 11774 - protein, 415 aa, unidentified
  source 1..415: note = protein_dc84032
  REGION 6..159: note = RuvC_domain
  SITE 9: note = RuvC_P1
  SITE 57: note = RuvC_P2
  SITE 98: note = RuvC_P3
  SITE 100: note = RuvC_P4
  SITE 103: note = RuvC_P5
  REGION 221..306: note = Tnp_domain
  SITE 229: note = Tnp_P1
  SITE 259: note = Tnp_P2
  SITE 267: note = Tnp_P3
  SITE 268: note = Tnp_P4
  SITE 279: note = Tnp_P5
MGRVVIGMDPHKRSATIDVCDERERVLATGRFGTDRDGYRQLLAAGRKWPHRLWAVEGCQGVGRHLAQRLVADGEPVVDVPAKLSARARVFSTGQGRKTDATDAHSVAVVALRTPGLRAVDVDGQTVALRLLADRRDELGAARTLTVNRLHRLLVELIPGGAKTFLSATQAKALLAGVRPRDVVGKTRRRLAAELIVDLDGIDKKIKAANKQLLELIEATGSSLLTLNGIGPSGAARLLGDVGDVTRFPTRGHFASWNGTAPIDASAGEQNRHRLSRAGNRRINRVLHIMAIVQLRNDTEGRAYYRRRLAAGKTSMEAIRVLKRRLSDVVYRQLVADQKRLRQVKRTDPGGQAGAATNSSAAGFNPNADASEKSLPGPATGEITRTGAPIPDRSSSRSRRPLTAPTRSRRQAQSA

SEQ ID NO: 11775 - protein, 351 aa, unidentified
  source 1..351: note = protein_0b41ab1
  REGION 6..148: note = RuvC_domain
  SITE 9: note = RuvC_P1
  SITE 52: note = RuvC_P2
  SITE 87: note = RuvC_P3
  SITE 89: note = RuvC_P4
  SITE 92: note = RuvC_P5
  REGION 211..296: note = Tnp_domain
  SITE 219: note = Tnp_P1
  SITE 249: note = Tnp_P2
  SITE 257: note = Tnp_P3
  SITE 258: note = Tnp_P4
  SITE 270: note = Tnp_P5
MNVTTIGLDIAKNVFFAHGVDEHGKAVMQKKLSRGQVLAYFAKRPPCLVGIEATGGAHYWARELNRLGHTAKLMPAQYVKPYVKRDKNDPNDAAGICEAVSRPSMRFVGLNTVAQQDVQMLHAIRRRLVGSRTALTNQIRGLLGEYGLVFGQGPTRVRRGLTETLAEDDARLSVAARELVADVQQQLTELENRLTDYNARIERVCAADARCVKLDVLPGVGPITATALVAAVNDGKQYKRGRHMSSSLGLTPREHSSGGKQHLLGISKRGNTYVRTLLIHGARSVLQHAAQKTDPDPLIRWALAVQARRGKNIAAVALANKLARIAWALLAQERTYDPRWTKPRGVNAIPV

SEQ ID NO: 11776 - protein, 387 aa, unidentified
  source 1..387: note = protein_bc6998f
  REGION 4..159: note = RuvC_domain
  SITE 7: note = RuvC_P1
  SITE 57: note = RuvC_P2
  SITE 98: note = RuvC_P3
  SITE 100: note = RuvC_P4
  SITE 103: note = RuvC_P5
  REGION 262..347: note = Tnp_domain
  SITE 269: note = Tnp_P1
  SITE 299: note = Tnp_P2
  SITE 307: note = Tnp_P3
  SITE 308: note = Tnp_P4
  SITE 320: note = Tnp_P5
MYFVGIDISKFKHDCAIIDELGDVITSSWSFNNDCEGFSLFRELLNALDGEKKIGFESTGHYGHNLKLFLETNNFSFMEINPLLISKFVRSKSLRKTKTDSLDAQSIAQYLMTAEYKPYPPSFYHMDQLKSLTRFRDSLVRQHSRQLVELTNILDKVFPEFKPFFDGRLSATALYILAHYQSPEKIANMNAKSYEALRKKSRGKFSMVKFAQLKTLAKNTVGRSDEYLLKQMEITIDIENQLDAKIDEIEAQISECIHGLNPPVLTIPGIGELTAAVILSEYGDINKFESPAQMLSFAGLEPGYYQSGQAEYDGHMVKHGSSHLRYALMNACLPLITYEPVFAEYYAKKRAEGKSHRVALSHVAKKLLRVIYTLQTKNIPYDPTLIR

SEQ ID NO: 11777 - protein, 388 aa, unidentified
  source 1..388: note = protein_e7251e2
  REGION 4..160: note = RuvC_domain
  SITE 7: note = RuvC_P1
  SITE 58: note = RuvC_P2
  SITE 99: note = RuvC_P3
  SITE 101: note = RuvC_P4
  SITE 104: note = RuvC_P5
  REGION 262..348: note = Tnp_domain
  SITE 270: note = Tnp_P1
  SITE 300: note = Tnp_P2
  SITE 308: note = Tnp_P3
  SITE 309: note = Tnp_P4
  SITE 321: note = Tnp_P5
MYLVGIDIAKYSHQCFIATEAGEVIKEFSFDNNFDGFNVLLKSLKSLDQFQDIKIGLESTGHYGNTLKQFICAKGYTFVEFNPYLAKQFFKSTTIRKTKTDKVDARLLSSMLASVDYKTLHTKYYHINELKSLTRARDSLICERSNYLVQITNALDVVFPEYKSFFNNKLSKTALFLLYKYNSRDKIAKITKEQYKKISNISMGKFSYPKFLNLKELARKSIGVDNEASFFLIKIFINLINSLNENLEKIEKEIEALMSMINTKLTTIPGVSIFSAATILGEIGDISKFSSPAKLIAFTGFDIAIYQSGEKEFYGKLVKRGSPLLRKTIWNLVLGSIRLIPQITDYYHRKREQGKHHKVAFSAISRKLIRLIYHIESNKIDFDIEQYR

SEQ ID NO: 11778 - protein, 392 aa, unidentified
  source 1..392: note = protein_513b782
  REGION 4..163: note = RuvC_domain
  SITE 7: note = RuvC_P1
  SITE 60: note = RuvC_P2
  SITE 101: note = RuvC_P3
  SITE 103: note = RuvC_P4
  SITE 106: note = RuvC_P5
  REGION 267..354: note = Tnp_domain
  SITE 275: note = Tnp_P1
  SITE 305: note = Tnp_P2
  SITE 313: note = Tnp_P3
  SITE 314: note = Tnp_P4
  SITE 327: note = Tnp_P5
MIYVGIDVAKDKHDCFIANSDGEVLLKAFTISNNREGFETLFQRISSVSGDLDKVKVGLEATGHYSYNLLGFLLDKGLATFVINPLHTNLYRKSLSLRKTKTDKVDSRTIATMMMSDMNLKSYSDTSYHNEELKSLTRYRFDKVKERAKLKTSVSRLVNILFPELENLVPQLHMASIYALLSEFPGASHIASSHLTRLENLLSKTSKGHYGKDTAILFRNAARDSIGSHMPAKSLELKHTIKLIQELTIEINEVETEIKRIMDEEVNSPILTIPGISYRMGAMIIAEIGDFNRFDSADKILAYAGMSPSTYQSGQLDNCYAHMEKRGSRYLRYALYNSTKYVCQWDESFAAYLAKKRAEGKHYNVALSHAAKKLVRLIYAMEKFGQPYSKAA

SEQ ID NO: 11779 - protein, 322 aa, unidentified
  source 1..322: note = protein_fdc52f0
  REGION 9..156: note = RuvC_domain
  SITE 12: note = RuvC_P1
  SITE 56: note = RuvC_P2
  SITE 96: note = RuvC_P3
  SITE 98: note = RuvC_P4
  SITE 101: note = RuvC_P5
  REGION 191..276: note = Tnp_domain
  SITE 199: note = Tnp_P1
  SITE 228: note = Tnp_P2
  SITE 236: note = Tnp_P3
  SITE 237: note = Tnp_P4
  SITE 248: note = Tnp_P5
MTKHTTISAGIDTGKRKLDVAIEGRHEPLQVENAPEGHEVLVAWLRRHRVKRVGIEASGGYEQPVVAELRRKRFVVVVFQPAQVRAYAKFHLQRAKNDKIDAALIAACTAAVRKIHAAPDPRLLPFAEQLTMIDQVNEDIARLKNRTESCRNALFRKLWQEDIVRLQQREKAELKALVAAIRKHPDLARRLALINSVDGIGLPTAVAILVRLPEIGRITREQAVALAGLAPYDDDSGEQVGARHIEGGRKRLRRALYTASLAASFRWNRQLIQLYQRLTAAGKEHKRALVACARKMLIFANTVVARGTPWRDQPPERTLSVS

SEQ ID NO: 11780 - protein, 354 aa, unidentified
  source 1..354: note = protein_eb87eac
  REGION 9..157: note = RuvC_domain
  SITE 12: note = RuvC_P1
  SITE 62: note = RuvC_P2
  SITE 97: note = RuvC_P3
  SITE 99: note = RuvC_P4
  SITE 102: note = RuvC_P5
  REGION 254..341: note = Tnp_domain
  SITE 262: note = Tnp_P1
  SITE 293: note = Tnp_P2
  SITE 301: note = Tnp_P3
  SITE 302: note = Tnp_P4
  SITE 313: note = Tnp_P5
MEIVYPRACGVDVHKSFIVAVICISESIKPKYIKKRFSTFNNQLIQFREWLIENNCQNVCMESTGKYYIPVYNALESHISNVVVANPKWVKAIKGEKDDNKDAKWIADLFKFGIVRSSYIPEKDIRILREFTRYQYKLVNIRSSEKNRFQNALTTGNCKLDLVFTDVFGKSASSIVDTILSDEPYTSEDILSKVHGRCKSSTEDILSAVEGTDLNHFQKERSKIVQKHIEYVDSLLDEVQHHIDMMVLAYEDYIQLLMAIPGISRKSAIIIISELGIDVSQWSNARKLAAWAGLAPGRNESAGKKKSVKISKVVSTLNHALFRLHMLLSRIRHAATMQKNLTEFPSVAARSVPS

SEQ ID NO: 11781 - protein, 340 aa, unidentified
  source 1..340: note = protein_ff0a4f3
  REGION 7..149: note = RuvC_domain
  SITE 10: note = RuvC_P1
  SITE 53: note = RuvC_P2
  SITE 88: note = RuvC_P3
  SITE 90: note = RuvC_P4
  SITE 93: note = RuvC_P5
  REGION 209..296: note = Tnp_domain
  SITE 217: note = Tnp_P1
  SITE 247: note = Tnp_P2
  SITE 255: note = Tnp_P3
  SITE 256: note = Tnp_P4
  SITE 268: note = Tnp_P5
MNEITLIGIDLGKHVFHLHAQDVKGHEVFRKKLTRSQLLPFFGNLKTVTVVMEACAGSHWLARQLIAMGHAAKLISPQYVRPFVKSNKNDYIDAEAICEAAARPSMRFVEPRSEAQQTLAALHRVREGLVVERTATINRIHGILLEFGISLPSSKAVLHRLSDALAVNELPRRLAELLHRLHEHYRYLDQQVHDIDKDLTLQLREDENAARLLSIPGIGVVTASLLASEIGNVSQYEGGRNFAASIGLVPKQHSTGGRNVLYGISKRGDKHLRHLLVQCARAVIQRVALRTDRLGEWIRSMLTRRHSNVVACAVANKLARIAWAVLTKHAAYDPSLGCRA

SEQ ID NO: 11782 - protein, 341 aa, unidentified
  source 1..341: note = protein_472eeb5
  REGION 7..149: note = RuvC_domain
  SITE 10: note = RuvC_P1
  SITE 53: note = RuvC_P2
  SITE 88: note = RuvC_P3
  SITE 90: note = RuvC_P4
  SITE 93: note = RuvC_P5
  REGION 209..295: note = Tnp_domain
  SITE 217: note = Tnp_P1
  SITE 247: note = Tnp_P2
  SITE 255: note = Tnp_P3
  SITE 256: note = Tnp_P4
  SITE 268: note = Tnp_P5
MSTVTLVDIDLGKHSFHLHGQDKAGREVFRKKTTRQQMMRLLGNLPNCTVVMEACAGSHFLARQLMAFGHEARLISPQFVRPFVKGNKNDFIDAEAICEAASRPAMRFVTPKTETQQTLSVLHRMRESLVRDRTKTANQAHGFLLEFGISLPKGLSLVRRLPCTLDEHELPPRLTMLLKRLHEHFCYLDEQIKALDKEMDSQLAADDLGSRLLSIPCVGPITASLLCAEMGDGKQYGGSRDFAASVGLVPRQYSTGGRANLLGISKRGDKNLRRLLVQCARVYLQRLEFQQGALADWVRSLRERRHSNVVVCALANKFARIAWAIAANHSEFETEPGAAAA

SEQ ID NO: 11783 - protein, 418 aa, unidentified
  source 1..418: note = protein_a1c01cb
  REGION 25..183: note = RuvC_domain
  SITE 28: note = RuvC_P1
  SITE 82: note = RuvC_P2
  SITE 122: note = RuvC_P3
  SITE 124: note = RuvC_P4
  SITE 127: note = RuvC_P5
  REGION 293..382: note = Tnp_domain
  SITE 301: note = Tnp_P1
  SITE 331: note = Tnp_P2
  SITE 339: note = Tnp_P3
  SITE 340: note = Tnp_P4
  SITE 353: note = Tnp_P5
MTLQVMKRCTGKSIKWSVIYMDPVIGLDVAKGESQVQAFLQRKETYKQSFKFTHDLLGLQTFHNFYQEVEKVSGQPPAVIFESTGHYHEPVLQFLEDKDIAYYLVNPVISFEARKTNLRQVKTDKADAFHLGELYYKEDLEIYQRKTNKALNLRLLTRQHSALTDSYVQIKLQFQVALDQVFPEYHCAFSDLYGKLSLNTLSNYPTAIDIHKVADEKLAEEMSQFGVRRSHAWFLDKAQQLKEAARRNPYQSQISHGQLVSLRMYIQMLFQYQEHLSELLTEINALSNSFEEYRLIQSVPGIGDKIAATILSEIGDINQFEHPKKLVAYAGLDPSVFESGKFKASINRITKRGSSRLRQTLYTAVQCGLAKGRNKKLIAFYDRKRNEGKPHKVALIACANKLVHWIYAMLKRQEVFVD

SEQ ID NO: 11784 - protein, 402 aa, unidentified
  source 1..402: note = protein_5c2b977
  REGION 5..160: note = RuvC_domain
  SITE 8: note = RuvC_P1
  SITE 57: note = RuvC_P2
  SITE 97: note = RuvC_P3
  SITE 99: note = RuvC_P4
  SITE 102: note = RuvC_P5
  REGION 268..354: note = Tnp_domain
  SITE 276: note = Tnp_P1
  SITE 307: note = Tnp_P2
  SITE 315: note = Tnp_P3
  SITE 316: note = Tnp_P4
  SITE 327: note = Tnp_P5
MNLSIGLDWASQTHAVCVLEATGQVGWQGTVEHSAAGLAELLRRLARFGPPAALPVALERPSGLLVDTLLAAGHPVVPIHPNALKASRPRYSAAGSKSDPGDAFILADLLRTDGHRFRRLQPLSDETRALRVLVRGRDDLVAERTALANQLRALLERVWPGAAALFAEVESPISLAFLTRYPTAQSAERLGEKRLARFLGQHSYCGRRSPAELLARLRSAPASDVSDLEAEASRDVVHALVAVLTPLGAQIQQLSAAIVAALAQHPDGPLLQSFPRSGGVNAAQILAELGEDRTRFPTDEQLAAEGGVAPVTRESGKHRQVAFRWACNKRLRQALTTFADHSRQASPWAATIYTAARRRACAHPHAVRILARAWVRVLWRCWQDRRPYDVTFHRAAQRVAAA

SEQ ID NO: 11785 - protein, 371 aa, unidentified
  source 1..371: note = protein_385ee67
  REGION 32..172: note = RuvC_domain
  SITE 35: note = RuvC_P1
  SITE 78: note = RuvC_P2
  SITE 113: note = RuvC_P3
  SITE 115: note = RuvC_P4
  SITE 118: note = RuvC_P5
  REGION 235..320: note = Tnp_domain
  SITE 243: note = Tnp_P1
  SITE 273: note = Tnp_P2
  SITE 281: note = Tnp_P3
  SITE 282: note = Tnp_P4
  SITE 294: note = Tnp_P5
MVWTAPYGIECARMRLLQSQTREPSVNQIIRIGMDTSKHIFQLHGVDSAERPVLRRKLRRSEVLAFFAKLPPTVIGMEACGAAHYWARELRKLGHEVKLMAPQHVKAYVKRNKNDGRDAEGLCEAMSRPTMQFVPVKTEEQQAALMLAGVRQQLIARRTQLSNAIRGYAAEFGLTTAKGLDKIEPLLTRIALDETVPALARELLAIHGQDYARLQIELKAIEVKLMAWHRANACSRRLAQIPGVGPIGATALVMKTPDPRAFRSGRHFAAWLGLTPKDHSTAGKTRLGKITRAGDEMLRSLLVAGATAVIQQVRRGRGRPSAWLLALLKRKPPKLAAVALANKVARIAWKLMTTGESYDGARMPGAQAFAA

SEQ ID NO: 11786 - protein, 363 aa, unidentified
  source 1..363: note = protein_0f2ffa4
  REGION 17..165: note = RuvC_domain
  SITE 20: note = RuvC_P1
  SITE 69: note = RuvC_P2
  SITE 105: note = RuvC_P3
  SITE 107: note = RuvC_P4
  SITE 110: note = RuvC_P5
  REGION 236..321: note = Tnp_domain
  SITE 243: note = Tnp_P1
  SITE 274: note = Tnp_P2
  SITE 282: note = Tnp_P3
  SITE 283: note = Tnp_P4
  SITE 294: note = Tnp_P5
MTTIASDSSRDQIEIAAGVDTHQDTHTVAAVDAAGRLLGHSTFPATGAGYHALLAWLHDLGVVLVVGIEGTGAYGAGLARYLSSQGIEMVEVDRPDRRTRRSAGKSDPIDAEAAARAALAQVRTGTPKAREGKVEALRNLRVARRSAVDQRADCQRRIKTLIVTAPEELRARLRVLSDRELLTTCAALRPDTERVSDPEQATKVALRNLARRHAALVADIAELDALIEPLVAAINPDLLQLNGVGADTAGQLLVTAGENADRLRSEGAFAMLCGVAPIPASSGKIHRHRLNRGGDRQANAALYRIVLCRLRWDPRTQAYMRRRTAEGLSKKDVIRCLKRLIAREMFYVITKTATDNQTLTMAA

SEQ ID NO: 11787 - protein, 319 aa, unidentified
  source 1..319: note = protein_09aa040
  REGION 6..156: note = RuvC_domain
  SITE 9: note = RuvC_P1
  SITE 56: note = RuvC_P2
  SITE 96: note = RuvC_P3
  SITE 98: note = RuvC_P4
  SITE 101: note = RuvC_P5
  REGION 191..277: note = Tnp_domain
  SITE 199: note = Tnp_P1
  SITE 229: note = Tnp_P2
  SITE 237: note = Tnp_P3
  SITE 238: note = Tnp_P4
  SITE 250: note = Tnp_P5
MNPVPVGVDIAKLKFDVAVLLPNQKYKTKKFSNTSAGCREFLNWLARFGNCHVCMEATGCYSTELATLLADNGCCVSLKNPARIHAFASTELARNKTDKSDAALIARYCALHQPAPWYPAPLSERQLTALVRHLRNLEEMRQMEINRLEAADEVIVPSLNEHVAMLDELIEETRKKITRHIDDNPDLKRDRELLKSIPGIGDMLSVSLLAFAGNLRRFSDSKALVAYAGLNPRRCESGMWKGKSRLSKVGHAELRSALYMPAVVAGRCNEVVKSLMDRLAARGKTGKERVCAGMRKLLQLAYGVVKSGHKFNAEIPLAG

SEQ ID NO: 11788 - protein, 401 aa, unidentified
  source 1..401: note = protein_fc9a9ec
  REGION 5..162: note = RuvC_domain
  SITE 8: note = RuvC_P1
  SITE 59: note = RuvC_P2
  SITE 99: note = RuvC_P3
  SITE 101: note = RuvC_P4
  SITE 104: note = RuvC_P5
  REGION 273..362: note = Tnp_domain
  SITE 281: note = Tnp_P1
  SITE 311: note = Tnp_P2
  SITE 319: note = Tnp_P3
  SITE 320: note = Tnp_P4
  SITE 333: note = Tnp_P5
MKYGVGIDISKGKSTVAILSVEGEIIEEPFEIMHDINGLTLLEEKMNKLPKEDLKIVMEETGTYHLPVLGYLLDKNYFVTAENALKIKKYLDRGLRKAKTDKKDSYKLAEYACDNWFKLNKVRENDEIYNELKFLSRQYLSTIAVQVKQKVNFSNLCDLLFPGYYQLLDDNTFILGLEIFKKYFHPEIVKKKKENQFITEIDKMAKKLGHKGAGITLANKIYTLAQNTIPPRPNNQYSQLSASSCVDALIVTIKTTTTIIAEMDKLARELPEYDVINEIPGCGKKLTARVIAEIGDVRRFKNAGSIIAYAGLDAPPYQSGQFEATNRHISKRGNKYLRKTGYEIMKSIKSNAKCENELRTYIIKKENEGKLKKVAKIAGLNKFLRMYYGIVKKKYRELNIW

SEQ ID NO: 11789 - protein, 343 aa, unidentified
  source 1..343: note = protein_ca58ee9
  REGION 7..149: note = RuvC_domain
  SITE 10: note = RuvC_P1
  SITE 53: note = RuvC_P2
  SITE 88: note = RuvC_P3
  SITE 90: note = RuvC_P4
  SITE 93: note = RuvC_P5
  REGION 212..303: note = Tnp_domain
  SITE 220: note = Tnp_P1
  SITE 250: note = Tnp_P2
  SITE 258: note = Tnp_P3
  SITE 259: note = Tnp_P4
  SITE 271: note = Tnp_P5
MQTVTTIGLDIAKSVFQVHGVDAAGQVVVRRQLKRRYVLAFFEKLPPCLIGVEACASSHHWSRELQALGHKVRLMPPAYVRPYVKRQKNDAADAEAICEAVTRANMRFVETKTPEQQSCLMLHRTRHLFIRQQTAVINAIRAHLAEFGIVAPVGRNGVEELLGVVADASDKRLPEIARACLAALGAQLRMLKAQILEFDRMINAWHRSNETSKRLDEIPGVGPALATALVASVADPRAFRSGRDFSAWIGLVPKQHSSGGKDKLGGISKQGDRYLRSLFTAGALAVIRYAKIHGAKHRPWLTALLARRPTKVAAVALANKIARMAWAMMARGERYKEPVALAA

SEQ ID NO: 11790 - protein, 323 aa, unidentified
  source 1..323: note = protein_e42aeb5
  REGION 9..153: note = RuvC_domain
  SITE 12: note = RuvC_P1
  SITE 56: note = RuvC_P2
  SITE 96: note = RuvC_P3
  SITE 98: note = RuvC_P4
  SITE 101: note = RuvC_P5
  REGION 191..276: note = Tnp_domain
  SITE 199: note = Tnp_P1
  SITE 228: note = Tnp_P2
  SITE 236: note = Tnp_P3
  SITE 237: note = Tnp_P4
  SITE 248: note = Tnp_P5
MAKRITICAGIDTGKDKLDVAIDGSSEQLRVDNTAEGHQALVEWLKGHKVKRIGIEASGGYEQAVVAELRRRRFVVILFQPKQVRAYGTFHRLLAKNDRIDAALIAMCTAAVKTIHPAPDPRLQPLAEHLTMVEQLTEDIARLKNRLESCRDKRIQGLWKEQIALLAKSKRAEFKALVAAIRKHPDFAARLDLIHSVAGCGRPTAVAVLVRMPEIGNVTREQAAALSGLAPYDDDSGNRVGARHITGGRERLRRALYTAAFPASFRWNPQLMGLYSRLIAAGKCHKSALVACARKLLVIINAVVARGTPWGAQAPQNAKLSVA

SEQ ID NO: 11791 - protein, 319 aa, unidentified
  source 1..319: note = protein_9cce376
  REGION 5..154: note = RuvC_domain
  SITE 8: note = RuvC_P1
  SITE 52: note = RuvC_P2
  SITE 92: note = RuvC_P3
  SITE 94: note = RuvC_P4
  SITE 97: note = RuvC_P5
  REGION 193..280: note = Tnp_domain
  SITE 201: note = Tnp_P1
  SITE 231: note = Tnp_P2
  SITE 239: note = Tnp_P3
  SITE 240: note = Tnp_P4
  SITE 253: note = Tnp_P5
MGKIIGIDISKQVFDVSFLEGNLWKHKVLSNKLLGFEKLITFIEKEDIVVMEASGTYYLPLAEYLYSQGINVVIENPLSIKRYAQSRLKRAKTDKADSKVIAEYGKKNLDELSLWNPESKTCIRIRQMHTRIQMIQKQTSQTYNQLEAFRSSGFLDEKLEIEMNNSIEQLRLGKEILESEIERLALEEFEQTIECLTSIPGIGIKTAIMLIVITDNFKKFEHHKQLIAFVGFSPRIYESGSSVRGRSSICKMGKSQIRKLLYLCSWSAKRWNKKCKEMYERLITKGKAERVAKIALANKLLKQAFAIGKNKEKYREDFC

SEQ ID NO: 11792 - protein, 391 aa, unidentified
  source 1..391: note = protein_76e9904
  REGION 4..163: note = RuvC_domain
  SITE 7: note = RuvC_P1
  SITE 60: note = RuvC_P2
  SITE 101: note = RuvC_P3
  SITE 103: note = RuvC_P4
  SITE 106: note = RuvC_P5
  REGION 266..353: note = Tnp_domain
  SITE 274: note = Tnp_P1
  SITE 304: note = Tnp_P2
  SITE 312: note = Tnp_P3
  SITE 313: note = Tnp_P4
  SITE 326: note = Tnp_P5
MIYVGIDVAKDKHDCFITNSDGEALFNVFTIPNNADGFHNLYQKISSLTNDFSNVKVGLEATGHYNYNLLGFLMDKGLPTFVINPLHTNLFRKSLSLRQTKTDKVDAHTIALMMMSGVNLQSYSDTSYHNEELKSLTRYRFDKVKERAKLKTSLSRLVNILFPELEKLVPTLHMVSVYALLAEFPSSSQIASCHLTRLTNLLENTSKGHYTKEKAIEIRNAARQSIGSNMPAKSLELKHTIRLIQELSYEIDEIECSIKSIMDDIRSPILSIPGINYRMGAMIIAEIGDFNRFSSPDKILAYAGLSPSTYQSGQLDSCYSHMEKRGSRYLRYALFNATKFVCIWDNQFSAYLAKKRSEGKHYNVAISHAAKKLVRVIYQLEKSGQLYHKAA

SEQ ID NO: 11793 - protein, 403 aa, unidentified
  source 1..403: note = protein_b30277f
  REGION 4..160: note = RuvC_domain
  SITE 7: note = RuvC_P1
  SITE 57: note = RuvC_P2
  SITE 97: note = RuvC_P3
  SITE 99: note = RuvC_P4
  SITE 102: note = RuvC_P5
  REGION 274..361: note = Tnp_domain
  SITE 282: note = Tnp_P1
  SITE 312: note = Tnp_P2
  SITE 320: note = Tnp_P3
  SITE 321: note = Tnp_P4
  SITE 334: note = Tnp_P5
MNAVGIDVSKGKSMVSVLRPFGEVVATPFEVRHTAIELKKLADYLKSLDGETRIILEHTGRYYEPVAQLLHDSGLFVSAVNPKLIKDYGNNSLRKVKTDKADSRKIARHGLDNWVELRQHTPIDTIRYQLKTMNRQYSLYSKSKVSMKNNLISLLDQTFPCVNTLFSSPAREDGSQKWVDFATSFWHLDCVRGLSLASFTQHYQKWCKRYGYNFSNGKAAEIHESTKNQIAMLPKDTMTKMLVHQAIEQLNAASRAVESLRTEMHHLAQQLPEYPVVMAMGGVGKSLGPQLMAEIGDVTRFAHKGSLAAYAGVDPGANQSGTREAKSTASSKSGSPELRKTLFMIMSVLLQNSLANDPVFQFLDKKRAEGKPYYVYMTAGANKFLRVYYGRVKEYLLSFEAAD

SEQ ID NO: 11794 - protein, 344 aa, unidentified
  source 1..344: note = protein_1647d14
  REGION 6..146: note = RuvC_domain
  SITE 9: note = RuvC_P1
  SITE 52: note = RuvC_P2
  SITE 86: note = RuvC_P3
  SITE 88: note = RuvC_P4
  SITE 91: note = RuvC_P5
  REGION 209..296: note = Tnp_domain
  SITE 217: note = Tnp_P1
  SITE 247: note = Tnp_P2
  SITE 255: note = Tnp_P3
  SITE 256: note = Tnp_P4
  SITE 268: note = Tnp_P5
MKLSACGIDLAKTVFQVHGVDLHGKPCLRKQLRRAEMLTFFVKIEPCLTGMEACGSAHYWARMSEMGPTVKLMAPQFVKPYVKTNKNDVADAEAICEAVTRPNMRFVAIKTEQQALLAIHRARQGFVKARTAQANQIRGLLAEFGIVMPQGLCNLGPRLASLCDESTGQLPGSFCALLQRLAENLKELDCQVEELGKEIQLWHAHSEASRRLAEIPGIGPITASALVASIGDAHCFKNGRQLAAWLGLVPRQHSSGGKQVLLGISKRGDCYLRTLLIHGACAVLRHAERKVETATSWLGRLLSRRNKNVAAVALANKNARRVWALLMHDDRRFHSDYVPASAGT

SEQ ID NO: 11795 - protein, 311 aa, unidentified
  source 1..311: note = protein_97f83eb
  REGION 6..156: note = RuvC_domain
  SITE 9: note = RuvC_P1
  SITE 53: note = RuvC_P2
  SITE 92: note = RuvC_P3
  SITE 94: note = RuvC_P4
  SITE 97: note = RuvC_P5
  REGION 188..272: note = Tnp_domain
  SITE 196: note = Tnp_P1
  SITE 225: note = Tnp_P2
  SITE 233: note = Tnp_P3
  SITE 234: note = Tnp_P4
  SITE 245: note = Tnp_P5
MTDHTIGVDISKSHLDVFRLEDGAAQRFENAAAGFRALVKWLGKAPVARVVFEPTGAYHKAFEVALGEKFPLVKVNPLQARRFAEAHGTRAKTDAVDAQMLARMGAAFDLAPQAPCSKEMRVLKELHVARAGLIKDRTRLRNRAQTQDIAVLKRQTKARLILVERQIAELDAEIAERIEAEQTTARSRDILCSMPGIGAVTAAAMLTLMPEIGTLERKQVASLAGLAPITRQSGQWQGKAFIGGGRKPLRDALYMPALVAMRVNPDLKAKYAALRDAGKPAKVAIVAVMRKLIEMANALVKADRKWTSETA

SEQ ID NO: 11796 - protein, 341 aa, unidentified
  source 1..341: note = protein_250fc27
  REGION 7..148: note = RuvC_domain
  SITE 10: note = RuvC_P1
  SITE 53: note = RuvC_P2
  SITE 88: note = RuvC_P3
  SITE 90: note = RuvC_P4
  SITE 93: note = RuvC_P5
  REGION 211..298: note = Tnp_domain
  SITE 219: note = Tnp_P1
  SITE 249: note = Tnp_P2
  SITE 257: note = Tnp_P3
  SITE 258: note = Tnp_P4
  SITE 270: note = Tnp_P5
MVEVSTVGIDLAKSVFQVHGSDRSGVVLFRKKLRRDQLLPFMATLPRSLVAMEACSSAHYWAREIAAVGHDTKLIPPAYVKPFVKRQKNDMADAEAICEAAQRPTMRFVQGKSAQAQASAVVFRTRDLLVRQRTQLINAIRGHLTEFGYVVRQGAGHVGKLVEIIADPQSDIPAEARPVLAIIAQSLEGLQAQIAQLDREIASRAKADPVAKQLMTIPGVGPVIATALVALAPAAGTFRRGRDFAAWLGLVPRQHSSGGKERLGRTTKMGERSLRRLLILGASSATKVAARNPEKASAWLVGMLARKPRMLVTVALANKMARIVWALMAHGGTYRAPAAAV

SEQ ID NO: 11797 - protein, 391 aa, unidentified
  source 1..391: note = protein_62893fd
  REGION 9..162: note = RuvC_domain
  SITE 12: note = RuvC_P1
  SITE 60: note = RuvC_P2
  SITE 101: note = RuvC_P3
  SITE 103: note = RuvC_P4
  SITE 106: note = RuvC_P5
  REGION 224..309: note = Tnp_domain
  SITE 232: note = Tnp_P1
  SITE 262: note = Tnp_P2
  SITE 270: note = Tnp_P3
  SITE 271: note = Tnp_P4
  SITE 282: note = Tnp_P5
MDTASRVVIGMDPHKRSVTIEVMTKDETIVGTGRFATDRDGHAAMRRYVQAWPDRVWAIEGCQGIGRHVANRLLAEGEQVVDVPPKLSARARVFATGQGRKTDATDAHSVALVGTRMSGLRPVVDNEDLAVLRILVDRRRSLGEEHTRKMSQVHHLLLELIPGGAKKDLSAAQAKKLLATVRPRDAAGKTRRRVAAELIADLERIYQRKKAANKELTALVAATSTTLMALNGIGPSGAARLLVEVGDITRFPDKNHFGSWTGTAPIDASSGDNVRHRLSRGGNRQINRVLHIMATVQLRNPTEGRDYFDRSKARGKTSNESMRLLKRRLSDIVYRTMVNDAARHIGTGPGGQRGDDSDSSAAGSQPHTNSSDKPLPGPATTDPRTPFPAAS

SEQ ID NO: 11798 - protein, 334 aa, unidentified
  source 1..334: note = protein_5f10b46
  REGION 7..149: note = RuvC_domain
  SITE 10: note = RuvC_P1
  SITE 53: note = RuvC_P2
  SITE 88: note = RuvC_P3
  SITE 90: note = RuvC_P4
  SITE 93: note = RuvC_P5
  REGION 209..296: note = Tnp_domain
  SITE 217: note = Tnp_P1
  SITE 247: note = Tnp_P2
  SITE 255: note = Tnp_P3
  SITE 256: note = Tnp_P4
  SITE 268: note = Tnp_P5
MENIALIGIDLGKNSFHIHCQDRHGKAVYRKKFTRPKLFEFLATCPTTTIVMEACGGAHFMVRKLLELGHTPKLISPQFVRPFVKSNKNDFVDAEAICEAASRPSMRFVQPRTESQQAMHTLHRVRESLVRDKVKTTNQIHAFLLEFGISAPKGPTLIKRLAEILEENPLPPYLVRLLQKLRDHYDYLIEQIKELESQLKISLDEDTTAQCLLTIPCVGPLTASLLSTQLGDGKQYGSSRDFAASTGLVPRQHSTGGRNTLLGISKRGNKKLRALLVQCARVYLRTLEYRSGQLADWVRELLLRKNNFIVTCALANKLARIAWALTTRHKAFEA

SEQ ID NO: 11799 - protein, 361 aa, unidentified
  source 1..361: note = protein_76fb172
  REGION 13..160: note = RuvC_domain
  SITE 16: note = RuvC_P1
  SITE 65: note = RuvC_P2
  SITE 101: note = RuvC_P3
  SITE 103: note = RuvC_P4
  SITE 106: note = RuvC_P5
  REGION 234..316: note = Tnp_domain
  SITE 238: note = Tnp_P1
  SITE 269: note = Tnp_P2
  SITE 277: note = Tnp_P3
  SITE 278: note = Tnp_P4
  SITE 289: note = Tnp_P5
MPTIADAGPPVTGGVDTHAEVHVAGVADQTGRVLGVKEFPATAQGYAAALAWMRGHGDLVKVGVEGTGSYGAGLARYLAAQGIEVAEVMRPNRQARRRRGKSDAADAIAAALAALNGEASGQPKSGDGAVESIRALQVARRGAVKARTQAGNQLRDLIITAPQLLREKLAALPSPERVKLTARFRPGALTCPAEAAKAAMATVARRHQALTAEIAQLDTALEALLEHAAPPGFLARTGVGARVAAALLVTTGDNPGRLRTEASFAALCGASPVDASSGKQRRHRLNRGGDRQANSALWRIVFTRIACDPRTQAYVARRTAEGKTTREIIRCLKRYVAREVYKVLTARPATQPAPATPRQIQ

SEQ ID NO: 11800 - protein, 350 aa, unidentified
  source 1..350: note = protein_22389b4
  REGION 6..148: note = RuvC_domain
  SITE 9: note = RuvC_P1
  SITE 52: note = RuvC_P2
  SITE 87: note = RuvC_P3
  SITE 89: note = RuvC_P4
  SITE 92: note = RuvC_P5
  REGION 211..297: note = Tnp_domain
  SITE 219: note = Tnp_P1
  SITE 249: note = Tnp_P2
  SITE 257: note = Tnp_P3
  SITE 258: note = Tnp_P4
  SITE 270: note = Tnp_P5
MKITRLGIDLAKQVFQLHGVDERGHRVLRRQVRRAQLLEYLARLEPCLIGMEACAGAHHWARRLRELGHDVRLIAPQFVKPYVRGNKNDANDAEAICEAVGRPDMRFVRIKTVAQQDIQALHRVRSERVTSRTALVNQIRGLVGEYGIAIAQGVRQVRVALPVLIENADERLSEAFVQILSEQYDDLVALDERIARLDAQIERIAREDGAARRLMSLRGVGPITATALVASLGDGRQFARARQASAWAGIVPAQHASGGKQRLLGISKRGDAYVRTLLIHGARSVIKNCAHKDDALSCWVQALCARRNKNVAAVALANKTLRMAWALLVRGGEYDPEHARTRTEEPVGVA

SEQ ID NO: 11801 - protein, 319 aa, unidentified
  source 1..319: note = protein_8c57724
  REGION 3..148: note = RuvC_domain
  SITE 6: note = RuvC_P1
  SITE 50: note = RuvC_P2
  SITE 90: note = RuvC_P3
  SITE 92: note = RuvC_P4
  SITE 95: note = RuvC_P5
  REGION 189..273: note = Tnp_domain
  SITE 197: note = Tnp_P1
  SITE 226: note = Tnp_P2
  SITE 234: note = Tnp_P3
  SITE 235: note = Tnp_P4
  SITE 246: note = Tnp_P5
MLVGIDVAKAELVVATRPLGERWTVENAERGVRTLIERLGRDGATLIVLEATGGYEMLCVAALAAANLPVVVVNPRQVRDFARATGQLAKTDRIDADILALFAERVRPEVRALPDAAAQELDALLARRRQLLEMLQAERNRLGQVFGRGKAPVKKSLKAHIAYLERELRMTDTDLGEMVHDSPAWRARDDLLQSVPGVGPVRSLTLLAELPELGRLSRREIAKLVGVAPLSRDSGTLRGRRFVQGGRASVRAVLYMAALVATKRNAVIRAFYLRLLTAGKPKKLALVACMRKLLTILNTIVRTGERWAAEHTNTELIPA

SEQ ID NO: 11802 - protein, 411 aa, unidentified
  source 1..411: note = protein_b3b3781
  REGION 5..163: note = RuvC_domain
  SITE 8: note = RuvC_P1
  SITE 62: note = RuvC_P2
  SITE 102: note = RuvC_P3
  SITE 104: note = RuvC_P4
  SITE 107: note = RuvC_P5
  REGION 273..372: note = Tnp_domain
  SITE 281: note = Tnp_P1
  SITE 311: note = Tnp_P2
  SITE 319: note = Tnp_P3
  SITE 320: note = Tnp_P4
  SITE 333: note = Tnp_P5
MNPVVGLDVAKGESQVQMFLDKKMPYKNSVKVEHTVDGLKELYSYLLDLEHQTGMKPPVVLESTGHYHAPVVQFLEAREYIVIIVNPLVSYRAKSSSLRKTKTDAIDAYHLGELYYKEDLEPQKKRGVQLLNLRHLTRQHENMTGIMVQTKLQFQSVLDQVFPEYKGVFGDLYAEVSLRTLQTFPISETVLKTCVEEIAQFIDRHCKARSFNWALEKAEGLIAAAERNPFQSTRYQSLLVSLNMYIDLLQVYHQQLSTLEREIDQLAVQLEEYELLQTIPGVGEKIAATIISEIGEIDRFSHPKKLVAFAGLDPSVFESGRFKGTKNHITKRGSARLRHMLFTAVRCSIRDSRKKKTTEETIARNMRLRAFYDLKREEGKPYKVAIIACANKLLHWIYAMLKTKTPFQETI

SEQ ID NO: 11803 - protein, 341 aa, unidentified
  source 1..341: note = protein_15c38ef
  REGION 7..148: note = RuvC_domain
  SITE 10: note = RuvC_P1
  SITE 53: note = RuvC_P2
  SITE 88: note = RuvC_P3
  SITE 90: note = RuvC_P4
  SITE 93: note = RuvC_P5
  REGION 211..295: note = Tnp_domain
  SITE 219: note = Tnp_P1
  SITE 249: note = Tnp_P2
  SITE 257: note = Tnp_P3
  SITE 258: note = Tnp_P4
  SITE 270: note = Tnp_P5
MGQVSTVGLDLAKSIFQAHGADVSGEVVFRKKLGRGRLLAFFAGLPPCVVAMEACSGAHYWGRELARQGHTIRLIPPIYVKPFVKRQKNDMADAEAICEAAQRPSMRFVPVKQEAQQASGVVFRARDLLVRQRTQLINALRGHLAEYGWIVPKGVPHVDRLIARVEDPAEALPTAARTILLVLVSTLRTLDQQIAILDVEIASRARHDPVARRLMTIPGIGPITATALIALAPSHEAFKSGRHFAAWLGLTPRQRSTGGQQKLGAITKMGERTLRRLLTIGASAVIKQAVIRGAPAGSWLDQMLARKPKMLVIVALANKNARIVWALLAKGDVYRAPGVPA

SEQ ID NO: 11804 - protein, 391 aa, unidentified
  source 1..391: note = protein_4ae7dbe
  REGION 4..163: note = RuvC_domain
  SITE 7: note = RuvC_P1
  SITE 60: note = RuvC_P2
  SITE 101: note = RuvC_P3
  SITE 103: note = RuvC_P4
  SITE 106: note = RuvC_P5
  REGION 266..353: note = Tnp_domain
  SITE 274: note = Tnp_P1
  SITE 304: note = Tnp_P2
  SITE 312: note = Tnp_P3
  SITE 313: note = Tnp_P4
  SITE 326: note = Tnp_P5
MISVGIDVSKDKHDCFIVNSEGEVLADVFTIPNTMDGFNSLLQRVRECTTPQDKIKVGLEATGHYSYNLLGFLLDNGLATYVLNPLRTNLYRKSLSLRKTKTDRVDARTIAAMLLSDVGLKPYTDTAYHNEELKSLTRYRFDKVKERAKLKSSISRLICILFPELEKLVSSLHTASVYTLLEEFPGAKQVAGAHLTRLRSLLETASKGHYKRDMALEIRDAARNSIGSWMPAKSLELQHTIRLIRELDTEIAEIEEQIRSIMDELHSPITTIPGLGFRMAAMILAEVGDFTRFDSPDKLLAYAGMSPSTYQSGQLKNCYPHMEKRGSRYLRYALFNATKYVCHWDPAFAAYLAKKRAEGKHYNIALSHATKKLVRLIFALEKSGTPYRSVV

SEQ ID NO: 11805 - protein, 399 aa, unidentified
  source 1..399: note = protein_d987d15
  REGION 4..163: note = RuvC_domain
  SITE 7: note = RuvC_P1
  SITE 60: note = RuvC_P2
  SITE 101: note = RuvC_P3
  SITE 103: note = RuvC_P4
  SITE 106: note = RuvC_P5
  REGION 266..348: note = Tnp_domain
  SITE 274: note = Tnp_P1
  SITE 304: note = Tnp_P2
  SITE 312: note = Tnp_P3
  SITE 313: note = Tnp_P4
  SITE 326: note = Tnp_P5
MIYVGVDVAKDKHDCFIMSSEGEILFDVFTIPNSMGGFDDLFSKITSASGDLEKVKVGLEATGHYSYNLLGFLLDKGLSPFVINPLHTNLYRKSLSLRKTKTDKVDARTIAVMLASDVSLKSYTDTAYHNEELKSLTRYRFTKVKERAKLKSSISRLVNILFPELEKLVPSIHMVSVYALLSEFPGAHHVASAHMTRLKSLLHDASKGRYDRDKAVEFRDAARNSIGSRMPAKSLEMKHTISLIRELDSEIEEIESAIKGIMDEMASPILTIPSIGYRMGAMILAEIGDFSRFESPDKILAYAGLSPSTYQSGQLTSSYSHMEKRGSRYLRYALFNASKFVCHWDVHFCGLSCKETFRWQALQCGDFSCSEEIGQIDICFRKIPAALHANCLILQYSIF

SEQ ID NO: 11806 - protein, 329 aa, unidentified
  source 1..329: note = protein_4b467b2
  REGION 7..160: note = RuvC_domain
  SITE 10: note = RuvC_P1
  SITE 59: note = RuvC_P2
  SITE 97: note = RuvC_P3
  SITE 99: note = RuvC_P4
  SITE 102: note = RuvC_P5
  REGION 200..287: note = Tnp_domain
  SITE 208: note = Tnp_P1
  SITE 238: note = Tnp_P2
  SITE 246: note = Tnp_P3
  SITE 247: note = Tnp_P4
  SITE 260: note = Tnp_P5
MEIIDVIGIDVSKLTLDCCIHSNGLQRKFANHPKGIAKMAKWSLAKSKVKKENLLFILEHTGLYSDRLVHMLAEDDCLMKVVSGLEIKRSLGITRGKDDRADARRIALYGYRTREEGRPSKLPSATLVRLKRLMSLRRKLVGQRAGHMATLREQKKVLEEDALLFWVQEDIINLLTWRINDLEREMDNLMQEDTELREMLRLLVGIKGIGKVTARFLIVYTSGFTSFGSWRKFASYCGIAPFPHTSGTSVKGRSKVSRLANLEGKSLLHQCALSAVKSSPEMKIYYERRLEMGKSKMSTLNIIRNKLVARAFAVVNRGTPYVNTMKYAS

SEQ ID NO: 11807 - protein, 401 aa, unidentified
  source 1..401: note = protein_eb5e886
  REGION 9..165: note = RuvC_domain
  SITE 12: note = RuvC_P1
  SITE 63: note = RuvC_P2
  SITE 103: note = RuvC_P3
  SITE 105: note = RuvC_P4
  SITE 108: note = RuvC_P5
  REGION 271..358: note = Tnp_domain
  SITE 279: note = Tnp_P1
  SITE 310: note = Tnp_P2
  SITE 318: note = Tnp_P3
  SITE 319: note = Tnp_P4
  SITE 331: note = Tnp_P5
MVVRQHLWAGIDAGKSAHHCVVIDTDGKRRLSRRIANDEPALLDLIEAVTGLVDNAEVTWAIDLNHGGAALLIALLLGRDQRLLYIPGRTVHWASGTYRGDGKTDAKDAAIIADQARMRRDLQPLRVGDEAAIELRILTSRRTDLGCDRTRAINRLRAQLLEYFPALERAFDLAHNKAALILLTGYQTPDGLRAIGTARLEAWLRKRKARNSARVASAAVEAARSQRTAVPGQRLGAAMVARLAQEVIQLDIEIAEIEAMIEQRFRRHRHAETIVSMPGFGALLGAEFIAATGGDMTVFNSVDRLAGVAGLAPVPRDSGRVSGNLKRPRRYDRRLLRACYLAAQIAAIHDPVSRGYYQRKRTEGKNHTQAVIALARRRLNVLWAMLRTRTPYQPAPGTVPA

SEQ ID NO: 11808 - protein, 366 aa, unidentified
  source 1..366: note = protein_92e4f9c
  REGION 7..155: note = RuvC_domain
  SITE 10: note = RuvC_P1
  SITE 60: note = RuvC_P2
  SITE 96: note = RuvC_P3
  SITE 98: note = RuvC_P4
  SITE 101: note = RuvC_P5
  REGION 221..299: note = Tnp_domain
  SITE 229: note = Tnp_P1
  SITE 259: note = Tnp_P2
  SITE 267: note = Tnp_P3
  SITE 268: note = Tnp_P4
  SITE 280: note = Tnp_P5
MKRKVYVGMDVHKETIQIAYLTSNSKEILKEQQIKHNEVQIKKFIKKLKTEWNEIHCCYEAGVTGYPLYRYLKSLGVNCILVAPGKIPRQNTDKIKTDKRDAIKLARLMRSGELESIHVPSEEDEAVRDYLRSRDSLRLDLGRNRQRLMKFLLRKDIKYSTTKYWTVSHYKWLNNLHFNNEILQETFNDYYSRVRVQEENLKAMDKKIQEIAESEPYREKVGILRCFRGVDYLTAMFLLCEVNDFKRFKTAGSFMSFLGLVPGEYSSGSKRKQTGITKTGSPRLRRILTEAAWQHRFPGTGSKIITARRSGQPALVVALAEKASLRLHKKFRNLQRKNSSSDDNGSFKRVIRISLGGNESCSLKLE

SEQ ID NO: 11809 - protein, 392 aa, unidentified
  source 1..392: note = protein_dd4826a
  REGION 4..163: note = RuvC_domain
  SITE 7: note = RuvC_P1
  SITE 60: note = RuvC_P2
  SITE 101: note = RuvC_P3
  SITE 103: note = RuvC_P4
  SITE 106: note = RuvC_P5
  REGION 267..354: note = Tnp_domain
  SITE 275: note = Tnp_P1
  SITE 305: note = Tnp_P2
  SITE 313: note = Tnp_P3
  SITE 314: note = Tnp_P4
  SITE 327: note = Tnp_P5
MIYVGIDVAKDKHDCFLTNSDGEVLFKSFTIPNNRKGFETLFQRVESASDDLTKVKVGLEATGHYSYNLLGFLLDKGLTTYVINPLHTNLYRKSLSLRKTKTDKVDSRTIATMMMSDMNLKSYSDTSYHNEELKSLTRYRFDKVKERAKLKSSVSRLICILFPELEKLVPTLHIASVYALLSEFPSADAVANAHLTRLSNLLSESSKGRYGKDTAVMFRDAARSSIGSHMPAKSLELKHTIKLIQELTAEIDEIEAAIKRIMDEEIQSPILTIPGISYRMGAMILAEIGDFSRFDSADKILAYAGMSPSTYQSGQLDNCYSHMEKRGSRYLRYALYNATKYVCHWDKSFGAYLEKKRSEGKHYNVALSHAAKKLVRLIFAMEKSGKAYLPVA

SEQ ID NO: 11810 - protein, 338 aa, unidentified
  source 1..338: note = protein_e8ca18e
  REGION 6..145: note = RuvC_domain
  SITE 9: note = RuvC_P1
  SITE 51: note = RuvC_P2
  SITE 86: note = RuvC_P3
  SITE 88: note = RuvC_P4
  SITE 91: note = RuvC_P5
  REGION 210..296: note = Tnp_domain
  SITE 218: note = Tnp_P1
  SITE 248: note = Tnp_P2
  SITE 256: note = Tnp_P3
  SITE 257: note = Tnp_P4
  SITE 269: note = Tnp_P5
MNTNAVGLDIAKNIFHLYSLGTDGKATKKKLKRADLLRFFANYPVSLIGIEACGGAHYWARELTKLGHEVVLLNARYVKGFVVGNKNDFNDAQAIHEAVLRPNKRVVKVKTEEQQDMQLLHNIRQDLVDKRTALVNQLRGLLMERGIVIPKGINHVRKELPFILEDAENGLTHLSRELFAEHYQQLKELDQAIKSHDQRIGRLCQQNRLSKRFLDVPGVGIITASIIAADIGDGKAYASGRDYAASLGVVPKQHSSGDKQVYLGVSKRGNRYIRKMLIHGARSVLKTCSGKTDKLSVWLQALIERRGFNKATVALANKNARILWAMASQDKGYEVRAA

SEQ ID NO: 11811 - protein, 323 aa, unidentified
  source 1..323: note = protein_7b97d44
  REGION 8..150: note = RuvC_domain
  SITE 11: note = RuvC_P1
  SITE 52: note = RuvC_P2
  SITE 92: note = RuvC_P3
  SITE 94: note = RuvC_P4
  SITE 97: note = RuvC_P5
  REGION 191..278: note = Tnp_domain
  SITE 199: note = Tnp_P1
  SITE 229: note = Tnp_P2
  SITE 237: note = Tnp_P3
  SITE 238: note = Tnp_P4
  SITE 251: note = Tnp_P5
MYKDIKYFGIDISKSVFDVTDSDGNYWQFKNSFSGFNKFVKLLTVTSHCVMEATGYYHYKLAYYLVEKGIKVSVENPLSVKRFIQMKLSKIKTDKSDSKLICEYGKQVDLKLWCGQSKEQQECLQITRLLSVYTKQSTMLKNKIHGEEVLGIPSNSVLRSIVRSLKHLKKEIKVLEEKLLILLKKEHQDLLTRLETIPGIGKKTAIMLVVLTDGFERFASGSELCSYSGLTPIIRQSGSSVKGRARISKIGNVKLRNLLFMCSFNACKYNKSCRELYQRIVAKGKSKKLALIAVCNKLLKQAFAIAKSGLIYDETYRSTLIKN

SEQ ID NO: 11812 - protein, 310 aa, unidentified
  source 1..310: note = protein_5c540ff
  REGION 5..149: note = RuvC_domain
  SITE 8: note = RuvC_P1
  SITE 51: note = RuvC_P2
  SITE 91: note = RuvC_P3
  SITE 93: note = RuvC_P4
  SITE 96: note = RuvC_P5
  REGION 187..271: note = Tnp_domain
  SITE 195: note = Tnp_P1
  SITE 224: note = Tnp_P2
  SITE 232: note = Tnp_P3
  SITE 233: note = Tnp_P4
  SITE 244: note = Tnp_P5
MDDTIGVDISKPTLDAFCLRTREHRQFPNDRAGCAALVRWIGTSAVRVVFEPTGPYHRLFEASLVAAGIEAVKVNPRSSRRFAEATGELAKTDRIDAAILARMGAVLDLEGRPAKTETLHDLRELGVARQALVKDRIAATNREQIAVNPVIKRQLRARLKQIGMQLKEIDTAIATLVGSDPGLSRRRDVLASIPGIGAVTAMAILIEMPELGTLENKQAASLAGLAPMTRQSGTWSGRARIRGGRRSLRTALYMPALVALRFNPDLKQKYQALKDAGKPSKVAITAIMRKLLILANALLRDDRKWNAKAA

SEQ ID NO: 11813 - protein, 352 aa, unidentified
  source 1..352: note = protein_c6f90b0
  REGION 6..147: note = RuvC_domain
  SITE 9: note = RuvC_P1
  SITE 52: note = RuvC_P2
  SITE 87: note = RuvC_P3
  SITE 89: note = RuvC_P4
  SITE 92: note = RuvC_P5
  REGION 213..301: note = Tnp_domain
  SITE 221: note = Tnp_P1
  SITE 251: note = Tnp_P2
  SITE 259: note = Tnp_P3
  SITE 260: note = Tnp_P4
  SITE 272: note = Tnp_P5
MQVTTIGLDLAKSVFQVHGVDAAGRVVVAKPLRRGQMAKFFADLRPCLIGMEACATRHHWARELRKHGHDVRLLPPAYVKPYVRRGKNDAADAAAICEAVTRPSMRFVPVKTIEQQSALMAHRARDLLIRQRTQTLNALRGHLAELGLIAAQGREGMATLVGIVRTETEGGQALPAAVRAALSPLVAQLEALQQQIAALDKVIRRQHRADEASRRLETIPGIGVIGATAIAATITDPRAFRSGRDLAAWIGLVPRQNSSGGKERLGGISKQGDRYLRKLLVGGAAAVVQQARRHPDKHPWLMELLARRPAKVAIVALANKMARVAWAVLARGETYRAPVPAATAAKGSAMAA

SEQ ID NO: 11814 - protein, 253 aa, unidentified
  source 1..253: note = protein_2224950
  REGION 6..148: note = RuvC_domain
  SITE 9: note = RuvC_P1
  SITE 52: note = RuvC_P2
  SITE 87: note = RuvC_P3
  SITE 89: note = RuvC_P4
  SITE 92: note = RuvC_P5
  REGION 211..247: note = Tnp_domain
  SITE 219: note = Tnp_P1
MKVSTLGIDLAKNVFQLHGVGCNGQTVLKKKLTRDKFLPFLMQLEPCLIGMEACASSHHFARVLRQYGHEVKLIPPQYVKPYVKTNKTDAADAEAICEAVARPNMRFVQIKTAEQQAILVLHTERNILIRERTACANSMRAILAEFGIIMPRTLSQLYKKIPEILEEYDNELSPFVRCSVARQLEHLQGVEDQITLIEQELSRWAKTQPACQRVMKIPGVGLMTATYLVASVGNGQQFHSAKQFAAERVLKWR

SEQ ID NO: 11815 - protein, 391 aa, unidentified
  source 1..391: note = protein_52785e4
  REGION 4..163: note = RuvC_domain
  SITE 7: note = RuvC_P1
  SITE 60: note = RuvC_P2
  SITE 101: note = RuvC_P3
  SITE 103: note = RuvC_P4
  SITE 106: note = RuvC_P5
  REGION 266..353: note = Tnp_domain
  SITE 274: note = Tnp_P1
  SITE 304: note = Tnp_P2
  SITE 312: note = Tnp_P3
  SITE 313: note = Tnp_P4
  SITE 326: note = Tnp_P5
MICVGIDVAKDKHDCFIISSEGVVLADVFTIPNNTEGFNCLLQKIRACSAGQGRIKVGLEATGHYSYNILGFLLDNGLDSFVINPLHTNLYRKSLSLRKTKTDRVDARTIAAMLMSDVGLKPYTDTAYHNEELKSLTRYRFDKVKERAQLKQSVSRLVCILFPELEKLVPTLHMATVYALLDEFPGARQIADANLTHLKTVLHDASKGRYGRDRTMEIREAARVSVGSVMPAKSLELRHTIRLIRELDAEIEEIESAIRHIMDQLHSPITTIPGIGNRMGAMILAEVGDFSRFDSPDKVLAYAGLSPSTYQSGQMANCYAHMEKRGSRYLRFAIFNAAKYVCRWDPAFAAYLAKKRAEGKHYNVAISHAAKKLVRLIYALEKSREPYRLAA

SEQ ID NO: 11816 - protein, 338 aa, unidentified
  source 1..338: note = protein_b0fdb0b
  REGION 7..149: note = RuvC_domain
  SITE 10: note = RuvC_P1
  SITE 53: note = RuvC_P2
  SITE 88: note = RuvC_P3
  SITE 90: note = RuvC_P4
  SITE 93: note = RuvC_P5
  REGION 211..297: note = Tnp_domain
  SITE 219: note = Tnp_P1
  SITE 249: note = Tnp_P2
  SITE 257: note = Tnp_P3
  SITE 258: note = Tnp_P4
  SITE 270: note = Tnp_P5
MSTAHIIGIDLGKNTFHIAAHDKSGNELFRKKLSRKKLLEFLSCREPSIIAMESCGGAHWLARKCESLGHVAKLIPPQYVKPYVKTNKNDFIDACAIAEAASRPSMRFTSHKTESAQIISTLRKLRNGYIRERTACMNRIGSILLEFGVSLPKGHAAMKKLFQWLADEGHYVPPEIIFELSELLEHYEVLNQKIENQQAKVEKLLAEDPQMTQLQTIPGVGPVIASACLSSIGNPTDFKNGRNFAAWIGLVPIQYSTGGKTTMLGISKRGNRELRTLFIHAARSILWRDKSAEKYFGNWLMDLKQRKPFNVAVVALANKLARIAWSVMTTNKPFLIKA

SEQ ID NO: 11817 - protein, 400 aa, unidentified
  source 1..400: note = protein_b5d5232
  REGION 6..170: note = RuvC_domain
  SITE 9: note = RuvC_P1
  SITE 63: note = RuvC_P2
  SITE 103: note = RuvC_P3
  SITE 105: note = RuvC_P4
  SITE 108: note = RuvC_P5
  REGION 273..361: note = Tnp_domain
  SITE 281: note = Tnp_P1
  SITE 311: note = Tnp_P2
  SITE 319: note = Tnp_P3
  SITE 320: note = Tnp_P4
  SITE 334: note = Tnp_P5
MTKFYLGVDVGKYNHQAALINENGLVLTPAYKFANQSQAINELCQTIKKQLPDKQTAVKVGMEATGHYYWHLRDELLKQGFEVVVFNPIETQTKAKLKLRKVKNDRIDSLIIADLVREKDLKKQGETTSFNQPDERLKELRQLTRFTTRLKKQARFYKQGITVLLERICPEFESCFKNVFSKTALVVMREYFIKNISEKKLINLMAKTSRGRIKTEQAKEIIQALNNSLGLSYRNESAKLELSILLDDLGTKLSQIKQLEQRIKDMSENIKEVELIASIKGVSERMASVIYAEISNINRFEKKEQLTAFAGLDPAVKQSGTYLRKQGNHISKRGPKYLRQELYFAAKTAIIFDPELKAYYLKKKTEGKHYNCIMIAISRKILMRIWAVLKQKRPYELRTA

SEQ ID NO: 11818 - protein, 336 aa, unidentified
  source 1..336: note = protein_092822b
  REGION 6..147: note = RuvC_domain
  SITE 9: note = RuvC_P1
  SITE 52: note = RuvC_P2
  SITE 87: note = RuvC_P3
  SITE 89: note = RuvC_P4
  SITE 92: note = RuvC_P5
  REGION 209..295: note = Tnp_domain
  SITE 217: note = Tnp_P1
  SITE 247: note = Tnp_P2
  SITE 255: note = Tnp_P3
  SITE 256: note = Tnp_P4
  SITE 268: note = Tnp_P5
MTIIRIGLDTSKHVFQIHGVDENEHVVLRRQIRRSEVAKFFAKLAPTRIGIEACGASHYWARVLRGLGHEMVLLPPQYIKPYVKRSKNDKIDAEAICEAMSRPTMRFVPVKSAERQAALTMLGVRDLLVKQRTMLINAIRGHAAEFGLTVAKGPKQVNELLQRLANEEGVPALAREMFGMLASQLDGLDVKLKTIEKQLMAWHRQDQTSQCLATIPGIGPIAGVSFALKVADPQAFHSARHFASWIGITPRENSTAGRQKLGRICRAGDEDLRRLLVIGATAVIRDAKPGRTSPWLLALLARKSKKLAAVALANKMARIVRAMMVSGETYRQPAQA

SEQ ID NO: 11819 - protein, 316 aa, unidentified
  source 1..316: note = protein_e47be09
  REGION 8..154: note = RuvC_domain
  SITE 11: note = RuvC_P1
  SITE 55: note = RuvC_P2
  SITE 95: note = RuvC_P3
  SITE 97: note = RuvC_P4
  SITE 100: note = RuvC_P5
  REGION 190..274: note = Tnp_domain
  SITE 198: note = Tnp_P1
  SITE 227: note = Tnp_P2
  SITE 235: note = Tnp_P3
  SITE 236: note = Tnp_P4
  SITE 247: note = Tnp_P5
MEVSSNFVGIDVSKERLDVSMRPSGERESITNDKAGIEALVQRLGGIRPTLIVLEATGGLERGVTRALTSAELPVVVVNPRQVRDFAKATGQLAKTDRIDARVLARFGEAVRPALRPMPDEVTLELRALIARRRQITEMIVAERNRLRGASKSVTKRIDAHIRWLEAELDRVGKDLDQSIRQSPIWQENEDLLRSVPGIGPVVSRSLIAQLPELGELNRKQIASLVGVAPLNRDSGTLRGRRTIWGGRASVRAVLYMAALVASRRNAVIRAFYQRLRNAGKAPKVALVACMRKLLTILNSMLKHKTRWSETSLQTS

SEQ ID NO: 11820 - protein, 318 aa, unidentified
  source 1..318: note = protein_0751509
  REGION 4..164: note = RuvC_domain
  SITE 7: note = RuvC_P1
  SITE 59: note = RuvC_P2
  SITE 99: note = RuvC_P3
  SITE 101: note = RuvC_P4
  SITE 104: note = RuvC_P5
  REGION 267..318: note = Tnp_domain
  SITE 275: note = Tnp_P1
  SITE 305: note = Tnp_P2
  SITE 313: note = Tnp_P3
  SITE 314: note = Tnp_P4
MILVGIDIGKNKHTFSIIDKNSGEILLSPSDFSNNLKGFLFLIQKLSSYTKSELLIGMEDTGHYHFALLKYLLDRRYTVALINPTTTDLTRKLQGGITKNDPFDSLTICDVISSNHRNKPYRVTKLNRFDLYEQKQLTRHHHNLKEELNTYKNRLQKCIDIVFPEFNSLFHSKYGIVYMNILKTFSSAKAIANADIRSIRKCFEFKGQGKRISLSAEQLKLTAKSSIGIPSVAEEIQIRHLVSQIELLEKQLSEIDKRIEEFSLKNNSPILTIPGISHFSGTSIISELGDICNYTKASQIIKFAGVAPYHYESSQFTA

SEQ ID NO: 11821 - protein, 390 aa, unidentified
  source 1..390: note = protein_4082507
  REGION 4..162: note = RuvC_domain
  SITE 7: note = RuvC_P1
  SITE 60: note = RuvC_P2
  SITE 100: note = RuvC_P3
  SITE 102: note = RuvC_P4
  SITE 105: note = RuvC_P5
  REGION 266..353: note = Tnp_domain
  SITE 274: note = Tnp_P1
  SITE 304: note = Tnp_P2
  SITE 312: note = Tnp_P3
  SITE 313: note = Tnp_P4
  SITE 326: note = Tnp_P5
MIYVGIDIAKLNHFASAISSDGEVLIEPFKFTNDGDGFQILLSKLNSLDAEPDSIIIGLESTAHYGDNLVRYLVAENFQVCVLNPIQTSSMRKNNIRKTKTDKADTYIIAKTLMMQDSYRFYTFYDLDLMDLKAMGRFYQKTIKQRTRLKIQLTAYVDEVFPELQYFFKSGLHQKSVYALLKEAPTPQTIASMHMTHLASLLVKTSHGHFTKEQAKELRVLARKSVGASDSALSIQITHTIAQIELLDSQLNKMEEEMTEIMKFNDSVIMTIPGIGYINGGMILGEIGDIHRFSSPGKLLAFAGLDPSVCQSGNFQARRTKMSRRGSKVLRYALINAAHNVVKNNTTFKAYYDAKKAEGRTHYNALGHCAGKLVRVIWKMMTNDLEFNLE

SEQ ID NO: 11822 - protein, 287 aa, unidentified
  source 1..287: note = protein_b6937b9
  REGION 1..49: note = RuvC_domain
  REGION 155..241: note = Tnp_domain
  SITE 163: note = Tnp_P1
  SITE 193: note = Tnp_P2
  SITE 201: note = Tnp_P3
  SITE 202: note = Tnp_P4
  SITE 214: note = Tnp_P5
MRETDLPVLHPHDAVIAELRMLTGHRADLVADRTRTINRLRQQLVAVCPALERVAQVSQDRGWVVLLSRYQRPKAIRHSGVSRITRILTEAGVRNAASLAEAAVTAAKTQTVRLPGDDVAAGLVAELAREVISLDDRIKATDADIEGRFRRHRLAEVITSMPGIGFRLGAEFLAAVGDPALIGSADQLAAWAGLAPVSRDSGKRTGRLHTPKRYSRRLRRVMYMSALTAIRCDPDSRSYYQRKRDEGKRPIPATICLARRRTNVLYALIRDNRAWQPDSPHITESAA

SEQ ID NO: 11823 - protein, 328 aa, unidentified
  source 1..328: note = protein_afbfcd3
  REGION 4..156: note = RuvC_domain
  SITE 7: note = RuvC_P1
  SITE 60: note = RuvC_P2
  SITE 100: note = RuvC_P3
  SITE 102: note = RuvC_P4
  SITE 105: note = RuvC_P5
  REGION 200..286: note = Tnp_domain
  SITE 208: note = Tnp_P1
  SITE 237: note = Tnp_P2
  SITE 245: note = Tnp_P3
  SITE 246: note = Tnp_P4
  SITE 259: note = Tnp_P5
MFFIGIDVSKAKLDCSLLVDVSSSKRRAKSVANSKAGVGELLSWCAKQHAMTQELHAILEGTGVYHEQAALALADAGVTVSIVNPAQVKDFGRSLGVRTKTDGIDSLILARYGALLKPKIWTPPSREARTLQVLLSRREAIAQDLQRERNRLEKADVIDTPSRVHQSIVDSVAFLEQQLSKLQQDIDNHIDRHPNLKADRDLLLSIPAVGPQVSNHLLSIIHTHHFQSAEQLAAYLGLVPVERQSGSSVLGRPRLSKAGPAQMRAILYMAAIVATRYNLHLKALYQRLQERGKSKMSALCAVMRKLVHLCFGVLKTREPYRSDYGVKA

SEQ ID NO: 11824 - protein, 320 aa, unidentified
  source 1..320: note = protein_d854556
  REGION 7..148: note = RuvC_domain
  SITE 52: note = RuvC_P2
  SITE 92: note = RuvC_P3
  SITE 94: note = RuvC_P4
  SITE 97: note = RuvC_P5
  REGION 187..272: note = Tnp_domain
  SITE 195: note = Tnp_P1
  SITE 224: note = Tnp_P2
  SITE 232: note = Tnp_P3
  SITE 233: note = Tnp_P4
  SITE 245: note = Tnp_P5
MSDRLAVGIDADSKSLVVARHGTKGSTRIPNSASAIGKWLSGLPTRTRIGVEATNRYHELVAQSAQKAGHAVFVLNPRDIKHYAKGVACRGKTDSGDAQVIARYIAKEADNLHEHVARSPAQERLHVLLQQRDSLVRSKTKLNLSLGSGASESALFGGVFSSLKEAIALLDQEIQRLCRSGEQHDLYRRIMTIPGIGPTVAAFITHHITRWPLASSDAWIACTGLDPRPNESGARIGRRRLSKRGSAGLRQILYMAAMGLTRSKGGKPLYNAIRERGHSSTATFNILARKLAKIAWGVFKSGRDFDPAMLKMGQACFQQA

SEQ ID NO: 11825 - protein, 345 aa, unidentified
  source 1..345: note = protein_a33ebf2
  REGION 6..147: note = RuvC_domain
  SITE 9: note = RuvC_P1
  SITE 52: note = RuvC_P2
  SITE 87: note = RuvC_P3
  SITE 89: note = RuvC_P4
  SITE 92: note = RuvC_P5
  REGION 211..297: note = Tnp_domain
  SITE 219: note = Tnp_P1
  SITE 249: note = Tnp_P2
  SITE 257: note = Tnp_P3
  SITE 258: note = Tnp_P4
  SITE 270: note = Tnp_P5
MELFTLGIDLGKTTFHLVGMNQRGDVVVRKRFSRTQLLCFTANLQVELIGMEACGGSHFLGRALREQGHEVRLIPAQYVKPYVKTNKSDYIDAEAIAEAVGRPRMRFVPIKSDDQLDLQSLHRVRERWVMRRTAVVNQIRGLLLERGITLRKGRRYVDAALPGILADTDSKLSGSVRVLLMELKLELEQLADKIERSDQSIEHIARENEACQRLVAMPGIGPVTATALIATIGNGSAFRKGRDFAAWLGVVPEEHSTGGKQTLWQIPLRGNQYLRRLFVQCARAVMQHKTKQSSGLSAWLVQLTARTHHNIAIVALANKLARMAWAVLTKNEVYRPPILVDAIAG

SEQ ID NO: 11826 - protein, 340 aa, unidentified
  source 1..340: note = protein_bb5b6a7
  REGION 6..147: note = RuvC_domain
  SITE 9: note = RuvC_P1
  SITE 52: note = RuvC_P2
  SITE 87: note = RuvC_P3
  SITE 89: note = RuvC_P4
  SITE 92: note = RuvC_P5
  REGION 210..298: note = Tnp_domain
  SITE 218: note = Tnp_P1
  SITE 248: note = Tnp_P2
  SITE 256: note = Tnp_P3
  SITE 257: note = Tnp_P4
  SITE 269: note = Tnp_P5
MNIKRIGLDLAKNIFQIHAVDHHEHVVLRKTLRRDRMTAFFSQLSPCLIGIEACGAAHYWARELTRMGHTVRIIPPQRVKSYLKGQKNDANDAEAICEAISRPGMRFVAMKTERQQTLQAEHRVRARLVRARTALSNEMRGLLGEFGLVLPVGIRQLRKALPEILSQQELWDDRFIRLLSELAEELQMLDERVARHDRRLEQSARDDIRIKRLLAIEGMGPVVASALVAAVGDGRQFKSGREMAAYLGLVPRQHSSGGKARLGSISKRGDSYLRTLIIHGARAVLNACQNKTDRRSQWLKALSERRNRNIATVALANKNARIAWAILSREEDYHGLQAAG

SEQ ID NO: 11827 - protein, 348 aa, unidentified
  source 1..348: note = protein_b903ed2
  REGION 7..149: note = RuvC_domain
  SITE 10: note = RuvC_P1
  SITE 53: note = RuvC_P2
  SITE 88: note = RuvC_P3
  SITE 90: note = RuvC_P4
  SITE 93: note = RuvC_P5
  REGION 211..293: note = Tnp_domain
  SITE 218: note = Tnp_P1
  SITE 247: note = Tnp_P2
  SITE 255: note = Tnp_P3
  SITE 256: note = Tnp_P4
  SITE 268: note = Tnp_P5
MTQYKRIAIDTSKAVFTLHGIDRADRAILRVNLSRAQMIPFFKKLRTTEIAMEACGGSHYWARELTALGHKVLLIPPQYVKPYVKRGKNDRIDAEAICEAAGRPGMHFVPVKSAEQRAQGMVLKVRDTLVGQRTALVNTLRGHATEFGIIAAKGLSNIAPLLEKIEAETTIPPEAREMMALLGEEIARLDARLKEMDTYLKRTHNANPDSKRRATAPGIGSTTALTVVTTVDPDAFESGRHFSAWVGLTPKEHSTGGKPRMGGISRAGNERLRQLFVLGAMSVIKAAVRAGGQCTDAWLLDMLRRKPRKVVAVALANKMARRCWAMLKRGEAYQPARHARSIRFVAQA

SEQ ID NO: 11828 - protein, 376 aa, unidentified
  source 1..376: note = protein_c42742a
  REGION 9..157: note = RuvC_domain
  SITE 12: note = RuvC_P1
  SITE 60: note = RuvC_P2
  SITE 97: note = RuvC_P3
  SITE 99: note = RuvC_P4
  SITE 102: note = RuvC_P5
  REGION 224..311: note = Tnp_domain
  SITE 230: note = Tnp_P1
  SITE 260: note = Tnp_P2
  SITE 268: note = Tnp_P3
  SITE 269: note = Tnp_P4
  SITE 281: note = Tnp_P5
MEHDSTLYVGLDVHKESITAAYAFGMGEVELLGKVGTTKTDIDRLCKRLQSKASRICIVYEAGPCGYGLYRQLQQKGIDCMVCAPSLIPRKPGERVKTDRRDAIKLVRSLRAGDLSEVFVPTVEDEAFRDLARAWVSAKDDLKRARQRLKSFLLSHGVSYTGRADWRAAHRRWLSTFAFDSTWQQLAFEEHRRAIEDRLAQCDRLEAALREAVVAWRFYPAVLGLQTMRGMQFTTAVGMLAELGDLSRFTHPRQLMAWLGVTPSEHSSGEKRRQGSITKNGNSYARKLLVESAWSYRHPARVSPEIQRRHEGIPKPIVDRSWDAQVRLCRRYRTLVARGKQKNIAVVAVARELSGFIWDISQLAMSLALQPQKHAA

SEQ ID NO: 11829 - protein, 444 aa, unidentified
  source 1..444: note = protein_f5a24d9
  REGION 18..177: note = RuvC_domain
  SITE 21: note = RuvC_P1
  SITE 76: note = RuvC_P2
  SITE 116: note = RuvC_P3
  SITE 118: note = RuvC_P4
  SITE 121: note = RuvC_P5
  REGION 293..387: note = Tnp_domain
  SITE 300: note = Tnp_P1
  SITE 330: note = Tnp_P2
  SITE 338: note = Tnp_P3
  SITE 339: note = Tnp_P4
  SITE 352: note = Tnp_P5
MQYQKVLQMLNCIPYLSVGLDVGADFTWMSIMLPNGTLTGKPFKIIHSDPQSRELAVTKIKEAQEMYSLKSRCFLESTGIYHIPLLCFLHDKGFDCSVINPIITKNSTNSNIRKLHNDKFDSKKAARVGLDASLKTSIVPDDEIIDLRNLVRDYYYYKDLQSAVVLKLNAELKVSFPAYLQVFSKITTLTSLKLLESYPLATDMLAAAKDEIVKTIRETAHFGEKYALSKYEAIFIAAEDAAVFGRALPSNALRIRLYIETYREYQKHLDSILEELHKAVDGLQGKPVHNQICLIQSLRGVGFLSAVVLIAEMGSFELFSSPKKLYAYFGLDPAVKQSGKFNGDRVHMSKRGSSLARRILHMAALNNLKVDRGTKMPVNPVIHSYYTDKCRSKKKNVAVGAVMHKICNIIFAMLRDNKPFEMITPQEHCKRYEVDHPSKPDNAA

SEQ ID NO: 11830 - protein, 320 aa, unidentified
  source 1..320: note = protein_9d412a0
  REGION 8..157: note = RuvC_domain
  SITE 11: note = RuvC_P1
  SITE 53: note = RuvC_P2
  SITE 93: note = RuvC_P3
  SITE 95: note = RuvC_P4
  SITE 98: note = RuvC_P5
  REGION 189..275: note = Tnp_domain
  SITE 197: note = Tnp_P1
  SITE 226: note = Tnp_P2
  SITE 234: note = Tnp_P3
  SITE 235: note = Tnp_P4
  SITE 247: note = Tnp_P5
MNQVPHEIGVDVSKDELVVATYGVGPVVRLANRRAAIRRWLRQLPTGCRIGLEATSIYHLPLAELAHAAGHCVYVLNPRQVARYLGSLRQRGKTDLLDAQGIARFVRNETDQVHPFTPSSPAQRGIASLIHRRHLLVKQRTALRQSCRGEPWLRQAVQPLLAEYRQLLAKLDAELEVLLAQVPGLAGQRQRLQSIAGIGPLVSLALSNRLSQTDYRRSDALVAAFGLDPRPRESGTYQGRRKLSKQGHPEDRRLIYLAAQGACRTGLWQAERTQWAARGLSKTAMNCIIARKLLRIAFAVWRSGKPFDPSLIGKQTCAGT

SEQ ID NO: 11831 - protein, 323 aa, unidentified
  source 1..323: note = protein_08498b6
  REGION 3..148: note = RuvC_domain
  SITE 6: note = RuvC_P1
  SITE 50: note = RuvC_P2
  SITE 90: note = RuvC_P3
  SITE 92: note = RuvC_P4
  SITE 95: note = RuvC_P5
  REGION 189..273: note = Tnp_domain
  SITE 197: note = Tnp_P1
  SITE 226: note = Tnp_P2
  SITE 234: note = Tnp_P3
  SITE 235: note = Tnp_P4
  SITE 246: note = Tnp_P5
MLVGIDVAKAELVVAARPSGERWTVANDERGVRTLVDRFRIDRPDLIVLEATGGYELLCVGALASAGLPVVVVNPRQVRDFAKATGQLAKTDRIDADVLALFAERVRPEVRPLPDAAAQELEALLARRRQLLEMLQAERNRLGQVFGRGKQPVKKSLKGHIAFLERELRITDSDLGEMIRQTPAWRERDDLLQSVPGVGPILSRTLLADLPELGRLSRREIAKLVGVAPLSRDSGTMRGRRFVQGGRATVRGVLYMAALVATKRNAVIREFYQRLLRAGKPKKLALVACMRKLLTILNTMVRTAEPWSVTWSATNADRLRILA

SEQ ID NO: 11832 - protein, 339 aa, unidentified
  source 1..339: note = protein_3ba9cae
  REGION 7..148: note = RuvC_domain
  SITE 10: note = RuvC_P1
  SITE 53: note = RuvC_P2
  SITE 88: note = RuvC_P3
  SITE 90: note = RuvC_P4
  SITE 93: note = RuvC_P5
  REGION 212..301: note = Tnp_domain
  SITE 220: note = Tnp_P1
  SITE 250: note = Tnp_P2
  SITE 258: note = Tnp_P3
  SITE 259: note = Tnp_P4
  SITE 271: note = Tnp_P5
MEKVSTIGLDVAKSVFQVHGVNEEGQVVVERQLRRPQLLGWFAQLPACLIGIEACGTAHYWARALRKLGHEVRLIPPAYAKAYVRRNKNDAADAAAICEAVSRPTMRFVAIKSAEQQALAGLHRVRDLLMKQRTMLRNQLRGLMAEFGVVAAQGRRGLNELLAVLCDDADQRIPDTLRAALLADAEVLRDLEHRIEAIERQMVAAGRENATYRHLITAEGYGPILSSAMAAMVVDPGAFRRACDFAAALGLVPRQDGTGGKVRLGPISKRGNGYLRRLLVNGAASLIISGRAKRDPWLAKLLATKPRKVAIVALANKLARIGWALMVRQQDYRFTPAAA

SEQ ID NO: 11833 - protein, 343 aa, unidentified
  source 1..343: note = protein_7f9808d
  REGION 6..147: note = RuvC_domain
  SITE 9: note = RuvC_P1
  SITE 52: note = RuvC_P2
  SITE 87: note = RuvC_P3
  SITE 89: note = RuvC_P4
  SITE 92: note = RuvC_P5
  REGION 211..296: note = Tnp_domain
  SITE 219: note = Tnp_P1
  SITE 249: note = Tnp_P2
  SITE 257: note = Tnp_P3
  SITE 258: note = Tnp_P4
  SITE 270: note = Tnp_P5
MQIHSVGIDLGKTTCHLVALGAAGKVLVKKKFTQKQLLVFTANMQTSLIGLEACSGAHFLGRALRKQGHDVRLIPAQFVKPFVKSNKNDFVDAEAIAEAVERKNMRFVPIKTDDQLDLQAIHRVRDRLISRRTAVINQLRAFLLERGMVFAQTPAKLKAAMADILENAEADLTPQMRNLIDMLWSEWKTVEQQIEELTTQLERIAAADAGCTRIRQIPGIGPIVATAIVAAIGNGAAFRKGRDFAAWLGVVPRQYSTGGKAKLLGISKRGNVYLRKVLIHGARAAVLRIKRDRAAIGPWLDRLDARAPKNVVVVAMANKLARIAWAVLSSGQDYKPSPIVAAA

SEQ ID NO: 11834 - protein, 420 aa, unidentified
  source 1..420: note = protein_f9b923d
  REGION 31..186: note = RuvC_domain
  SITE 34: note = RuvC_P1
  SITE 83: note = RuvC_P2
  SITE 123: note = RuvC_P3
  SITE 125: note = RuvC_P4
  SITE 128: note = RuvC_P5
  REGION 293..378: note = Tnp_domain
  SITE 301: note = Tnp_P1
  SITE 331: note = Tnp_P2
  SITE 339: note = Tnp_P3
  SITE 340: note = Tnp_P4
  SITE 352: note = Tnp_P5
MDVAISAVAGPDEYDRRTLHVIDTRDIDVYLGLDVGKGEHHATAVTPAGKKAFDKRLPNSEPKLREVFAKLQAKHGTVLVVVDQPATIGALPLAVARDMGCQVAYLPGLTMRRIADLYPGEAKTDARDAFIIADAARAMPHTLRSLDLDDATVAELEMIVGFDDDLAAEATRLSNRLRGLFTQVHPHLERVLGPRMQHPAVLKLLSQFGSPAQIRKAGRRRLITLIRPKAPRMTERLIDEVFTALDEQTVIVPGTDAAALIVPSLADSLQAVLDQRKLLAHRIEELLEAHPLSQVLMSMPGIGIRTGARILIDVGDGTNFPSAAHLAAYAGLAPATRSSGSSIRGEQPSRRGNKQLKRAFFLSAFAALADPTSRTYYDKKIAQGKHHTQALLCLARRRADVLFAMLRDGTFYQPPTPITP

SEQ ID NO: 11835 - protein, 381 aa, unidentified
  source 1..381: note = protein_00c55a3
  REGION 4..159: note = RuvC_domain
  SITE 7: note = RuvC_P1
  SITE 57: note = RuvC_P2
  SITE 98: note = RuvC_P3
  SITE 100: note = RuvC_P4
  SITE 103: note = RuvC_P5
  REGION 255..341: note = Tnp_domain
  SITE 263: note = Tnp_P1
  SITE 293: note = Tnp_P2
  SITE 301: note = Tnp_P3
  SITE 302: note = Tnp_P4
  SITE 314: note = Tnp_P5
MLYLGIDVAKSKHDVTVLNDKGQTVLKPLTVSNSRAGFDLLHQSLKQLNQDCLIALEDTGHDAFNLANFLHEHDYQVYTYNPLLIKEFAKSLSLRKTKTDKKDARVIALKLLSDPNREQVKHDKRQEELKILTRYLNRLKKKQTDWKVQYTKCLDIIFPELDKLIGKHADYAYELLSRYPSPQKMVQAGFDKLLNVKRLSAHKIKDILDIAPSSIGTSSPARKFELREIIENIQHYNRLIKTAEKQIDELMAKLKSSITTVTGIGNRLGAVILAEMRNINTFDNPAQLQAFAGSEPAIYQSGQMEMTGKMVKRGSPHLRWALLQAAKACTRYSPRFRQYLKLKLAQGKHYNVAITHVAKKLIRVIFYVLKNNCPFDENKLR

SEQ ID NO: 11836 - protein, 342 aa, unidentified
  source 1..342: note = protein_3be780c
  REGION 7..149: note = RuvC_domain
  SITE 10: note = RuvC_P1
  SITE 53: note = RuvC_P2
  SITE 88: note = RuvC_P3
  SITE 90: note = RuvC_P4
  SITE 93: note = RuvC_P5
  REGION 212..299: note = Tnp_domain
  SITE 220: note = Tnp_P1
  SITE 250: note = Tnp_P2
  SITE 258: note = Tnp_P3
  SITE 259: note = Tnp_P4
  SITE 271: note = Tnp_P5
MESAVTIGLDLGKSVFQVHGVDAGGAVVIQRRLTRGRLLAFFAKQPACLVGMEACAAAHHWGRELQKLGHKVRLMPPRYVKPYVKRQKNDAADAEAICEAVTRPNMRFVEIKTCEQQGILVLHRVRLMLTRQRVQLSNAIRGHMAEYGLVAPVGRNGLQRLIAIIEDPDDGRVPAVARASLVPLVRQLGMVNDQVLENDRLVRASARSTELGHRLMEVPGVGPVLASAMVATVPDPTAFKSGRDLGAWIGLVPRQNSSGGKEKLGGITKQGDRYLRQLLVAGALAVIRYAQRHGTRRPWLMHLLARRTPKIAAVALANKMARVIWAMMVTGERYKEPRAAAT

SEQ ID NO: 11837 - protein, 339 aa, unidentified
  source 1..339: note = protein_e6a9778
  REGION 6..146: note = RuvC_domain
  SITE 9: note = RuvC_P1
  SITE 52: note = RuvC_P2
  SITE 87: note = RuvC_P3
  SITE 89: note = RuvC_P4
  SITE 92: note = RuvC_P5
  REGION 210..297: note = Tnp_domain
  SITE 218: note = Tnp_P1
  SITE 248: note = Tnp_P2
  SITE 256: note = Tnp_P3
  SITE 257: note = Tnp_P4
  SITE 269: note = Tnp_P5
MKYTPVGVDIAKHLIQVHFIDEHTGEVIDKQLRRQDFLTFFSNRERCLIGMEACGGSQHWARELKKLGHEVRLLQARFVKAFVMGNKNDVMDARAIWMAVQHPGKEIAVKTEEQQSVLVLHRTRRQLVKFRTAQINALHGTFLEFGETLHKGRASLNKELPEALERLKMRLPPYLISILDDQYNRLNELDSRIDGIEKLLNSVARQSETCKRLMEIPGVGPLIATAAVATMGSASAFKSGREFAAYVGLVPKQTGSGGKVRLLGISKRGDSYLRTLFIHGARAASLVAKEPGPWITELKKRRPTGVVIVAMANKLARTVWAIAAHDSKYDKNFISIRPY

SEQ ID NO: 11838 - protein, 341 aa, unidentified
  source 1..341: note = protein_bc98d96
  REGION 7..147: note = RuvC_domain
  SITE 10: note = RuvC_P1
  SITE 53: note = RuvC_P2
  SITE 88: note = RuvC_P3
  SITE 90: note = RuvC_P4
  SITE 93: note = RuvC_P5
  REGION 212..299: note = Tnp_domain
  SITE 220: note = Tnp_P1
  SITE 250: note = Tnp_P2
  SITE 258: note = Tnp_P3
  SITE 259: note = Tnp_P4
  SITE 271: note = Tnp_P5
MKNTTTISIDLAKTVFQVALFNKYGVLKSNNKMSQSKMVQFIAQHPEALICMEACGTAHFWGRRFQKSGHRVLLVPAHIAAKYRTGNKNDANDALAIYEAIKRPKTYFVQVKNLDQQDLASLLKLRQGYIKQRTQTVNRIRGLGLEYGIKIPKSIAKVRKNLPYFLEDAENELTTSSRFILRDLLDQLLLLDTQVDNATNALLTRAKEIPVCSRLTALPGVAWIIASALYARLGDGSAYKCGRDASASVGLVPANSGTGGNNKLLGITKRGDRSLRSLLVHGARSIVSRIKDKQDGLSCWIRDQLSKNHLNKTTVALANKLVRMAWAILKSGEDYRAPLAQ

SEQ ID NO: 11839 - protein, 321 aa, unidentified
  source 1..321: note = protein_858567f
  REGION 10..154: note = RuvC_domain
  SITE 56: note = RuvC_P2
  SITE 96: note = RuvC_P3
  SITE 98: note = RuvC_P4
  SITE 101: note = RuvC_P5
  REGION 191..275: note = Tnp_domain
  SITE 199: note = Tnp_P1
  SITE 228: note = Tnp_P2
  SITE 236: note = Tnp_P3
  SITE 237: note = Tnp_P4
  SITE 249: note = Tnp_P5
MTSQTESPRFGIDVSKRWLDIAEYGRSPVLHIDNTAQAIRGWLRTLPPGACHIACESTGTYHRALVELLIGAGHRVYLIDGYTLSRYRDTLGQRAKTDRHDAGLIARYLAHEGARLRPFSLPPRAVTDLRALLRRRATLVRCLGRMRQSMEELPGFTRQVRAVTERIQALIKRLEQRIAALIGTSGWGDPYRRILKVEGIGTLTAAGLCATFHRAPFGRADAFIAFLGLDVTVRQSGTQRGRGVLSKKGDAEMRRLLYNAAMAASRSSTWQPFYQRMLQRGFSRTQALVALARKLARVAFSLMKNASDYVPQQHENACAQT

SEQ ID NO: 11840 - protein, 347 aa, unidentified
  source 1..347: note = protein_21c2491
  REGION 7..147: note = RuvC_domain
  SITE 10: note = RuvC_P1
  SITE 53: note = RuvC_P2
  SITE 88: note = RuvC_P3
  SITE 90: note = RuvC_P4
  SITE 93: note = RuvC_P5
  REGION 210..296: note = Tnp_domain
  SITE 218: note = Tnp_P1
  SITE 248: note = Tnp_P2
  SITE 256: note = Tnp_P3
  SITE 257: note = Tnp_P4
  SITE 269: note = Tnp_P5
MTNIIRIGIDTSKSVFQLHGVDASERPVLRKQLSRREMIRFFEKLPPTVVAIEACGASHHWARLLGSFGHEVKLIAPQLAKPYVKRGKNDAADAEALCEAMSRPTMRFVPAKTPDQQAALMLVGMRARLIKRRTQLANAIRGFAAEFGVTTATGMCRIEPLLETIAADETIPALARELFALHAEEYGALKCEIERVEEKLMAWHRSNECSQRLAKIPGVGPIGASFLMMKTPDPRLFKSGRDFAAWMGLTPKDHSTAGKTRLGGITRAGDELLRSTLIVGATAVIGHVRRTRGRNASPWLLGLLDRKKPKLVAVALANKIARIAWKMMVSGEQYHRSTTRAVQAAAA

SEQ ID NO: 11841 - protein, 333 aa, unidentified
  source 1..333: note = protein_5f0c15e
  REGION 25..166: note = RuvC_domain
  SITE 28: note = RuvC_P1
  SITE 72: note = RuvC_P2
  SITE 112: note = RuvC_P3
  SITE 114: note = RuvC_P4
  SITE 117: note = RuvC_P5
  REGION 207..292: note = Tnp_domain
  SITE 215: note = Tnp_P1
  SITE 244: note = Tnp_P2
  SITE 252: note = Tnp_P3
  SITE 253: note = Tnp_P4
  SITE 264: note = Tnp_P5
MVEGTVGSHHKEGSTKMRKPSMICAGIDTGKRKLDVALDGKPDVLQVDNSPAGHRSLSAWLRRRRVTRLGIEASGGYEQEVVSQLRRDGFVVIVFQPAQVRAYAKFHLQRAKNDRIDAALIAACTAATKKVQPPPDPRLAPFAGHLTLIEQIAEDIAQCKTRRETCRDRRIRAFWTGEIARFKALLRGELKALVAAIRQHADLAKRLDLIASIDGIGLRTAVAILARMPEIGRITREEAAALVGLAPYDDDSGDHLGARHIEGGRERLRKALYTAALAAAFHWNPQLNAIYRRLIAAGKPHKVALVACARKLLIYANTVVERGTPWTTNPAAT

SEQ ID NO: 11842 - protein, 347 aa, unidentified
  source 1..347: note = protein_d225e01
  REGION 7..148: note = RuvC_domain
  SITE 10: note = RuvC_P1
  SITE 53: note = RuvC_P2
  SITE 88: note = RuvC_P3
  SITE 90: note = RuvC_P4
  SITE 93: note = RuvC_P5
  REGION 212..298: note = Tnp_domain
  SITE 220: note = Tnp_P1
  SITE 250: note = Tnp_P2
  SITE 258: note = Tnp_P3
  SITE 259: note = Tnp_P4
  SITE 271: note = Tnp_P5
MNDVTIIGLDLAKHVFQAYGADAEGAPLFNRKLRRAEVLRFFEKLPPCLVGMEACASAHYWAREISAFGHEVRLLPPQYVKPFVKRGKTDAADAEAIAEAMTRKTMRFVPVKTAEQQAAVMVLRTRALLVRQRTQAINALRAHMSELGVIAPTGIANVKALAAIIREKNDIRLPPAARFALTEIIDQIDMLAAQIDKLEREIIIQARKDEEMRRLATIPGVGAIIAMAVKAFVPDPAGFKSGRHFAAWIGLTPKAHSSGGKERLGRISKMGNPVLRSLLTTGAAAVLRHVRDRDRVWSWLKDMLGRRPFKVVAVALANKIARMIWALLIKGGTYRNPVRIEAEAVTI

SEQ ID NO: 11843 - protein, 343 aa, unidentified
  source 1..343: note = protein_e5bde1e
  REGION 5..152: note = RuvC_domain
  SITE 8: note = RuvC_P1
  SITE 55: note = RuvC_P2
  SITE 92: note = RuvC_P3
  SITE 94: note = RuvC_P4
  SITE 97: note = RuvC_P5
  REGION 212..300: note = Tnp_domain
  SITE 220: note = Tnp_P1
  SITE 250: note = Tnp_P2
  SITE 258: note = Tnp_P3
  SITE 259: note = Tnp_P4
  SITE 271: note = Tnp_P5
MAHFAGLDVSVKETSVCIVDDTGKIMREVRVASEPEALLQVLTNTIYRFKRIGLEAGPLSQWLYSVLAEAGLPVICVETRHMSAMLKAQINKTDRNDARGIAQMMRVGLYRAVHVKTLRSQKLRVLLTHRKLLQSKTIAIENDLRATLRNFGLKVGMVGTVKFEVRIRELVENLPDLAVLVEPLLIVRRVLREQLGILHRRVLAVVRDDDVCRRLMTIPGVGPVVALTYRVTVDVPARFRNSKAVGAVFGLTPAKYQSGENDRTGAISRCGDEMMRMMLYEAAQSMLVRSAKWSWLKGWAMKIVRHRGMKKAIVALARRLAVIMHRVWVDGTAFRWTREITPA

SEQ ID NO: 11844 - protein, 321 aa, unidentified
  source 1..321: note = protein_9376af6
  REGION 4..149: note = RuvC_domain
  SITE 7: note = RuvC_P1
  SITE 52: note = RuvC_P2
  SITE 92: note = RuvC_P3
  SITE 94: note = RuvC_P4
  SITE 97: note = RuvC_P5
  REGION 191..278: note = Tnp_domain
  SITE 199: note = Tnp_P1
  SITE 229: note = Tnp_P2
  SITE 237: note = Tnp_P3
  SITE 238: note = Tnp_P4
  SITE 251: note = Tnp_P5
MTYVGIDVSKATFVVAYSSAKNSKTKTFKNTTKGVHEFIQSLSASEHHCVLEATGNYSSLLVYLLSQAGITVSLENPLKIKNFARVMLSVTKTDETDARLIALYGEKMQPAPYKLRSDAMLTLKQKRTVIRQLKKQLIATRNLKGSMEVLPFFDPKCKKAIEKTIAFLEKQVKNLEEELAVLAQSEYKKQMDLLTSIKGIGITLAATLIMATGGFTYFDNAKQLTRYLGLSPTYQQSGTSVNVKGHINRNGDSSLRSQLYIAAMASLRCNAECKECFNRLRSNGKPGKVAVVAVANKLVRQAFAVVKQGKPYVDGFKSEKP

SEQ ID NO: 11845 - protein, 344 aa, unidentified
  source 1..344: note = protein_54e2e22
  REGION 7..150: note = RuvC_domain
  SITE 10: note = RuvC_P1
  SITE 55: note = RuvC_P2
  SITE 90: note = RuvC_P3
  SITE 92: note = RuvC_P4
  SITE 95: note = RuvC_P5
  REGION 214..301: note = Tnp_domain
  SITE 222: note = Tnp_P1
  SITE 252: note = Tnp_P2
  SITE 260: note = Tnp_P3
  SITE 261: note = Tnp_P4
  SITE 273: note = Tnp_P5
MNKLSRVGIDLAKNVFQLHGVDRHGESAWRRRLTRNNWLKVLLDKVEPGCTIGMEACTGAHHWARELQAKGFTVKLIAPQFVKPYVKSNKNDANDAEAVCEAMSRPSMRFVAVKTVEQQDIQAAHRIRSELIGQRTSKANQIRGLVAEYGLVAPQHLARLRAAVPAWLEDAENGLTSRFRWLLNGLWDDLNRLDQRIEELNREITSMAQNDPVAKRLQQLRGVGPLIATALVAAVGNAEQFANGRQMAASLGLTPKQHSSGGKDRLLGISKRGDAYLRTILIHGARSVIRTAKHKDDRLSQWVTSLAARRHANVAAAALANKTVRIAWAMLRHGTDYQPDRIVA

SEQ ID NO: 11846 - protein, 427 aa, unidentified
  source 1..427: note = protein_c5d6d41
  REGION 42..197: note = RuvC_domain
  SITE 45: note = RuvC_P1
  SITE 95: note = RuvC_P2
  SITE 135: note = RuvC_P3
  SITE 137: note = RuvC_P4
  SITE 140: note = RuvC_P5
  REGION 300..387: note = Tnp_domain
  SITE 308: note = Tnp_P1
  SITE 338: note = Tnp_P2
  SITE 346: note = Tnp_P3
  SITE 347: note = Tnp_P4
  SITE 360: note = Tnp_P5
MYSINHEFDESLNSYAPGFNIPCKWALITITSIERMIIMITIGIDIGKFNHCACVLDNRTGELLVEPFFFENNKEGFYQCHQAISPYKNALIGLEDTGHYGDNLVFFLLNHDFKVALINPITTEYKRKSKLKSAKNDRKDSILIAQVLLNKDEYRNIDLKTYHLRDLKKLTRHHHDLKEDLNVYKNRLQKEIDLVFPEFNSLFISKYGIVYNQILKQFGSANVIANTDIRTLRKAFTVASQGKRISLTPEHLKLVANNSVGEDSITSTIQIKHLIVLIETLEEQVKEVDKKIEELSTNLNSPITSIPGIGIFSGMSILSEYGDIDRFDSPAKMVSYAGVDPYVFQSGDFEASKTAITKKGNPYLRKTLYQIALPVIRFNPVFQEYYTLKRSQGKSHRCALGHVVRKLIRVIFHLVSNDIEFDVAKLV

SEQ ID NO: 11847 - protein, 403 aa, unidentified
  source 1..403: note = protein_73a85ea
  REGION 4..160: note = RuvC_domain
  SITE 7: note = RuvC_P1
  SITE 57: note = RuvC_P2
  SITE 97: note = RuvC_P3
  SITE 99: note = RuvC_P4
  SITE 102: note = RuvC_P5
  REGION 274..361: note = Tnp_domain
  SITE 282: note = Tnp_P1
  SITE 312: note = Tnp_P2
  SITE 320: note = Tnp_P3
  SITE 321: note = Tnp_P4
  SITE 334: note = Tnp_P5
MNAVGIDVSKRKSMVAIIRPFGEIVYSPFEIKHTSNDIQSLIQLIYSMEGESRIVMEHTGHYYESLAHELSAAGLFVSALNPKLIKDFDNNSLREVKSDKADAMKLARYALDKWPDLRQYSVMDELRNQLKTMNRQFDFYMKHKTAMKNNLISILDMTYPGVNTYFESPARSDGRQKWVDFATTYWHVDCVRKMSLKAFTEHYQKWCKRKKYLFSEAKAEEIYGKAKELVPVLPKDAVTKELIKQAAEQLNSISSTVEELRTKMNETASKLPEYPIVMEMKGVGTSLGPQIMAEIGDVMRFTHKSAITAFAGVDPGVNESGDYKKKSVHTSKRGSSQLRKSLFQVMEVLVKTMPQEDPVYRFIDKKRGEGKPYYVYMTAGANKFLKIYYGRVKEYLSSLSDSN

SEQ ID NO: 11848 - protein, 321 aa, unidentified
  source 1..321: note = protein_8bc8791
  REGION 10..158: note = RuvC_domain
  SITE 13: note = RuvC_P1
  SITE 57: note = RuvC_P2
  SITE 97: note = RuvC_P3
  SITE 99: note = RuvC_P4
  SITE 102: note = RuvC_P5
  REGION 196..280: note = Tnp_domain
  SITE 204: note = Tnp_P1
  SITE 233: note = Tnp_P2
  SITE 241: note = Tnp_P3
  SITE 242: note = Tnp_P4
  SITE 253: note = Tnp_P5
MKDVSEAIFIGIDVSKDTLEVASSEQACTWQVVNETAGIEALGAQLLDLRPALVVLEATGGYEFEAACALQSSGLDVAVVNPRQARDFARAMGTLAKTDSLDARMLAAFARVLHQHPERSRFIKPLADEALQRLQALVLRRRQLVGMLTSERQRLRMSHVGARPSIERTIEFLKAQIQELETDSGEHIKAHHAALAQALSSVKGVGKTTVSTLLAELPELGQLCRRRIAALVGVAPRNRDSGQMRGQRSIWGGRADVRNVLYMAALVASRTNPVFKAFYERLLAAGKLKKVALVAVMRKLLTTLNAIAKSGNHWKDSLHAA

SEQ ID NO: 11849 - protein, 292 aa, unidentified
  source 1..292: note = protein_4a2e877
  REGION 7..89: note = RuvC_domain
  SITE 28: note = RuvC_P3
  SITE 30: note = RuvC_P4
  SITE 33: note = RuvC_P5
  REGION 149..236: note = Tnp_domain
  SITE 157: note = Tnp_P1
  SITE 187: note = Tnp_P2
  SITE 195: note = Tnp_P3
  SITE 196: note = Tnp_P4
  SITE 208: note = Tnp_P5
MARKLEELGHFPKLISPQFVRPFVKSNKNDFVDAEAICEAASRPSMRFVQPRTESQQAMRALHRVRESLVQDKVKTTNQMHAFLLEFGISVPRGAAVISRLSTLLEDNSLPLYLSQLLLKLQQHYHYLVEQIKDLESQLKRKLDEDEIGQRLLSIPCVGTLTASTISTEIGDGKQYASSRDFAAATGLVPRQYSTGGRTTLLGISKRGNKKIRTLLVQCARVFIQKLEHQSGKLADWVRDLLCRKSNFVVTCALANKLARIARAPNGTTANLCSITAEIHRFKESLIWFCEY

SEQ ID NO: 11850 - protein, 405 aa, unidentified
  source 1..405: note = protein_6bd06b2
  REGION 6..162: note = RuvC_domain
  SITE 9: note = RuvC_P1
  SITE 99: note = RuvC_P3
  SITE 101: note = RuvC_P4
  SITE 104: note = RuvC_P5
  REGION 271..357: note = Tnp_domain
  SITE 279: note = Tnp_P1
  SITE 310: note = Tnp_P2
  SITE 318: note = Tnp_P3
  SITE 319: note = Tnp_P4
MAKVFVGHDWAEAHHDVHVEDGDGKRLAKARLPEGIEGVARFHELVAAFVDEADDVTIATETDRGLFVTALVAAGYRVLAVNPMSTSRYRERHSTSGAKSDPGDAFVLAELARTDSHNHRPVAGDSEEAEAVKVLARAHQSMIWTRQRQVNQLRSTLREFYPGALTCFDDLASGDALAVVAIAPTPTLGRQLSVSKIASALRRGGRQRRIEQRSAEIQAALRAEALEAPGLVSEAMGASVGALVAVIAELVTQTARLETTLDARFEKHPDAEVIRSLPGLGMILGARVLGEFGDDPNRYADAKSRKNYAGTSPITKASGKHRVVLARYARNTRLADATYQWAFCSLGASPGARAFYDQHRAAGATHHKALRALANRLVGILHGCLRHATLYDEHTAWGHRIAVAA

SEQ ID NO: 11851 - protein, 318 aa, unidentified
  source 1..318: note = protein_208930d
  REGION 9..153: note = RuvC_domain
  SITE 12: note = RuvC_P1
  SITE 56: note = RuvC_P2
  SITE 96: note = RuvC_P3
  SITE 98: note = RuvC_P4
  SITE 101: note = RuvC_P5
  REGION 196..272: note = Tnp_domain
  SITE 224: note = Tnp_P2
  SITE 232: note = Tnp_P3
  SITE 233: note = Tnp_P4
  SITE 244: note = Tnp_P5
MGKRNTICAGIDTGKHKLDVALDGNSEQLQVDHTVEGHQVLVEWLKCRKVKRVGIEASGGYEQAVVAELRRKRFVVVLFQPKQVRAYGTFHLLLAKNDKIDAKLIAMCTAAVRTIHSAPDPRLQPFADHLTMIDQITEDIARLKNRLESCRDTRIQGVWKAQIALLAKSKRAEFKALLAAIRTHSDLAARLDLIYCGLPTAAAVLIRMPEIGTITRERASALSGLAPYDDDSGKRSGARHIKGGRERLRWALYNAALPASSRWNPQIRALYGRLIAAGKPHKCALVACARKLLVTINAVVARGIPWEPEMPQLAKLTT

SEQ ID NO: 11852 - protein, 387 aa, unidentified
  source 1..387: note = protein_e590412
  REGION 5..161: note = RuvC_domain
  SITE 8: note = RuvC_P1
  SITE 59: note = RuvC_P2
  SITE 100: note = RuvC_P3
  SITE 102: note = RuvC_P4
  SITE 105: note = RuvC_P5
  REGION 261..347: note = Tnp_domain
  SITE 269: note = Tnp_P1
  SITE 299: note = Tnp_P2
  SITE 307: note = Tnp_P3
  SITE 308: note = Tnp_P4
  SITE 320: note = Tnp_P5
MIYYIGIDISKYKHDFCIISNAGEAIVENDSFDNTKNGFQYFVNLLKSYDKSKVRIAFEATGHYSKNLELFLINQDYSFIKINPLVIHQFLKARSLRRTKTDKADSIAIANYLMSVPYKPNSNLLYNIYTLKSLCRSREQLIKERSKFYVLLTNELDLTFPELKPFFSNDFSATLLYILDKYINAEHISLMRDFETISKKSRGRFSYAKFVNLKELAKNSVGHHDKNTDLLISTYVSIIQNFNDKIDPIDKQISTIIKELNPRMLSIPGLGEISAATIISEYGDIKNFSSSNKMLAFAGLEPSIIQSGTIENNGKMVKHGSGHLRYSIMNTAMIILRYSPTFYDYYHKKCSEGKCHRVALSHVCKKLLRVIYTLEKNNMDFNPSLLR

SEQ ID NO: 11853 - protein, 341 aa, unidentified
  source 1..341: note = protein_3e34f5b
  REGION 30..173: note = RuvC_domain
  SITE 76: note = RuvC_P2
  SITE 116: note = RuvC_P3
  SITE 118: note = RuvC_P4
  SITE 121: note = RuvC_P5
  REGION 214..298: note = Tnp_domain
  SITE 222: note = Tnp_P1
  SITE 251: note = Tnp_P2
  SITE 259: note = Tnp_P3
  SITE 260: note = Tnp_P4
  SITE 271: note = Tnp_P5
MGYPKDTPADNFEAWSPIMMAESDEIQSILGLDVSCDTVTLFDSCTRRCLTIANEADALRAALEPYQGSATLAVCEATGGHEDTVLGVLLELAIQAHRADPAKVKAYIKSFGKRAKNDAIDARWLSRYGRDRAAMLLRWQPTAPTQQKLELLVARRLDLVAMRVQEQNRLKAPRSSLIADNIRAHLCELERHIEALNAEIDTLISESRDLELRAKSLRSVPGIGPVLVPLLLAVMPELGTLNRRQVASLAGVAPHPKDSGKASWHRSTTGGRRQIRPALFIAALAACRGNSPLATAYQALLKAAKPKRVALTAIMRKIITIANARVRDALQQQNELMLAPA

SEQ ID NO: 11854 - protein, 392 aa, unidentified
  source 1..392: note = protein_4b9e710
  REGION 4..163: note = RuvC_domain
  SITE 7: note = RuvC_P1
  SITE 60: note = RuvC_P2
  SITE 101: note = RuvC_P3
  SITE 103: note = RuvC_P4
  SITE 106: note = RuvC_P5
  REGION 267..354: note = Tnp_domain
  SITE 275: note = Tnp_P1
  SITE 305: note = Tnp_P2
  SITE 313: note = Tnp_P3
  SITE 314: note = Tnp_P4
  SITE 327: note = Tnp_P5
MIYVGIDVAKDKHDCFISNSDGEVLYKSFTISNNREGFETLFQRIVSVAEDLNNVKVGLEATGHYNYNLLGFLLDKGLPTYVINPLHTNLYRKSLSLRKTKTDKVDSRTIATMIMSDLNLKSYSDISYHNEELKSLTRYRFDKVKERAKLKSSVARLINILFPELEKLVPSLHMVSVYALLSEFPGASHVASAHLTRLTNLLSQASKGHYGKDTAILFRETAKTSIGSLMPAKSLELKHTIKLIQELTSEIDEIESAIKQIMVEEIQSPILTIPGISYRMGAMIIAEIGDFSRFDSPDKILAYAGMSPSTYQSGQLDNCYSHMEKRGSRYLRYALYNATKYVCHWDENFGAYLAKKRAEGKHYNVALSHATKKLVRTIFAIEKSGQAYIPTV

SEQ ID NO: 11855 - protein, 336 aa, unidentified
  source 1..336: note = protein_82598c7
  REGION 6..147: note = RuvC_domain
  SITE 9: note = RuvC_P1
  SITE 52: note = RuvC_P2
  SITE 87: note = RuvC_P3
  SITE 89: note = RuvC_P4
  SITE 92: note = RuvC_P5
  REGION 211..298: note = Tnp_domain
  SITE 219: note = Tnp_P1
  SITE 249: note = Tnp_P2
  SITE 257: note = Tnp_P3
  SITE 258: note = Tnp_P4
  SITE 270: note = Tnp_P5
MEPTTIAIDLSKRVFQIHYVEPETGAIHSKALKRAQLVPFFANRPASRVVMEACGSAHHWARVLARLGHDVRLIAAQFVRPFVKSNKNDAADAAAIWEAAQRPGMRFVAVKTEGQQAMLAMHRIRQQLVRIRVMQVNQLRGLLYEFGVVLPQGRRASIEAAKAALASLADELPAMLADSLQDQLSRLRGLDEQIARIEQRILDWRRNDDACKRISEIPGVGVLTATAAVSVIGQATTFRSGREFAAYLGLVPRQNSSGGKIKLGGISKRGDVYLRTLLIHGARSVIVSSRHLPERLRQMLSRRPTNVVAVALANKMARTIWALLAYGRTYQAAPAQ

SEQ ID NO: 11856 - protein, 320 aa, unidentified
  source 1..320: note = protein_7e66cb3
  REGION 9..153: note = RuvC_domain
  SITE 12: note = RuvC_P1
  SITE 56: note = RuvC_P2
  SITE 96: note = RuvC_P3
  SITE 98: note = RuvC_P4
  SITE 101: note = RuvC_P5
  REGION 191..276: note = Tnp_domain
  SITE 199: note = Tnp_P1
  SITE 228: note = Tnp_P2
  SITE 236: note = Tnp_P3
  SITE 237: note = Tnp_P4
  SITE 248: note = Tnp_P5
MAKRITICAGIDTGKRKLDVALDGNSERLQVDNTAEGHQALMAWLRQHKVKRVGIEASGGYEQPVVAALRGQRFVVVVFQPAQVRAYAKYRGQRAKNDRIDAALIAACTAAVKQIHPAPDARLAPFAEHLTMIDQIGEDIARLKNRLETCRDERIRQVWKEEIARLARRERLELKALVAAIRRYRDLAERLELIHSVGGAGLPTAVAVLVRMPEIGKISREQAAALAGLAPYDDDSGDQVGVRHIEGGRERLRRALYAAALPASFRWNPQLIALYKRLIAAGKEHKRALIACARKLLIFINTVVARGTPWLDKVPAYPAA

SEQ ID NO: 11857 - protein, 410 aa, unidentified
  source 1..410: note = protein_ea19107
  REGION 15..169: note = RuvC_domain
  SITE 18: note = RuvC_P1
  SITE 66: note = RuvC_P2
  SITE 106: note = RuvC_P3
  SITE 108: note = RuvC_P4
  SITE 111: note = RuvC_P5
  REGION 276..361: note = Tnp_domain
  SITE 284: note = Tnp_P1
  SITE 314: note = Tnp_P2
  SITE 322: note = Tnp_P3
  SITE 323: note = Tnp_P4
  SITE 335: note = Tnp_P5
MTEQDGSTDRYDVYCGVDVGKSEHHACALNPAGKRLHDKPLPNDEDALKEVLGKLQTRGRVLVIIDQPASIGALVIAVARMMGIEVAYLPGLAMRRIADLYPGEGKTDARDSFIIADAARTMPHTLRRIGTDDETVADLTVLAGYDDDLAAQSTRLSNRLRDALLHVHPALERLLGKHFDRPGVLELLVAASTPDALARLTPQAMTEIMKPRSPRLAKTLPAKIRTALDEQSVIVPGTQAFGRVISGLATQLRDIHLERASLGAELEARLQAHPLHEVLTSMPGLGVRTSLKILTIVGDGSAFPSAAHLAAYAGLAPVTRRSGTSIKGETRSRRGNRALKNALFQSAFASLADPTSRTYYDRKRAEKKKHNAAIVCLARRRTDVIYAMLRDKQPYQQPSTENPTKHTAAA

SEQ ID NO: 11858 - protein, 413 aa, unidentified
  source 1..413: note = protein_dd4b66a
  REGION 5..171: note = RuvC_domain
  SITE 8: note = RuvC_P1
  SITE 68: note = RuvC_P2
  SITE 108: note = RuvC_P3
  SITE 110: note = RuvC_P4
  SITE 113: note = RuvC_P5
  REGION 279..365: note = Tnp_domain
  SITE 287: note = Tnp_P1
  SITE 318: note = Tnp_P2
  SITE 326: note = Tnp_P3
  SITE 327: note = Tnp_P4
MLLFIGDDWAEDHHDLEVEDETGRRLAKARLPEGLEGISRLHALVAEHAPAEWAELPSEEVASRVYIGIETDRGPWVTALQAAGYQVLAINPLSSARYRERYSTSGAKSDAGDAHVLAEIVRLDRDHHRQIAGDTDLVDAVKLVARAHQTAIWERTRQVLRLRSTLREYFPAAIEAFEDLAAKDTLLLLARAPSPARVARLTRSQVVSALRAARRHHVEAKADAVLAVLRAPGLRQPATTEAAYAAVVVGQIGIIGALNEQITQLQEVVAEHFGRHPDADIYLSQPGFGVVLAARALGEFGDDKKRFHDARARKNYSGQSPITRASGKKTVVLARYATNRRLGAALHAQAFSALAASPGARAYYDALRARKIGHHAALRQLANRLVGILHGCLKTGTKYDENTAWHHQITAAA

SEQ ID NO: 11859 - protein, 394 aa, unidentified
  source 1..394: note = protein_b032f22
  REGION 4..164: note = RuvC_domain
  SITE 7: note = RuvC_P1
  SITE 59: note = RuvC_P2
  SITE 99: note = RuvC_P3
  SITE 101: note = RuvC_P4
  SITE 104: note = RuvC_P5
  REGION 267..354: note = Tnp_domain
  SITE 275: note = Tnp_P1
  SITE 305: note = Tnp_P2
  SITE 313: note = Tnp_P3
  SITE 314: note = Tnp_P4
  SITE 327: note = Tnp_P5
MILAGIDIGKDSHFFSLVRKEDGEVLAQPRKFTNTSEGFKTLTDSFIPYDKESILIGMEDTGHYHFALLRYLLSRKFNVALINPTATDFTRKANGSISKNDRLDTLTICDVLSSNKPKKPYRISKFSSFDLYEQRGLTRHHHNLKEEINVYTNRLQKCIDIVFPEYNSLFPSKYGRVYISVLKTYGSAANIAKADIRSLRKCFEYKARGKRISLTAEKLKEAAKASIGIDSACEVIQIRHLLEQIELLNKQIKEIDKKIEEYSLANDSPILSIPGISHFSGTSILAELTDINNYDKAAQIIKRAGVAPLVYESSKYQAKHTAITKSGSKYLRKTLYQIILPVIRYNPVFQKYYDLKISQGKSHRCACGHCVRKLLRIIFHLLKTNQKFDPALLR

SEQ ID NO: 11860 - protein, 334 aa, unidentified
  source 1..334: note = protein_86d6f60
  REGION 7..149: note = RuvC_domain
  SITE 10: note = RuvC_P1
  SITE 53: note = RuvC_P2
  SITE 88: note = RuvC_P3
  SITE 90: note = RuvC_P4
  SITE 93: note = RuvC_P5
  REGION 208..295: note = Tnp_domain
  SITE 216: note = Tnp_P1
  SITE 246: note = Tnp_P2
  SITE 254: note = Tnp_P3
  SITE 255: note = Tnp_P4
  SITE 267: note = Tnp_P5
MEKITTVGIDLAKSVFSLHGVDGAGQVMLRRTVRRDQLVKVVAGLSPCLIGMEACSGAHEWGRRFQEHGHTVRLMAPKFVAPYRKSGKNDGNDAEAICEAVSRPNMRFVPVKSAEQQAVLALHRVRQGWIEERTATINRLRAVLTEFGIVLPNRAPHVRRGAQAAAEALPALARRAVEELRAHLALLDERIGAYDRELQAQARQSEAAQRLMQIRGIGPLSAVAIVATVGNARDFRSGRQFAAWLGLTPRQHSSGGKTRLGHISRRGDAYLRCLLVQGARSVLLTATRHSDRLSRWVLSVQARRGYHKALVAIAAKNARIAWALLSKNQTLRAA

SEQ ID NO: 11861 - protein, 410 aa, unidentified
  source 1..410: note = protein_cd43c82
  REGION 14..166: note = RuvC_domain
  SITE 17: note = RuvC_P1
  SITE 65: note = RuvC_P2
  SITE 103: note = RuvC_P3
  SITE 105: note = RuvC_P4
  SITE 108: note = RuvC_P5
  REGION 274..359: note = Tnp_domain
  SITE 281: note = Tnp_P1
  SITE 312: note = Tnp_P2
  SITE 320: note = Tnp_P3
  SITE 321: note = Tnp_P4
  SITE 332: note = Tnp_P5
MQHPTPPSTTAPVAGVDWATDSNALCVVDRDGQVLRELVAAADAAGTRRLLGELDRHGVTQVAIERPDGPLVEALLAAGKAVVVVPPRQVRHLRGRYGQAGNKHDRFDAFVLADVLRTDHRRLQPLHPDSPRTVALRTTVRARSDLVEARVALCNQLRAHLRLVFPGAVGLFADLDAPVSLAFLARFPSADQAAWLTHKRLAAWLAANRYGGRTAVEVLLGRLTGAPAGLSGEHGHAAAATTLAYVHALAAVRGQVAALEARIAEQLALHPDRLVFQSLPRSGTVRAAKLLVEVGDARGRFPTPDSLAALAGAAPSTRQSGRHRAVTFRWACDKKLRDAVVDFAADSRRASPWAQAIYQRHRAAGKTHQHATRILARAWLRVIWRCWQNHTPYNPALHGIAKHRRLPLAA

SEQ ID NO: 11862 - protein, 343 aa, unidentified
  source 1..343: note = protein_ad24379
  REGION 6..149: note = RuvC_domain
  SITE 9: note = RuvC_P1
  SITE 54: note = RuvC_P2
  SITE 89: note = RuvC_P3
  SITE 91: note = RuvC_P4
  SITE 94: note = RuvC_P5
  REGION 213..300: note = Tnp_domain
  SITE 221: note = Tnp_P1
  SITE 251: note = Tnp_P2
  SITE 259: note = Tnp_P3
  SITE 260: note = Tnp_P4
  SITE 272: note = Tnp_P5
MKFMRIGVDLAKNVFQIHGVDCHEQPVWRQRLPRDRWLQTVLEKVEPGCEIGMESCGGAHHWARQLEARGFRVKLIAPQFVKPYVKSNKNDANDAEAICEAMSRPSMRFVAIKTIEQQDIQATHRIRAGLIEQRTAKANQIRGLVAEYGLVAPKELLMLRRAIPCWLEDADNGLTARFRRLLDGLWDDLRALDERVCKLDGEITAIAASEPSAVRLQQLRGVGPMIATALVVALGDARQFANGRQFAASLGLTPRQHSSGGKDRLLGISKRGDAYLRTLMVHGARSALRTAKSKEDRLSQWAVRLAERSHPNVAAIALANKTARMAWAMLRHGTDYQPDQAAA

SEQ ID NO: 11863 - protein, 334 aa, unidentified
  source 1..334: note = protein_8db5040
  REGION 7..149: note = RuvC_domain
  SITE 10: note = RuvC_P1
  SITE 53: note = RuvC_P2
  SITE 88: note = RuvC_P3
  SITE 90: note = RuvC_P4
  SITE 93: note = RuvC_P5
  REGION 209..305: note = Tnp_domain
  SITE 217: note = Tnp_P1
  SITE 247: note = Tnp_P2
  SITE 255: note = Tnp_P3
  SITE 256: note = Tnp_P4
  SITE 268: note = Tnp_P5
MQNVTLIGIDLGKNSFHIHCQEKHGNTLLRKRFSRIQLTQFLATCPPCIVAMESCAGAHFMARHISQLGHQVKLISPQFVRPFVKSNKNDFIDAEAICEAASRPSMRFVTPRTEDQQAMSALHRVRDALVRERVKATNQMHAFLLEFGISMPRGIAVIKRLATVPEEHELPPYLVRLLTRLHQHYGYLCEQIEEIERELKNHLADDETAQRLLTIPGIGTITASLLATKLGDGKNYLSSRDFAASTGLVPRQYSTGGKSTLMGISKRGDKNLRRLLVQCARVYMQRLEYQSGRLAEWVNGQLTRHHSNVVACALANKLARIAWAVTTQGTVFSK

SEQ ID NO: 11864 - protein, 408 aa, unidentified
  source 1..408: note = protein_b99d96a
  REGION 6..169: note = RuvC_domain
  SITE 9: note = RuvC_P1
  SITE 63: note = RuvC_P2
  SITE 109: note = RuvC_P3
  SITE 111: note = RuvC_P4
  SITE 114: note = RuvC_P5
  REGION 281..367: note = Tnp_domain
  SITE 288: note = Tnp_P1
  SITE 318: note = Tnp_P2
  SITE 326: note = Tnp_P3
  SITE 327: note = Tnp_P4
  SITE 340: note = Tnp_P5
MNPLFVGIDVSSKNNVAYLMKPDGSKHSSFSVQNNLGGAKLLSERIVSALSSMRLSDVVIGLEATSIYGDNLVYALREDGGLGRFRRKIHVLNPKQVKKFKEAYPDLPKNDWVDAFVIADHLRFGRIAKEVYMDDYRYQALRTLTRARFDVIQNLTREKQRFANYLFLKCSGMAQDKGIQNTSATTIALMERFETVDNLANADLDDLTAFVAETGRGRFADPESTAKAVQAAARGSYRLPKTVNDTVNQAMAVSIASMRALKEQVKVLDKAIEQQFEIIPNTLTSIPGVGKVYSAGIIAEIGDIHRFASQASVAKFAGLVWTQHQSGEFEAEHSRMIKSGNRYLRYYLLEAANSVRRCDSEFRRYYDLKFKEVNKYQHKRALALTARKLVRLVFRLLKDNRLYIPPEG

SEQ ID NO: 11865 - protein, 343 aa, unidentified
  source 1..343: note = protein_02a2aff
  REGION 6..147: note = RuvC_domain
  SITE 9: note = RuvC_P1
  SITE 52: note = RuvC_P2
  SITE 87: note = RuvC_P3
  SITE 89: note = RuvC_P4
  SITE 92: note = RuvC_P5
  REGION 211..296: note = Tnp_domain
  SITE 219: note = Tnp_P1
  SITE 249: note = Tnp_P2
  SITE 257: note = Tnp_P3
  SITE 258: note = Tnp_P4
  SITE 270: note = Tnp_P5
MQIRSVGIDLGKTTFHLVALGDNGKVLLKKKFTQKQLITFTANLQTSLIGMEACSGAHFLGRVLREQGHDVKLIPAQFVKPFVKSNKNDFLDAEAIAEAVDRHNMRFVPIKTDDQLDLQALHRVRDRLMARRTSVINQIRAFLLERGIVYAKSPIRLREAIPEVLENANENLTPRMRNLVAMLSSEWKELELQIVEMNDEVERIASSDAACLRLRQIPGIGPLVATAIVASIGNGAAFRKGREFAAWMGLVPKQHSTGGKAKLYGISKRGNRYLRKILIHGARAAVLRCKRDRIAMGAWMTSLEIRAPRNVLIVATANKLARIAWAVLSTGQDYRALQDPVSA

SEQ ID NO: 11866 - protein, 392 aa, unidentified
  source 1..392: note = protein_10c2b37
  REGION 5..164: note = RuvC_domain
  SITE 8: note = RuvC_P1
  SITE 61: note = RuvC_P2
  SITE 102: note = RuvC_P3
  SITE 104: note = RuvC_P4
  SITE 107: note = RuvC_P5
  REGION 267..354: note = Tnp_domain
  SITE 275: note = Tnp_P1
  SITE 305: note = Tnp_P2
  SITE 313: note = Tnp_P3
  SITE 314: note = Tnp_P4
  SITE 327: note = Tnp_P5
MVVSVGIDVSKDKHDCFIVNSESEILADVFTIPNNMDGFHYLLQRIQDCTNTQDKIKVGLEATGHYSYNLLGFLLDNGLSTYVLNPLRTNLYRKSLSLRKTKTDRVDARTIASMLLSDAGLKPYTDTAYHNEELKSLTRYRFDKVKERSKLKSSISRLVCILFPELEKLVPSLHLASVYALLEEFPGAKQVAAAHFTRLKALLETASKGHYKRDMALEIRDAARNSIGSQMPAKSLELQHTIRLIRELDNEITEIEEQIQAIMDELHSPITSIPGMGFRMAAMILAEVGDFTRFDSPDKLLAYAGMSPSIYQSGQLKNCYPHMEKRGSRYLRYALYNATKYVCQWDPTFSDYLAKKRAEGKHYNVALSHAAKKLVRLIFAMEKSRTTYRLAA

SEQ ID NO: 11867 - protein, 387 aa, unidentified
  source 1..387: note = protein_78ce472
  REGION 4..159: note = RuvC_domain
  SITE 7: note = RuvC_P1
  SITE 57: note = RuvC_P2
  SITE 98: note = RuvC_P3
  SITE 100: note = RuvC_P4
  SITE 103: note = RuvC_P5
  REGION 262..347: note = Tnp_domain
  SITE 269: note = Tnp_P1
  SITE 299: note = Tnp_P2
  SITE 307: note = Tnp_P3
  SITE 308: note = Tnp_P4
  SITE 320: note = Tnp_P5
MYFVGIDISKFKHDCAIVDELGDVITPSWSFQNDREGFSLLKELLDALDGKKKIGLEATGHYGQNLKLFLENNDFSFIEFNPLLINQFVHSKSLRKTKTDSIDALMIAQYLMTVEYKPYPPSFYTLERLKSLTRFRDNLIRQRSKQLVELTNILDKVFPEFKPFFKGRFSATALYILSHYASPEKISNMNSKSYEPLRRLSRGRFSMVDFVELKTLVRNTVGSTCDYLLQEMEITIDIYNQLQSKAEEIELQIHDCVLDLAPPMLTIPGIGAASAAVILSEFGDLSKFNSPSKLLSFAGMEPGYFQSGTSESTGKMVKHGSSHLRYAMMNCAQTVINNEPTFAAYYAKKRAEGKEHRVALTHVAKKLLRVIYTLQTKELSYNPDLVR

SEQ ID NO: 11868 - protein, 307 aa, unidentified
  source 1..307: note = protein_97433b1
  REGION 30..114: note = RuvC_domain
  SITE 53: note = RuvC_P3
  SITE 55: note = RuvC_P4
  SITE 58: note = RuvC_P5
  REGION 176..262: note = Tnp_domain
  SITE 184: note = Tnp_P1
  SITE 214: note = Tnp_P2
  SITE 222: note = Tnp_P3
  SITE 223: note = Tnp_P4
  SITE 235: note = Tnp_P5
MSSSPSCRPVLWQWRPAAARISLRFRGRELARPGHDIRLIPPAYVKPFIKRQKNDAADAEAICEAAQRPNMRFVPVKSEETQGAASVFRVRELLIRQRTQAINALRGHLTEYGQVVPQSATNARRLIALVADEYPELPATARASLKVLTATLAQLDDQIETLDAEITRRAKENDVARRLMTIPGIGPLIATAIATLAPPPEMFRKGRDFAAWLGLTPRQHSTGGKQRLGATTKMGERSLRRLLIIGANNVIIKRHCHASARPGTWLARMLERKPPMLVRVALANKMARIVWALMKGGEIYRAPAMAV

SEQ ID NO: 11869 - protein, 301 aa, unidentified
  source 1..301: note = protein_8408271
  REGION 1..105: note = RuvC_domain
  SITE 2: note = RuvC_P2
  SITE 42: note = RuvC_P3
  SITE 44: note = RuvC_P4
  SITE 47: note = RuvC_P5
  REGION 219..300: note = Tnp_domain
  SITE 227: note = Tnp_P1
  SITE 257: note = Tnp_P2
  SITE 265: note = Tnp_P3
  SITE 266: note = Tnp_P4
  SITE 279: note = Tnp_P5
MEATGRYHEPVAAALHAYGIYVCVLNPLFIKQSGGGSIRKVKTDKADAMKIAKYGLDNWVDLREYTPMDTVRQQLKLCSRQYNLYMKTVVSLQNNLISLTDKTFPGVNELFSSPERADGHQKWVDFVITFWHCDCICYVSAKAFTERYQKWCKRKGYHFSAEKALDIHAGSCDHFTTLPKNDNTKLLISTAAQQLLAGKVTLAALRAEMTRLSKQLPEYDTVRAMYGVGETTAAQLVAEIGDVRRFPRRSSIIGFAGVDPGIDESGKHSAKSVPTTKRGSPHLRKTLYQIVLHLLEKSPGR

SEQ ID NO: 11870 - protein, 342 aa, unidentified
  source 1..342: note = protein_7a7f641
  REGION 6..148: note = RuvC_domain
  SITE 9: note = RuvC_P1
  SITE 52: note = RuvC_P2
  SITE 87: note = RuvC_P3
  SITE 89: note = RuvC_P4
  SITE 92: note = RuvC_P5
  REGION 210..294: note = Tnp_domain
  SITE 218: note = Tnp_P1
  SITE 248: note = Tnp_P2
  SITE 256: note = Tnp_P3
  SITE 257: note = Tnp_P4
  SITE 269: note = Tnp_P5
MNDTMIGVDLAKNVFQLHGASMSGQVRFRKKLSRQNFSKFMAEHPPALVVMEACGSAHYWAREMVRLGHEVKLIAAQYVRPFVKRQKNDATDAEAIVIAAQRPEMRFVEPKSADQQSRAILFRARERLVHQRTELINALRACLYEYGHVVPQGRNHFKRIEEILDGLNSDLPVLMLEECRDLLKQIAENTARIDERTAKIKALSAEADTARRLRTIPGVGPLTALAIEAFAPHMENFRRGRDFAAWLGLVPRQFSSGGKQRLGRISKSGQSDIRRLLIIGAMTRLNWLGRKSIPEGSWLARMLARKPRMLVAIALANKMARTVWALLTKHEDYRVPAQAPAT

SEQ ID NO: 11871 - protein, 334 aa, unidentified
  source 1..334: note = protein_7546ef6
  REGION 7..148: note = RuvC_domain
  SITE 10: note = RuvC_P1
  SITE 53: note = RuvC_P2
  SITE 88: note = RuvC_P3
  SITE 90: note = RuvC_P4
  SITE 93: note = RuvC_P5
  REGION 209..297: note = Tnp_domain
  SITE 217: note = Tnp_P1
  SITE 247: note = Tnp_P2
  SITE 255: note = Tnp_P3
  SITE 256: note = Tnp_P4
  SITE 268: note = Tnp_P5
MQNVALIGIDLGKHSFHIHCQDKQGNPLLRKKFSRTQLIHFLATCTPSTVAFESCAGAHFMARTIGKLGHQVKLISPQFVRPFVKSNKNDFIDAEAICEAASRPSMRFVTPRTEDQQAMAALHRVRDSLIRERVKTTNQIHAFLLEFGVSLPRGITVIRRLAAVLEENDFPAYLARLLNRLHSHYVYLSGEIGEVDKELKNHLAEDETAQRLLTIPGVGPVTASLLATRQGDGKNYASSRDFAASTVRVPRQYSTGGKTTLMGISKRGDKNLRRLLVQCARVFMQRLEHNPGRLAEWVKRQLASHHSNVVACALANKLARIVWAVTAHQAVFSK

SEQ ID NO: 11872 - protein, 334 aa, unidentified
  source 1..334: note = protein_4947ada
  REGION 7..149: note = RuvC_domain
  SITE 10: note = RuvC_P1
  SITE 53: note = RuvC_P2
  SITE 88: note = RuvC_P3
  SITE 90: note = RuvC_P4
  SITE 93: note = RuvC_P5
  REGION 208..294: note = Tnp_domain
  SITE 216: note = Tnp_P1
  SITE 246: note = Tnp_P2
  SITE 254: note = Tnp_P3
  SITE 255: note = Tnp_P4
  SITE 267: note = Tnp_P5
MEKITTVGIDLAKSVFSLHGVDGMGRVVLRKTVRRDQLEAVVAGLSPCLIGMEACSGAHEWARRFERHGHTVRLIAPKFVIPYRKSGKNDGNDAEAICEAVSRPSMRFVPVKSLEQQALLALHRVRQGFVVERTATINRLRGLMAEFGVVLPLRSVTVRRQAAAAAEGLPELARRMVAELLEQLRLLDERIGAYDRELGAQARLSEPAQRLMKIRGIGPTTALAIVATVGNAREFDNGRQFAAWLGLVPGQYSTGGKARLGRITKRGDAYLRNLLVYGARSVLHTAAAHRDRISRWALELQGRCGYHRTLVAIANKNARIAWALLAKGEQLRPE

SEQ ID NO: 11873 - protein, 408 aa, unidentified
  source 1..408: note = protein_7233bbe
  REGION 15..171: note = RuvC_domain
  SITE 18: note = RuvC_P1
  SITE 69: note = RuvC_P2
  SITE 109: note = RuvC_P3
  SITE 111: note = RuvC_P4
  SITE 114: note = RuvC_P5
  REGION 277..364: note = Tnp_domain
  SITE 285: note = Tnp_P1
  SITE 316: note = Tnp_P2
  SITE 324: note = Tnp_P3
  SITE 325: note = Tnp_P4
  SITE 337: note = Tnp_P5
MTTITEVAVRQQVWAGVDAGKSDHHCVVINVEGIQLLSQRVVNDETALLDLIGAVTALADGGDITWAIDLNAGGAALLITLLIASEQRLLYIPGRTVYHASAGYRGDGKTDAKDAAVIADQARMRRDLQPLRPGDDIAVELRILSSRRTDLVADRTRAINRLRAQLLEYFPALERAFDYSTSKAALILLTGYQTPDGLRRAGPARLTAWLAKRKARNASAVAAKAIEAANAQHSIVPGQNLAATMIARLAKEVMALDTEIGATETMIEDRFRRHRHAEIIVSMPGFGVVLGAEFLAATGGELSAFDSVDRLAGVSGLAPVPRDSGRISGNRKRPRRYDRRLLRACYLSAQIAIRTDTPSRNYYDRKRSEGKTHTQAVLALARRRLNVLWAMLRDHRPYQPTAPNTAAA

SEQ ID NO: 11874 - protein, 342 aa, unidentified
  source 1..342: note = protein_f3fa0fb
  REGION 6..147: note = RuvC_domain
  SITE 9: note = RuvC_P1
  SITE 52: note = RuvC_P2
  SITE 87: note = RuvC_P3
  SITE 89: note = RuvC_P4
  SITE 92: note = RuvC_P5
  REGION 211..292: note = Tnp_domain
  SITE 219: note = Tnp_P1
  SITE 249: note = Tnp_P2
  SITE 257: note = Tnp_P3
  SITE 258: note = Tnp_P4
  SITE 270: note = Tnp_P5
MAIAVLGVDLGKNSCSVAALDATGRVVLRRRLNRDGVVRLAAGSPGCLVAMEACCGAHHLGRRLRDAGHEVRLMSPEYVQPYVKAQKNDERDAEAIAEAATRPTMRFVELKSEAQLDMQSLHRARDRLVGERTALINQLRAILLERGIIVPQGRRKLEVYLETLLSEERVSLSPRIRLLVEDQRAEWRELDRRIEAFDEEFAAAARSDEAARLLTTIPGIGPLNATALVAAIGRAATFGRGRDLAAWLGLVPRQMTTGGKPKLLGISKRGNVYLRKMLIHGARAALPTLLKGDTLLGRWLRSLSARAHVNTVVVALAAKLARIICAVLRSGQRFEMKVAAMS

SEQ ID NO: 11875 - protein, 412 aa, unidentified
  source 1..412: note = protein_b2ebe4a
  REGION 4..161: note = RuvC_domain
  SITE 7: note = RuvC_P1
  SITE 57: note = RuvC_P2
  SITE 98: note = RuvC_P3
  SITE 100: note = RuvC_P4
  SITE 103: note = RuvC_P5
  REGION 276..362: note = Tnp_domain
  SITE 283: note = Tnp_P1
  SITE 313: note = Tnp_P2
  SITE 321: note = Tnp_P3
  SITE 322: note = Tnp_P4
  SITE 335: note = Tnp_P5
MNAVGIDVSKGKSMVAVRRPFNETVAKPFEVRHTGSELKQLADYLKSLDGETRVVMEHTGRYYEQIAQYLHDAGLYVSAVNPKLIKDYGGGTSLRHVKTDKADARKIAGYALDRWAELRQHTPMDTIRYQLKMLNRQCGLYTKTKTMMKNNLIALLDQTYPGVNALFDSPVREDGTQKWVDFAASFWHVDCVRGMSRTAFVQRYAKWCKQHRYQARAGRAEEIYEHSQDLIAMLPKDAMTKLLVKQSVDAINAVSATLERLKAEMLKLASLLPEFPVVMAMRGVGDTLGPQLMAEIGDVARFAHRSAITSFAGVDPGANQSGTHEAKSVRISKSGSPELRKALFLVMDCLIQTKPQDDPVYLFMDKKRAEGKPYLVYMTAGANKFLRIYYGRVKEHLASLKGNPVPDPEGHT

SEQ ID NO: 11876 - protein, 413 aa, unidentified
  source 1..413: note = protein_cfd9c5e
  REGION 4..160: note = RuvC_domain
  SITE 7: note = RuvC_P1
  SITE 57: note = RuvC_P2
  SITE 97: note = RuvC_P3
  SITE 99: note = RuvC_P4
  SITE 102: note = RuvC_P5
  REGION 274..361: note = Tnp_domain
  SITE 282: note = Tnp_P1
  SITE 312: note = Tnp_P2
  SITE 320: note = Tnp_P3
  SITE 321: note = Tnp_P4
  SITE 334: note = Tnp_P5
MNSVGIDVSNGRSMVAVLRPLGEVVSAPFEVRHDSVSLLSLSQFLQQLEGESRVVMEHTGRYYESIAKSLHEAGLFVSAVNPLLIKEYGGNSLRKVKTDKADAVKIAKYGLDNWAELRDYTPMDETRYNLKTMHRQFQLASKTRTALSNNFVALQEQSFPGIRKCFDSPVRSDGTQKWVDFTYTFWHVDCVRKVSLKAFTERYRKWCKRHGYNFNTDKAAEVYALAMSAVVLVSKNETTKVLVQQAAAQLTSISRSVETYRAEMNRLASTLPEYPIVMAQYGVGTSFGPQLMAEIGDVRRFARKQSLVAFAGVDPAPNDSGDKTSRSNKTTKRGSPYLRKTLFCLMSTILQKSPVDDPIYQFLDKKRSEGKPYYVYMTAGANKFLRHYYAKVMNYLDTLENEASGKDPQQPSC

SEQ ID NO: 11877 - protein, 339 aa, unidentified
  source 1..339: note = protein_5f4504e
  REGION 6..147: note = RuvC_domain
  SITE 9: note = RuvC_P1
  SITE 52: note = RuvC_P2
  SITE 87: note = RuvC_P3
  SITE 89: note = RuvC_P4
  SITE 92: note = RuvC_P5
  REGION 211..298: note = Tnp_domain
  SITE 219: note = Tnp_P1
  SITE 249: note = Tnp_P2
  SITE 257: note = Tnp_P3
  SITE 258: note = Tnp_P4
  SITE 270: note = Tnp_P5
MEVTTIGLDLAKNVFQVHGITEGEEVVFNRPLRRAQLLPFFSKIEPCLIGMEACSSAHYWARELTALGHEVRLIPPMYVKPYVKRGKSDAIDAAAICEAVTRPTMRFVAIKTVEQQALLSLHRARDLLVRQRTQLINGLRGMVAEFGVYIARGLARVIGFAEDILAGEVLDLPEIANEVIHNLCEHLMALHARIRWYEDRLKVVAKEDTRVRLLRTIPGVGAVTASAIIASIGDGHQFRNGREFAAWLGLTPANKSSGGKEKLGRITKMGDQYLRSLLVVGMTSLVRQTKSHPERASKWLTGLLDRKPARVATVAMANKTARIVWAVLTRNETYSPHSA

SEQ ID NO: 11878 - protein, 341 aa, unidentified
  source 1..341: note = protein_83849d4
  REGION 6..148: note = RuvC_domain
  SITE 9: note = RuvC_P1
  SITE 52: note = RuvC_P2
  SITE 87: note = RuvC_P3
  SITE 89: note = RuvC_P4
  SITE 92: note = RuvC_P5
  REGION 211..297: note = Tnp_domain
  SITE 219: note = Tnp_P1
  SITE 249: note = Tnp_P2
  SITE 257: note = Tnp_P3
  SITE 258: note = Tnp_P4
  SITE 270: note = Tnp_P5
MQITTIGLDLAKNVFQVHGIDATEKVVVRKQLRRGQLIKFFEALAPCLIGMEACATAHHWARELTKLGHEVRLMPAKDVKAYVKRNKNDAADAEAICEAVRRPTMRFVMVKSAEQQGRLMQHRVRDLLMRQRTQLINALRAHLAELGIAAAQGREGIKELLAIVAQDGGSRLPVDAHASLIVLAAQLQAVQTMIGSIEKRVVGQHRSNEESKRLETIPGIGVIGATAIAATVPDPKVFRSGRDFAAWIGLVPREDSTGGKQKLGPISKQGDRYLRRILVVGACAVLKQARQQPEKYPWLTQLLARRPFKVVAVALANKMARVAWALLAKGGTYRAPRLKAA

SEQ ID NO: 11879 - protein, 342 aa, unidentified
  source 1..342: note = protein_025a32e
  REGION 6..147: note = RuvC_domain
  SITE 9: note = RuvC_P1
  SITE 52: note = RuvC_P2
  SITE 87: note = RuvC_P3
  SITE 89: note = RuvC_P4
  SITE 92: note = RuvC_P5
  REGION 210..293: note = Tnp_domain
  SITE 218: note = Tnp_P1
  SITE 248: note = Tnp_P2
  SITE 256: note = Tnp_P3
  SITE 257: note = Tnp_P4
  SITE 269: note = Tnp_P5
MKNMMIGVDLAKAVFQVHGALPTGEVQFRKKLSRKQFPAFMAQQESSMVIFEASGSAHFWAREMEALGQEVKLIAPQYVRPFVKRQKNDAADAEAIVIAARQPEMRFVEPKTVDQQSCAAVFRGRERLVHQRTADVNALRTLLYEHGYVFPVGMSHLNRMTALVQDETVDLHTLIREECLDLLAQIAEKTACIIERTTKLKTLAAESDRARRLQTMPGVGPLTAVAVEAFGPDMAEFKTGRNFAAWLGLVPRQHSSGGKERLGRMTKAGQADIRRLLIIGAMSRLNWLGQRTIVEGSWLSHMLMRKPKMLVATALANKMARQIWAMLTKNRDDRDPAIAVGA

SEQ ID NO: 11880 - protein, 400 aa, unidentified
  source 1..400: note = protein_5cd4aaa
  REGION 11..166: note = RuvC_domain
  SITE 14: note = RuvC_P1
  SITE 63: note = RuvC_P2
  SITE 103: note = RuvC_P3
  SITE 105: note = RuvC_P4
  SITE 108: note = RuvC_P5
  REGION 273..358: note = Tnp_domain
  SITE 281: note = Tnp_P1
  SITE 311: note = Tnp_P2
  SITE 319: note = Tnp_P3
  SITE 320: note = Tnp_P4
  SITE 332: note = Tnp_P5
MIDVSDIGVFLGLDVGKGEHHATAVTPARKKAFDKRLPNSEPKLREVFGKLQAKHGTVLVVVDQPASIGALPLAVARDMGCPVAYLPGLTMRRIADLYPGEAKTDARDAFVIADAARVMPHTLRSVDLEDETIAELEMIVGFDDDLAGEATRVSNRLRGLLTQIHPSLERVLGPRVQHPAVLKLLDQFGSPAQIRKAGRRRLVTLIRPKAPRMAERLVEDIFTALDEQTVVVPGTDAAALIVPSLANSLQAVLDQRKLLAARIEELLEAHPLSKVLTSMPGIGVRTGARILIDVGDGSSFPSAAHLAAYAGLAPATRSSGSSIRGEQPSRRGNKQLKRAFFLSAFAALADPASRTYYDKKIAQGKHHTQALLCLARRRADVLFAMLRDGTFYEPQPAPTG

SEQ ID NO: 11881 - protein, 318 aa, unidentified
  source 1..318: note = protein_f64b909
  REGION 11..154: note = RuvC_domain
  SITE 14: note = RuvC_P1
  SITE 58: note = RuvC_P2
  SITE 98: note = RuvC_P3
  SITE 100: note = RuvC_P4
  SITE 103: note = RuvC_P5
  REGION 193..277: note = Tnp_domain
  SITE 201: note = Tnp_P1
  SITE 230: note = Tnp_P2
  SITE 238: note = Tnp_P3
  SITE 239: note = Tnp_P4
  SITE 250: note = Tnp_P5
MNTKTKQNINVGVDTGKYQLDIYIRPLDIYFTVPNDDKGIKEAVKTIKKYKPERIVIEATGRLEMPFILACANANLPFTIANPIHVKRFAGAIGQRAKTDKLDAQLIAHYSEAIKPKLSQLKPDTMQAMSDLVTRRNQLLTMQTMEKNRLQIMPKALAMTIKPVLTLFNNQIKKIEEKIVKLIESCPEYQAKNMILQSMTGIGKIAAASIISNLPELGYINSKQASSLIGVAPMNRESGRYKGHRKIQGGRPQVRTVLYMAMMSAMQSNPVFKVTYQRLLAAGKPKKVAIIACIRKMIVILNSMLRDGVVWEAPKVNN

SEQ ID NO: 11882 - protein, 301 aa, unidentified
  source 1..301: note = protein_180757b
  REGION 1..166: note = RuvC_domain
  SITE 44: note = RuvC_P2
  SITE 84: note = RuvC_P3
  SITE 86: note = RuvC_P4
  SITE 89: note = RuvC_P5
  REGION 178..262: note = Tnp_domain
  SITE 186: note = Tnp_P1
  SITE 215: note = Tnp_P2
  SITE 223: note = Tnp_P3
  SITE 224: note = Tnp_P4
  SITE 235: note = Tnp_P5
MSKDILAVCVLPDKRQRDYANTLEGWTELLDELSGYEVQRVLLEATGGYEAGVLRYLAAVNLPVVRINPRQARAFAQAMGRQAKTDRIDAALLAHQAQVIEGTAYQPQSAQALALQELVKRRTHLVAQRDDDRRRLAKASLPAVQANIRQCLDFLNQQIASLNQAIAQACKALDGSRAQRLASVSGIGPVSVANLLAYLPELGHLDRRQIAALVGVAPYNVDSGAKKGIRRISGGRSAIRRVLYMAAWSVVRHQADFNRRYQELLQRGKPAKVALIACLRVLLIRLNAMLRDGTPWRSEPV

SEQ ID NO: 11883 - protein, 263 aa, unidentified
  source 1..263: note = protein_3bd686c
  REGION 2..71: note = RuvC_domain
  SITE 11: note = RuvC_P3
  SITE 13: note = RuvC_P4
  SITE 16: note = RuvC_P5
  REGION 131..218: note = Tnp_domain
  SITE 139: note = Tnp_P1
  SITE 169: note = Tnp_P2
  SITE 177: note = Tnp_P3
  SITE 178: note = Tnp_P4
  SITE 190: note = Tnp_P5
MQAVLKAQINKTDRNDARGIAQMMRVGLYRPVHVKTLRSQKLRMLLTHRKLLQSKAIAIENDLRGTLRNFGLKVGMVGTVKFEARIKELVENFSDLAVLVEPLLMVRRVLREQFSVLHRRLLAIVRDDEVCRRLMTTPGVGPVVALTYRATVDVPARFRKSKAVGAVFGLTCSRYQSGEIDWSGRISRCGDEMMRVMLYEAAQSMLRSKKWSWLKAWAMQIARRRGMKKAIVALARRLAVIMHRIWVDGTEFRWTREQAVAAT

SEQ ID NO: 11884 - protein, 343 aa, unidentified
  source 1..343: note = protein_46099e9
  REGION 6..140: note = RuvC_domain
  SITE 9: note = RuvC_P1
  SITE 52: note = RuvC_P2
  SITE 83: note = RuvC_P3
  SITE 85: note = RuvC_P4
  SITE 88: note = RuvC_P5
  REGION 204..291: note = Tnp_domain
  SITE 212: note = Tnp_P1
  SITE 242: note = Tnp_P2
  SITE 250: note = Tnp_P3
  SITE 251: note = Tnp_P4
  SITE 263: note = Tnp_P5
MEQHTIGVDLGKTVFHLVGLNRLGEIVVRKKLSRPQLLRFTANLHVQLIGMEACGGAHFLGRALREQGHEVRLIPAQYVKTNKSDYIDAEAVGRPTMRRFVPIKTDHQLDLQSLHRVRERWVMRRTAVINQTRSLLLERGITLRRGRCHLETALPEIIEDATAKLSGALRILLTQMKLELDQLVTRIEEADAGIKQVAQENEACQRLITIPGVGPVTATALIAAIGNGAAFRKGREFAAWIGVVPREYSTGGKQKLLGISKRGNPYLRRLFVQGARSVMMHRTKQSSGLSQWLEKLSLHKHHNIALIALANKLARMAWAVLTSGQVYQPPVLTDIGSAKLVCR

SEQ ID NO: 11885 - protein, 419 aa, unidentified
  source 1..419: note = protein_dc045b5
  REGION 36..191: note = RuvC_domain
  SITE 39: note = RuvC_P1
  SITE 90: note = RuvC_P2
  SITE 130: note = RuvC_P3
  SITE 132: note = RuvC_P4
  SITE 135: note = RuvC_P5
  REGION 295..382: note = Tnp_domain
  SITE 303: note = Tnp_P1
  SITE 333: note = Tnp_P2
  SITE 341: note = Tnp_P3
  SITE 342: note = Tnp_P4
  SITE 355: note = Tnp_P5
MGYSRQSTYFNQVYEGKHLWYCHSVNTQKGAFMIYVGIDIAKLNHFASALSSDGEIMLQPFKFTNDYDGFHLLTQKLESFNSDDIIIGLESTAHYGSNLVEFLVINNYKVCVINPIQTSSMRKNNIRKTKTDKVDTFIIAKTLILNPHRLFTMQDISIMHLKQLGRFRMKLIKKRTQAKIQLTSYVDQAFPELQYFFKSGIHQKSVYAVLKEAPTTDAIISMHLTHLSHLLETTSHGHFKKSTATELRILAQRSVGSSDSSISTQITQTIDLVELLDSQVNKVESDMEAVVTSLDSVIMTIPGIGFINGGMILGEIGDISRFSNPSKVLAFSGLDPTVYQSGNFNASHTKMSKRGSRPLRYALINAAHNVVRNNKTFKAYYDQKISEGKSHYNALGHCAGKLVRIIYKMLTDNVEFKLD

SEQ ID NO: 11886 - protein, 348 aa, unidentified
  source 1..348: note = protein_57d8f28
  REGION 7..143: note = RuvC_domain
  SITE 10: note = RuvC_P1
  SITE 53: note = RuvC_P2
  SITE 88: note = RuvC_P3
  SITE 90: note = RuvC_P4
  SITE 93: note = RuvC_P5
  REGION 210..296: note = Tnp_domain
  SITE 218: note = Tnp_P1
  SITE 248: note = Tnp_P2
  SITE 256: note = Tnp_P3
  SITE 257: note = Tnp_P4
  SITE 269: note = Tnp_P5
MDQVIRIGLDTSKRLFQLHGVDAAERVVLKRKLSRSAMEAFFARLPPTLVVLEACGASHHWARVLTAMGHDVRLIAPQLAKPYVKRGKNDAADAEALCEAAGRPSMRFVPMKSAGQQADLMLAGMRERLGRRRTQLANTIRGYGAEFGHVGAKGAAHVRPLLETVQDDPEIPPLAREMFAELALELAELEERLCAIEVRLKAWHLANEASRRLAEVPGIGPIIATTLVMKTPHPEAFRSGRDFAAWIGLTPKDHSTAGKTRLGRITRAGDETLRSLLVVGATAVVWQVRRGKARRPMPWLTSLLARKPPKLAAIALANKLARIAWALLARGGRYRTSDARPEACPAAA

SEQ ID NO: 11887 - protein, 341 aa, unidentified
  source 1..341: note = protein_03d8ed4
  REGION 6..148: note = RuvC_domain
  SITE 9: note = RuvC_P1
  SITE 52: note = RuvC_P2
  SITE 87: note = RuvC_P3
  SITE 89: note = RuvC_P4
  SITE 92: note = RuvC_P5
  REGION 210..294: note = Tnp_domain
  SITE 218: note = Tnp_P1
  SITE 248: note = Tnp_P2
  SITE 256: note = Tnp_P3
  SITE 257: note = Tnp_P4
  SITE 269: note = Tnp_P5
MKDTMIGVDLAKRVFQLHGATMSGEVKFRKKLSREQFRAFMAAQPAALVVFEACGSASYWAREMVALGHEARLIAPQYVRPFVKRQKNDAADAEAIVIAARQPDMRFVAPKTAEQQAKAVLFRGRERLVHQRTELVNALRAVLYEYGHVFPVGFCHVKRIAAVVEDPDYDLPALVISECQDLLAQIAEKTERIEAKTKALKALAAETDTARRLQTMPGVGPLTALAVEAFAPDMTQFKTGRDFAAWLGLVPKQHSSGGKERLGRMTKAGQADIRRLLIIGAMSRMNWLGQRTIVEGSWLSRMLTRKPKMLVAIALANKMARQIWAMLTKNEDYKDPALVTA

SEQ ID NO: 11888 - protein, 333 aa, unidentified
  source 1..333: note = protein_a72d708
  REGION 11..163: note = RuvC_domain
  SITE 14: note = RuvC_P1
  SITE 68: note = RuvC_P2
  SITE 106: note = RuvC_P3
  SITE 108: note = RuvC_P4
  SITE 111: note = RuvC_P5
  REGION 204..291: note = Tnp_domain
  SITE 212: note = Tnp_P1
  SITE 242: note = Tnp_P2
  SITE 250: note = Tnp_P3
  SITE 251: note = Tnp_P4
  SITE 264: note = Tnp_P5
MQDLSTKQHFVGCDVSKDTLDLALYQPKTDYRKFEQVQISNDTEGFKQLLQWLKARKIKKNEVAIAFEHTGAYSIALAEWLHKKKITFNMLHPLDVKNACSRGRNKTDEVDAKFIADYAYTMREKLAPSGPEPKNIKHLRELRNERDLCVRCRASYLCQIKVQTEAQTIARMHKMVDFMTVQIHQIEEEIKKIIAADETIATNYHLLISIPGIGMVNAVNTIVATGNFTRFQTSRQYAKFCSVSPMAVQSGTSVHSGNHVCKKGHNELKATLSEAARSAIIHDPQLRHYYQRKRSQGKSHGCVMNAVKFKLICRMFAVIKRQQPYVNTECYRG

SEQ ID NO: 11889 - protein, 327 aa, unidentified
  source 1..327: note = protein_2b88542
  REGION 1..94: note = RuvC_domain
  SITE 31: note = RuvC_P3
  SITE 33: note = RuvC_P4
  SITE 36: note = RuvC_P5
  REGION 201..285: note = Tnp_domain
  SITE 209: note = Tnp_P1
  SITE 238: note = Tnp_P2
  SITE 246: note = Tnp_P3
  SITE 247: note = Tnp_P4
  SITE 259: note = Tnp_P5
MAVARDEGVLVAYLPGLAMRRIADLHAGEAKTDARDAAIIAEAARSMPHTLRSLRLADEPLAELTMLCGFDDDLAAQVTQTSNRIRGLLTQIHPALERVLGPHLDHPAVLDLLERYPSPAALAATSEKTLANRLTKLAPRMGKRLAAEIVQALGEQTVVVPGTQAATVVMPRLAKQLAALLQQRDEIASEVERLVHLHPLYPVLTSMPGVGVRTAARLLTEVAHKAFASAAHLAAYAGLAPVTRRSGSSIRGEHPSRRGNKVLKRTLFLSAFAALRDPISRAYYARKIQQGKRHNQALIALARRRCDVLFAILRDGTFYQPQTAPNA

SEQ ID NO: 11890 - protein, 388 aa, unidentified
  source 1..388: note = protein_640a766
  REGION 4..160: note = RuvC_domain
  SITE 7: note = RuvC_P1
  SITE 58: note = RuvC_P2
  SITE 99: note = RuvC_P3
  SITE 101: note = RuvC_P4
  SITE 104: note = RuvC_P5
  REGION 262..348: note = Tnp_domain
  SITE 270: note = Tnp_P1
  SITE 300: note = Tnp_P2
  SITE 308: note = Tnp_P3
  SITE 309: note = Tnp_P4
  SITE 321: note = Tnp_P5
MYLVGIDISKYKHNCFIATESGVPLKEFVFENNFEGFKLFHQVLSELDQDQEIRIGLESTGHYGTNLKQFIMASGYTYLEFNPYLTHQFSKAMSLRKTKTDKVDAKTISNMLGSVDYKTLHTQFYHINELKQLVRDRDDILTNRSKTLVKLTNLLDIIFPEYKPFFNNRLGATALSLLKKYGSPQRISKLTMKDFDDLRSKSKGRLTYPKFSHLKLLAKETVGIQSEVYQKRMLTLIDDYTYFDQSLDEIERDIINLFKEAESKLTTIPGLSIIQAATIYAEIGDIHLFSNPQKLIAYVGFDISISQSGISEHHGHIVKRGSPLLRKAIWIYALPSLRFIPTLNDYYHKKRAEGKHHKVALTHVCRKLIRVIYHIEYNHIDFDDKEVK

SEQ ID NO: 11891 - protein, 416 aa, unidentified
  source 1..416: note = protein_e625e30
  REGION 9..159: note = RuvC_domain
  SITE 12: note = RuvC_P1
  SITE 63: note = RuvC_P2
  SITE 98: note = RuvC_P3
  SITE 100: note = RuvC_P4
  SITE 103: note = RuvC_P5
  REGION 258..345: note = Tnp_domain
  SITE 266: note = Tnp_P1
  SITE 297: note = Tnp_P2
  SITE 305: note = Tnp_P3
  SITE 306: note = Tnp_P4
  SITE 317: note = Tnp_P5
MDAIVERCAGLDVHLDTVVACVLYGKLDIKPKKEVKTFSTTTKGLLELLDFINQKECTHVAMESTGIYWKPVWNILESGAFDLIVANAKKIKNVPGRKTDVKDAEWIASLLRCGLIEKSFVPPERIRDLRDLTRLRKELLGEVNRNKNRIHKVLQDANIKISSVLSDVFGETGKSILNQIIGNQCITEEFIYSLYEGRGKSKLKSTLMEMYEALNGKIRGHHVILLGMHNSNIVFLEKQINELEKEIDILLQKERDSLELLETIPGISKISASSIIAEIGTSMDVFKTEKHISSWAGLCPKNNESAGKKKRSGIKSWNNWLRSMLCECAWSATKKKDSRFKNKYWSMVPRMGRKKALIAIANMMLRLIYHLLKTKSTYKELEIQYFIDKDKRREDRIIKELKSKGYLVEKDSLQMA

SEQ ID NO: 11892 - protein, 340 aa, unidentified
  source 1..340: note = protein_c0f9ecc
  REGION 7..149: note = RuvC_domain
  SITE 10: note = RuvC_P1
  SITE 53: note = RuvC_P2
  SITE 88: note = RuvC_P3
  SITE 90: note = RuvC_P4
  SITE 93: note = RuvC_P5
  REGION 212..297: note = Tnp_domain
  SITE 220: note = Tnp_P1
  SITE 250: note = Tnp_P2
  SITE 258: note = Tnp_P3
  SITE 259: note = Tnp_P4
  SITE 271: note = Tnp_P5
MSSHFFCGVDLAKHHFSLHAVDDRGKVILHKSVSRAKLLTTLANMPPMRIGIEACSGAHYWAREFIKLGHDARVMAAKYVGPYRTKGKNDLNDAIAICEAVQRPNTRFVPVKSPERQAILSIHRMREHWVQERTALINRIRALLAEFGIVIPTGRHAIQRDVPLILEAADYGLPDIARAVLGDSFEHLQVLNQRIDDTELCFDIVTKASPNAQRILKVRGIGPQTATAIIATIGKGEQFDSGRDFAAWLGLVPKQYSTGGKPRLGRISKRGDKYLRTLLVHGARAAITNLGEKQDRLSVWARDILERRGMNRAIVALAAKNARIIWALLHNQTDYQDYAA

SEQ ID NO: 11893 - protein, 411 aa, unidentified
  source 1..411: note = protein_3b605f9
  REGION 5..168: note = RuvC_domain
  SITE 8: note = RuvC_P1
  SITE 65: note = RuvC_P2
  SITE 105: note = RuvC_P3
  SITE 107: note = RuvC_P4
  SITE 110: note = RuvC_P5
  REGION 276..362: note = Tnp_domain
  SITE 284: note = Tnp_P1
  SITE 315: note = Tnp_P2
  SITE 323: note = Tnp_P3
  SITE 324: note = Tnp_P4
MLLFVGDDWAEDHHDVEVMDASGRRLAKARLPEGMAGMTRLHAMIGQALGDDIDAEDVSGRVRIGIETDRGPWVQALVAAGYTVYPVNPLQAARYRERLAVSGAKSDAADAHMLADMVRTDSHQLRPMAGDSADAEAVKVVSRMHKTLIWERTRAGQRLRHALREYFPAALAAFEDLDAADTLELLAKAPDPASAARLSLAQISAALKRARRRDIPAKAAAIQTTLRAEHLGQPAVVTAAYAASVRALIALLSTLNEQVKVLQGQVEAHFGRHPDAEIILSQPGLGTVLGARVLAEFGDDHARYVSAKARKNYAATSPITRASGKKRTVAARFVHNDRLIDALMTQAFSALKASPGARAYYDRQRARGASYNAALRQLANRLVGILHGCLKTGTPYDEATAWSHHLNEAAA

SEQ ID NO: 11894 - protein, 343 aa, unidentified
  source 1..343: note = protein_a01d8ca
  REGION 6..148: note = RuvC_domain
  SITE 9: note = RuvC_P1
  SITE 52: note = RuvC_P2
  SITE 87: note = RuvC_P3
  SITE 89: note = RuvC_P4
  SITE 92: note = RuvC_P5
  REGION 210..298: note = Tnp_domain
  SITE 218: note = Tnp_P1
  SITE 248: note = Tnp_P2
  SITE 256: note = Tnp_P3
  SITE 257: note = Tnp_P4
  SITE 269: note = Tnp_P5
MQITTIGLDLAKNWFQVHGVDANGQVVVRKRLWRSGVIAYFRSLEPCLVGMEACATAHYWARELAALGHTVKLMPPAYVKAYVKRNKNDAADAEAICEAVTRPSMRFVPVKDAEQQSVLMLHRVRSLLVRQRTMLVNALRAHMAEFGIIAPQGLRHVEILTKTIAHEQKQLPELARSILQTIVEQLNGTMARIREIEVSIARWHQQNRVSRSLATVPGVGIMGASAVAATVADPSLFRSGREFAAWLGMTPRQNSSGGKEHLGRTSKRGDKYIRSLLIAGAMAVLRHARNRPTRDGEWVRALLARKPTKVAAVALANKTARIVWAVMMRGDGYRATEVFGQPA

SEQ ID NO: 11895 - protein, 406 aa, unidentified
  source 1..406: note = protein_a4197b2
  REGION 4..163: note = RuvC_domain
  SITE 7: note = RuvC_P1
  SITE 60: note = RuvC_P2
  SITE 100: note = RuvC_P3
  SITE 102: note = RuvC_P4
  SITE 105: note = RuvC_P5
  REGION 271..357: note = Tnp_domain
  SITE 279: note = Tnp_P1
  SITE 310: note = Tnp_P2
  SITE 318: note = Tnp_P3
  SITE 319: note = Tnp_P4
MLFVGDDWAEDHHDVEIQDETGRRLAKARLPEGISGMARLHGLVGRFLPEDGAAAGVKIGIETDRGPWVAALVASGYQVYAINALQSARARQSQGVSGAKSDAGDAHVLADLVRTHSHQLPTVAGDSEHAGAVKVLTRMHQTLIWDRTRQVLRLRSSLREFFPAALEAYEDLAFPDVLELLTKAPEPNSAARLTRAQITAALTRAHRRDREAKTTAIMAALAAEHLTQPPLIAAAYGATVRALAALIGTSNEQITALQGQVEACFGQHPDAEIYLSQPGLGLVLGARVLAEFGDDPTRYDGARARKNYAGTSPITRASGKKKVVLARYVRNNRLADALHQQAFSALSGSPGACAYYDALRDRDISYNAALRQLGNRLVGILHGCIKTHTPYDEATAWNQHTQQAAA

SEQ ID NO: 11896 - protein, 405 aa, unidentified
  source 1..405: note = protein_91aaed3
  REGION 15..169: note = RuvC_domain
  SITE 18: note = RuvC_P1
  SITE 66: note = RuvC_P2
  SITE 106: note = RuvC_P3
  SITE 108: note = RuvC_P4
  SITE 111: note = RuvC_P5
  REGION 276..360: note = Tnp_domain
  SITE 284: note = Tnp_P1
  SITE 313: note = Tnp_P2
  SITE 321: note = Tnp_P3
  SITE 322: note = Tnp_P4
  SITE 334: note = Tnp_P5
MGMNITGYDGVDVFIGVDVGKGEHHAVAVDRAGKRLFDKALPNEETKLRELIRGLKDRGTVLFVVDQPATIGALPLAVAQAENVLIGYLPGLAMRRIADLHAGEAKTDRRDAAIIAEAARTLPHALRSLALADEQVAELSMLCGFDDDLAQQINATGNRIRGLLTQIHPTLERVIGKHLDHPAIVDLLQRYPSPAALAAAGEKRLGDRLSKLAPRIGRRLAAGIVQALSEQTVVVVGTNAAALVLPRLAKQLADLRQQRDDIAVEVERLVEAHPLHPVLTSMPGVGVRTTARLLTEVAGKSFATAAHLASYAGLAPVTRRSGSSIRGEHASRRGNKLLKRALFLSAFAALRDPVSRAYYDRKIAQGKRHNEALIALARRRCDVLHAMIRDGSLYHPRTPLPATAA

SEQ ID NO: 11897 - protein, 344 aa, unidentified
  source 1..344: note = protein_42e8faf
  REGION 4..157: note = RuvC_domain
  SITE 7: note = RuvC_P1
  SITE 55: note = RuvC_P2
  SITE 96: note = RuvC_P3
  SITE 98: note = RuvC_P4
  SITE 101: note = RuvC_P5
  REGION 219..304: note = Tnp_domain
  SITE 227: note = Tnp_P1
  SITE 257: note = Tnp_P2
  SITE 265: note = Tnp_P3
  SITE 266: note = Tnp_P4
  SITE 277: note = Tnp_P5
MILIGIDPHKSSHTAVAVDASGHQLAKRRFVVNAGTLRQLMAWCEQWPERRFAVEGAGGLGRSLAQQLAAAGEDVVDVPATLSARARLLATGGNRKTDEADARHVAQVALFRPDLRQVTAEDQTTILRLLTERRDDLVHERTRVLNRLHAVLRDLLPGGVATGLSADKAAAAMKGIRPVTATDNCRRDIARDLLADLRRLDRLVKDNEIQMREALAATRTTLTRLPGLGTVLAAKVLGHVGDVTRFPTEHHFASYTGTAPLDASSGNNVRHRLNTGGNRALNSVLHTIAVCQIRDGGRGQDYYLRKIAEGKTPPEARRALKRRLSNVVYRIMQRDHRTQLAAVA

SEQ ID NO: 11898 - protein, 424 aa, unidentified
  source 1..424: note = protein_17a24c3
  REGION 26..178: note = RuvC_domain
  SITE 29: note = RuvC_P1
  SITE 77: note = RuvC_P2
  SITE 115: note = RuvC_P3
  SITE 117: note = RuvC_P4
  SITE 120: note = RuvC_P5
  REGION 285..371: note = Tnp_domain
  SITE 293: note = Tnp_P1
  SITE 324: note = Tnp_P2
  SITE 332: note = Tnp_P3
  SITE 333: note = Tnp_P4
MKSASNPLSSECPLVLPEVAINDVTAGIDWARDDHAACIVDGRGHKIATITVEHTTAGLRDLVAFLGRHGVGEVAIERPDGPVVDTLLAADLVVVVISPNQVKNLRGRYGSAGNKDDRFDAYVLADTLRTDRARLRPLVPDTEATIALRRACRARKDLVKHRVAAANQLRAHLRNVLPGAIGLFKDIDSEISLAFLARFDTQDRADWLTPKRLGDWLAKHGYPGRTSPELLHQRLLDAPRGATGDHATTQAHITASYVALLKTLVEQIKALSTQIDRQLDAHPDAHIFTSLPRSGRVRAARLLAEIGDCRARFPTPESLTCLAGAAPSTRQSGKLRTVGFRWSCDKQLRDAVTDFANGSRDANPWAADLYDRARARGHDHAHAVRILARAWLHVIWHCWQDRAAYNPETHRALQRVLATQPEAA

SEQ ID NO: 11899 - protein, 432 aa, unidentified
  source 1..432: note = protein_4b432da
  REGION 35..191: note = RuvC_domain
  SITE 38: note = RuvC_P1
  SITE 87: note = RuvC_P2
  SITE 128: note = RuvC_P3
  SITE 130: note = RuvC_P4
  SITE 133: note = RuvC_P5
  REGION 298..382: note = Tnp_domain
  SITE 306: note = Tnp_P1
  SITE 335: note = Tnp_P2
  SITE 343: note = Tnp_P3
  SITE 344: note = Tnp_P4
  SITE 356: note = Tnp_P5
MDAERDHLPAGQHAQMPVQERDSIVAEQPLPAVFVGLDVGKSDHHAVAVTSTGKTVYDKALPNDETRLRAILEELAAEHGPVLMVVDQPATIGALPVAVAEATDQVEVAYLPGLAMRRIADLHPGTAKTDARDALIIAEAARTMPHTLRDIRVDEAQIAELAVLAGFDDDLAAQITATSNRLRGMLTQIHPALERVLGPRVTHPAVADLLTRYPTPAKLAAAGRGHVRARLKKHAPRLAEALTEEIFDALGQQSVVVAGTEAAATVVPILAGQLAALIHQRATVATQVEALVEAHPLSAVLTSMPGVGVRTAARILTEVVGKDFRDAGHLASYAGIAPVTRRSGTSIRGEHAAKGGNKRLKRALFLSAFASLNHPPSRAYYDRKRAQGKRHNQAVIALARRRTDVLFAMLRDGTLYQDPTEPRDPSPVALAA

SEQ ID NO: 11900 - protein, 339 aa, unidentified
  source 1..339: note = protein_8868c66
  REGION 6..148: note = RuvC_domain
  SITE 9: note = RuvC_P1
  SITE 52: note = RuvC_P2
  SITE 87: note = RuvC_P3
  SITE 89: note = RuvC_P4
  SITE 92: note = RuvC_P5
  REGION 208..294: note = Tnp_domain
  SITE 216: note = Tnp_P1
  SITE 246: note = Tnp_P2
  SITE 254: note = Tnp_P3
  SITE 255: note = Tnp_P4
  SITE 267: note = Tnp_P5
MQISVVGLDIAKQVFQVHAADAEGHALAQVKLRRSHVLDYFRGLPPCLVGIEACATAHHWARELIALGHTVRLMPPAYVKPYVKRNKTDAADAEAIAEAVTRPTMRFVSVKSAEQQAALMLHRTRELLVRQRTMLATSLRAHLAEFGIIAPQGIHRVEKLAAEVHNPAVPPLARDALMVLIGELASLWERIDALEAQIIARHRADQVSRRLASIPGVGPITAMAIVSTVPDPSMFRSGREFAAWLGLTPKSHSSGGKDRMGRISKRGDRYIRHLLYVGAGNAIRFAKARAATGEAWIRALQERRPPKVVIIALANKMARIAWALMMRGESFRPPAVAAA

SEQ ID NO: 11901 - protein, 320 aa, unidentified
  source 1..320: note = protein_bbaf3f4
  REGION 7..147: note = RuvC_domain
  SITE 52: note = RuvC_P2
  SITE 92: note = RuvC_P3
  SITE 94: note = RuvC_P4
  SITE 97: note = RuvC_P5
  REGION 187..270: note = Tnp_domain
  SITE 195: note = Tnp_P1
  SITE 224: note = Tnp_P2
  SITE 232: note = Tnp_P3
  SITE 233: note = Tnp_P4
  SITE 245: note = Tnp_P5
MSDRFAVGIDADSRTLVVAYHGTKGSFRIANSASTINKWLSSLPAKSRIGVEATNRYHELVVQAAQRAGHAVFVLNPRDIKHYAKGVACRGKTDSGDAQVIARYVAKEADNLHEHVARSPAQEQLHVLLQQRDSLVRNRATLRLSLGDDAADSTIFGRIFRGLKEAIAMLDREIQRLCSSGEQRDLYRRIMTIPGVGPTVAAFVTHHITRWPLASSDAWVACTGLDPRPNESGARIGRRRLSKRGNASLRQMLYMAAMGLTRSKGGKPLYLAIRERGHSSTASFNILARKLARIAWGVFKSGQNFDPTMLKVGQARFQQA

SEQ ID NO: 11902 - protein, 320 aa, unidentified
  source 1..320: note = protein_53bf9e3
  REGION 10..154: note = RuvC_domain
  SITE 13: note = RuvC_P1
  SITE 55: note = RuvC_P2
  SITE 95: note = RuvC_P3
  SITE 97: note = RuvC_P4
  SITE 100: note = RuvC_P5
  REGION 190..274: note = Tnp_domain
  SITE 198: note = Tnp_P1
  SITE 227: note = Tnp_P2
  SITE 235: note = Tnp_P3
  SITE 236: note = Tnp_P4
  SITE 248: note = Tnp_P5
MTILDSQVVVGVDVAKDEIVVYRRDLEKIQIVANEGATLKRWLRTLPSNSAIGIEATNIYHVETVELAYSMGHQVFVVDPGKLSKYRDSLGKRAKTDASDAALLARYLAHEKAGLRLWSPPPEVYTELKSLLHRRAKLVSMRVTLRQSWGSHNDLAHEFEAVIKGLDTLDQALQGLMKDLLSKTGLMPQVKRCEAIEGVGFLTATAFLTAFMRGEFENSDAYIAFLGLDLCVRDSGKKSGRRRLTKKGDPEIRRLGHNASMAACRSATWKPFYQRHLASGKARTQALVILTRKLARVAFALMKNQTDYRPNSIFGASPQT

SEQ ID NO: 11903 - protein, 336 aa, unidentified
  source 1..336: note = protein_473aaa7
  REGION 4..163: note = RuvC_domain
  SITE 7: note = RuvC_P1
  SITE 60: note = RuvC_P2
  SITE 101: note = RuvC_P3
  SITE 103: note = RuvC_P4
  SITE 106: note = RuvC_P5
  REGION 266..336: note = Tnp_domain
  SITE 274: note = Tnp_P1
  SITE 304: note = Tnp_P2
  SITE 312: note = Tnp_P3
  SITE 313: note = Tnp_P4
  SITE 328: note = Tnp_P5
MICVGIDVAKDKHDCFILSSEGEILADVFTIPNNAEGFDHLLQMIRNCSRPQDKIKVGLEATEHYSYNILGFLLDKGMPTYVINPLYTNLYRKSLSLRKTKTDRVDARTIATMLMSDVDLKSYTDTAYHNEELKSLTRYRFDKVRERAKLKQSVSRLVTILFPKLEKLVSTLHMASVYALLEELPGAKQIAGTHLTHLKSLLQTASKGRCRREMAMALRDTARCSIGSVMPAKSLGLQHTIRLIRELDAEIDDIETAIQAIMEENRSPITTIPGIGTRMGAMILAEIGDFSRFDSPDKVLAYAGMSPSTYQSEQLSLSGTYSHMEKRGSRYLRYAL

SEQ ID NO: 11904 - protein, 348 aa, unidentified
  source 1..348: note = protein_df12df8
  REGION 13..160: note = RuvC_domain
  SITE 16: note = RuvC_P1
  SITE 65: note = RuvC_P2
  SITE 101: note = RuvC_P3
  SITE 103: note = RuvC_P4
  SITE 106: note = RuvC_P5
  REGION 232..315: note = Tnp_domain
  SITE 237: note = Tnp_P1
  SITE 268: note = Tnp_P2
  SITE 276: note = Tnp_P3
  SITE 277: note = Tnp_P4
  SITE 288: note = Tnp_P5
MTVTIVETRAVTGGVDTHADAHVAAALDPIGGLLGVQEFPATPAGYARLLGWLGGFGTVCLVGIEGTGSYGAGLARHITAAGIRVVEVDRSDRQDRRRAGKSDPLDAVSAARAAQSGRARGAPKGRDGAVEAIRVLMVAKRSARAERTQTINQAGALILTGPDDLRARFSQHHPADLVAELAALRPRPGGVVGYATRIAVRELGRRAEFLDGQLERLDELIVPLVTARVPGMLALYGVGPDTAALLLVAAGDHPERLRSEAAWAHLCAVAPIPASSGKITRHRLNPGGDRQANHALWRIVITRMSSHPPTRAYVARRTEEGLSKKEIIRCLKRYIAREIYPHLRAAAG

SEQ ID NO: 11905 - protein, 335 aa, unidentified
  source 1..335: note = protein_58f2f01
  REGION 24..169: note = RuvC_domain
  SITE 70: note = RuvC_P2
  SITE 110: note = RuvC_P3
  SITE 112: note = RuvC_P4
  SITE 115: note = RuvC_P5
  REGION 207..293: note = Tnp_domain
  SITE 215: note = Tnp_P1
  SITE 245: note = Tnp_P2
  SITE 253: note = Tnp_P3
  SITE 254: note = Tnp_P4
  SITE 266: note = Tnp_P5
MIVFTPRWRNRSCPQSSASTSPIRSFDLAIDLANGKYRTKAKLPNDPKGFQVLQTWLQTHAQADSWIVMEATGTYHEALAEFVYGLGYRVCVLNPAQMALYARSQLTRVKTDPSDAKLIASYGQRHAAQLRPWQPDPPALKRLKALVRRRDDLLQMLQMERNRLDVAALVVRDSLLENIGQLQARIAQIERAIDDQIDQDPTLRGQRELLVSIDGIASTSAALMLAELGNVERFAHASAVTAFAGLNPRLQESGKRQGQVCISRTGSPRLRAGLFLPALVAMTHNPVVRALKLRMRERGKANKQIICAAMRKLLHIAYGVLKSRTPFDPQKTLAC

SEQ ID NO: 11906 - protein, 344 aa, unidentified
  source 1..344: note = protein_2e881e7
  REGION 6..147: note = RuvC_domain
  SITE 9: note = RuvC_P1
  SITE 52: note = RuvC_P2
  SITE 87: note = RuvC_P3
  SITE 89: note = RuvC_P4
  SITE 92: note = RuvC_P5
  REGION 212..298: note = Tnp_domain
  SITE 219: note = Tnp_P1
  SITE 249: note = Tnp_P2
  SITE 257: note = Tnp_P3
  SITE 258: note = Tnp_P4
  SITE 270: note = Tnp_P5
MKITTVGIDLAKNVFQIHAVDERGKTALKKQLKRGQVAELFANLPVCLIGMEACGSAHHWARKLAGFGHTVRLMAPQFVKPYVKTNKNDAADAEAICEAVSRPNMRFVPIKNIEQQSVLALHRVRQSFVKARTAQSNQIRGLLAEFGLIVPVGIANIAKRVPELIEDATNELTGSFRLLIARLMDHLKELDRQVDELEAQIKSWHRASDASCKLEKVPGIGPITASALVATIGDAKNFDGGRQMAAWLGLVPRQHSTGGKSNLLGMSKRGDTYLRTLLIHGARSVIFRAQQKVDKAGWLNELVQRRNKNVAAVALANKNARIIWALLANDREFQSNYKTASMAA

SEQ ID NO: 11907 - protein, 341 aa, unidentified
  source 1..341: note = protein_a7771fc
  REGION 7..149: note = RuvC_domain
  SITE 10: note = RuvC_P1
  SITE 53: note = RuvC_P2
  SITE 88: note = RuvC_P3
  SITE 90: note = RuvC_P4
  SITE 93: note = RuvC_P5
  REGION 211..295: note = Tnp_domain
  SITE 219: note = Tnp_P1
  SITE 249: note = Tnp_P2
  SITE 257: note = Tnp_P3
  SITE 258: note = Tnp_P4
  SITE 270: note = Tnp_P5
MEKISIIGLDLAKSIIQVHGASIDGAIQFRRKIASKKLLAFLSGVDPCTVAMEACAGSHHWGREIAKLGHQVKLIAPIYVKPFVKRQKNDAADAEAICEAALRPTMRFVAVKSEEKQAAATVFKVRDLLVRQKTQIINILRGLMAEFGITVPQGPSHVGVLISHVENDDSSLTEAARAPCLALVVTLRALIDKIRELDLEISRRARQDDVAKRLMSIPGVGPVIATALEALAPPAATFTRGRDFSAWMGLTPRQHSSGGKARLGKTSKMGQRDLRRLLIIGAAAVVRWASRRGAVEGSWLSRMIGKKPPMLIAVALANRMGRIAWALMTSGDRYEERNLAA

SEQ ID NO: 11908 - protein, 323 aa, unidentified
  source 1..323: note = protein_a7af989
  REGION 5..155: note = RuvC_domain
  SITE 8: note = RuvC_P1
  SITE 58: note = RuvC_P2
  SITE 98: note = RuvC_P3
  SITE 100: note = RuvC_P4
  SITE 103: note = RuvC_P5
  REGION 195..281: note = Tnp_domain
  SITE 203: note = Tnp_P1
  SITE 233: note = Tnp_P2
  SITE 241: note = Tnp_P3
  SITE 242: note = Tnp_P4
  SITE 254: note = Tnp_P5
MTSFVGVDVAKNTFDIATHLPNGKHKTKAKLSNDAKGFKEFEAWLNKHVESSALIVMEATSVYHLELAEFVYNKGYQVCVVNPATAHSYAGSELRRIKTDKSDAKLLADFAREKNEKLKLWAPEPLRYRQLKAMVRRLDDLQEIEQMERNRLEVSDEKVKASINSVLRHIEKEITETHKTIKKHIDDDPDMRQMRDLIVTIDGIGQKTIERLLAELGDLRKYDDPRKLVAAAGLNPKLHDSGQLKGRSTISKIGSVRVRAGLYMPGLVALKHNEAIKAMKDRLKANGKAPKQIICAAMRKLLHFVYAVLKSGQPYDPNFALVR

SEQ ID NO: 11909 - protein, 345 aa, unidentified
  source 1..345: note = protein_9cbe8fa
  REGION 7..149: note = RuvC_domain
  SITE 10: note = RuvC_P1
  SITE 53: note = RuvC_P2
  SITE 88: note = RuvC_P3
  SITE 90: note = RuvC_P4
  SITE 93: note = RuvC_P5
  REGION 212..304: note = Tnp_domain
  SITE 220: note = Tnp_P1
  SITE 250: note = Tnp_P2
  SITE 258: note = Tnp_P3
  SITE 259: note = Tnp_P4
  SITE 272: note = Tnp_P5
MIKNTIIAIDLAKHSFQVCKFNSDGKIDYNKAMSRKALIALLGNHVSALVAMEACGGSNYWARLARRHGHQVKIIHPRAVKGLQLKQKTDKNDAYAIGIAAQLPHINSCGIMEEDEQGLQALERVRMLQLEQRTALANQIRGLLTEFGIVIAKGLNHLVTALPDILEDAENGLPMNYRQALAAQSQMLQLYTTQIESYDRLIAEHTRHNPVCQKLSKLEGVGPLIALGLTVRLGNATEFNTGRDASACIGLTPKQHSTGGKERLGHISKNCADKRLRSLLYQGAMSVVNKAVSREPKTVKEQWLKALVDRRGKKVAAIALANKTVRTAVALIKNNDDYNPILLAA

SEQ ID NO: 11910 - protein, 398 aa, unidentified
  source 1..398: note = protein_d7526fc
  REGION 10..164: note = RuvC_domain
  SITE 13: note = RuvC_P1
  SITE 61: note = RuvC_P2
  SITE 101: note = RuvC_P3
  SITE 103: note = RuvC_P4
  SITE 106: note = RuvC_P5
  REGION 271..356: note = Tnp_domain
  SITE 279: note = Tnp_P1
  SITE 308: note = Tnp_P2
  SITE 316: note = Tnp_P3
  SITE 317: note = Tnp_P4
  SITE 329: note = Tnp_P5
MKTDDIQIFLGLDVGKTDHWACAVTKDGTKIWNRTLPNDEAKLTKVYQDLRAKGTVLVVVDQPATVGALAVAVAQHLGIMVAYLPGLTMRRIADMYPGTAKTDEKDAFIIADAARTMPHTLRSLHVSDKEEAALGMLTGFDLDLARQITQTSNRIRGLFTQIHPPLERLIGARLDYDAILEVLAAWPTPAALKHAGKARIDAKLKKHGARRHTAWAAAILDALDEQTVTVVGTEAAGLVIPHLARQLIALHAQRTDVASHLESMVEAHPLYPVLTSMPGVAVRTAAAFNAETSGKTFDSAAAMASYAGLAPTTRQSGTSIKSERVSHSGNKRLKRALFLSAFASIRSDPTSRDYYDRKRGQGKRHNQALIALAHRRLTVLFAMIRDGSLYDVPELKIA

SEQ ID NO: 11911 - protein, 406 aa, unidentified
  source 1..406: note = protein_b194fb0
  REGION 4..163: note = RuvC_domain
  SITE 7: note = RuvC_P1
  SITE 60: note = RuvC_P2
  SITE 100: note = RuvC_P3
  SITE 102: note = RuvC_P4
  SITE 105: note = RuvC_P5
  REGION 271..357: note = Tnp_domain
  SITE 279: note = Tnp_P1
  SITE 310: note = Tnp_P2
  SITE 318: note = Tnp_P3
  SITE 319: note = Tnp_P4
MLFVGDDWAEDHHDVEVQDQDGKVLKRARLPEGMAGMARLHDLVGRFVAADAEPSEVGVCIETDRGPWVRALVAAGYRVFAVDPKQAARHREILGSSGAKSDKGDAHALADMLRTRRHQLREVAGDSQTAEAVKVVTRAHQTMVWERTRHMLRLRSALREYFPAALEAYKPLGLTSDAVLRLLAKAPTPAAAAKLTTGQIRAVLKGRRDIDAKTAAIQDVLRGDHLGQGEIVTSAYAATVRSLVAVITTLNVEITVLEGQVEAHFGRHSDAEIILSQPGLGPVLGARVLAEFGDAPGRYASAKARKNYAGTSPITRQSGKMRTVHARFVHNDRLVDALHLQASCALLHDPHVRAYYDQLRTRDIGHNTALRQVANRLVGILHGCLKTNTRYDQTTAWSHHHHDLAA

SEQ ID NO: 11912 - protein, 402 aa, unidentified
  source 1..402: note = protein_691da6d
  REGION 5..164: note = RuvC_domain
  SITE 8: note = RuvC_P1
  SITE 61: note = RuvC_P2
  SITE 102: note = RuvC_P3
  SITE 104: note = RuvC_P4
  SITE 107: note = RuvC_P5
  REGION 271..356: note = Tnp_domain
  SITE 279: note = Tnp_P1
  SITE 309: note = Tnp_P2
  SITE 317: note = Tnp_P3
  SITE 318: note = Tnp_P4
  SITE 329: note = Tnp_P5
MAVKAGIDVAKEFHWVAIVAAETGKVLLSRRVDNDPDSIDALIAQLRQAEAEHGELTAAIDLMGGVASLLTAMLLEAGVRLVHVPGLVVNRARRASKGGEAKSDPRDAATIADQLRLRDDWRIVTAEDDITLDLRMLVSRRRELVIDQTRRLNRLRETLAGFFPGLERVVDVTNLSDLRLLVRFVTPEEVREAGRDGLIDHMLAAGVRRSYAEPLAGKAIAAAQAQHVIVPGQKRMAEFAREFATDAIAARHRIGELENQIADGLDRHPDAALVRSLPGMGATLTAEFLAEAGNLDRFTSADQLASAAGLAPVLQQSGKMNYLRRATAGSKHLKFIFYQSAFCAIRTDPLSKAFYQRKRAEGKRHHQALIALARRRINVLYALLRTRQPYQADYRHTTATAA

SEQ ID NO: 11913 - protein, 330 aa, unidentified
  source 1..330: note = protein_beef511
  REGION 12..166: note = RuvC_domain
  SITE 15: note = RuvC_P1
  SITE 63: note = RuvC_P2
  SITE 103: note = RuvC_P3
  SITE 105: note = RuvC_P4
  SITE 108: note = RuvC_P5
  REGION 204..288: note = Tnp_domain
  SITE 212: note = Tnp_P1
  SITE 241: note = Tnp_P2
  SITE 249: note = Tnp_P3
  SITE 250: note = Tnp_P4
  SITE 262: note = Tnp_P5
MIENYDSVDVFIGVDVGKGEHHAVALDRAGKQLFDKALPNDEAKLRELIGQLKRHGQVLFVVDQPATIGALPIAVAQAEDVLVGYLPGLAMRRIADLHAGEAKTDARGAAIIAQAARSLPHALRSLQLADEQVAELSMLCGFDDDVVGQITATSNRIRGLLTQIHPALERVLGPKLAEQLAALRRQRDEIAVEVERLVEAHSLHPVLISMPGVGIRTAARLLTEVSGKDSATAGHLAAYAGLAPVTRRSGSSIRGEHPSRRGNKILKRALFLSAFAALRDPVSRAYYDRKIDQGKRHNQALIALARRRCDVLYAMLRDGTLYQTDHQLAA

SEQ ID NO: 11914 - protein, 426 aa, unidentified
  source 1..426: note = protein_e6e2f0a
  REGION 9..161: note = RuvC_domain
  SITE 12: note = RuvC_P1
  SITE 64: note = RuvC_P2
  SITE 100: note = RuvC_P3
  SITE 102: note = RuvC_P4
  SITE 105: note = RuvC_P5
  REGION 257..344: note = Tnp_domain
  SITE 265: note = Tnp_P1
  SITE 297: note = Tnp_P2
  SITE 305: note = Tnp_P3
  SITE 306: note = Tnp_P4
  SITE 317: note = Tnp_P5
MKVLYERVAGIDVHKKMIKVGIRVPGDKPWTRKSEVLQYRTFYGVLQQMAAELRKRGITHVVMEASGVYTEPVCYALAERDFEQVAVINPAHAKALKGHKTDARDCLRLAELFECGLLRGSYIPAPELKEVRDLTRCRIKTVQARTSEIQRLAKALESAGIKLGSVASDITGKSATAMIEALTGGERRGAVLADLARGRMRTAGKLADLSQALAGRFTDHHALLCRLHLDRIAIFDSAVAGLEDTITRKAARWQREQDLLKTIPGFGDAVAQAWLAEIGPAPHSYFAGHDKLASWVTLCPGNHMSAGKRKHGRTGDAGAYIKPMLVNAAWAAVKAPGRLQAKYHRLVRRFGGQKNPAAKKKAIIAIAHTLLKIAYQVLQSGQPYQDLGADFYTRRESPEQRQAYLLRQLQQLNPGCTITITPAEAA

SEQ ID NO: 11915 - protein, 333 aa, unidentified
  source 1..333: note = protein_2f94dbf
  REGION 4..149: note = RuvC_domain
  SITE 7: note = RuvC_P1
  SITE 51: note = RuvC_P2
  SITE 91: note = RuvC_P3
  SITE 93: note = RuvC_P4
  SITE 96: note = RuvC_P5
  REGION 190..277: note = Tnp_domain
  SITE 198: note = Tnp_P1
  SITE 228: note = Tnp_P2
  SITE 236: note = Tnp_P3
  SITE 237: note = Tnp_P4
  SITE 250: note = Tnp_P5
MTYIGVDISKKSFVAAFPSANGYLTKEFENTPRGVRKFIGSLPNSCMVVMEATGNYCFLLLYLLHNAKIEAALVNPKQIKHFARMMMTVTKTDAKDACLIALYGEKMNPASYKLPSATILTLKQKRTVISQLKKQLNATHNLLESITVLPYADKTCLNSLKKTISFLEKQIKSLESELVNLAESEFDALLKRLTSIKGIGVTLATALIIATGGFTYFNNAKQLSRYIGICPTVCQSGSSISIHGSINRNGDESLRSMLYIASWSAIRYNASCRQMYERMRSNGKPAKVALVAVSNKLVRQCFAVANSNMSYIDGFVSTKPETQKCVSSKDQTL

SEQ ID NO: 11916 - protein, 352 aa, unidentified
  source 1..352: note = protein_183ed6e
  REGION 10..158: note = RuvC_domain
  SITE 13: note = RuvC_P1
  SITE 62: note = RuvC_P2
  SITE 98: note = RuvC_P3
  SITE 100: note = RuvC_P4
  SITE 103: note = RuvC_P5
  REGION 228..314: note = Tnp_domain
  SITE 236: note = Tnp_P1
  SITE 267: note = Tnp_P2
  SITE 275: note = Tnp_P3
  SITE 276: note = Tnp_P4
  SITE 287: note = Tnp_P5
MPKRTRIVIGGVDTHSRTHHAAVLDEQGRLLGDREFPADHSGYRQLLSWLGRHGQVEVVGVEGTGSYGAGLTHYLLDQRVRVVEVDWPDRRTRRQRGRSDPIDAEAAARAVLAGTATAVPKRRDGIVEAIRVLRTARRGASKARTAAINQLKALLVTAPASVREALDDLSVSTLVTTCARFRPDEADLADPLHASKAALQAVAKRIELLEAELELADRRLAKLVGRAAPRLLALLAIGNDHAGQLLVTAGQHPERLRGEAAFAHLCGVAPIPASSGKTRRHRLHRGGDRDANRALHLAVVVRMRFCPRTRAYVERRTKEGLSKPEIMRCIKRYLAREVYHALVADFEALHAT

SEQ ID NO: 11917 - protein, 335 aa, unidentified
  source 1..335: note = protein_8073b9b
  REGION 4..152: note = RuvC_domain
  SITE 7: note = RuvC_P1
  SITE 57: note = RuvC_P2
  SITE 96: note = RuvC_P3
  SITE 98: note = RuvC_P4
  SITE 101: note = RuvC_P5
  REGION 199..285: note = Tnp_domain
  SITE 207: note = Tnp_P1
  SITE 237: note = Tnp_P2
  SITE 245: note = Tnp_P3
  SITE 246: note = Tnp_P4
  SITE 258: note = Tnp_P5
MQIYGIDLAKEKFDVSFFDLTSKKVSNQPSHKVVTNNLKGIGKFFKGLPSDAVLVAEHTGVYGDTLLKCCMDSNVKIAFVGGYVIHRYRATPDRAKTDVLDCALLRDFGERYPDKLKYKTFPEEALYELRQLARHREMLVEQRKQLITADRSEDCRPIRSLAVKRSMDRIKEMLDTEIAETEKEMLKVINGHESIHHNYELVKSVDGVGLITAVELLVKTENFTKITTARQYAAYAGTAPYEKSSGKMDKGAHISKIGNRRSKTLLYICAESARLHNKEIKLYYERRTLIDKKPRHYVLNAIANKLLRIIFTLVEKGEYYDANFIRQDPRVVKYN

SEQ ID NO: 11918 - protein, 422 aa, unidentified
  source 1..422: note = protein_a2430f6
  REGION 4..157: note = RuvC_domain
  SITE 7: note = RuvC_P1
  SITE 57: note = RuvC_P2
  SITE 94: note = RuvC_P3
  SITE 96: note = RuvC_P4
  SITE 99: note = RuvC_P5
  REGION 285..371: note = Tnp_domain
  SITE 292: note = Tnp_P1
  SITE 323: note = Tnp_P2
  SITE 331: note = Tnp_P3
  SITE 332: note = Tnp_P4
  SITE 344: note = Tnp_P5
MLGIGIDWAEEFHDVALGTDEKGVIEQFRIAHSPNGVAALVERALRLEPDPAEIRVVLETRHGLLVEALLDAGFTVLPVNPDLVARRRGPARKKDDTEDARICCLLALDRHQTLKTLIPHGELGGELRAIGRDDERAARDQRRLLNRLRADLQTTYPAALALAGTDLGAPTVLRLLERWPTQDELAAASREELVAFARAGRHGWPDRFADRVTEALAAPSLPTRDYLVRAKAAGIRLAAVQLLALHEARRGWEQRMGELLLGGRRTGRDHTVTDPDPGKAFPGGDIYLSFPGLGDRLAARVAGEIGEHIDQFDSSNGLQCYAGRAPVTRRSGKSDFVVARRMAHNRYLGDAVHQWAFCSLTQSGWAREFYDAKIAAKKSHHNALRALGNRWLEILWHCLTRRVLYDEDLHVANRNRALGRAA

SEQ ID NO: 11919 - protein, 386 aa, unidentified
  source 1..386: note = protein_d74ea5d
  REGION 4..161: note = RuvC_domain
  SITE 7: note = RuvC_P1
  SITE 59: note = RuvC_P2
  SITE 99: note = RuvC_P3
  SITE 101: note = RuvC_P4
  SITE 104: note = RuvC_P5
  REGION 259..346: note = Tnp_domain
  SITE 267: note = Tnp_P1
  SITE 297: note = Tnp_P2
  SITE 305: note = Tnp_P3
  SITE 306: note = Tnp_P4
  SITE 319: note = Tnp_P5
MKLVGIDIAKYEHAAFIMEASTGESLCDPFFFKNNKEGFKKLYTELNKYSKNELLIGMEDTGHYNFAIESSLLAEGYKVALINPITTKSLRKASLKSVKSDKEDALLITKALLDKAYYRIISIQDEKLKEAKELTRYRTQLTLEMNRKKNVLQRHIDIVFPEFNTLFNNEYTITYLNILRKYSDAYTIAHTDIRSLRKCFKYCNSFSAEELKELASNSVGIHDVSISFIIQSVISSIDLINSQIEELDKKIEELAITQASSITSIPGISIITGTSILAELGDISKYSNAGKVIKFAGVNPYISESGKFSADKTAITKKGSKYLRTTLYRVIIPVIRHNPAFNNYYHLKRNQGKGHLCALGHCVRKLLRIIYHLETNNLSFDINSLK

SEQ ID NO: 11920 - protein, 343 aa, unidentified
  source 1..343: note = protein_0203eeb
  REGION 7..149: note = RuvC_domain
  SITE 10: note = RuvC_P1
  SITE 53: note = RuvC_P2
  SITE 88: note = RuvC_P3
  SITE 90: note = RuvC_P4
  SITE 93: note = RuvC_P5
  REGION 212..303: note = Tnp_domain
  SITE 220: note = Tnp_P1
  SITE 250: note = Tnp_P2
  SITE 258: note = Tnp_P3
  SITE 259: note = Tnp_P4
  SITE 271: note = Tnp_P5
MQTITTIGLDIAKSVFQVHGVDAEGKVIIRRQLKRRYVLAFFQKLPPCLVGIEACASSHHWSRELKALGHTVRLMPPAYVKPYVKRQKNDAADAEAICEAVTRANMRFVATKTPEQQSCLMLHRTRHLFIRQQTAVINAIRAHLAEFGIVAPVGRNGVEELLDVVADPSDKRVPEIARACLLALGAQLRKLKEQILEFDRMIRAWHRSSEMSMRLDEAPGIGPVLATALVATVTDPKAFRSGRNFSAWIGLVPKQHSSGGKDRLGSISKQGDRYLRSLFVAGALAVIRYAKIHGTKRRPWLTALLARRPTKVAAIALANKIARMVWAMMVRGERYKQPVALAA

SEQ ID NO: 11921 - protein, 315 aa, unidentified
  source 1..315: note = protein_cc28161
  REGION 9..173: note = RuvC_domain
  SITE 12: note = RuvC_P1
  SITE 56: note = RuvC_P2
  SITE 96: note = RuvC_P3
  SITE 98: note = RuvC_P4
  SITE 101: note = RuvC_P5
  REGION 192..276: note = Tnp_domain
  SITE 200: note = Tnp_P1
  SITE 229: note = Tnp_P2
  SITE 237: note = Tnp_P3
  SITE 238: note = Tnp_P4
  SITE 249: note = Tnp_P5
MSEHNADTVGVDISKDFLDANIHPSGIAKRFANDAKGHRALIAWLQGRQVERVVFEATGAYHRAFERTLAAAGLPMAKINPRQARRFAEAIGKLAKTDAIDAAMLARFGALLTPQTREPVSQTLDEMKELHNARGALVKDRTATLNRQKQMRSTILKRLAAQRLKQIDSQLKTIDAALAALRDGDAAVKARFDILMSIPGIGATTAFAMLIEMPEIGTMENPQAASLAGLAPLARDSGKWSGKRSIRGGRANLRQAIYMPALVATRFNPDFKAKYQAMIAAGKPAKVAITAIMRKLVVLANALLKAGRNWQPKAA

SEQ ID NO: 11922 - protein, 425 aa, unidentified
  source 1..425: note = protein_7512b74
  REGION 4..157: note = RuvC_domain
  SITE 7: note = RuvC_P1
  SITE 59: note = RuvC_P2
  SITE 94: note = RuvC_P3
  SITE 96: note = RuvC_P4
  SITE 99: note = RuvC_P5
  REGION 284..371: note = Tnp_domain
  SITE 292: note = Tnp_P1
  SITE 323: note = Tnp_P2
  SITE 331: note = Tnp_P3
  SITE 332: note = Tnp_P4
  SITE 344: note = Tnp_P5
MLGVGIDWAEEFHLVALGRPGDGVIEVSRVEHTPAAIDALVGRIASLEPDPAEVRVVLETRHGMLVERLVDAGYAVVPVNPDLVARRRGPAKKKDDAEDARIACLIALDRFEVLRPLVPHGEMAGELRAIARDDLRAGRDERRLLNRLRADLIATFPAALAIAGEDLGAPTFLRLLERWPTQDALAEASTQELEAFARAAHHGWPTRFAEKVHAALGAEHFVPRDYLVRAKADTIRLGVTQLLAIGAQRRAWERRMGELLLGAPRRGRDKKPREEDMGQAFPGGEIYLSFPGLGDRLAARVAGEVGDHPEQFSTPNSLQCYAGRAPVTRRSGKSELVVACRLACNRFLADAVHQWAFCSLEKSAWAREFYDAQRARGKGHNAALRALGNRWLEVLWHCLDRGVPYDEALHVANRNRALGRAPKAA

SEQ ID NO: 11923 - protein, 390 aa, unidentified
  source 1..390: note = protein_e0febc3
  REGION 4..163: note = RuvC_domain
  SITE 7: note = RuvC_P1
  SITE 60: note = RuvC_P2
  SITE 101: note = RuvC_P3
  SITE 103: note = RuvC_P4
  SITE 106: note = RuvC_P5
  REGION 266..353: note = Tnp_domain
  SITE 274: note = Tnp_P1
  SITE 304: note = Tnp_P2
  SITE 312: note = Tnp_P3
  SITE 313: note = Tnp_P4
  SITE 326: note = Tnp_P5
MIFVGIDVAKDKHDCFICNSDGEVLFNAFTIQNTIEGFNSLYQRIESVSKDFNKVKVGLEATGHYSYNLLGYLLDKGLTTFVINPLNTNLFRKSLSLRKTKTDKIDAHTIAMMLMSNVDLKSYSDILYHNEELKSLTRYRFYKVSERAKLKTTVSRLVNILFPELEKLVPSLHIKSVYTMLSEFPSAHHIAEAHLTKLTNLLHTASRGRYGKDTAIGFREAAKNSIGSDMPAKSLELKHTIKLIQELTAEIEEIEAEIKHIMDNINTPILSIPGISYTMGAMIVAEIGDFSKFSSPDKILAYSGMSPSTYQSGQITNSYSHMEKRGSRYLRYALYNAAKYVCHWDETFKNYLAKKRTEGKHYNVAISHAVKKLVRVIYHLQKTGQSYQAV

SEQ ID NO: 11924 - protein, 342 aa, unidentified
  source 1..342: note = protein_ac3ba3f
  REGION 6..151: note = RuvC_domain
  SITE 9: note = RuvC_P1
  SITE 52: note = RuvC_P2
  SITE 87: note = RuvC_P3
  SITE 89: note = RuvC_P4
  SITE 92: note = RuvC_P5
  REGION 210..296: note = Tnp_domain
  SITE 218: note = Tnp_P1
  SITE 248: note = Tnp_P2
  SITE 256: note = Tnp_P3
  SITE 257: note = Tnp_P4
  SITE 269: note = Tnp_P5
MIDTMIGVDLAKNVFQLHGASLTGEVKFRKKLSRPQFRKFMEDQPASIVVFEACGGAHFWTREMQQLGHQAKLIAPQYVKPFVKRQKNDVADAEAIVIAAQRPEMRFVEPKSNAQIARGVVFRSRDRLVRQRTEQINALRSILYEQGQVFPTGVRQMKKIAEFLERADNGLIALVLEECEELLASIYDLTTRIDAKTLKLKKLSQQSEMSRRLQTIPGVGPLTAMAIEAFAPPMEIFRCGRDFAAWIGLVPKQHSSGGKARLGKISKEGQVDIRRLLIIGAMTRIAWVGRKPIQAGSWLDRMLKRKPKMLVAIALANKMARTIWAVLTKQEDYRDPVKTAAA

SEQ ID NO: 11925 - protein, 339 aa, unidentified
  source 1..339: note = protein_7f4e286
  REGION 6..148: note = RuvC_domain
  SITE 9: note = RuvC_P1
  SITE 52: note = RuvC_P2
  SITE 87: note = RuvC_P3
  SITE 89: note = RuvC_P4
  SITE 92: note = RuvC_P5
  REGION 211..297: note = Tnp_domain
  SITE 219: note = Tnp_P1
  SITE 249: note = Tnp_P2
  SITE 257: note = Tnp_P3
  SITE 258: note = Tnp_P4
  SITE 270: note = Tnp_P5
MKAIVVGVDIAKRVFQLHWVEPQTGEIVALQLKREKFLEHFANRSKCLIGMEACGGSQHWARSLQKLGHEVKLMSGRMVKPFVVGNKNDAADARGIWMAVQQPGIKAVAVKSEEQQAVLALHRMREQLVKFRTAQSNGLRGLLTEYGEVMPQGRAGIKRDIPGALGRLSDRLPAIVIDTLREQYARLSEIDGQISQIERRLRQWQREDSATQRIAAIPGVGLLSATAAVATMGDAKAFKSGREFAAWLGLVPRQTGTGGRVRLLGISKRGDRYLRMLLIHGARAVLTHSKAPPEWLTELVKRRPKNVAVVAMANKMARTIWALMAHERAYQFGYVSRPA

SEQ ID NO: 11926 - protein, 389 aa, unidentified
  source 1..389: note = protein_1d70a0f
  REGION 7..149: note = RuvC_domain
  SITE 10: note = RuvC_P1
  SITE 53: note = RuvC_P2
  SITE 88: note = RuvC_P3
  SITE 90: note = RuvC_P4
  SITE 93: note = RuvC_P5
  REGION 212..301: note = Tnp_domain
  SITE 220: note = Tnp_P1
  SITE 250: note = Tnp_P2
  SITE 258: note = Tnp_P3
  SITE 259: note = Tnp_P4
  SITE 271: note = Tnp_P5
MTEVTTIGLDLAKTVFQVHGVDASGVVRVRRALRRSRVLAFFAKLPPCLVGMEACATGHYWAREIAKLGHEVRLIAPAYAKAYVRRNKNDAADAEAICEAVSRPSMRFVAIKSETQQAAAGIHRVREMLVKQRTMLINTLRGLMAEYGIVVAERPRLVGELVAILADPADERIPAPLHDGLMALVETLRGLEQRIERIEQQIVGWGRDNATCRHLITIPGYGPILSTAMAAMVIDPAAFTSARHFAASLGLVPRQEGTGGKVKLGPISKRGNGYLRRLLVNGAMSVLCSRRAKEDPWLAKLLETKERKLVACALANKMARIAWAVMMRQEDYRNRRHDQSCPRPERAWRRAHRRQDRCAHACGGGLRPVLTAAARSATAEPGRDGETAR

SEQ ID NO: 11927 - protein, 402 aa, unidentified
  source 1..402: note = protein_503ed78
  REGION 10..164: note = RuvC_domain
  SITE 13: note = RuvC_P1
  SITE 61: note = RuvC_P2
  SITE 101: note = RuvC_P3
  SITE 103: note = RuvC_P4
  SITE 106: note = RuvC_P5
  REGION 271..356: note = Tnp_domain
  SITE 279: note = Tnp_P1
  SITE 308: note = Tnp_P2
  SITE 316: note = Tnp_P3
  SITE 317: note = Tnp_P4
  SITE 329: note = Tnp_P5
MQTSSIDVFIGIDVGKSDHWATALDRDGNRLFDKALPNDETRLRDLYERLARHGRVLVVVDQPATIGALAVAVAQDMGIPVGYLPGLSMRRIADLTPGNAKTDARDAAVIAQAGRTMPHTLRAINGSDQDAAALSMLTGFDLDLARQVNQTSNRIRGLYTQIHPALEKVLGPRLEHDAVLEVIASWPVPTALRKAGRVRVAAKLKAHGARRHEAWAGEIISALEAQNVVVIGTDAAGIVLPHLARQLIALHAQRRDVAAKVEALVEAHPLYQVLTSMPGIGVRTAAVFIAETLGRSFDTGAHLASYAGLTPVTRRSGSSIRGEYTSHAGNKRLKRAMFLSAFASLRSDPVSRAYYDRKIAQGKRHNQAVIALAHRRILTLHAMIRNATLYNPQPTHQLPTVA

SEQ ID NO: 11928 - protein, 399 aa, unidentified
  source 1..399: note = protein_9d4fb03
  REGION 11..166: note = RuvC_domain
  SITE 14: note = RuvC_P1
  SITE 63: note = RuvC_P2
  SITE 103: note = RuvC_P3
  SITE 105: note = RuvC_P4
  SITE 108: note = RuvC_P5
  REGION 273..358: note = Tnp_domain
  SITE 281: note = Tnp_P1
  SITE 311: note = Tnp_P2
  SITE 319: note = Tnp_P3
  SITE 320: note = Tnp_P4
  SITE 332: note = Tnp_P5
MYDTSGIGVFLGLDVGKGEHHAHGLTPAGKTVYDKRLPNTEPKLRALFEKLIAKFATVLVIVDQPANIGALPLSVARDVGCQVAYLPGLAMRRAADLYEGEAKTDARDAAVIADVARTAPRALRTLTVLDETEAELAMLVGFDQDLAGESTRTSNRLRGLLTQIHPSLERVLGPRIQHQAVLALLARYGSPELLAEAGTRRIVKLLKPLAPRLAERLAEEIAEALAEQTVVVPGTRAAALVIPSLARQLTEILAQRRTLEGQLSALLEAHPLSPLLTSMPGIGIRTAATILTTVGDAATFPTADHLASYAGLAPVTKSSGSSIRGEHAPRRGNRQLKRAMFLSAFAALADPDSRAYYDKHRAAGKTHTQAIIRLARRRINVLHAMLRNATLYTPHTATT

SEQ ID NO: 11929 - protein, 343 aa, unidentified
  source 1..343: note = protein_349eae5
  REGION 10..150: note = RuvC_domain
  SITE 12: note = RuvC_P1
  SITE 55: note = RuvC_P2
  SITE 90: note = RuvC_P3
  SITE 92: note = RuvC_P4
  SITE 95: note = RuvC_P5
  REGION 211..297: note = Tnp_domain
  SITE 219: note = Tnp_P1
  SITE 249: note = Tnp_P2
  SITE 257: note = Tnp_P3
  SITE 258: note = Tnp_P4
  SITE 270: note = Tnp_P5
MNTQNLALTSLDLGKNCFHFHGQDSRGQYLFRSKISRSKVFSYIAQLPPCTLAMEACGGAHFMARFAASCGHQPKLIAAQHVRPYVKSNKNDYTDAEAIGEAASRSAMRFVAIKSEAQQALSMLNMTREAFIRDRTATVNRIHAFLLEWGVSLAPTFKSVRELPETLEKLHAPGSVIRLFQQFHAHFNYLDEQVKVLTKELESQVAGDDLATRLMTIPCIGPITSSALAAELGDGKQFKRGRDYSASIGLVPKQLTTGGKPRLLGISKRGDRNQRRLLVQCSHTFINHLDKQSGRLADWVRVLLTRHHPNVVVCALANRLARIAWAIAHSHGIYEAGPSAQNA

SEQ ID NO: 11930 - protein, 342 aa, unidentified
  source 1..342: note = protein_4a91bf0
  REGION 6..146: note = RuvC_domain
  SITE 9: note = RuvC_P1
  SITE 52: note = RuvC_P2
  SITE 87: note = RuvC_P3
  SITE 89: note = RuvC_P4
  SITE 92: note = RuvC_P5
  REGION 211..298: note = Tnp_domain
  SITE 219: note = Tnp_P1
  SITE 249: note = Tnp_P2
  SITE 257: note = Tnp_P3
  SITE 258: note = Tnp_P4
  SITE 270: note = Tnp_P5
MEIDLLGIDLAKRVFQLHGADARGRAVYRNKVSRAALIETVRALRPQMIAMEACGSAHHWARRFKEAGIEVRLISPHYVSPFVKTNKNDRNDAEAIVEAASRPSMNFVAVKSVEQQDMQAAHRVRELLVQQRTAIINQARGLLGERGIAIAQSPAAFRRAIPEILLQSEGELTSFCQSLIMALVQHLRALEEEIAVAEGWIRSFMNRSALCQKIAAVPGIGPITATAIVAAVGRADGFRNGRHLAAWLGLVPRQHSSGGKSQLYGISKRGDKYLRTLLIHGARSVLIRVSGKLDARSRWLQELIARRGYNRACVALANKNARIIQVLLSTEATYKPVALADS

SEQ ID NO: 11931 - protein, 391 aa, unidentified
  source 1..391: note = protein_133edb5
  REGION 6..163: note = RuvC_domain
  SITE 9: note = RuvC_P1
  SITE 61: note = RuvC_P2
  SITE 102: note = RuvC_P3
  SITE 104: note = RuvC_P4
  SITE 107: note = RuvC_P5
  REGION 267..351: note = Tnp_domain
  SITE 273: note = Tnp_P1
  SITE 303: note = Tnp_P2
  SITE 311: note = Tnp_P3
  SITE 312: note = Tnp_P4
  SITE 324: note = Tnp_P5
MSLYFAGIDISKYKHDCCIISAVDQQVVSKFTFKNDKDGFSELLTVLHSLSSPEDIRIGFESTAHYALNLELFLEKAHHSFMEVNPVLISEYKKSTTLRRTKTDRVDCESIARWLMTVEYKPHSKGFYHAYSLKSLTRLRDKLIRQRSFYLVKITNVLDHTFPEFKPFFNERFSKTALYLLENYGSAEKMARMNTASYEKLRSLSRGKFSPQQFLALKSLAANTVGVNNSIFDTELRSLLTLYKATAEQISILENQITELIEEVHPHYMSIPGIGPMSAAVIYAEYGDISNFSNPSQMLAFAGLEPGINDSGTESHGGRMVKRGSSQLRYVLMNCALPLIRFDMTFASYYAKKRAEGKPHRVAMSHVTKKLVRVIFALERQNTDFVAQALR

SEQ ID NO: 11932 - protein, 320 aa, unidentified
  source 1..320: note = protein_02d3b90
  REGION 10..153: note = RuvC_domain
  SITE 13: note = RuvC_P1
  SITE 57: note = RuvC_P2
  SITE 97: note = RuvC_P3
  SITE 99: note = RuvC_P4
  SITE 102: note = RuvC_P5
  REGION 193..278: note = Tnp_domain
  SITE 201: note = Tnp_P1
  SITE 230: note = Tnp_P2
  SITE 238: note = Tnp_P3
  SITE 239: note = Tnp_P4
  SITE 250: note = Tnp_P5
MVAQDDRIVVGIDVAKDKVDACIRSLSLRQVCPNTGQGHRKLVAWLRKYKATRAVMEASGGYERDWAKLLRQAGVEVRIVDPKRVRSFALSAGRLAKNDVIDAEMIAWFAEIFTEAPSQTHDAAREELLALVKARIGLGDLKTRLQSQNEHAAPGLVQKTHARVLKNLVSEIAKLEAAIAAKIKASPHLAERAEIIESVPGLAETTSANLIAGMPELGQVSNKIAGALLGAAPYDDDSGHRRGERHIKGGRRWVRNAIYMPCLGAATQNNPVLKAFYDRLIAKGKKPKVVLVACMRKLIVILNIMIARRQKWDPSRYALN

SEQ ID NO: 11933 - protein, 350 aa, unidentified
  source 1..350: note = protein_ce13850
  REGION 12..158: note = RuvC_domain
  SITE 15: note = RuvC_P1
  SITE 65: note = RuvC_P2
  SITE 101: note = RuvC_P3
  SITE 103: note = RuvC_P4
  SITE 106: note = RuvC_P5
  REGION 231..315: note = Tnp_domain
  SITE 237: note = Tnp_P1
  SITE 267: note = Tnp_P2
  SITE 275: note = Tnp_P3
  SITE 276: note = Tnp_P4
  SITE 288: note = Tnp_P5
MNSLSEIVEVVIGVDTHVETHTAAVVDARTGAVLDELTVHTTPQGYQDLVDLADAHSALRVWAIEGTGGHGAGLVRHLGRAEEVVVELDRPERTKRRHGAKSDLLDAVRAAREALARPKLGTPRAGGDRQALSVLLAARRSAVDASTVAQRQLFSLVIAAPEHLRTKLRGRKLPEMVRVAARLRIQSNWDRESAATATTLRTLARRTQALTIEAADLEKQILAIVRSWRPDLLDQPGIGPIVAATVLCAWSHPGRIHTEAGFAMLAGVAPIPANSGQVTTRYRLNRHGDRQLNRALHTIVLVRQRYHEPTKAYTDRRTTQGKTPREIRRCLKRYIARDLYRILEHHPSTA

SEQ ID NO: 11934 - protein, 321 aa, unidentified
  source 1..321: note = protein_55ab865
  REGION 1..112: note = RuvC_domain
  SITE 16: note = RuvC_P2
  SITE 51: note = RuvC_P3
  SITE 53: note = RuvC_P4
  SITE 56: note = RuvC_P5
  REGION 180..262: note = Tnp_domain
  SITE 182: note = Tnp_P1
  SITE 212: note = Tnp_P2
  SITE 220: note = Tnp_P3
  SITE 221: note = Tnp_P4
  SITE 233: note = Tnp_P5
MIAYFRSLEPCLAGMEACATAHYWARELIALGHRVKLMPPAYVKAYVERNKNDAAGAEAICEAVTRPSMRLVPVKDAEQQSVLMLHRGRSLLVRQRTMLVNALRAHLAEFGIVAPQGLRHDEILTETIAHQQAQLPELARSMLQTIVNQLDGTMARIQEIEGAPGQVAPREPGQSFAGDRAGVGIMGASAIAATVADPSLFRSGREFAAWLGMTPRQNSSGGKEPLGRISKRGDKYIHSLLTAGAVAVLRHARNRPTRDGEWVRALLARKPTKLAAVALANKTARIVWAVMTRGEGYRAKKVFGQPAWPPTARSACEVKRR

SEQ ID NO: 11935 - protein, 341 aa, unidentified
  source 1..341: note = protein_94200bd
  REGION 5..151: note = RuvC_domain
  SITE 8: note = RuvC_P1
  SITE 54: note = RuvC_P2
  SITE 91: note = RuvC_P3
  SITE 93: note = RuvC_P4
  SITE 96: note = RuvC_P5
  REGION 211..296: note = Tnp_domain
  SITE 219: note = Tnp_P1
  SITE 249: note = Tnp_P2
  SITE 257: note = Tnp_P3
  SITE 258: note = Tnp_P4
  SITE 270: note = Tnp_P5
MDEYIGLDVSMKETAVSIRRNGKRIWRGKCTSDPASIGALLRKHAPSTKRVIFETGPLSVWFYHALCAQGLPAICIDARHAKAALDMAANKTDANDADGLAHLAEVGFYREVRVKGFDSMLTRTLVAARTRLVRILTELSNQIRGLMKTFGLVVPAGKGSRFEEHVRELLVDQVGLAAIVLPVLEAWSSIRLRASELGRQLIARARHSEACRLLMSIPSVGTMTATAFTTAIEEPSNFRKSRSVGAWLGLTTRRYQSGQVDYDGHISRRGDRHVRSLLYEAATVILTRSSAESGLRTWGLALKARVGFKRAAVAVARKLAVTMHAMLKSGERFDPTAGVIA

SEQ ID NO: 11936 - protein, 341 aa, unidentified
  source 1..341: note = protein_fa49708
  REGION 7..148: note = RuvC_domain
  SITE 10: note = RuvC_P1
  SITE 53: note = RuvC_P2
  SITE 88: note = RuvC_P3
  SITE 90: note = RuvC_P4
  SITE 93: note = RuvC_P5
  REGION 211..294: note = Tnp_domain
  SITE 219: note = Tnp_P1
  SITE 249: note = Tnp_P2
  SITE 257: note = Tnp_P3
  SITE 258: note = Tnp_P4
  SITE 270: note = Tnp_P5
MGELTIIGLDIAKSVFQAHGADAAGTVIFRKKLGRGRLLAFFAGQPRCLVAMEACAGAHHWGRELEALGHTVKLIPPAYVKPFVKRQKNDEADAEAICEAAQRPTMRFVPVKSREQQASGVVFRARDLLVRQRTQIMNGLRGHLAEFGYVAPKGVMYVQRLVAEIEDPASQLPPAARVSLQVMVRMLAALETEIASLDAEIARRAKEDLVARRLMTIPGIGPVTASAMVALAPGAESFRCGRDFSAWLGLTPVQRSSGGKQKLGQITKAGERTLRRLLVIGASAVIKQALIRGAPPGSWLAQMLARKPRMLVAVALANKTARIIWALLARGGVYRAPALTA

SEQ ID NO: 11937 - protein, 420 aa, unidentified
  source 1..420: note = protein_e010221
  REGION 5..171: note = RuvC_domain
  SITE 8: note = RuvC_P1
  SITE 68: note = RuvC_P2
  SITE 108: note = RuvC_P3
  SITE 110: note = RuvC_P4
  SITE 113: note = RuvC_P5
  REGION 279..365: note = Tnp_domain
  SITE 287: note = Tnp_P1
  SITE 318: note = Tnp_P2
  SITE 326: note = Tnp_P3
  SITE 327: note = Tnp_P4
  SITE 338: note = Tnp_P5
MRLMIGDDWAEDHHDIEIEDETGRRLCKARLPEGLPGISRLHELIAQHAPSDWTDLTPELAADLVFVGTETDRGPWVVALRAAGYHVFAINPMSSARYRERHSTSGAKSDAGDAHVLAEIVRVDRDHHREIAGDTDLADAVKLLARAHQNLIWERVRHTLRMRSALLEFFPVAVQAFPDLAAADALILLGRAPDPDRAAKLTRGQVVSALTAARRHHVDDRVEPLRALLRQPALRQPPTLEAAYAAVVASQVKVLTALNEQITALQAVMTQNFDRHPAAQIYLSQPGLGPILAARVLGEFGDDDTRFINSRARKNYSGQSPITRASGKKTTVMARYATNRRLGVALHLQAYGALNGSPGTRAYYDTIRARGTNHHAALRQVANRLVGILHGCLDSGTLYDETVAWPAEPINTREPMTSAA

SEQ ID NO: 11938 - protein, 345 aa, unidentified
  source 1..345: note = protein_853dcd4
  REGION 19..167: note = RuvC_domain
  SITE 22: note = RuvC_P1
  SITE 69: note = RuvC_P2
  SITE 109: note = RuvC_P3
  SITE 111: note = RuvC_P4
  SITE 114: note = RuvC_P5
  REGION 210..297: note = Tnp_domain
  SITE 218: note = Tnp_P1
  SITE 248: note = Tnp_P2
  SITE 256: note = Tnp_P3
  SITE 257: note = Tnp_P4
  SITE 270: note = Tnp_P5
MTTFKINKNDHESKLSLQAGIDVGSEELILVVRKNSKPFDPQKFTNTPADRAQLVKKLTKLPGIIVCMEATGIYHFDLAIALYDAGVLLMVVNPKASHNFAKVLMKNSKTDAVDANTLAEYAERMDFVAWTRPSDEKIALRCFSRRINSLTGQKAAAKNHLHALTATQETPKAVLRDAKLAITQLQKRIDRLTAEALVLIAKYPELTRILQLLIGIKGIAETSAIALMGELLLLPPDLSHREWVKFAGLDPKAFDSGKSIHKKTRVSKAGNRYIRAALYMPALSAHQHDPHVRAYFQHLVVTNGKEKMQALCAVMRKLLHAIHGMLKYDKPFDNTRFYAIPASAG

SEQ ID NO: 11939 - protein, 347 aa, unidentified
  source 1..347: note = protein_a4c4b4f
  REGION 7..147: note = RuvC_domain
  SITE 10: note = RuvC_P1
  SITE 53: note = RuvC_P2
  SITE 88: note = RuvC_P3
  SITE 90: note = RuvC_P4
  SITE 93: note = RuvC_P5
  REGION 210..296: note = Tnp_domain
  SITE 218: note = Tnp_P1
  SITE 248: note = Tnp_P2
  SITE 256: note = Tnp_P3
  SITE 257: note = Tnp_P4
  SITE 269: note = Tnp_P5
MDQIIRIGMDTSKHVFQLHGVNAAEQPILRKKMRRKEMVDFFAKCPPTVIAIEACAASHHWARLLTGFGHEVKLIAPQLVKPYVKRGKNDAADAEALCEAMSRPTMRFVPVKSADQQAALMLVGLRERAVAAQTQLANTIRGYAAEFGLTAAKGMSHIPFLLERMMIDDNIPALARDLFASLAEEFAQLGERLKEVEAKLMAWYRDNECCRRLAKIPGVGPIGAVLLVMKAPAPEQFTSGRQFAAWMGLTPKDHSTAGKVRLGVITRAGDEALRKTLVVGATSLLRQVRAGRGRNASLWLIELLKRKPPKLAAVALANKIARIAWKMMVSGEAYKGNAAQPALACAA

SEQ ID NO: 11940 - protein, 354 aa, unidentified
  source 1..354: note = protein_e5a5417
  REGION 6..148: note = RuvC_domain
  SITE 9: note = RuvC_P1
  SITE 52: note = RuvC_P2
  SITE 87: note = RuvC_P3
  SITE 89: note = RuvC_P4
  SITE 92: note = RuvC_P5
  REGION 211..298: note = Tnp_domain
  SITE 219: note = Tnp_P1
  SITE 249: note = Tnp_P2
  SITE 257: note = Tnp_P3
  SITE 258: note = Tnp_P4
  SITE 270: note = Tnp_P5
MKIAVIGIDLAKNVFQLHGVDDHGKVVLRKQLRRNQMMLFFAQRSPCLVGMEACGGAHDWARRLIELGYTVKLMAPQFVKPYVKTNKNDAADAEAICEAVSRPNMRFVPVKTKDQQAVLALHRARQGFVQQRTAQANQIRGLLAEYGIAMPQGIRHIYKSLPEILEDGENALPGLFRQLLRQLGDHLKTLDRMVEEMDQQIQQWHRSNEASLRLAAIAGVGAITATAMVASVGDARNFSNGRQLAAWLGLVPRQHSSGGKPQLLGISKRGDCYLRTLLIHGARSVIQSAQPRVRTTLNERANSPSIQSSPWLPALVLRRGKNISAVALANKNARVIWALLAKDQHYQSSYLAVA

SEQ ID NO: 11941 - protein, 342 aa, unidentified
  source 1..342: note = protein_f0bd37c
  REGION 7..149: note = RuvC_domain
  SITE 10: note = RuvC_P1
  SITE 53: note = RuvC_P2
  SITE 88: note = RuvC_P3
  SITE 90: note = RuvC_P4
  SITE 93: note = RuvC_P5
  REGION 212..296: note = Tnp_domain
  SITE 219: note = Tnp_P1
  SITE 249: note = Tnp_P2
  SITE 257: note = Tnp_P3
  SITE 258: note = Tnp_P4
  SITE 270: note = Tnp_P5
MGEVTIIGVDLAKNVFQVHGAAADGSVLFRKKLSRPQFARFMADQPPCLVAMEACASAHHWSREMSRHGHEVRLIAPHYVKPFIKRQKNDAADAEAIVEAALRPTMRFVEPKSAEQQARAVAFRTREQLVKQRTEAINALRSHLYEFGHVAPEGIGYVPRLAKVVDNPNVELPELARDICRMLLEQIVHLTDRINALKARIPAMSQEAEMPRQLQTMPGVGPITALAVETFAPPMEQFRRGRDFAAWLGLVPRQHSTGGKQKLGKTSKMGQRDIRRLLVIGATAVIRWASRRGAPKGSWLARMLERKPVPVVAVALANKMARGIWAMLTRGESYRGPVLISA

SEQ ID NO: 11942 - protein, 401 aa, unidentified
  source 1..401: note = protein_eac7be3
  REGION 11..165: note = RuvC_domain
  SITE 14: note = RuvC_P1
  SITE 62: note = RuvC_P2
  SITE 102: note = RuvC_P3
  SITE 104: note = RuvC_P4
  SITE 107: note = RuvC_P5
  REGION 272..359: note = Tnp_domain
  SITE 280: note = Tnp_P1
  SITE 311: note = Tnp_P2
  SITE 319: note = Tnp_P3
  SITE 320: note = Tnp_P4
  SITE 332: note = Tnp_P5
MEQALDFDVVVGLDVGKAAHHAVALDRGGRRLVDREVANTEEDLRAVLARAGQSGRILVVVDQLNSIGALPVAVAHATGTAVAYLPGLSMRRLADLHPGNAKTNARDAFVIANAALTAPHALRALDIPSEAQADLSMLLGYDDDLAEACSAAISRLRGLLVHIHPSLEKSLGDNVSHEAVLRLLIKAGGPAGLRALGRARIDRELAKHAPRIHARLADEIWDGLAAQTVTVPGTTAAARVLPGIASQILQLRDQRRQVAQDVERVLDAHPLSDVLTSMPGIGVRITARFLAETGGDVAAFPTAAHLAAYAGLAPVTRRSGTSLRGEHVNRGGNTRLKNALFMAAFASLRADPESRAYYDRKRAEGKRHNAALICLARRKTDVLYAMVRDHRHFTPAHPKAA

SEQ ID NO: 11943 - protein, 392 aa, unidentified
  source 1..392: note = protein_21184a8
  REGION 5..163: note = RuvC_domain
  SITE 8: note = RuvC_P1
  SITE 62: note = RuvC_P2
  SITE 102: note = RuvC_P3
  SITE 104: note = RuvC_P4
  SITE 107: note = RuvC_P5
  REGION 267..356: note = Tnp_domain
  SITE 275: note = Tnp_P1
  SITE 305: note = Tnp_P2
  SITE 313: note = Tnp_P3
  SITE 314: note = Tnp_P4
  SITE 327: note = Tnp_P5
MEPVIGVDVAKGFSVIQAFLKRNEPWGKAISISHEQSGFEQLGEILTELQAQTGISPAVVLEATGHYHRGLVTYLERSGWTYFIVNPLQAKRAKGTQLRKVKTDATDAWHLAEMYYRGDVTAHRTWEEDYLELQHVTRQHEFITGMFVQAKLNMRALLDQVFPGYEKVFRNLFSVTSLYVLARCLEGQTEDLHVVIRKSAGKSHSEKWVEAKAETLREVMSRWGEQPRSRAQTSVLRSMVDLVLVFTDQLSELEKQMNEMARGLPEVELVKSIPGIGDKLAAAIVAEIGDVRQFKEAKQLVAFAGLDPGIFSSGKFIATSSRITKRGSKRLRRALYLAVQCGIRGRTNPRIREYYDKKRKEGKPYKVVVIACANKLLHHVYAILCKQQPFQT

SEQ ID NO: 11944 - protein, 380 aa, unidentified
  source 1..380: note = protein_8c4e8ee
  REGION 7..163: note = RuvC_domain
  SITE 10: note = RuvC_P1
  SITE 61: note = RuvC_P2
  SITE 101: note = RuvC_P3
  SITE 103: note = RuvC_P4
  SITE 106: note = RuvC_P5
  REGION 269..356: note = Tnp_domain
  SITE 277: note = Tnp_P1
  SITE 308: note = Tnp_P2
  SITE 316: note = Tnp_P3
  SITE 317: note = Tnp_P4
  SITE 329: note = Tnp_P5
MRQQLWAGVDAGKADHHCVVIDVEGARLLSQRVANDETALLELIDAVMALADGGDVTWAIDLNAGGAALLITLLIASEQRLLYIAGRTIYHASAGYRRDGNTDAKDAAVIADQARMRCDLQPLRSGDDIAVELRILTTRRTDLVTDHTRAINRLRVQLLEYFPALKRAFDYSTSKAALILLSGYQTPDGLRRTGTARLTTWLAQHKARNASATATKATQATNAQHTTVCGQNLAATMVAGLAKEMMTLDTEISATETMIEDRFRRHRHAEIILSMPGFGVVPGAEFLAATGDDMSTFDSVDRLAGMSGLAPVPPDSGRISANLKRPRRYDRRLLRARYPSAQIAIHTDAASHTDYDRKRSEGKTHTQAVPAVARPRPHIL

SEQ ID NO: 11945 - protein, 408 aa, unidentified
  source 1..408: note = protein_b43390e
  REGION 5..164: note = RuvC_domain
  SITE 8: note = RuvC_P1
  SITE 61: note = RuvC_P2
  SITE 101: note = RuvC_P3
  SITE 103: note = RuvC_P4
  SITE 106: note = RuvC_P5
  REGION 273..359: note = Tnp_domain
  SITE 281: note = Tnp_P1
  SITE 312: note = Tnp_P2
  SITE 320: note = Tnp_P3
  SITE 321: note = Tnp_P4
MRLFVGDDWAETYHDVELMDGSGHTLAKARLPEGMAGMVRLHAMIGEQLGDDADDAEVVVGIEIDRGPWVRALLSAGCRVFGVNPLQASRYRERPSVSGAKSDAADAHMLADMVRTDSHQLRPVVGDSADAEAIKVVTRAHKTLIWERTRHCQRLRHALRDYFPAALVAFEDLDAADTLELLAKAPTPAEAAELTITQISATLKRGRRRGDLRQKAAVIQAALRAEHLSQPDVLTAAYAATVRSAVAVLTVLNEQIKTLQGQVEAHFGVHPAAEIILSQPGLGMILGARVLAEFGDDPDRYATAKARKNYAGTSPITRASGKKKVVLARYVHNDRLIDALDIQAFTALKASPGARAYYDRQRARDVGHHAALRQLANRLVGILHGWLKTGTLYNEATAWQQHTDHLAA

SEQ ID NO: 11946 - protein, 339 aa, unidentified
  source 1..339: note = protein_ab30f04
  REGION 6..147: note = RuvC_domain
  SITE 9: note = RuvC_P1
  SITE 52: note = RuvC_P2
  SITE 87: note = RuvC_P3
  SITE 89: note = RuvC_P4
  SITE 92: note = RuvC_P5
  REGION 211..299: note = Tnp_domain
  SITE 219: note = Tnp_P1
  SITE 249: note = Tnp_P2
  SITE 257: note = Tnp_P3
  SITE 258: note = Tnp_P4
  SITE 270: note = Tnp_P5
MNCTVFGLDLAKRVFQLHWVDMETGEICRRQLKRKQVAEFFANRKPCVVAMEACGSAHYWGRKSAALGHEVRLIAGQFVRPFAKSNKTDVADAQAIWEAVQRPGMKFVALKTGEQQSVLTLHRMREQLVKMRTMQINQLRGLLYEFGADLPQGRRRGMARVTEELARLEGKLSAMVIEVMRQQLRRIEALDQDIAGIEKKLLLWKKEDESGKKLMGIPGVGLLTATAAVATIGDAKKFKSGREFAAFLGLVPRQSGTGGRVKLLGIGKRGDVYLRTLLIHGARSVIQHQKEHAPWLKKLLLRRPHNAVAVALANKMARTIWALLAHDRTFQKDYVASAA

SEQ ID NO: 11947 - protein, 338 aa, unidentified
  source 1..338: note = protein_2d738aa
  REGION 7..149: note = RuvC_domain
  SITE 10: note = RuvC_P1
  SITE 53: note = RuvC_P2
  SITE 88: note = RuvC_P3
  SITE 90: note = RuvC_P4
  SITE 93: note = RuvC_P5
  REGION 212..299: note = Tnp_domain
  SITE 220: note = Tnp_P1
  SITE 250: note = Tnp_P2
  SITE 258: note = Tnp_P3
  SITE 259: note = Tnp_P4
  SITE 271: note = Tnp_P5
MAKITTIGLDLAKQVFHVVCCDARGKMVRKRMLRRAQVGAYFAQLEAALVGMEACASAHHWARELEALGHTVKLLPPQFVKAYVRGNKNDYNDALAIAEAVVRPEMRGVAVKTAAQQDIQALHRLRTQCVASRTALCNQLRGLLGEYGVVMPQGVRTLRRRLPEVLEAGENGLSDLFRRLLANGYQRLQELDRHIDAYTAELERHSQEEDACQRLQTIPGFGPIVASAFHSAVGDGQSYRRGRDVSAALGLVPRQHSSGGKSVLLGISKRGDRYLRSLLVHGARAVVRQAAHKDDRLSRWINKIRAQRGYNKASVALANKLARIGWAVLYNRSVYQAA

SEQ ID NO: 11948 - protein, 340 aa, unidentified
  source 1..340: note = protein_3dfe5f6
  REGION 7..149: note = RuvC_domain
  SITE 10: note = RuvC_P1
  SITE 53: note = RuvC_P2
  SITE 88: note = RuvC_P3
  SITE 90: note = RuvC_P4
  SITE 93: note = RuvC_P5
  REGION 212..303: note = Tnp_domain
  SITE 220: note = Tnp_P1
  SITE 250: note = Tnp_P2
  SITE 258: note = Tnp_P3
  SITE 259: note = Tnp_P4
  SITE 271: note = Tnp_P5
MNQITTIGLDLAKKVFQIHGVDASGAVVRRRALRRGKVLEFFGKLPPCLIGMEACATAHYWARELGKLGHEVRLIPPAYAKAYLRRNKNDAADAAAICEAVSRPSMRFVVVKTEDQQAAAGVHKVRELLVKQRTMAINHLRGMVAEFGIVVADGPQHVAELVAIVLDTAEVRIPALLRQPLMAIADLLGSLERKLQGIEKQLLAWGRNNQTCRNLITVPGYGPILSSAMAAIVVNPDGFNSGRDFAASLGLVPRHEGTGGKVRLGPISKRGNGYLRRLLVNGATSVLNSKRAQQDPWLRKLLETKPRKLAAVAVANKMARIGWAIMTRQESFRAAPVSAA

SEQ ID NO: 11949 - protein, 314 aa, unidentified
  source 1..314: note = protein_bc0b408
  REGION 8..149: note = RuvC_domain
  SITE 11: note = RuvC_P1
  SITE 53: note = RuvC_P2
  SITE 93: note = RuvC_P3
  SITE 95: note = RuvC_P4
  SITE 98: note = RuvC_P5
  REGION 188..273: note = Tnp_domain
  SITE 196: note = Tnp_P1
  SITE 225: note = Tnp_P2
  SITE 233: note = Tnp_P3
  SITE 234: note = Tnp_P4
  SITE 246: note = Tnp_P5
MTIQTPIIGIDVAKENLSLYRLDTQQSATLANDRRAIVAWLKTLPADCAVAIEATSTYHVLLADLAYQCGHRIYVIDGYRLSNYRKGIGGRAKTDQSDARLLARYLAHEQNQLHPWNPACKAYRRLQLLLRRRATLVRSATALRLSFAQDRQMARELKPVLERIKRLERRLNEQVHKALQEAGLAEQAKRCQAIEGIGPLTAAALNLAFLRGSFRNSDAFIAFLGLDVRVKESGRHSGRRKLSKQGDSEIRRLLHNAAMAASRTTAWQQRYQQYLQRGLKRTEALVILARKLARIAFALMKTQQPYRPAVDTVG

SEQ ID NO: 11950 - protein, 339 aa, unidentified
  source 1..339: note = protein_1308ee0
  REGION 6..148: note = RuvC_domain
  SITE 9: note = RuvC_P1
  SITE 52: note = RuvC_P2
  SITE 87: note = RuvC_P3
  SITE 89: note = RuvC_P4
  SITE 92: note = RuvC_P5
  REGION 211..296: note = Tnp_domain
  SITE 219: note = Tnp_P1
  SITE 249: note = Tnp_P2
  SITE 257: note = Tnp_P3
  SITE 258: note = Tnp_P4
  SITE 270: note = Tnp_P5
MKATVVGVDIAKRVFQLHWVEPETGEIMSLQLKRERFLEHFANRASCVVGMEACGGSQHWARSLQKLGHQVKLLSARMVKPFVVGNKNDVADARAIWTAVQQPKIKAVAVKTEEQQAVLALHRMREQLVKFRTAQINGLRGLLTEYGEVMPQGRAGIKRDIPGALGRLAGRLPAMVIDTLREQYARLSELDEQVSQIERRLRQWQREDPAAQRVAAIPGVGLLSATAAIATMGDARAFKSGREFAAWLGLVPRQTGTGGRVRLLGISKRGDKYLRTLLIHGARAVLTHTKAPPEWVTELVKRRPKNVAVVAMANKMARTIWALTAHERAYQSGYVSQPA

SEQ ID NO: 11951 - protein, 342 aa, unidentified
  source 1..342: note = protein_4663210
  REGION 6..148: note = RuvC_domain
  SITE 9: note = RuvC_P1
  SITE 52: note = RuvC_P2
  SITE 87: note = RuvC_P3
  SITE 89: note = RuvC_P4
  SITE 92: note = RuvC_P5
  REGION 211..298: note = Tnp_domain
  SITE 219: note = Tnp_P1
  SITE 249: note = Tnp_P2
  SITE 257: note = Tnp_P3
  SITE 258: note = Tnp_P4
  SITE 270: note = Tnp_P5
METSTVGLDLAKSIFQVHAINSAGEAIVRKALRRSQVVPFFTKLPPCLVGMEACGTSHYWARELMKLGHNVQLMPPAYVKPYVKRGKTDANDAEAICEAVTRPTMRFVPVKSPEQQAALALHRTRSLLVKQRTQLVNMMRSLLGEFGIAMPRGLRHALEVARQLTDGSAPDVPKLAERLVTSLARQISAAHEELALLEKELLAWHRSNELSQRLATIPGIGVVAATALAASVTDPERFRSGRQFAASLGLTPLQKSSGGKEKQGRISKMGDRYLRQLLVVGMTSLVRRARTAPGSVDPRITAMLQRRPARVVTVAAANRAARVAWVIMTRGETYRKPLAAVV

SEQ ID NO: 11952 - protein, 272 aa, unidentified
  source 1..272: note = protein_89ee379
  REGION 6..147: note = RuvC_domain
  SITE 9: note = RuvC_P1
  SITE 52: note = RuvC_P2
  SITE 87: note = RuvC_P3
  SITE 89: note = RuvC_P4
  SITE 92: note = RuvC_P5
  REGION 209..272: note = Tnp_domain
  SITE 217: note = Tnp_P1
  SITE 246: note = Tnp_P2
  SITE 254: note = Tnp_P3
  SITE 255: note = Tnp_P4
  SITE 267: note = Tnp_P5
MNLNRVGLDTSKAIFTLHGVDQDERAVLRRNLKRSEMEAFFAMLPPTLVALEACGGSHHWGRRLADLGHTVRLIPPQYVKPFVRRGKNDRNDAEAISEAASRPGMPCVPVRAAEQQAEAIVLSVRELLVRQRTQLVNAVRGHAAEFGVVAAKNISHLSGLLETVAAEEAVPDTAKEMLAFLGAQVVQLDERIAELEGRMKQQHKASAVSQLLAEVPGIGPISALSLALKIDPGRFTSGRHFAGWLGLTPKEHSTGGRQRLGGISRAGNERLR

SEQ ID NO: 11953 - protein, 409 aa, unidentified
  source 1..409: note = protein_b57380e
  REGION 17..173: note = RuvC_domain
  SITE 20: note = RuvC_P1
  SITE 71: note = RuvC_P2
  SITE 111: note = RuvC_P3
  SITE 113: note = RuvC_P4
  SITE 116: note = RuvC_P5
  REGION 279..366: note = Tnp_domain
  SITE 287: note = Tnp_P1
  SITE 318: note = Tnp_P2
  SITE 326: note = Tnp_P3
  SITE 327: note = Tnp_P4
  SITE 339: note = Tnp_P5
MMTIMTMEVVVTQQLWAGVDAGKSDHHCVVIDAEGNRLLSQRIPNDESSLLQVIQAVTRLADGGEVTWAVDLNHGGAALLITLLITADQRLLYIPGRTVYHASGGYRGDGKTDAKDAAVIADQARMRRDLQPLRPGDEIAVDLRILTARRSDLVADRTRAINRLRAQLLEYFPALERAFDYSSSKAALILLTGYQTPDGLRRAGVTRLAAWLRKRKARNADGVAAAAIEAANAQHTIVPGQQLAAAMVGRLAKEVMTLDTEIGATDVMIEDRFRRHRHAEIILSMPGFGVILGAEFLAATGGDMTAFDSVDRLAGVSGLAPVPRDSGRISGNLKRPRRYDRRLLRTCYLSAQIAIRTDPASRTYYDRKRAEGKTHTQAVLALARRRLNVLWAMLRDHAVYRPATTTAAA

SEQ ID NO: 11954 - protein, 338 aa, unidentified
  source 1..338: note = protein_22c9e41
  REGION 7..149: note = RuvC_domain
  SITE 10: note = RuvC_P1
  SITE 53: note = RuvC_P2
  SITE 88: note = RuvC_P3
  SITE 90: note = RuvC_P4
  SITE 93: note = RuvC_P5
  REGION 211..298: note = Tnp_domain
  SITE 219: note = Tnp_P1
  SITE 249: note = Tnp_P2
  SITE 257: note = Tnp_P3
  SITE 258: note = Tnp_P4
  SITE 270: note = Tnp_P5
MDKIITIGLDLAKQVFQVHGVDCEGRVLVRRQLRRREVVSFFAQLPPCLVGMEACATAHHWGRELIKLGHTVKLMPPAYVKPYVKRGKTDAADAEAIAEAVTRPTMRFVAVKSMDQQAMLMLHKVRDLLVRQRTMLINALRGHLAEFGIVTARGPAGVKAAIGELHAMHDSLPPLARVALHGLLDRLEATSEEIRKVEKEIVASCRSQEASRRLMTVPGIGPITASAIVAAVPDASLFRSGRQFAAWLGLTPRAHSSGGKDRRGGISKQGDGYIRRLLVTGATAVIRMARKANPSKVWAARLLERKPARLVSVALANKTARIAWAVLARNQSYMAPAM

SEQ ID NO: 11955 - protein, 430 aa, unidentified
  source 1..430: note = protein_8c8fb41
  REGION 20..181: note = RuvC_domain
  SITE 23: note = RuvC_P1
  SITE 79: note = RuvC_P2
  SITE 120: note = RuvC_P3
  SITE 122: note = RuvC_P4
  SITE 125: note = RuvC_P5
  REGION 288..374: note = Tnp_domain
  SITE 296: note = Tnp_P1
  SITE 326: note = Tnp_P2
  SITE 334: note = Tnp_P3
  SITE 335: note = Tnp_P4
  SITE 347: note = Tnp_P5
MKSNTQNTKIEAITETTLVLGIDVGSETHYARAFDYRGIEYSKKPFKFSNDEAGFVMFKAWILDIKEKHGKDKVVPGMEPTGHYWFNLGKFLQDNEMKPVLVNPHHVKKSKELDDNNPTKNDRKDPKVIAGLVRGGRYMIPYLPEGVYADLRTASNMRFQLQAELTRIQNRISRWFNIYFPEYKTVYGQPDAKSGMLILKVAPLPEDILTLGIDGVNQIWRDAKVRAVGKARAKTLIEAAEHSVGSKEGEISARMEIRMLLEDYESRNTRLQEVVALIEELVKKIPMAEKLLEIKGVGIKTVSGFLAEVGDISRFNNPKELQKLAGLALVENSSGKHKGETTISRRGRKRLRYLLFEVAMSLVSKNPEFRELHSYYTTRKLNPLKKMQSLMAVAAKLLRVFFAMLTKGVDYDPKKLVGDIKRPAVYLQVA

SEQ ID NO: 11956 - protein, 349 aa, unidentified
  source 1..349: note = protein_a7ce96a
  REGION 13..155: note = RuvC_domain
  SITE 16: note = RuvC_P1
  SITE 59: note = RuvC_P2
  SITE 94: note = RuvC_P3
  SITE 96: note = RuvC_P4
  SITE 99: note = RuvC_P5
  REGION 218..304: note = Tnp_domain
  SITE 226: note = Tnp_P1
  SITE 256: note = Tnp_P2
  SITE 264: note = Tnp_P3
  SITE 265: note = Tnp_P4
  SITE 277: note = Tnp_P5
MKEYNEKNAIKVIGIDLAKNSFHVHGVNQAGHKVMSKKMSRQNLKTFMMNLPPCLVGMEACGGAHYWARLLRNWGHQVKLIAPQFVKPFVKSNKNDAIDAEAICEAIQRPNMRFIAIKNTAQQDVLAIHRMRSLVVGQRTALVNQIRGLLQEFGIVIPKGRRHVNQYLPRILEDAENGLSGLFREALHGLYRDLSHFDQRVVDYDDRIDQMAQVDEQAQRLMTIPGVGPKVATALLGAIGDISAFKNGRELAAWLGLVPRQCSTGGKSTLLGISKRGDVYIRKLLIHGSRSVLNWVDRKDDRTSLWAKELKARRHKNIASVALANRIVRVAFALLKRGEDYKIAVTTPA

SEQ ID NO: 11957 - protein, 343 aa, unidentified
  source 1..343: note = protein_3a4aef8
  REGION 6..149: note = RuvC_domain
  SITE 9: note = RuvC_P1
  SITE 54: note = RuvC_P2
  SITE 89: note = RuvC_P3
  SITE 91: note = RuvC_P4
  SITE 94: note = RuvC_P5
  REGION 213..299: note = Tnp_domain
  SITE 221: note = Tnp_P1
  SITE 251: note = Tnp_P2
  SITE 259: note = Tnp_P3
  SITE 260: note = Tnp_P4
  SITE 272: note = Tnp_P5
MNISRIGIDLAKNVFQLHGVDRHGKAVWKRRLKRAQWLKAVLDKTAPDCEIGMEACAGAHHWARELESRGYTVKLMAPQFVKPYVKSNKNDANDAEAICEAMSRPNMRFVTVKSIEQQDIQATHRVRSELMSQRTAKANQIRGLVAEYGLVAPQTMCALRAAVPCWLEDAENGLTGHFRSLLHGMWTDLVALDDRVRELDRGIQKLADSNEVTQRLQQLRGVGPLVATALVATVGDARQYHRSRQMAAAIGLTPRQHSSGGKDRLLGISKRGDVYLRSMLIHGARAVVSQAKHRDDRLSRWVIGIATRRHPNVAAVALANKTARMAWAMLRNETDYDPDFAIS

SEQ ID NO: 11958 - protein, 341 aa, unidentified
  source 1..341: note = protein_f05af25
  REGION 7..149: note = RuvC_domain
  SITE 10: note = RuvC_P1
  SITE 53: note = RuvC_P2
  SITE 88: note = RuvC_P3
  SITE 90: note = RuvC_P4
  SITE 93: note = RuvC_P5
  REGION 211..296: note = Tnp_domain
  SITE 219: note = Tnp_P1
  SITE 249: note = Tnp_P2
  SITE 257: note = Tnp_P3
  SITE 258: note = Tnp_P4
  SITE 270: note = Tnp_P5
MEKVSTIGIDLAKQVFQVHGAAGDGSVIFRRRLSREKFLAFLATAPACVVAMEACASAHYWGREIRRLGHEVRLIAPAYVKPFVKRQKNDMADAEAVCEAAQRPTMRFVAVKSEAQQASAMIFRARDLLVRHRTATINALRAHLAEFGFIAPKGTAHVKRLQVMIEDTSNGMPEPARLLCQDLLEMIRIYSTRIGALDREVRERARQDDVAKRLMTIPGIGPLIATALQAMAPPIETFDRGRDFAAWMGLTPRQHSTGGKARRGKTSKMGQRDLRRLLIIGASAVVHWAVRRGAPAGSWLERMLAKKPRMLVTVALANKMARMAWALMAKGGVYRAPAPVA

SEQ ID NO: 11959 - protein, 367 aa, unidentified
  source 1..367: note = protein_2ab64a1
  REGION 23..171: note = RuvC_domain
  SITE 26: note = RuvC_P1
  SITE 75: note = RuvC_P2
  SITE 111: note = RuvC_P3
  SITE 113: note = RuvC_P4
  SITE 116: note = RuvC_P5
  REGION 239..325: note = Tnp_domain
  SITE 247: note = Tnp_P1
  SITE 278: note = Tnp_P2
  SITE 286: note = Tnp_P3
  SITE 287: note = Tnp_P4
  SITE 298: note = Tnp_P5
MSSMPQSPVHSQPGPDPAGEVVLGVDTHKDFHVAVVLSLLGQVLGTRSFRTTAAGYRALLAWAQSLGVVRRAGVEGTGSYGKALTRQLLAAGVAVVEVNQPDRAERRRRGKTDAIDAEAAARAVLSGRATATAKTGNGQVEMLRMFKLARESAVKARTQTLNQLKTMIITADPELRDQLTGLTTPKLVRHCAGLPDQPVTDITAAARYTLRLLARRVQQLTAEITDLARQLKATVTALAPALLQQQGIGPDHAAQLLITAGDNPDRLRSEAAFAALCGVSPIQASSGNTTRHRLNRGGDRHANSALYLIVVCRLRHCPATRAYTARRTADGKSKRDIIRCLKRYIARDIHKIITGALRPAEPAPATP

SEQ ID NO: 11960 - protein, 399 aa, unidentified
  source 1..399: note = protein_ad91d2a
  REGION 5..164: note = RuvC_domain
  SITE 8: note = RuvC_P1
  SITE 61: note = RuvC_P2
  SITE 102: note = RuvC_P3
  SITE 104: note = RuvC_P4
  SITE 107: note = RuvC_P5
  REGION 271..357: note = Tnp_domain
  SITE 279: note = Tnp_P1
  SITE 309: note = Tnp_P2
  SITE 317: note = Tnp_P3
  SITE 318: note = Tnp_P4
  SITE 329: note = Tnp_P5
MPMAVGIDVAKEVHWIVVVDATDGTELLSHRLRNDPLEINATLAEINALAAAHGRATVGLDIVGGIAGLLTATAAAAGLTLVHVPGLVVNRARRATVGGENKSDPRDARVIADQVRHRPELRPITITDEQIAQLQVLVSRRTDLVTEQTRRVQRLREHLVAIFPALERTTDPTNHSDLILLARYVTPAEIRDTGAGRMRAYLRDAGVKTSRADTLTKRVLAAAADQTIEVTGQSIVAEIVRELAEEALRVRRRLREIDTRIGAVLDTHPDAELITSLPGMGPTLTAELLATTGGLARFDTGDELAAAAGLAPVLHQSGRVQFRRRATTGKRALKHVFYRSAFCALSSPDAASKAYYARKRAEGKSHHQAVIALARRRVNVLHAILRTRQPYRPMITAAA

SEQ ID NO: 11961 - protein, 404 aa, unidentified
  source 1..404: note = protein_57b5ea8
  REGION 4..160: note = RuvC_domain
  SITE 7: note = RuvC_P1
  SITE 57: note = RuvC_P2
  SITE 97: note = RuvC_P3
  SITE 99: note = RuvC_P4
  SITE 102: note = RuvC_P5
  REGION 270..356: note = Tnp_domain
  SITE 278: note = Tnp_P1
  SITE 309: note = Tnp_P2
  SITE 317: note = Tnp_P3
  SITE 318: note = Tnp_P4
MIFVGVDWAEAHHDICVLDTAGEVLARKRIPDTLVGVRELHELLSEHADEPEQVVVGIEKDRGLIVTSMLGSGYRVFAVNPLSVARYRERHVTSGSKNDALDAKVLAELVRTDRQNHREAVSDSEAADATKVLARAHQSAIWSCQREVNALRNALKDYYPGALLAFGNSLAERDAVAILSVAPTPSLGAQLSQSKIISALKRAGRQRNLEKRAKEIQDALREEQLHERPKVERAYGVITKSHVAMIRAFNTEIEELEKSLTAGFSEHPDAKIILSLPGLGMILGARVLGEFGDAPNRYHDAKSRRNYAGTSPVTRSSGKSLVVLSRHARNRRLSDAADRWAFCSLKQSPGARAYYDKLRARNKTHHQALRQLANRWVGILHACLDYQVVYDEALAWKSREALTA

SEQ ID NO: 11962 - protein, 407 aa, unidentified
  source 1..407: note = protein_9ef6445
  REGION 4..162: note = RuvC_domain
  SITE 7: note = RuvC_P1
  SITE 57: note = RuvC_P2
  SITE 99: note = RuvC_P3
  SITE 101: note = RuvC_P4
  SITE 104: note = RuvC_P5
  REGION 277..365: note = Tnp_domain
  SITE 285: note = Tnp_P1
  SITE 315: note = Tnp_P2
  SITE 323: note = Tnp_P3
  SITE 324: note = Tnp_P4
  SITE 337: note = Tnp_P5
MNAVGIDVSKGKSTVAVLRPFGEIVVSPFDVSHSPKELSKLVTLLKTLNGDTKVVMEYTGNYYLPIALFLRNNGFFVSVVNPILVKDYSTKSLTVRKVKTDKKDALKIASFALDRWNELSPFSAQSEARLLLKSYNRQYNQYNKLKIILKNNLIALLDQTFPGANTLFSTPTRKSDGHEKWVDFVLKFSHSECISKKSFSFFLKSYLSWCKKFGYKFSKSKAQAVYDFACNCSPSLSFSDSSALLVSNAIIQLNSINETLASLASEMNKIAATLPEYDSVMSMFGVGSVLGSQLIAEIGDVSRFPNKKALVGFAGLDASPFQSGNFNPQSRSISKRGSAALRKTLFQVMSVVLQRAPTNNVIFQFMDKKRSEGKHFYVYMTAAANKFLRIYYARVTEHLNLFTTTTA

SEQ ID NO: 11963 - protein, 369 aa, unidentified
  source 1..369: note = protein_369fb51
  REGION 41..143: note = RuvC_domain
  SITE 82: note = RuvC_P3
  SITE 84: note = RuvC_P4
  SITE 87: note = RuvC_P5
  REGION 205..291: note = Tnp_domain
  SITE 213: note = Tnp_P1
  SITE 243: note = Tnp_P2
  SITE 251: note = Tnp_P3
  SITE 252: note = Tnp_P4
  SITE 263: note = Tnp_P5
MRRGRSRACCRERTVRQQRRGVPGAESVLAGLAAAELGRRGRANGVGKYLAQRLVAAGETVVDVSTRRAALARVHAGGNGRKTDDTDAESIAMVGLRTPGLAEVRPDALTVELKLLANRRDELVAMRIQAVCRIHRDLVVLLPGGVSKRLTARYAKQVLARVRPRDELGRLRRQLLAEQITDLEAIDGKILAINKQIKARIKVAKTTLTEVFGFGPINTARILGDAGDVSRFKSRHHFASYNGTAPTVWGSGGPSQPAVNPKGNRKLNHAIHIAAVTQVRSKTSAGHAYYARKIAEGKSHNEAMRALKRRISDTVYRHLVADAAAGAKRGPGGQLGATQTASATGSTPTTGSSARPQPGPRTKATPPAA

SEQ ID NO: 11964 - protein, 346 aa, unidentified
  source 1..346: note = protein_d09434b
  REGION 7..147: note = RuvC_domain
  SITE 10: note = RuvC_P1
  SITE 53: note = RuvC_P2
  SITE 88: note = RuvC_P3
  SITE 90: note = RuvC_P4
  SITE 93: note = RuvC_P5
  REGION 210..302: note = Tnp_domain
  SITE 218: note = Tnp_P1
  SITE 248: note = Tnp_P2
  SITE 256: note = Tnp_P3
  SITE 257: note = Tnp_P4
  SITE 269: note = Tnp_P5
MNEIIRIGMDTSKHFFQLHGVDAAERPVLRKRLRRKEVVAFFAGLSPMVVGIEACGAAHHWARTLSELGHEVQLLPPQLVKPYVKRGKNDAADAEALCEAMSRPTMRFAPVKSKEEQAALMLIGVRDRLIRNRTQLANAIRGYAAEFGLIAAKGLDKIEPLLARLEADESLPALARDLFMTQAEEYAQLKAKIRDVDAKLSAWRRQDARSRRLVRIPGLGPIGAALLSMKTLDPSLFRSGRQFAAWIGLTPKDHSTAGKVKLGGITRAGDEALRSALVSGATAVIRQARHGRGKPSPWLAALIARKPPKLAAVALANKIARIAWKLMKTGESYDARRASGAAAQAA

SEQ ID NO: 11965 - protein, 312 aa, unidentified
  source 1..312: note = protein_1bd6e5a
  REGION 6..154: note = RuvC_domain
  SITE 9: note = RuvC_P1
  SITE 53: note = RuvC_P2
  SITE 93: note = RuvC_P3
  SITE 95: note = RuvC_P4
  SITE 98: note = RuvC_P5
  REGION 190..273: note = Tnp_domain
  SITE 197: note = Tnp_P1
  SITE 226: note = Tnp_P2
  SITE 234: note = Tnp_P3
  SITE 235: note = Tnp_P4
  SITE 246: note = Tnp_P5
MQNDTIGVDVSKDHLDAHRLVDGASRRFANDKRGHKTLIKWLAQTPVQRVVFEPTGPYHRALERALGAAGVPFAKVNPRQARRFAEATGKLAKTDRLDAAMLARMGAMLELATRPARSEVLLELKELHLAREALVKDRTAAKNRAKALTLALLKRHNAQRLEQIERQIETIEATITQIIEADADLAVRFAIVTSIPGIAKVTAFALLIEMPELGLLEPGQAASLAGLAPIARQSGRWNGRAFIRGGRANVRQALYMPALVATRFNPDLKAKYDQLVAAGKPAKVVLTAIMRKLIVLANALLRANRKWAPKPA

SEQ ID NO: 11966 - protein, 389 aa, unidentified
  source 1..389: note = protein_ec8e191
  REGION 5..161: note = RuvC_domain
  SITE 8: note = RuvC_P1
  SITE 59: note = RuvC_P2
  SITE 99: note = RuvC_P3
  SITE 101: note = RuvC_P4
  SITE 104: note = RuvC_P5
  REGION 265..352: note = Tnp_domain
  SITE 273: note = Tnp_P1
  SITE 303: note = Tnp_P2
  SITE 311: note = Tnp_P3
  SITE 312: note = Tnp_P4
  SITE 325: note = Tnp_P5
MMIFVGIDIAKLNHFASAISSDGEILIEPFQFTNDGDGFQLLISKLDSFDKDSLIIGLESTAHYGDNLVRYLVASFYKVCVLNPIKTSSMRKNNIRKTKTDKVDTYIICKTLMMQDHLRFVTFYDLDLMDLKALGRFRQKTIKQRTRLKIQLTSYLDEVFPELQYFFKSGLHQKSVYALLKEAPTPETIASMHMTHLAHLLKSTSHGHFDKETAQQLRVLAEKSVGASDSALSIHVTHTISQIELLDSQLERVEAEMTEIMKFNDSVIMTIPGIGYINGGMILGEIGDIHRFSNSNKLLAYAGLDPSVYQSGNFHATKTRMSKRGSKVLRYALINAAHNVVKNNSTFKAYYDAKMAEGRTHYNALGHCAGKLVRVIWKMMTDEVEFNLK

SEQ ID NO: 11967 - protein, 412 aa, unidentified
  source 1..412: note = protein_d22dc1e
  REGION 9..158: note = RuvC_domain
  SITE 12: note = RuvC_P1
  SITE 64: note = RuvC_P2
  SITE 98: note = RuvC_P3
  SITE 100: note = RuvC_P4
  SITE 103: note = RuvC_P5
  REGION 253..340: note = Tnp_domain
  SITE 261: note = Tnp_P1
  SITE 292: note = Tnp_P2
  SITE 300: note = Tnp_P3
  SITE 301: note = Tnp_P4
  SITE 312: note = Tnp_P5
MDIVHERAAGMDISKRDAKVCVRVPGTRAGTYTSKVTTWGATTQAILELREFLEREHITIVVMEATSDYWKPFFYLLEETLPVMLVNAKAARNIPGRKTDVSDAAWLAQLAAHGLLRASFVPPEPIRDLRDLTRARAIAARDRAREIQRLEKFLESSGIKLSSVVSDLTGVSSRDMLEALINGERNPNVLAGMARGTMRSKIPALVDALTGRFKPHHAFMARLHLDQIDAHTRTIEALTARIEEAMEPFREAREALATIPGASRRVAEVIIAETGADMTVFETPARLASWAGVCPSAHESAGHIKSAHIMPGNKYLKAALGTAAMSATRSKNTYLAARYRRITARSGRNKALVAVEHSILTAAWHMLSNGECYNDPGTDHFNRINPSRAKNNAIKQLNNLGYNVTITPLTAA

SEQ ID NO: 11968 - protein, 319 aa, unidentified
  source 1..319: note = protein_4405262
  REGION 9..149: note = RuvC_domain
  SITE 12: note = RuvC_P1
  SITE 56: note = RuvC_P2
  SITE 96: note = RuvC_P3
  SITE 98: note = RuvC_P4
  SITE 101: note = RuvC_P5
  REGION 192..277: note = Tnp_domain
  SITE 200: note = Tnp_P1
  SITE 229: note = Tnp_P2
  SITE 237: note = Tnp_P3
  SITE 238: note = Tnp_P4
  SITE 249: note = Tnp_P5
MAQNDLVVVGIDVAKDKVDACIRVLALRQTCPATAQGHRKLVAWLRKHQVGMAVMEASGGYEREWRKVLYKAGIEARIVDPKRVRNFALSAGRLAKNDAIDAEMIAWFAETFNEAPSQTHDTAHEELVALVKARIGLVELKTRLQSQDVHAGPGQVRKAHARILKSLAAEIEKLEAAIAAKIKATADFAERAEIIESVPGFAETTSANLVAAMPELGHVSDRIAAALIGLAPYDDDSGQRRGERHIKGGRRWIRNAIYMPCLGAATQNNPVIKAFYDRLIAKGKAPKVALVACMRKLIIILNTLIARRQKWDPGRHVLA

SEQ ID NO: 11969 - protein, 309 aa, unidentified
  source 1..309: note = protein_4103758
  REGION 1..81: note = RuvC_domain
  SITE 19: note = RuvC_P3
  SITE 21: note = RuvC_P4
  SITE 24: note = RuvC_P5
  REGION 185..271: note = Tnp_domain
  SITE 192: note = Tnp_P1
  SITE 222: note = Tnp_P2
  SITE 230: note = Tnp_P3
  SITE 231: note = Tnp_P4
  SITE 244: note = Tnp_P5
MNPLHTNLYRKSLSLRKTKTDRVDARTIATMLLSDVDLKSYTDIAYHNEELKSLTRYRFDKVRERAKLKQSVSRLVTILFPELEKLVPSLHIASVYALLSEYPGAKQISEIHLTKLTNLLATASKGRYGKDKAIQIRDAARTSIGSVMPAKFLELKHTIKLIRELTSEIDEIEVSIQKIMDELNPPILSIPGVGIQSAAMILAEIGDFSNFESPDKILAYAGCSPSTYQSGKLTNCYAHMEKRGSRYLRYALYNATKYVCYWNPVFAEYLAKKRAEGKHYNVALSHAMKKLVRLIYALQKSGKTYLTAA

SEQ ID NO: 11970 - protein, 398 aa, unidentified
  source 1..398: note = protein_859dbdc
  REGION 10..164: note = RuvC_domain
  SITE 13: note = RuvC_P1
  SITE 61: note = RuvC_P2
  SITE 101: note = RuvC_P3
  SITE 103: note = RuvC_P4
  SITE 106: note = RuvC_P5
  REGION 271..356: note = Tnp_domain
  SITE 279: note = Tnp_P1
  SITE 309: note = Tnp_P2
  SITE 317: note = Tnp_P3
  SITE 318: note = Tnp_P4
  SITE 330: note = Tnp_P5
MSRPEYGVFLGLDVGKEEHHACGLDGDGERVHDKPLPQSEAKIRAVLEALSAHGPVLVIVDQPASIGALAVTVARDLGIDVAYLPGLAMRRIADLHPGSAKTDARDAYIIAEAARSMPHALRRVDTGDEALADLEVVVGYDDDLAGEGTRIANRIRGLLTQIHPALERVLGPKIQHPAVLELLTRFGGPQGLAGATRRQLITATKTRAPRSYDKLVTAVQQALTEQTVTVPGTRAAEHVLPRLAAALAGLLTERADAARQIEEMLDAHPLSKVLTSIPGIGVRTGARILLEVGDGTAFPTPGHLAAYAGLAPVTRRSGTSIRGEHPSRGGNKQLKRAFFLAAFAALSDPTSRAYYDRKRAAGKKHNAALICLARRRIDVLHAMLRTGTLYQRPTPSAA

SEQ ID NO: 11971 - protein, 395 aa, unidentified
  source 1..395: note = protein_76ff73e
  REGION 4..162: note = RuvC_domain
  SITE 7: note = RuvC_P1
  SITE 60: note = RuvC_P2
  SITE 101: note = RuvC_P3
  SITE 103: note = RuvC_P4
  SITE 106: note = RuvC_P5
  REGION 267..354: note = Tnp_domain
  SITE 275: note = Tnp_P1
  SITE 305: note = Tnp_P2
  SITE 313: note = Tnp_P3
  SITE 314: note = Tnp_P4
  SITE 327: note = Tnp_P5
MFYVGIDVAKYKHFASIMDQTGKPLGKPFPFQNHKQGAESLLAWINQHNASPEEILIGMEATGHYWLAIYSFLIDHGYSVIVLNPIQTHAWRKGTEIRKRKTDAIDSVMIADMIRFGRFLESRLVDEKMFALKQLSRFRNSLVTTMSNLKRKVIVVLDQTFPEYQRIFSDVFGKTSSQLLLDFSSPSDYEQLSIDDLTAIMEQASRSRLGREKATELLHLASNSFGVTFCKETFSFQLKLLMEQIRFIDLQVTACEKQMSQLLIDLDTPITTIPGVGPIIGATILSEIGDILRFDSPSKLVAYAGIDASVSQSGQYESVSMSISKRGSSHLRRALFQAAISASKHDPVLKAFFEKKRSQGKHYYVCLGAVARKLCHIIYAVLKSNNPYQIPPLTT

SEQ ID NO: 11972 - protein, 285 aa, unidentified
  source 1..285: note = protein_e2a849b
  REGION 7..160: note = RuvC_domain
  SITE 10: note = RuvC_P1
  SITE 62: note = RuvC_P2
  SITE 100: note = RuvC_P3
  SITE 102: note = RuvC_P4
  SITE 105: note = RuvC_P5
  REGION 205..249: note = Tnp_domain
  SITE 213: note = Tnp_P1
  SITE 243: note = Tnp_P2
MENFYFIGVDVSKKKLDFCVMFEGKVVHEEATANHQTAIMSLLRHLEEDYGITSDRMLVCAEHTGQYTFPLACACKSVECKLWLENAAEIKYSSGVQRGKNDKVDARRIAIYAGRFQDKVRYYKRPTEDIERLKQLESERTLYVTDLAKYKGQMKDQKDYMPKALYERKMKRLQALMDDLEEAIQAITDEMDEVIASCPVLFRQRELLMSIDGVGRVVATNMIIATEAFTRFDDPRKFNCYAGVAPFSFFRKFPALESKSIAPGRQSDEKIAAFSCCCCNTPDWR

SEQ ID NO: 11973 - protein, 310 aa, unidentified
  source 1..310: note = protein_fadc301
  REGION 10..158: note = RuvC_domain
  SITE 13: note = RuvC_P1
  SITE 62: note = RuvC_P2
  SITE 98: note = RuvC_P3
  SITE 100: note = RuvC_P4
  SITE 103: note = RuvC_P5
  REGION 225..310: note = Tnp_domain
  SITE 233: note = Tnp_P1
  SITE 264: note = Tnp_P2
  SITE 272: note = Tnp_P3
  SITE 273: note = Tnp_P4
  SITE 284: note = Tnp_P5
MKSTIPTILAGVDTHSTTHTLALLDEHGRVTDTETFNADPKGYERLIAMIGDPALCLGVGVEGTNSYGAALSRRLAAAGYTVHEVLRPKRSVRRSDGKSDPIDAIAAARSVLAGDGISTPKASDGWCEALRHLIAAREQLVTSMTAISNCLAGLLTTAPEGIRERYRSLPSKRRIGKLAACRPSGGIVERNVLSSLKTLASSWRELHDRADVLECRMRQILEENARPLLDVYCMGTMSAAQLAVIGGDNPERIRSEAAFAKLCGACPLPASSGKTNRHRLNRSGNRQGNRALYNVALVRMSHHQPTRTTW

SEQ ID NO: 11974 - protein, 345 aa, unidentified
  source 1..345: note = protein_d78a93f
  REGION 6..149: note = RuvC_domain
  SITE 9: note = RuvC_P1
  SITE 54: note = RuvC_P2
  SITE 89: note = RuvC_P3
  SITE 91: note = RuvC_P4
  SITE 94: note = RuvC_P5
  REGION 213..301: note = Tnp_domain
  SITE 221: note = Tnp_P1
  SITE 251: note = Tnp_P2
  SITE 259: note = Tnp_P3
  SITE 260: note = Tnp_P4
  SITE 272: note = Tnp_P5
MNITRVGVDIAKSVFHVHAVDRHDQVQWRGKYSRDKWLDAICKRVPVGAEIGMEACASSHHWARQFQVRGYHVKLIAAQFVKPYVKSNKNDQVDAAAVCEAMGRPHMRFVTIKTVSQQDIQAAHRVRAELVHQRTAKANQIRGLVGEYGLVAPLGIAQLRAALPRWLEDAENGLTDEFRVLLAGLAEDLRHLDVRIAMVTERIKRHTQTDPMAKRLLSLPGVGTLTASALAGALGDAQAFKRGRDFAASLGLTPRQHSTGGRDRLLGISKRGDSYLRTLLVHGARAVLRYAGDKDDNLSHWIRQLAERKHPNVAVVALANKTARIAWAITRRDAAYEPELAAYVA

SEQ ID NO: 11975 - protein, 405 aa, unidentified
  source 1..405: note = protein_774a361
  REGION 10..162: note = RuvC_domain
  SITE 13: note = RuvC_P1
  SITE 61: note = RuvC_P2
  SITE 99: note = RuvC_P3
  SITE 101: note = RuvC_P4
  SITE 104: note = RuvC_P5
  REGION 269..355: note = Tnp_domain
  SITE 277: note = Tnp_P1
  SITE 308: note = Tnp_P2
  SITE 316: note = Tnp_P3
  SITE 317: note = Tnp_P4
  SITE 328: note = Tnp_P5
MHDSIPDAYAGVDWAVDAHAVCVVDVAGRVVVEFDVEHTAAGLDQLCRCVKHAGARRVAIERPDGPVVDAIFEAGLEVVVVSSRSVKALRERYGTSGNKSDRSDAYVLADCLRTDGHRWPSLEPDGPATVTLRAHVRARKDLVEHRVAVANQLRAHLRVVFPGAVGLFRDLDSQISLRFLQRFPSASHAARLSPKRLHTWLQTSHYSGATSAAELHRRLLDAPAGVLGDNGDARSTVTLTYVAVLNTLRTQINELDTRLEVLLDAHPDAHIFRSLPRCATIRAATLLAEIGDCRARFPDPESLACLAGVAPSTRTSGRHRSVTFRFASDKKLRDAICDFAGDSWQGNAWAAARYRQLRADGKTHPHAERILARSWTHIIWRCWQDHTTYDPTRHGAHQRLLDTAA

SEQ ID NO: 11976 - protein, 396 aa, unidentified
  source 1..396: note = protein_0e1f539
  REGION 4..158: note = RuvC_domain
  SITE 7: note = RuvC_P1
  SITE 59: note = RuvC_P2
  SITE 99: note = RuvC_P3
  SITE 101: note = RuvC_P4
  SITE 104: note = RuvC_P5
  REGION 264..354: note = Tnp_domain
  SITE 272: note = Tnp_P1
  SITE 302: note = Tnp_P2
  SITE 310: note = Tnp_P3
  SITE 311: note = Tnp_P4
  SITE 327: note = Tnp_P5
MATIGIDIGGHTHVAARCRDGQAQAERKILRVSQSRAGFISLDAWLAAEPEPIELVVMESSGHYWMPLAAHLRRSGVPVAVVNPLAARYFAKSRLERTKSDPADARSLAEMAMRDSPPARDPLAGVELRQAARFAMTLVTEQAKVCQKLYRLVELGFPELRELFEDPTCRTARAVLRLAPTATAATRRRTSTLANANGGAGHRRLGQAKAERLVAAAADSIAVPELDAEVSFEVGLLLDQFDLLERQIEAAEARVGELLDGKLARRLRTIPGVGPAIVATLIAEIGDIFRFDDFDQLLAFAGVHPAERSSGRKGVSPETSWHMSKAGNSYLRAAAYRMAVVGVQHNPVIAAHYARKRAAGKSPMNALGHCMRKALSIVWGVWRNGQDFDPNWGLEA

SEQ ID NO: 11977 - protein, 399 aa, unidentified
  source 1..399: note = protein_7bcef95
  REGION 9..163: note = RuvC_domain
  SITE 12: note = RuvC_P1
  SITE 60: note = RuvC_P2
  SITE 100: note = RuvC_P3
  SITE 102: note = RuvC_P4
  SITE 105: note = RuvC_P5
  REGION 271..357: note = Tnp_domain
  SITE 279: note = Tnp_P1
  SITE 309: note = Tnp_P2
  SITE 317: note = Tnp_P3
  SITE 318: note = Tnp_P4
  SITE 330: note = Tnp_P5
MTTEYAITLGLDVGKSAHHGCALTPEGQRVYDHELPQDETALREVITDLQQHGAVLVVVDQPNTIGALPIAIARDVGADVAYLPGLAMRKAADLYPGRSKTDARDAFIIADTARTMPHTLRAVDRDSAVLSALKVLSGFDEDLARESTRAINRLRSLLVQIYPSLERVFPGVVLTRAIVLELFIRYHGPAGLKAAGKAGVKRWARNHSRKDPGPLVDQVFTALAEQTVTVPGADAVELVIPRVAAQIKELNHQRDIVAGEVEKLVDDFPLSRVLTSIPGVGVKTAVQILLAAGDMSAFPTPGHLAAYAGIAPVTRRSGTSIRGEFPARAGNKRLKNALFRSAWVASCHDPLSRAYYERKRAEGKRHNAAVMCLARRRLNVMYAMMKTGTLYEPRVPAAA

SEQ ID NO: 11978 - protein, 385 aa, unidentified
  source 1..385: note = protein_785a9d9
  REGION 28..170: note = RuvC_domain
  SITE 31: note = RuvC_P1
  SITE 74: note = RuvC_P2
  SITE 109: note = RuvC_P3
  SITE 111: note = RuvC_P4
  SITE 114: note = RuvC_P5
  REGION 230..300: note = Tnp_domain
  SITE 238: note = Tnp_P1
  SITE 268: note = Tnp_P2
  SITE 276: note = Tnp_P3
  SITE 277: note = Tnp_P4
  SITE 289: note = Tnp_P5
MVIPTLRGHTFAGCFISEAIITSAVALVGIDPGKQSFHLHGKDGSGRKIFRTKATRQQMMRLLGILPACTVVMEACAGAHFMARQLTALGHQVKLISPQFVRPFVKGNKNDFIDAEAICEAASRPSMRFVSPKTEARQTLSVLHRMRDSLVRDRTKTANQAHGFLLEFGISLPKGLSLVRRLPSTLDEHELPPRLVVLLTRLHQHSRCLDGQIKAPDKEMTTQLEEDDLGSRLLTIPCVGPITASLLSAEMGDGKQYGGSRDFAASVGLVPRQHSTGGRANLLGISKRGRQVSAAAFSAVRPGLPAAPGASAGCLGPLGPLATAATPCEHGGARPGQQVLPSRLGVRRQPLGIRSRASRLRRLTRPFSCTTEHPSRFCDAEQPMT

SEQ ID NO: 11979 - protein, 347 aa, unidentified
  source 1..347: note = protein_2d632f4
  REGION 14..160: note = RuvC_domain
  SITE 17: note = RuvC_P1
  SITE 65: note = RuvC_P2
  SITE 105: note = RuvC_P3
  SITE 107: note = RuvC_P4
  SITE 110: note = RuvC_P5
  REGION 206..293: note = Tnp_domain
  SITE 214: note = Tnp_P1
  SITE 244: note = Tnp_P2
  SITE 252: note = Tnp_P3
  SITE 253: note = Tnp_P4
  SITE 266: note = Tnp_P5
MNNPSGDSPATVFCGIDVSAATLAVAVIEQDQAAQQREFPNQPAGHKQLLLWLAKCQACVRVSLEATGIYSLDLALALDAAPQVEVAVLNPKLVNRFAQTLSRSKSDAADALVLAQYSQRMPFIPWSAPSSGGLALRTAARHIHALVVQQTHEQNRLHAVKASRTAPRAVVNDLAQALRSLACRIAKMRKAAREIIRADAPLNECYHLLVAMPGIADVSAIYLLAETALLSPQLTARQWVAHSGLDPTHHNSGTSVHKRPRISRAGNRHLRRALYMPALAAVRWDPHMKAFYEALQQRHKTKLQALIAVARKILHAIYGIFKTRTPYDGRKLFPRLAIAPELQSASR

SEQ ID NO: 11980 - protein, 327 aa, unidentified
  source 1..327: note = protein_4bca9e6
  REGION 6..155: note = RuvC_domain
  SITE 9: note = RuvC_P1
  SITE 56: note = RuvC_P2
  SITE 94: note = RuvC_P3
  SITE 96: note = RuvC_P4
  SITE 99: note = RuvC_P5
  REGION 199..286: note = Tnp_domain
  SITE 207: note = Tnp_P1
  SITE 237: note = Tnp_P2
  SITE 245: note = Tnp_P3
  SITE 246: note = Tnp_P4
  SITE 259: note = Tnp_P5
MKSIYVGIDVSKRTLDVCVKSAEQEQFFKIENKSNSIKKLFKELRKVDSCVVIAMENTGYYNHQLYKVLPNFNFTVYVVDPKHIKRSIGLVRGKNDKVDAKRIATFIERNNEDLNPWEPLSESVYSLKVLLTERKAEVARIRSLKQRIESLNQQKSVSSVPKLITRNKKEIQRIQKRVKEIEKMIREEIAKEISLKREIDRIKTVPGIGDITAWMIAAKTHGFKRLLDPRKLACFAGVVPFEQQSGSSLKTKPRVSKMADRSLKTVLQMAAMRSVRMNNELQSYYQRKVEEGKNKMSVLNAVRNKLIHIVMALIKNKTYYQNPLELS

SEQ ID NO: 11981 - protein, 310 aa, unidentified
  source 1..310: note = protein_e005e5b
  REGION 7..148: note = RuvC_domain
  SITE 10: note = RuvC_P1
  SITE 53: note = RuvC_P2
  SITE 93: note = RuvC_P3
  SITE 95: note = RuvC_P4
  SITE 98: note = RuvC_P5
  REGION 188..272: note = Tnp_domain
  SITE 196: note = Tnp_P1
  SITE 225: note = Tnp_P2
  SITE 233: note = Tnp_P3
  SITE 234: note = Tnp_P4
  SITE 245: note = Tnp_P5
MIHPDVIGCDIAKAHLDFFDSGLERHFRIDNTPAAISAWLDGLDGRGVHIVFEATGRYDRQLRIALETRELPYSRVNPARARDFAKAIGLLAKTDAIDARLLARMGQSLPLSTQAPDDPARHVLARLHTRRDQLVAMRQQERTRLHETEGIERDSAESHMAWLDAEGARIEMACRDVLKAEKTLQEQEARLRSIPGIGPVAALTLIAHMPELGNRSAKAIAALAGLAPFNVDSGTSRGKRHIRGGRKRIRDALYMAALTASRMPRAFKSHADQMKEAGKPFKVVIIALARKLLAIANAIIRDKTTFRRTT

SEQ ID NO: 11982 - protein, 387 aa, unidentified
  source 1..387: note = protein_67d58ac
  REGION 5..158: note = RuvC_domain
  SITE 8: note = RuvC_P1
  SITE 56: note = RuvC_P2
  SITE 97: note = RuvC_P3
  SITE 99: note = RuvC_P4
  SITE 102: note = RuvC_P5
  REGION 220..305: note = Tnp_domain
  SITE 228: note = Tnp_P1
  SITE 258: note = Tnp_P2
  SITE 266: note = Tnp_P3
  SITE 267: note = Tnp_P4
  SITE 278: note = Tnp_P5
MSVIIGMDPHKRSATIEVVDERARVLAVGRYGTDKTGYAQMLAAGRQYADRVWAVEGCNGIGKHIAHRLLHDGETVLDVPAKLSAQVRVFASGNGRKTDPVDAHSVAMVALRTPNLVQVQLDPDLQVMGMLVDRRDELGRARTQTINRLHRLLLELFPGGAKQFLSARQARALIATIKPRDIVGKTRRRLAVELIGELEGIDKKIKTAEKDLKELVVARSSTLMDLHGIGPSGAARLLADVGDIRRFADRDRFASWNGTAPLDASSGDQKRHRLSRAGNRRINRTLHIMAVVQLRNRTEGRAYFDAKKAAGKTSMEAMRALKRRLSNVVYARMITDHKRRQAADPGGHSGTTLQSSVTDLTPDIGPSDKPLPGPATNHPKPLVSAAP

SEQ ID NO: 11983 - protein, 320 aa, unidentified
  source 1..320: note = protein_d8444a7
  REGION 8..163: note = RuvC_domain
  SITE 11: note = RuvC_P1
  SITE 56: note = RuvC_P2
  SITE 96: note = RuvC_P3
  SITE 98: note = RuvC_P4
  SITE 101: note = RuvC_P5
  REGION 195..279: note = Tnp_domain
  SITE 203: note = Tnp_P1
  SITE 232: note = Tnp_P2
  SITE 240: note = Tnp_P3
  SITE 241: note = Tnp_P4
  SITE 252: note = Tnp_P5
MSASSVVVGIDVAKAHVDVSVLGAKFEAQRFDNHADGHSALAAVLKALEVALVVMEATGGYETELACALQSASLPVAVINPRQARDFAKSMGRLAKTDTIDARMLAELAAVLVRREDLGRFLRPLTNEQQQWLAALVTRRRQLLTMLLSERQRLQITPKGLHPSIEAIVAAIKAQLDDIEAQMVGHVREHFGELDRLLQSASGIGPVASATLIAELPELGRLNRREIAALVGVAPMANDSGTTRGRRRIQGGRFEIRRVLYMAALTASRRNPPIKAFYDRLLAAGKLPKVALVACMRKLLTMLNAMVRTNRSWDNSLHGA

SEQ ID NO: 11984 - protein, 345 aa, unidentified
  source 1..345: note = protein_1386a6f
  REGION 5..152: note = RuvC_domain
  SITE 8: note = RuvC_P1
  SITE 55: note = RuvC_P2
  SITE 92: note = RuvC_P3
  SITE 94: note = RuvC_P4
  SITE 97: note = RuvC_P5
  REGION 212..300: note = Tnp_domain
  SITE 220: note = Tnp_P1
  SITE 250: note = Tnp_P2
  SITE 258: note = Tnp_P3
  SITE 259: note = Tnp_P4
  SITE 271: note = Tnp_P5
MDHYAGLDVSVKETSVCIINEAGAICRELKVPSHPNDLVGALKDPAWRLVRIGLEAGPLSQWLFRGLTDAGLPVTCIETRHTKAFLKAQINKSDRNDARGIAQMMRVNLLRPVHVKTLASQNHRALLTARKLLQEKAIAIENDIRGLLRNFGLKVGTVGMVKFEERIRELVESLPEMGEIIEALLAARQKLHEEFARLHRKLLMVVRDDAVCRRLMTIPGVGPVVSLAFTSTIDTPARFRNSKALGPVLGLTPVLKQSGESNRVGHISRCGDEMMRTLLYEGAQTLLTRVKKWSWLKAWAMNIARRRGVRKAIVALARRLAVIMHRMWVDGTEFRWTRENAPLAA

SEQ ID NO: 11985 - protein, 387 aa, unidentified
  source 1..387: note = protein_08ee89e
  REGION 47..185: note = RuvC_domain
  SITE 118: note = RuvC_P3
  SITE 120: note = RuvC_P4
  SITE 123: note = RuvC_P5
  REGION 255..342: note = Tnp_domain
  SITE 263: note = Tnp_P1
  SITE 292: note = Tnp_P2
  SITE 300: note = Tnp_P3
  SITE 301: note = Tnp_P4
  SITE 313: note = Tnp_P5
MSQVSDLSRSLVPFDQNITLTVVVELSEASWLVAGLIPGVDRQPVKKQEPEPVALLRLLERWRVEAVRAGRTIGRIALAFEAGRDGFWLARWLQARDIEVHVVHSTSVAVSREHRRAKTDRLDTAMLMRVFLGWLRGERGHCRMVAIPTLEQEDAKRPSRERESLVGERTRIVNRMKAALARLGIRGFKPTLRKAPQRLDALRTPEEVSIPPNTLDEIRRDMVRLAVVREQIDVIERARLARLEQAPAAGPHAMVRLLARVIGVGLETADMLVQEVLSRNLRDRRAVARYVGLTGSPDESGRRRREKGLAKAGNARVRRGLIQLAWRFLRFQRDSTLAQWYRTRTGGPKGARKTTMIVALARKLLIALWRMVTIGEIPAGVALRQVI

SEQ ID NO: 11986 - protein, 320 aa, unidentified
  source 1..320: note = protein_b48ca7a
  REGION 10..152: note = RuvC_domain
  SITE 13: note = RuvC_P1
  SITE 57: note = RuvC_P2
  SITE 97: note = RuvC_P3
  SITE 99: note = RuvC_P4
  SITE 102: note = RuvC_P5
  REGION 193..278: note = Tnp_domain
  SITE 201: note = Tnp_P1
  SITE 230: note = Tnp_P2
  SITE 238: note = Tnp_P3
  SITE 239: note = Tnp_P4
  SITE 250: note = Tnp_P5
MMAQNDLIVVGIDVAKDKVDACIRSLSLKGTWPSTVQDRRKLIAWLGKHKVGKAVMEASGGYERDWAKALREADIEVRIVDPKRVRSFARSAGRLAKNDAIDAEMIAWFAETFGEAPGQAYDAAREKLSQIVNARQGLLDLQTNLQNRGEHAGPEPVQKMRARLLKQLALEIDKLEAAIAAMIRATPYFAERAEIIESVPGVGGITSAGLIAAMPELGQVSNKVAAALLGAAPYDDDSGRRRGERQIKGGRRKVRNLFYMACLGAATRHNPALKAFYRRLIAKGKKAKVALVACMRKLIVILNIMIARGEKWDANRYAVG

SEQ ID NO: 11987 - protein, 346 aa, unidentified
  source 1..346: note = protein_862f3e4
  REGION 7..147: note = RuvC_domain
  SITE 10: note = RuvC_P1
  SITE 53: note = RuvC_P2
  SITE 88: note = RuvC_P3
  SITE 90: note = RuvC_P4
  SITE 93: note = RuvC_P5
  REGION 210..296: note = Tnp_domain
  SITE 218: note = Tnp_P1
  SITE 248: note = Tnp_P2
  SITE 256: note = Tnp_P3
  SITE 257: note = Tnp_P4
  SITE 269: note = Tnp_P5
MDQIIRIGMDTSKHVFQLHGVNAAEEPVLRKKLRRQDMVAFFTKLPPTAVAIEACGGSHHWARLLQALGHQVKMIAPQFVKPYVKRGKNDAADAKALCEAMSRPSMRFVRVKTAEQQAALMLVGLRDRLIRQRTQLTNAIRGYAAEFGLVAAKGLVKIEPLLERIREDDTLPALARELFEIHAREYTHLQAQLEEIDDKLMAWHRADERSRRLAEIPGVGPIGATMLVMKTPAPEAFRSARHFAAWLGLTPKDHSTAGRVRLGVITRAGDEALRSVLVVGATAVIRHAQRSQTRASPWLIALLKRKPPKLAAVALANKIARIAWKLMVSGEHYAARIGPVGSGGAA

SEQ ID NO: 11988 - protein, 346 aa, unidentified
  source 1..346: note = protein_bf2444a
  REGION 5..152: note = RuvC_domain
  SITE 8: note = RuvC_P1
  SITE 55: note = RuvC_P2
  SITE 92: note = RuvC_P3
  SITE 94: note = RuvC_P4
  SITE 97: note = RuvC_P5
  REGION 212..300: note = Tnp_domain
  SITE 220: note = Tnp_P1
  SITE 250: note = Tnp_P2
  SITE 258: note = Tnp_P3
  SITE 259: note = Tnp_P4
  SITE 271: note = Tnp_P5
MKHYTGLDVSVKETAICIVDETGTVCREMKVPSHPEDLARVLKDPAWRLERVGLEAGPLSQWLFSGLAEAGLPVICIETRHVKAFLKAQPNKTDRNDARGIAQMMRVNLFRPVHVKTLTSQKRRALLTARKLLKEKAIAIENDIRGLLRNFGLKVGKVGAVKFEERIRELTDGMPDLAEIVEPLLDARRKLRQNFAALHRKLLAIVRDDQVCCRLMSIPGVGPVVSLAYAATIDIPARFRSSKAVGPILGLTPALHESGESRRMGGISLCGDAMMRTLLYEAAQTLLKRVTKWSWLKAWAMGIARRRGEQKAIVALARRLAVIMHRMWSDGTQFRWTRTEIMPVAG

SEQ ID NO: 11989 - protein, 340 aa, unidentified
  source 1..340: note = protein_c03e1e3
  REGION 7..148: note = RuvC_domain
  SITE 10: note = RuvC_P1
  SITE 53: note = RuvC_P2
  SITE 88: note = RuvC_P3
  SITE 90: note = RuvC_P4
  SITE 93: note = RuvC_P5
  REGION 211..298: note = Tnp_domain
  SITE 219: note = Tnp_P1
  SITE 249: note = Tnp_P2
  SITE 257: note = Tnp_P3
  SITE 258: note = Tnp_P4
  SITE 270: note = Tnp_P5
MANCTAVGVDIAKSVFQVHYIDPESGEIVNKAIKRPKFLEFFANRTPSLIGMEACGGAHHWARQLMKMGHQVKLMPAKFVKAFNIGNKNDAADARAIWLAVQQPSKPVAVKSEMQQAMLGLHRMRAQLVKFRTMQGNALRGLLAEYGEVMSKGRAKLDKEIPALLERIAERLPAVLIDTLRDQWNGLAKLDGQIAEIERRMREWKKEDPAVNAISEIPGVGLLTATAAVAMMGDPKAFSSGREFAAWAGLVPRQTGSGGKVNLHGISKRGDTYLRTLLIHGARSVLTRAKEPGQWAEQIGGRRPRNVVVVALANKMARTIWAVLAHDRPYQRDYVSVKPA

SEQ ID NO: 11990 - protein, 345 aa, unidentified
  source 1..345: note = protein_e99035c
  REGION 6..147: note = RuvC_domain
  SITE 9: note = RuvC_P1
  SITE 52: note = RuvC_P2
  SITE 87: note = RuvC_P3
  SITE 89: note = RuvC_P4
  SITE 92: note = RuvC_P5
  REGION 211..297: note = Tnp_domain
  SITE 219: note = Tnp_P1
  SITE 249: note = Tnp_P2
  SITE 257: note = Tnp_P3
  SITE 258: note = Tnp_P4
  SITE 270: note = Tnp_P5
MKIHTIGIDLAKTVFHLVGLNARGEVVVRKKCSRNQLLRFTSNLHVSLIGMEACGGAHFLGRALREQGHNVRLMPAQYVKPYVKTNKNDYIDAEAIAEAVGRPTMRFVPIKTDDQLDLQSLHRIRERWVTRRTAVVNQIRGLLLERGITIRKGRRHVEVSLPAILEDPDNKLSGALRLLLAQLQLEMQYLSRQIDESDKLILRIANEIESCRRLIAIPGIGPLTATATIAAIGNGAAFKKGRGFAAWLGVVPGEHSTGGKQKLTGTSGRGNKYLRKLFVQGAQTVLLRKEKQSTGLRTWLIDLTSRKRKQVAAVAMANKMARMVWAVLSKGEAYCPPLLAQTVAA

SEQ ID NO: 11991 - protein, 345 aa, unidentified
  source 1..345: note = protein_3247322
  REGION 7..149: note = RuvC_domain
  SITE 10: note = RuvC_P1
  SITE 53: note = RuvC_P2
  SITE 88: note = RuvC_P3
  SITE 90: note = RuvC_P4
  SITE 93: note = RuvC_P5
  REGION 212..298: note = Tnp_domain
  SITE 220: note = Tnp_P1
  SITE 250: note = Tnp_P2
  SITE 258: note = Tnp_P3
  SITE 259: note = Tnp_P4
  SITE 271: note = Tnp_P5
MDKVSTVGLDLAKSVFQLHGADAKGAVVFRKKLRQDRLLVFFSELHHCLVAMEACASAHHSAREIGKFGHEVRLIPPAYVKPFVKRGKTDAADAEAICEAFTRPMMSFVTVKSRDQQAIMSLHRTRSLLVKQRTQSINMMRAILAEFGINIPEGLERALQLARQTAAERSQDVPEAAGAMVEILAQQALNTHSQILDIDRRLMRLQQSDEVAQRLATIPGIGPVGATALAAAVADPTQFRSGRHFAAWLGLTPLQNSSGGKEQQGGISKMGDKYLRRLLVIGVTSLVRRAKYQPETADPRLVALLAGKPVRVATVVMANKMARIVWAILLRGGVYERCHAPMLAA

SEQ ID NO: 11992 - protein, 413 aa, unidentified
  source 1..413: note = protein_63357dc
  REGION 12..167: note = RuvC_domain
  SITE 15: note = RuvC_P1
  SITE 64: note = RuvC_P2
  SITE 104: note = RuvC_P3
  SITE 106: note = RuvC_P4
  SITE 109: note = RuvC_P5
  REGION 275..361: note = Tnp_domain
  SITE 283: note = Tnp_P1
  SITE 314: note = Tnp_P2
  SITE 322: note = Tnp_P3
  SITE 323: note = Tnp_P4
MLSQQDGQLFFVGIDWASAEHSVCVLGRDGRKVAAFTIAHTAAGFARLAARLGKHARPQDMPVAIERPDGRLVDALLEAGHPVMPVKPNAIKTWRESEVLSGAKSDPGDAHVIADYLRVRFRRLRPAAPLSGRTKALRAVVRTRGDLVAARVAAVNQLAAVLDAHWPGAKAIFAKLESLIALAFLTRCPTAASAARLTEKQLAAFCANHGYSGKKPAAVLLARLRSAPAGTLDPVVSEGIRDAVLAQVGVITALNTAIKNLDRSIAEKTGAHPDGEIFRSFPRAGTVNAAQILAEWGDAREVFDHPDAIAALAGITPVTKASGKQRGVSFRWACNKRLRVAITTFADNSRHGSPWAAGIYNRARASGKDHPHAIRVLARAWVRVIWRCWQNGTPYDPALHGSARQSTEQQAAA

SEQ ID NO: 11993 - protein, 309 aa, unidentified
  source 1..309: note = protein_6115907
  REGION 5..145: note = RuvC_domain
  SITE 8: note = RuvC_P1
  SITE 50: note = RuvC_P2
  SITE 90: note = RuvC_P3
  SITE 92: note = RuvC_P4
  SITE 95: note = RuvC_P5
  REGION 186..270: note = Tnp_domain
  SITE 194: note = Tnp_P1
  SITE 223: note = Tnp_P2
  SITE 231: note = Tnp_P3
  SITE 232: note = Tnp_P4
  SITE 243: note = Tnp_P5
MQDIIGIDISKGRLDAFRLSDRIHRPFANDDKGHRALVRWIGVDVKVVFEPTGAYHRHLEAALASKGIPFVKVNPRQARRFAEATGTQAKTDRVDAMLLARMGAALDLAPCATRSETLHELRELHVARVGLVKDRTAARNRASIAEHTVLKRQGKARLALIDKQLAEIDAVMTAMIAQDPALAARLDILISIPGVGTVTAFALLIDMPELGTLDNKQAASLAGLAPVSRQSGTWQGKEHIRGGRATLRRAIFMPALVAARHNADLKRKYDQLIANGKPPKLAITAIMRKLVVLANALLRKQQKWTELPA

SEQ ID NO: 11994 - protein, 330 aa, unidentified
  source 1..330: note = protein_4de60b5
  REGION 7..148: note = RuvC_domain
  SITE 10: note = RuvC_P1
  SITE 53: note = RuvC_P2
  SITE 88: note = RuvC_P3
  SITE 90: note = RuvC_P4
  SITE 93: note = RuvC_P5
  REGION 211..285: note = Tnp_domain
  SITE 219: note = Tnp_P1
  SITE 249: note = Tnp_P2
  SITE 257: note = Tnp_P3
  SITE 258: note = Tnp_P4
  SITE 270: note = Tnp_P5
MEEVSIIGVDIAKHVFQVHGARPDGSVAFSKKLSRGKLLPFLALRPRCLVAMEACASSHHWGREIEALGHQVRLIAPAYVKPFVKRQKNDAADAEAIAEAAARPTMRFVALKSAEKQASGMVFRIRDLLVRQRTQTINALRGHLSEHGVIAPNGTYHVSRLLAEMESPHNSLPAAAIEMCKLLFQHVVALDEQIAGLDRQIRQRARQEASVRRLMGIPGIGPICATALEALAPPPETFVKGRDFAAWLGLVPRQHFSGGKARLGRVSKMGQRDLRRLLITRHVRGSLGAPPRYCGKLLARPHVGAEAADARCDCASEQDGAGRLGFARQG

SEQ ID NO: 11995 - protein, 409 aa, unidentified
  source 1..409: note = protein_0e5676c
  REGION 5..166: note = RuvC_domain
  SITE 8: note = RuvC_P1
  SITE 63: note = RuvC_P2
  SITE 103: note = RuvC_P3
  SITE 105: note = RuvC_P4
  SITE 108: note = RuvC_P5
  REGION 274..360: note = Tnp_domain
  SITE 282: note = Tnp_P1
  SITE 313: note = Tnp_P2
  SITE 321: note = Tnp_P3
  SITE 322: note = Tnp_P4
MRLFIGDDWAEDHHDVELMDERGKRLAKARVAEGVAGIAKLHAMVAEQLGERPEDDDTEVVVGIETDRGPWVGALLAAGYTVLAVNPLVAARYRERRAVSGAKSDAADAHMLADMVRTDGHQLRPVAGDSDLAEAVKVVSRAHKTLIWERTRHTQRLRHALRDYFPAALAAFGDLDAPDSLELLAKAPDPASAARLSRSQIAAALKRARRRDVEAKAERIQAALRAPHLGQPQAVTAAYAASVRALTAVLTVVDAQVNALQYEVGAHFGQHPAAKIVISQPGLGPIVGARVLAEFGDDPHRYASAKARKDYAATSPITIASGKKKVVIARHVHNDRLIDALMFQASKAINVSPGARAYYDKQRARGAGYNAALRQVANRLVGILHGCLKTCTLYDETTAWANHPKPATT

SEQ ID NO: 11996 - protein, 343 aa, unidentified
  source 1..343: note = protein_7c8b644
  REGION 7..149: note = RuvC_domain
  SITE 10: note = RuvC_P1
  SITE 53: note = RuvC_P2
  SITE 88: note = RuvC_P3
  SITE 90: note = RuvC_P4
  SITE 93: note = RuvC_P5
  REGION 212..303: note = Tnp_domain
  SITE 220: note = Tnp_P1
  SITE 250: note = Tnp_P2
  SITE 258: note = Tnp_P3
  SITE 259: note = Tnp_P4
  SITE 271: note = Tnp_P5
MQVVTTIGLDIAKSVFQVHGVDAQGRVVVRRQLKRRYVLPFFKKLSPCLVGIEACATSHHWSRELQALRHTVRLMPPAYVKSYLKRQKNDAADAEAICEAVARPNMRFVETKTAEQQSCLMLHRTRHLFVRQQNAVINSIRAHLAELGIVAPVGRNGVEELLDVVADPEDDRVPEVARECLAALGAQLRMLKAQILEFDQRIVAWHRSNETSKRLDEIPGVGPALATVLVASVADPRAFRSGRDFSAWIGLVPKQNSSGGKEKLGNITKRGDRYLRSLFTAGAPAVIRYAKLHGTKHRPWLTALLARRPTKVAAIALANKIARMAWAMMAKGERQKEPAALAA

SEQ ID NO: 11997 - protein, 343 aa, unidentified
  source 1..343: note = protein_5a62041
  REGION 6..148: note = RuvC_domain
  SITE 9: note = RuvC_P1
  SITE 52: note = RuvC_P2
  SITE 87: note = RuvC_P3
  SITE 89: note = RuvC_P4
  SITE 92: note = RuvC_P5
  REGION 211..297: note = Tnp_domain
  SITE 219: note = Tnp_P1
  SITE 249: note = Tnp_P2
  SITE 257: note = Tnp_P3
  SITE 258: note = Tnp_P4
  SITE 270: note = Tnp_P5
MEITTIGLDLAKHVFQVHGIDASGKVTVRKALRRAQVLAFFGKLPPCLVGMEACGTSHHWARELTRLGHEVRLMPPAYVKPYVKRGKTDAADAEAICEAVTRPTMRFVPVKSREQQAALSMHRTRNLLVKQRTQLVNMMRGLLAEFGVDIAQGLERALLLARRIVDGQVPDVPLEAGKVAVMLSQQALSLHAQLQEIDRALVALQRADDVARRLATIPGIGPVGSTALAAAVTDPGQFRSGRQFAAWLGLTPLQNSSGGKERLGRITKMGDKYLRKLLVIGATSLVRRAKSKPESVDPRLVELLARKPARVAAVAMANKMARIVWAVMARGEVYKAAHSPTVA

SEQ ID NO: 11998 - protein, 339 aa, unidentified
  source 1..339: note = protein_9e33bcf
  REGION 6..148: note = RuvC_domain
  SITE 9: note = RuvC_P1
  SITE 52: note = RuvC_P2
  SITE 87: note = RuvC_P3
  SITE 89: note = RuvC_P4
  SITE 92: note = RuvC_P5
  REGION 211..296: note = Tnp_domain
  SITE 219: note = Tnp_P1
  SITE 249: note = Tnp_P2
  SITE 257: note = Tnp_P3
  SITE 258: note = Tnp_P4
  SITE 270: note = Tnp_P5
MTNTVVGVDIAKSVFQIHEVSSATGEIVSIQVKRARFLHHFVNREPCLIGMEACGGAQHWARQLIAMGHTVKLLPAQMVKPFAGGNKSDMADAKAIWVAVQQPAVRAVAIKTEAQQAVLALHRMRQQLVKFRTAQINALRGLLTEYGEVMPLGRDALARMLPTAFARVAERLPAVLIETLREQYERIRQLDLQVSEMERRLREWHKEDDACKRIAAIPGVGLLTATATVATMGDPKAFRSGREFAAWLGLVPRQTGTGGRVKLLGISKRGDTYLRTLLIHGARAVLTSSKAPPEWAVNLAKRRPLNVAVVALANKMARTLWALLAYQRAYQAGYASRPV

SEQ ID NO: 11999 - protein, 342 aa, unidentified
  source 1..342: note = protein_922488b
  REGION 6..151: note = RuvC_domain
  SITE 9: note = RuvC_P1
  SITE 53: note = RuvC_P2
  SITE 91: note = RuvC_P3
  SITE 93: note = RuvC_P4
  SITE 96: note = RuvC_P5
  REGION 211..297: note = Tnp_domain
  SITE 219: note = Tnp_P1
  SITE 249: note = Tnp_P2
  SITE 257: note = Tnp_P3
  SITE 258: note = Tnp_P4
  SITE 270: note = Tnp_P5
MAVVTVGIDLAKNVFAVHGVNKNGNAVLVNPKVSRTALPELIVSLPSYTIGMEACSGAHYWARLFREYSHDVKLMAPKFVSPYRQAGKSGKNNAADALAICEAVRRPHMRFVPVKDEEQQSMQCLHRTRQGFIKERTASYNRLRGLISEFGLVTSQSTEQLRKLAREQRENLPGWVSQYIDDLLSHIDSIELKIADYDRILVKIAARDSRSKNIMKLRGVGPTTAITLIASIVNGHDFKNGRQLAAWLGLTPSQYSSGGKARLGKITKAGDAYLRTLLVQGARSVMVGVEHKQAPFSRWVCSLINRRGYWRAAVALAAKNDRLCWASLNYGDDFKLYSSPNS

SEQ ID NO: 12000 - protein, 344 aa, unidentified
  source 1..344: note = protein_0db045e
  REGION 5..152: note = RuvC_domain
  SITE 8: note = RuvC_P1
  SITE 55: note = RuvC_P2
  SITE 92: note = RuvC_P3
  SITE 94: note = RuvC_P4
  SITE 97: note = RuvC_P5
  REGION 212..299: note = Tnp_domain
  SITE 220: note = Tnp_P1
  SITE 250: note = Tnp_P2
  SITE 258: note = Tnp_P3
  SITE 259: note = Tnp_P4
  SITE 271: note = Tnp_P5
MQYYAGLDVSVKETSVCIVDKTGKVIREVKVATKPVAILAVLTEQALAIERIGLEAGPLSQWLYSALVEADLPVICVETRHMKAALSAQINKSDRNDARGIAQMMRVGLYRPVHVKTLASQKRRMLLTSRQLLQSKALDIENDLRGTLRNFGLKVGMVGMVKFEARIRDLVAEHPDLAAIVEPLLIARRVLREQLGVLHRQLLEIVRHDEVCRRLMTTPGVGPVVALTFRATVDVPSRFTSSKAVGAAFGLTPRRQQSGEIDRMGGISKCGDAMMRERLFEAALVLMTHSRKWSWLKAWGMKIARHRGMKRAIVAVARRLAVIMHRMWVDGTEFRWSTKEAAAA

SEQ ID NO: 12001 - protein, 311 aa, unidentified
  source 1..311: note = protein_c72841a
  REGION 6..149: note = RuvC_domain
  SITE 9: note = RuvC_P1
  SITE 53: note = RuvC_P2
  SITE 92: note = RuvC_P3
  SITE 94: note = RuvC_P4
  SITE 97: note = RuvC_P5
  REGION 188..272: note = Tnp_domain
  SITE 196: note = Tnp_P1
  SITE 225: note = Tnp_P2
  SITE 233: note = Tnp_P3
  SITE 234: note = Tnp_P4
  SITE 245: note = Tnp_P5
MTHDSIGIDISKRHFDAHRLTTGIHRRFDNTAAGFRAFGRWLGTGDPGLVVFEPTGPYHRDFEAAFTGRLPLVKVNPLQARRFAQSQGTRAKTDAVDAHMLARMGRALELAPDRPAEEIQIVLRDLRVARSGLVRDRTALMNRLAAARLPLVRRLAKARLAQVERQIAALDAEIDARLDACPKRRRAVQILTSIPGIGRITARSILAECPEIGTLRHKQIAALAGLAPMTRQSGTWRGKARIEGGRRHLREALFMPALVAMKKNPDLSAKYDRLREAGKPHKVALTALMRKLVQLANTLIREDRTWHPKPD

SEQ ID NO: 12002 - protein, 401 aa, unidentified
  source 1..401: note = protein_1f3ee24
  REGION 9..163: note = RuvC_domain
  SITE 12: note = RuvC_P1
  SITE 60: note = RuvC_P2
  SITE 100: note = RuvC_P3
  SITE 102: note = RuvC_P4
  SITE 105: note = RuvC_P5
  REGION 270..355: note = Tnp_domain
  SITE 278: note = Tnp_P1
  SITE 308: note = Tnp_P2
  SITE 316: note = Tnp_P3
  SITE 317: note = Tnp_P4
  SITE 329: note = Tnp_P5
MTSGYQVFLGLDVGKDAHHAVGLDPAGKRLHDGPLPNSEPKLQTLFDKLAAHGPLLVVVDQPATIGALPVAVARACGHQVAYLPGLAMRRIADLYLGRAKTDARDAFIIADAARSLPHTLRPVDVGDDALAELDVLVGFDDDLAGESTRISNRIRGLLTGIHPALERAIGPKISHPAVLEILSRHGGPTGIRKAGRRKLAQVATKHAPRIGEKLVDPIWTALDEQTVTVPGTTAADTVLPRLADSLKTVLAQRKQVAKQVEEILDAHPLAGVLTSMPGIGVRTAARILLEVGDAANFATSAHLAAYAGIAPVTRSSGISIKGEHPARTGNRKLKRAFFLAAFAALKDPTSRAYYNRKRTEGKKHNAALIGLARRRCDVLFAMLRNKTHYRHPQPKNLPAAA

SEQ ID NO: 12003 - protein, 364 aa, unidentified
  source 1..364: note = protein_ad91ed8
  REGION 27..169: note = RuvC_domain
  SITE 30: note = RuvC_P1
  SITE 73: note = RuvC_P2
  SITE 108: note = RuvC_P3
  SITE 110: note = RuvC_P4
  SITE 113: note = RuvC_P5
  REGION 232..319: note = Tnp_domain
  SITE 240: note = Tnp_P1
  SITE 270: note = Tnp_P2
  SITE 278: note = Tnp_P3
  SITE 279: note = Tnp_P4
  SITE 291: note = Tnp_P5
MDPALAASWNLERQLQPRRRVMQVVRIGLDLAKYVFAVHGVDERGKIALRKTLRRDSVVRFFANLPPCMVGMEASNGAHYWARVLTDLGHQVRLISPHFVTPYVKSNKNDRNDAEAICEAISRPSMRFVPPKSTEQLAVQAIHRIRRRLVSDRVKLVNQVRGLLAEHGIVIPRDITQLRRGLAELIARCDDDLSELVRSLMTELREELAELDRRITSYDRRIREIFRNSEPCQRLGKIEGIGPITATALIAAVGDRTCFKNGRQFAAWLGLVPKQRSSGGRARLVGISKRGDRYLRTLMIHGARAALARAGGKQDPRSLWLGKLRNRRHPNVAAVALANKNARIVWAMLAGNAAYQPELSMKTA

SEQ ID NO: 12004 - protein, 400 aa, unidentified
  source 1..400: note = protein_0fa85e7
  REGION 11..166: note = RuvC_domain
  SITE 14: note = RuvC_P1
  SITE 63: note = RuvC_P2
  SITE 103: note = RuvC_P3
  SITE 105: note = RuvC_P4
  SITE 108: note = RuvC_P5
  REGION 273..358: note = Tnp_domain
  SITE 281: note = Tnp_P1
  SITE 311: note = Tnp_P2
  SITE 319: note = Tnp_P3
  SITE 320: note = Tnp_P4
  SITE 332: note = Tnp_P5
MIDISQVGVFLGLDVGKSTHHGHGLTPAGKKVFDQPLPNSEPKLRAVLDKLRTKFGTVLVIVDQPATIGALPLTVARDAGCQVAYLPGLAMRRIADLYPGEAKTDARDAGVIADAARTMPHTLRSLELGDEISAELTVLVGFDQDLAAEATRTSNRIRGLLTQFHPSLERVLGPRLDHRAVTWLLERYGSPAALRKAGRRKLVEVIRPKAPRMAGRLIDDVFDALNEQTVVVPGTGTLDVVVPSLARSLAAVHEQRRALEAQIGTLLEAHPLSQVLTSMPGVGVRTATVLLVTVGDGSSFPSAAHLASYSGLAPTTKSSGTSIHGEHAPRGGNRQLKRAMFLSAFAALHDAASRTYYDKCRARGKTHTQALLRLARHRISVLFAMLRDGTFYEPRTPHLA

SEQ ID NO: 12005 - protein, 399 aa, unidentified
  source 1..399: note = protein_e4130f6
  REGION 9..163: note = RuvC_domain
  SITE 12: note = RuvC_P1
  SITE 60: note = RuvC_P2
  SITE 100: note = RuvC_P3
  SITE 102: note = RuvC_P4
  SITE 105: note = RuvC_P5
  REGION 270..355: note = Tnp_domain
  SITE 278: note = Tnp_P1
  SITE 308: note = Tnp_P2
  SITE 316: note = Tnp_P3
  SITE 317: note = Tnp_P4
  SITE 329: note = Tnp_P5
MTQAYAVFCGVDVGKGEHHAVGLDPTGKRLHDRALPNDEARLRAVFEKLAAHGPLLIVVDQPNTIGALPVTVARAMGHDVAYLPGLSMRRIADLYPGQAKTDARDAFIIADTARTLPHTLRRVDVGDEALTELGLLVGYDDDLAGEATRTSNRIRGLLTIVHPALERVLGPRIAHPAVLEILSRCGGPEGIRATGKRKLTALAVKHAPRMGARLAEEIFAALPAQTVTVPGSKAAEVVLPKLADSLKSVLLQRQSIAADIERMLDAHPLAKVLTSMPGIGVRTGARILLEVGDGSAFPTAGHLAAYAGIAPITHRSGSSIRGEHPARSGNHKLKRALFLSAFAALHDPASRAYYTRKRDEGKKHNAALICLARRRCDVLYAMLKTKQPYRDSPASASTG

SEQ ID NO: 12006 - protein, 344 aa, unidentified
  source 1..344: note = protein_9bb92be
  REGION 7..149: note = RuvC_domain
  SITE 10: note = RuvC_P1
  SITE 53: note = RuvC_P2
  SITE 88: note = RuvC_P3
  SITE 90: note = RuvC_P4
  SITE 93: note = RuvC_P5
  REGION 213..298: note = Tnp_domain
  SITE 221: note = Tnp_P1
  SITE 251: note = Tnp_P2
  SITE 259: note = Tnp_P3
  SITE 260: note = Tnp_P4
  SITE 272: note = Tnp_P5
MPEVTTIGLDIAKYVFHAHGADERGHALFSKKLSRGKVLDFFAAQPACTVALEACGGAHHWGRELMDMGHTVRLIPPAYVKPFVKRNKNDAVDAEAICEAAQRPNMRFVAVKSEEQQAAALVFRTRDLLVRQRTQLINAIRGHLTEYGWVAPKGPSYVAMLADLLEEEEMASSLPPAALAMIRLMLDLLPELDGRIAELDREIARRAREDAVSRRLMTIPGVGPITATAIAALAPPAETFAKGRDFAAWLGLAPLQKSTGGKQKLGAISKMGERTLRRLLIIGSMAVIKQAARRGAPKGSWLEQMLARKPRMLVAVALANKMARIVWALLMKQESYKAPAAVTA

SEQ ID NO: 12007 - protein, 342 aa, unidentified
  source 1..342: note = protein_e7604b3
  REGION 7..148: note = RuvC_domain
  SITE 10: note = RuvC_P1
  SITE 53: note = RuvC_P2
  SITE 88: note = RuvC_P3
  SITE 90: note = RuvC_P4
  SITE 93: note = RuvC_P5
  REGION 211..295: note = Tnp_domain
  SITE 219: note = Tnp_P1
  SITE 249: note = Tnp_P2
  SITE 257: note = Tnp_P3
  SITE 258: note = Tnp_P4
  SITE 270: note = Tnp_P5
MSDVAIIGLDLAKRVFQLHGSKADGSVAFRLKLPRARVLDFLASQPRCLVAMEACASAHGWGREIAKLGHSVRLIPPIYVKPFVKRQKNDATDAEAIAEAASRPTMRFVAVKSQEQQARAMLFRTRDLLVRQRTQLINALRGHLAEHGVVAPTGAAYLNRLAAAISDDKAALPEPVRELGTLYLEQIETLSARVAGLDRQMRKTAAEADSTRRLQTMPGVGPITAMAIETFAPPMTVFCRSRDFAAWLGLVPRQHSTGGKQRLGATSKMGQRDIRRLLITGAMAVVQHASRKGAPDGSWLGRMLARKPRMLVAIALANKMARGLWAMITTSKDFKNPAMAAA

SEQ ID NO: 12008 - protein, 336 aa, unidentified
  source 1..336: note = protein_ed0ea29
  REGION 7..149: note = RuvC_domain
  SITE 10: note = RuvC_P1
  SITE 53: note = RuvC_P2
  SITE 88: note = RuvC_P3
  SITE 90: note = RuvC_P4
  SITE 93: note = RuvC_P5
  REGION 207..292: note = Tnp_domain
  SITE 215: note = Tnp_P1
  SITE 245: note = Tnp_P2
  SITE 253: note = Tnp_P3
  SITE 254: note = Tnp_P4
  SITE 266: note = Tnp_P5
MSELATVGIDLAKSVFQIHGVDENGLVLVRRQLRRSQLLAIFQNRPRCLIGMEACAGAYDWGLRLQQMGHDVRLMPPSYVKPYVKRGKTDAADAAAICEAVTRPSMRFVAIKSESCSLVMVLHRTRDFLVRQRTQIGNAIRAHMTEFGIITAKGAQNIERLKEQVDQLPQAARMLLILLFEQLSEADMRIERLTGEIEETYSQSETSQRLATIPGVGVLSATIIAATTPNVDNFDCARDYAAWLGLTPKPHSTGGKQRVGGISKMGNRYIRRLRYLGAMAQIMLRRRLERESGSDRLSGMLVRKKTKIVAIALAHRMARMIFAVLRDGSRYEPQAA

SEQ ID NO: 12009 - protein, 341 aa, unidentified
  source 1..341: note = protein_7dc5747
  REGION 7..148: note = RuvC_domain
  SITE 10: note = RuvC_P1
  SITE 53: note = RuvC_P2
  SITE 88: note = RuvC_P3
  SITE 90: note = RuvC_P4
  SITE 93: note = RuvC_P5
  REGION 209..295: note = Tnp_domain
  SITE 217: note = Tnp_P1
  SITE 247: note = Tnp_P2
  SITE 255: note = Tnp_P3
  SITE 256: note = Tnp_P4
  SITE 268: note = Tnp_P5
MDTISLIGIDLGKHCFHLHAQDASGRMVLRKKLSRTQMFTLLGNLPGCTAVMKACAGAHWVARRIQALGHQAKLISPQYVKPFLQGNKNDFADAQAICEAASRPSMRFVTPRNEVQQTISALHRVREALVRERTGTVNQIHAFLLEFGVSLPKGMAVIRRLPGVLVAHDLPPRLVALLERLQAHFKYLDEQIGEIEGDLICQLKEDERSQRLLEIPGIGPITASVLATELGDARQFACARQFAASIGLVPRQYSTGGKPTLLGISKRGDKNLRRLLVQCARAVMLQIERRTDRLGAWVRDLLARRHSNVVACALANKLARIAWAILAKGTHYQGAQAVAAA

SEQ ID NO: 12010 - protein, 404 aa, unidentified
  source 1..404: note = protein_0540497
  REGION 4..159: note = RuvC_domain
  SITE 7: note = RuvC_P1
  SITE 58: note = RuvC_P2
  SITE 96: note = RuvC_P3
  SITE 98: note = RuvC_P4
  SITE 101: note = RuvC_P5
  REGION 267..353: note = Tnp_domain
  SITE 275: note = Tnp_P1
  SITE 306: note = Tnp_P2
  SITE 314: note = Tnp_P3
  SITE 315: note = Tnp_P4
MWYAGIDWADNHHDAVVLDDGGRVVLTLRIAHTPAGLAQLTTALAQICGPTAKAQLACFVETNHGLLITALLSAGLAVYPVNPKTVDRRRNAAGVKTDQIDAYLLAKTGRSDLADLRRLTPDSPLIQELKALTRDQDSLIQSQTRLLNQLSACLKTYYPIALELFSKLHQRSTIAFLRAYPTPQDARAASIEAIAAILKAAGHTRAEQAAATIHQQLHQPHLVADAITSRTKARLLLALLAQLQPVMEQIAEYDREIERLFLSHADSALFASLPRAGKRLAPRLLAEIGDERTRYADAAGLQALAGTAPVCFESGNYAKAHRRYACLKPLRNAMQQFAWQSTLQEGWALAYYQRKRSEGKSHTVAIRALANVWLRIIYAMWRDHTPYVSATFEAAQQHKLRKAA

SEQ ID NO: 12011 - protein, 389 aa, unidentified
  source 1..389: note = protein_162dc96
  REGION 19..167: note = RuvC_domain
  SITE 22: note = RuvC_P1
  SITE 69: note = RuvC_P2
  SITE 106: note = RuvC_P3
  SITE 108: note = RuvC_P4
  SITE 111: note = RuvC_P5
  REGION 233..319: note = Tnp_domain
  SITE 241: note = Tnp_P1
  SITE 271: note = Tnp_P2
  SITE 279: note = Tnp_P3
  SITE 280: note = Tnp_P4
  SITE 292: note = Tnp_P5
MPSTNLQNPIDFKGQKFHVGLDVHKKSWAVTIRSMGIQVAHFTQPPDTAALFNYLQRNFPGGCYHSAYEAGFCGTGIHEQLCKLGINNILLHAADIPATDKQKKNKTDLHDSRSIAEHLERGNLHGIHVLSRDQQELRSLFRLREAKVQDVTRANNRLKSFLMLFNINISSVSKKEYLSLKALAWLGKLELACASGTISLQQYIEELTYQRRQLYQVTRLLRTQVQVSHAKTYECLLSVPGIGGVTAMGLIAEIADFKRFKDPDEYCSFLGLCPWEDSSGETIKTKGMQPRCNRHLRPLLVEASWTAIKRSPVLFAYYSKHAARNGKAAIVKVARKLAMTAKGVATSGQPYQVDYSQKNNQQASKRFFSGITEQHVNKQPGNILTVWPG

SEQ ID NO: 12012 - protein, 347 aa, unidentified
  source 1..347: note = protein_5ac114d
  REGION 5..152: note = RuvC_domain
  SITE 8: note = RuvC_P1
  SITE 55: note = RuvC_P2
  SITE 92: note = RuvC_P3
  SITE 94: note = RuvC_P4
  SITE 97: note = RuvC_P5
  REGION 212..295: note = Tnp_domain
  SITE 220: note = Tnp_P1
  SITE 250: note = Tnp_P2
  SITE 258: note = Tnp_P3
  SITE 259: note = Tnp_P4
  SITE 271: note = Tnp_P5
MKHYAGIDVSLNSSNVCVVDESGKVVREVKVPSEPVALIRCIKSLGVRVERIGLEAGPLSQWLYGALRESGLPVELLETRHVKAALSAMPVKTDRNDARGLAQLMRLGWFRPVHCKSMAAQEVRALLTARKLVQSKLYDIEMSLRGILRGFGLKVGPTTSRSFAARINHLTADHPSLEMVAEALLSTHAAALCAFKNLEKNVRQISRADTRVRLLMSTPGVGPVVALTYVSAIDDPKRFTSSKPVGAHFGLTPKKYQSGETDINGRISKVGDSSVRAVLYEAAHIILTRPIHGGALKSWAMRLAKRAGMKKAKVALARKLAVVLHRMWVSASTFDFEKANSCTRAAA

SEQ ID NO: 12013 - protein, 332 aa, unidentified
  source 1..332: note = protein_f9cef77
  REGION 4..145: note = RuvC_domain
  SITE 7: note = RuvC_P1
  SITE 49: note = RuvC_P2
  SITE 84: note = RuvC_P3
  SITE 86: note = RuvC_P4
  SITE 89: note = RuvC_P5
  REGION 206..298: note = Tnp_domain
  SITE 214: note = Tnp_P1
  SITE 244: note = Tnp_P2
  SITE 252: note = Tnp_P3
  SITE 253: note = Tnp_P4
  SITE 265: note = Tnp_P5
MQMLAIDLGKQSFHIYGITCEGEVISRKVSRAKLVDAVTRLQPQSVAMEACASSHHWGRVFEALSYAVRLIHPRFVKPFVKGSKNDAVDAEAIFEAANRPTMRFVPLKSVEQQDLQALHRTRDRLIVQRTALINHTRGLLAEYGVVMPAGASRFRLQVDKMIEIAELSHLAKDLFLKLVEEYRDLDARVSTLDDMLVDICRRDDRCKRLTTLPGVGPIVATSLIAAIDDGRHFASGRALSAWIGLVPRQYTTGGKPRLGGIGNRANHYLRRQLIHGARSALLRIAKHDDRRSKWAQELQSRAGHNKTLVAMANKTARMAWAMLRSGESYKMA

SEQ ID NO: 12014 - protein, 343 aa, unidentified
  source 1..343: note = protein_0448288
  REGION 7..149: note = RuvC_domain
  SITE 10: note = RuvC_P1
  SITE 53: note = RuvC_P2
  SITE 88: note = RuvC_P3
  SITE 90: note = RuvC_P4
  SITE 93: note = RuvC_P5
  REGION 212..303: note = Tnp_domain
  SITE 220: note = Tnp_P1
  SITE 250: note = Tnp_P2
  SITE 258: note = Tnp_P3
  SITE 259: note = Tnp_P4
  SITE 271: note = Tnp_P5
MQSISTIGLDIAKSVFQVHGVDAAGQVVVRRQLRRGRVLAFFEKLPPCLVGIEACASSHYWSRELQVLGHPVRLMPPAYVKPYVKRQKNDATDAEAICEAATRPSMRFVPTKTVEQQSCLMLHRARHLFIGQQTAVINSIRAYLAELGIVAPVGRRGVEQLLEIVADTTDRRLPEVARVCLAALGSQLRALKAQILEFDRRIIAWHRSSATSRRLDAIPGVGPALATALVASVADAKAFRSGRDFSAWVGLEPKQNSSGGKDRLGSISKQGDRYLRSLFTAGALAVIRYAKIHGTRHRPWLTALLARRPTKVAAIALANRLARMAWAMMARNERYKEPAALAA

SEQ ID NO: 12015 - protein, 415 aa, unidentified
  source 1..415: note = protein_a67ada2
  REGION 10..165: note = RuvC_domain
  SITE 13: note = RuvC_P1
  SITE 62: note = RuvC_P2
  SITE 102: note = RuvC_P3
  SITE 104: note = RuvC_P4
  SITE 107: note = RuvC_P5
  REGION 273..359: note = Tnp_domain
  SITE 281: note = Tnp_P1
  SITE 312: note = Tnp_P2
  SITE 320: note = Tnp_P3
  SITE 321: note = Tnp_P4
MEALRPKYFVGLDWASAAHAVCVLDPDGRPVVQDVIPHTAAGLTDLVRRLTRLAVPAEIAIAIERPSGLLVDTLVAAGFRLVPIHPNALKATRPRYAAAPGKSDPGDAYILADLLRTDGHRFRPLRPPADSTRALRAAVRTRDDLVATRIQLANQLRSLLESFWAGAAALFADIDSPIALAFLDAYPTPDSAVRLGEQRLARFLQRHAYCGRRAPAALLARLRAAPRGYAGELESETKGQLVRSLVAVLRPLVEQLRELEALIAAQLAQHADGPLLQSFPRTGTVNAAQLLAELGEDRGRFPTAAQLAAEAGVAPVTRSSGKHCSVACRFACNKRLRQAATTWADNSRHAHPWAAAVYRQARARGCDHPHAVRILARAWLRVLWRCWQARTPYNPAQHGRALPFLVSRPPTSRVA

SEQ ID NO: 12016 - protein, 391 aa, unidentified
  source 1..391: note = protein_76a72d3
  REGION 6..163: note = RuvC_domain
  SITE 9: note = RuvC_P1
  SITE 61: note = RuvC_P2
  SITE 102: note = RuvC_P3
  SITE 104: note = RuvC_P4
  SITE 107: note = RuvC_P5
  REGION 265..351: note = Tnp_domain
  SITE 273: note = Tnp_P1
  SITE 303: note = Tnp_P2
  SITE 311: note = Tnp_P3
  SITE 312: note = Tnp_P4
  SITE 324: note = Tnp_P5
MSMYFAGIDISKYKHDCCIIAAADQSIVAKFTFKNNKEGFDQLLTTINSLSSSEDIRIGFESTSHYALNLELFLENASLTFMEVNPVLISEYKKSTTLRRTKTDSVDCESIARWLMTVEYKPHSKGFYHSYSLKSLTRLRDRLVRQRSLYLVKLTNVLDHTFPEFKPFFNECFSKTALYLLENYGSAENMSAMNETDYNEIRRISHGKFSPQQFLELKRLAADTVGINNSIFDVELESLLSLYKSLVKEINTLEGEIIRLINEVHPHFMTIPGIGPISAAVIYAEYGDISNFSSPAQMLAFAGIEPSVNDSGTESHGGKMVRHGSSQLRYVLLNCCLPLIRFDMTFATYYAKKRHEGKPHRVAITHVAKKLIRVIFALEKQNIDFNSQKLR

SEQ ID NO: 12017 - protein, 349 aa, unidentified
  source 1..349: note = protein_58d9ed7
  REGION 4..157: note = RuvC_domain
  SITE 7: note = RuvC_P1
  SITE 54: note = RuvC_P2
  SITE 94: note = RuvC_P3
  SITE 96: note = RuvC_P4
  SITE 99: note = RuvC_P5
  REGION 224..308: note = Tnp_domain
  SITE 231: note = Tnp_P1
  SITE 261: note = Tnp_P2
  SITE 269: note = Tnp_P3
  SITE 270: note = Tnp_P4
  SITE 281: note = Tnp_P5
MIWIGVDAHKRIHQAVAIDERGVQGERRIANTAAAWAELFSWAQRWPERIWAVEGAWYLGRGLAQYLAGRGERVHEVSGRITAHRRGGMVRRGKNDRLDAHAVATVLREEAERLPRVFAEDEGTAAVQLWSRTQAEVTKDLTRLINRLHDLLLVCDPEYGAKLPALTTKAAIAQLRTYTAPGDTTLAREREQVIRQSAEQLALLDAQDRLLRRKLEHASQGTFRPLREVEGIGALIACGLVAEVGRPRPGFAEEQLAALAGVSPLEASSAGATRHRLNRGGNRRLNMLLHQIVLTQGRMYAPAQAYLARRRTEGLSDREARRALKRLIVRRVYRALCSCFDRSLERVAA

SEQ ID NO: 12018 - protein, 336 aa, unidentified
  source 1..336: note = protein_eb946bc
  REGION 7..148: note = RuvC_domain
  SITE 10: note = RuvC_P1
  SITE 53: note = RuvC_P2
  SITE 88: note = RuvC_P3
  SITE 90: note = RuvC_P4
  SITE 93: note = RuvC_P5
  REGION 209..294: note = Tnp_domain
  SITE 217: note = Tnp_P1
  SITE 247: note = Tnp_P2
  SITE 255: note = Tnp_P3
  SITE 256: note = Tnp_P4
  SITE 268: note = Tnp_P5
MQNVTLIGIDLGKHAFHLHGQDKAGKAVFRRKVSRKQLFEFFATFQPCTVVMEACAGAHYMARKLIAFGHEIKLISPQFVRPFVKSNKNDFVDAEAICEAASRPSMRFVTPKTESQQTLSALHRVRDALVRDKVRTTNQMHGFLLEFGVTLPIGNGVVRRLPELLAEHSLPPRIVAILERLHAHLKYLVEQIGEIGKELNRQLADDSIGQRLLTIPGVGPITASLLSSELGDGKQYRCGRDFAAAVGLVPRQYSTGGRSNLLGISKRGDRNIRRLLVQCAHAFMLHLHSYSGPVADWVRSMLARRHSNVVTCALANKFARIAWAIASRDAVFELRT

SEQ ID NO: 12019 - protein, 342 aa, unidentified
  source 1..342: note = protein_9bdcb75
  REGION 6..147: note = RuvC_domain
  SITE 9: note = RuvC_P1
  SITE 52: note = RuvC_P2
  SITE 87: note = RuvC_P3
  SITE 89: note = RuvC_P4
  SITE 92: note = RuvC_P5
  REGION 211..296: note = Tnp_domain
  SITE 219: note = Tnp_P1
  SITE 249: note = Tnp_P2
  SITE 257: note = Tnp_P3
  SITE 258: note = Tnp_P4
  SITE 270: note = Tnp_P5
MKITTIGIDLAKNVFQVHGVDAHGKTVLKKQLKRDHVANFFIQLEPCLIGMEACGGAHHWGRKLQAMGHTVRLMAPQFVKPYVKTNKNDVADAEAICEAVARPNMRFVAIKTVDQQSVLALHRACQGFVRARTTQANQIRGLLAEFGLVLPQGIHHVAKRVPQLMEDASDELTGTFRLLMERLLDQLKALDQHVHELEVQITAWHRANPMSRKLEKVPGIGPITASALVASIGDAKNFHNGRQVAAWLGLVPKQHSSGGKPVLLGISKRGDSYLRSLLIHGARAVVAHAQRKTRADGWLNTLLQRRNTNVAVVALANKNARVIWALLAHGREFRVDYEPNVS

SEQ ID NO: 12020 - protein, 368 aa, unidentified
  source 1..368: note = protein_ca80f54
  REGION 8..156: note = RuvC_domain
  SITE 11: note = RuvC_P1
  SITE 60: note = RuvC_P2
  SITE 97: note = RuvC_P3
  SITE 99: note = RuvC_P4
  SITE 102: note = RuvC_P5
  REGION 222..305: note = Tnp_domain
  SITE 229: note = Tnp_P1
  SITE 259: note = Tnp_P2
  SITE 267: note = Tnp_P3
  SITE 268: note = Tnp_P4
  SITE 280: note = Tnp_P5
MKQVTTYVGIDAHKKDLFIAMLVGTDKTPVTWTVPNESNAVRRLVRKLERDAPGPVQACYEAGPCGYALQRQMTTPRVSCQVIAPALVPRKPGERVKTNRRDARKLGELLRAGLLTEVRPPTPEEEAGRDLCRARDDARADLQRCRHRLGKLLLRRGLHFSGRNWTRAHRQWVDGLTWVHEAERVVVEDYWLAIDQVGARLSELDARLMEIAQTEPYREPVAWLRCFRGIDTLTAILILAELHDFRRFQSPRALMAYLGLVPGEDSTGEKHRRGRITRTGNALVRRLLVETAWHYQHRPAVGVALTRRRKGQPTRVIAVADKAQQRLCRRFRKLAAEHKPPPKIAVAVARELAGFLWAVLQPAPAHVN

SEQ ID NO: 12021 - protein, 342 aa, unidentified
  source 1..342: note = protein_d9c6dbe
  REGION 5..152: note = RuvC_domain
  SITE 8: note = RuvC_P1
  SITE 55: note = RuvC_P2
  SITE 92: note = RuvC_P3
  SITE 94: note = RuvC_P4
  SITE 97: note = RuvC_P5
  REGION 212..299: note = Tnp_domain
  SITE 220: note = Tnp_P1
  SITE 250: note = Tnp_P2
  SITE 258: note = Tnp_P3
  SITE 259: note = Tnp_P4
  SITE 271: note = Tnp_P5
MDHSAGLDVSVKETSICIVDDTGRIVREVKVASEPEDLLQVLSNPTYHFKRIGLEAGPLSQWLYSALAEEGLPVICVETRHMRAVLKAQINKTDRNDARGMAQMMRAGLYRPVHVKTLRSQKLRMLLTHRKLLQSKAIAIENDLRGTLRNFGLKVGMVGKVKFEARIKELVGNLPDLALLVEPLLVVRRVLREQLVILHKRLLAIVRDDEVCRRLMTTPGVGPVVALTYRATVDVPARFRKSKAVGAVFGLTCSKYQSGEIDRSGRISRCGDEMMRVMLYEAAQSMLRSKKWSWLKAWAMQIARRRGMKKAIVALARRLAVIMHRIWVDGTELRWTRDVAAA

SEQ ID NO: 12022 - protein, 344 aa, unidentified
  source 1..344: note = protein_05b4329
  REGION 6..147: note = RuvC_domain
  SITE 9: note = RuvC_P1
  SITE 53: note = RuvC_P2
  SITE 86: note = RuvC_P3
  SITE 88: note = RuvC_P4
  SITE 91: note = RuvC_P5
  REGION 210..301: note = Tnp_domain
  SITE 218: note = Tnp_P1
  SITE 249: note = Tnp_P2
  SITE 257: note = Tnp_P3
  SITE 258: note = Tnp_P4
  SITE 271: note = Tnp_P5
MNNTIIGVDLAKEVIQVCIYTNKSVRSNTEMTTREFLIFLANLKSATVIFEACSTSNYWKQKATSLGHDARLICPKLVHSVRQNQKTDKNDALAVVQAALLPDVNFISGKNIEQQQLQSIMRFRELAIKQKTALGNQLKSLLLELNIRVSNRDGGLKGVIQATLEDGENDLSFEFRSALQMAWTQYRGLIKSIVHYEEVLANISTQHTECKRLLQLEGVSTINAVNLYIALGCQPELFHKGKEASACIGLTPVQHSTGGKVKLGSIGKYVKNSMLRSNLIVGAMSAINRIMTREAVTQKEAWIQALVARRGKRCAAVALANKTVRTAFAMLTQGTEYKAVLITA

SEQ ID NO: 12023 - protein, 317 aa, unidentified
  source 1..317: note = protein_212dfd4
  REGION 6..147: note = RuvC_domain
  SITE 9: note = RuvC_P1
  SITE 52: note = RuvC_P2
  SITE 87: note = RuvC_P3
  SITE 89: note = RuvC_P4
  SITE 92: note = RuvC_P5
  REGION 211..296: note = Tnp_domain
  SITE 219: note = Tnp_P1
  SITE 249: note = Tnp_P2
  SITE 257: note = Tnp_P3
  SITE 258: note = Tnp_P4
  SITE 270: note = Tnp_P5
MEIHTLGIDLGKTVFHLVGLNVRGEVVLRKKCSRTQLLRFTASRHVQLIGMEACGGAHFLGRALREQGHEVRLIPAQYVKPYVKTNKSDYIDAEAIAEAVARPTMRFVPIKSDDQLDLQSLHRVRDRWVMRRTAVVNQIRGLLLERGITLRKGRCHLEAALPEILEDATTKLSGALRLLLAQLKLELDQLALRLEETDGLMQTIAQESEVCRRLDAISGIAPVTATALIAAIGNGAAFHRGREFAAWVGLVPREHSTGGKQKLLGISKRGNSYLRRLFVQGARGVLQFREKQSSGLSACGTTNIAGTSQCCRRSPGQ

SEQ ID NO: 12024 - protein, 397 aa, unidentified
  source 1..397: note = protein_3d7fa6e
  REGION 4..162: note = RuvC_domain
  SITE 7: note = RuvC_P1
  SITE 60: note = RuvC_P2
  SITE 101: note = RuvC_P3
  SITE 103: note = RuvC_P4
  SITE 106: note = RuvC_P5
  REGION 267..354: note = Tnp_domain
  SITE 275: note = Tnp_P1
  SITE 305: note = Tnp_P2
  SITE 313: note = Tnp_P3
  SITE 314: note = Tnp_P4
  SITE 327: note = Tnp_P5
MFYLGIDIAKHKHYASIIDSTGKPITKPFPFHNHKEGGQALLTWLYRYISSPTELSIGMEATGHYWIAVYSFLLDHGFSVIVLNPLQTNAWRKGTEIRKRKTDAIDATMIADVIRFGRFLETPLVDEKMFALKQLSRFRNSLVRNISDLKRKALVVLDQTFPEYQSIFSNVFGKTSSQLLIDYTSPSDYEKLSIDDLTLIIEQASRCRLGKKTANQLMELASNSFGVTFCKDAFSFQLKMLMEQIRFIETQLRECENQMSQLLSDLDTPITTIPGIGPILGATILSEIGDIGRFDKPSKLVAYAGIDATISQSGQYESTGMSMSKRGSSHLRRALFQAAITAYKHDPVLKAFYEKKRNQGKHYYVCIGAVARKLCYIVYAILKSNKPYKIPPFPCQR

SEQ ID NO: 12025 - protein, 338 aa, unidentified
  source 1..338: note = protein_38d9b4b
  REGION 6..148: note = RuvC_domain
  SITE 9: note = RuvC_P1
  SITE 52: note = RuvC_P2
  SITE 87: note = RuvC_P3
  SITE 89: note = RuvC_P4
  SITE 92: note = RuvC_P5
  REGION 209..295: note = Tnp_domain
  SITE 217: note = Tnp_P1
  SITE 246: note = Tnp_P2
  SITE 254: note = Tnp_P3
  SITE 255: note = Tnp_P4
  SITE 267: note = Tnp_P5
MEYKRISIDTSKHVFTIHGVDEKERPVLRREVGRAQVERFFAKIAPTEVVLEACGGSHHWGRVLSRMGHRVKLIPPQYVKPFVKRGKNDRNDAEAICEAASRPTMRTVPVKSVDEQAATLILKHREMLVGQRTQAINALRGHATEFGIIGAKGCANVEALITALLANTAVPDVAKSMLKDMGSHVADLDAKISVLDQKLNELHKTNPVSQRLAAIPGVGPITAITMALTINAADFETGRHFAAWLGLTPREHSTGGKHRLGRINKAGNERLRQLLVVGSMSVIRFAKPGSKSASEWLLKLLERRPRKVAAVALANKIARVIWAMMVRGEVYRRQPVAA

SEQ ID NO: 12026 - protein, 345 aa, unidentified
  source 1..345: note = protein_b534731
  REGION 18..165: note = RuvC_domain
  SITE 21: note = RuvC_P1
  SITE 68: note = RuvC_P2
  SITE 108: note = RuvC_P3
  SITE 110: note = RuvC_P4
  SITE 113: note = RuvC_P5
  REGION 209..296: note = Tnp_domain
  SITE 217: note = Tnp_P1
  SITE 247: note = Tnp_P2
  SITE 255: note = Tnp_P3
  SITE 256: note = Tnp_P4
  SITE 269: note = Tnp_P5
MTNLPINAIAESIHRLFAGVDVGADELVLVIRKNGKSFDPQKYANTRSDRARLVNKLIKLPGIKVCLEATGIYHFDLAIALHDAGIPVMVVNPKASHNFAKVLMRNSKTDAVDANTLAEYVERMDFVAWTRPSNQTLALRGFARRIDALTGQKAAAKNHLHALSATQETPKALLRDAKLAISQLEKRIDTLAAEAMTLINQHPELKRVFELLTGIKGIAQTSAIALMGELLLLPPNLSHREWVKFAGLDPKAFESGKSVHKKMRLSKAGNRHIRSALYMPALSAKQHDPHVSAYFQHLVDNGKKPLQAVCAVMRKLLHAIHGMLKHDQPFDNTRFYVIPTPIIAE

SEQ ID NO: 12027 - protein, 413 aa, unidentified
  source 1..413: note = protein_00bd0de
  REGION 14..166: note = RuvC_domain
  SITE 17: note = RuvC_P1
  SITE 65: note = RuvC_P2
  SITE 103: note = RuvC_P3
  SITE 105: note = RuvC_P4
  SITE 108: note = RuvC_P5
  REGION 273..359: note = Tnp_domain
  SITE 281: note = Tnp_P1
  SITE 312: note = Tnp_P2
  SITE 320: note = Tnp_P3
  SITE 321: note = Tnp_P4
  SITE 332: note = Tnp_P5
MSFTPATTPARVCAGLDWAKDDHAVCILGPDGSVLDRFFVVHDAAGLKTLVRRLLKAGVDELGIERGDGPVVDALLQAGLTVLVIAPGQVMNLRSRYGSAGNKDDRFDAYVLADVVRTDRARLRPLVRDSAATTAMRTTVRARRDLVKHRVAAANQLRAHLQLVFPAAASLFAAIDTAISLSFLERFTTQSQADWLSPKRLGTWLSSVGYSGRTDPTILHAKLLATPRGTTGTDADVHAATTSAYVTLLRVLNTQIAVLEDNLTDQLKTHPDTHIYASLPRVKTLRTARLLAEIGDARGKFPTANSLAALAGVAPSTRQSGKVKAVTFRWGCNKQLRDALCDFAGGSRHDNAWAADLYERAIARGHDHPHAVRILGRAWAQVIWRCWHDNLSYDPAQHRALQSILANTANEAA

SEQ ID NO: 12028 - protein, 341 aa, unidentified
  source 1..341: note = protein_e9774a4
  REGION 7..149: note = RuvC_domain
  SITE 10: note = RuvC_P1
  SITE 53: note = RuvC_P2
  SITE 88: note = RuvC_P3
  SITE 90: note = RuvC_P4
  SITE 93: note = RuvC_P5
  REGION 209..294: note = Tnp_domain
  SITE 217: note = Tnp_P1
  SITE 247: note = Tnp_P2
  SITE 255: note = Tnp_P3
  SITE 256: note = Tnp_P4
  SITE 268: note = Tnp_P5
MNPVAQVGIDLGKHNFHLHGQDSSGREVFRKKLTRPQMMHFLGNLPPCTVVMEACSGAHYTAREVSALGHEAKLISPQFVRPFVKSNKNDFVDAEAICEAASRPSMRFVTPKSEAQQTLSVLHRMRESLVRSRTGTINQMHGFLLEFGISLPKGPTVIRRWSAVLSEHNLPPRLTALLQSLHEHAVYLDTRIKELDRAMDRQLAEDDLGSRLLSIPGVGPVTASLLSGEMGDGKQYACSRDFAASLGLVPRQYSTGGRSNLLGISKRGNKNLRRLLVQCAKTYLIHLDRQRGPLAEWVRSLCRRRHANVVTCALASKLARIAWALATKHSRFDSGADAVAA

SEQ ID NO: 12029 - protein, 389 aa, unidentified
  source 1..389: note = protein_bcaf4f6
  REGION 5..161: note = RuvC_domain
  SITE 8: note = RuvC_P1
  SITE 59: note = RuvC_P2
  SITE 99: note = RuvC_P3
  SITE 101: note = RuvC_P4
  SITE 104: note = RuvC_P5
  REGION 265..352: note = Tnp_domain
  SITE 273: note = Tnp_P1
  SITE 303: note = Tnp_P2
  SITE 311: note = Tnp_P3
  SITE 312: note = Tnp_P4
  SITE 325: note = Tnp_P5
MKIFVGIDIAKLNHFAAAISSDGEILIEPFKFTNDADGFQLLVSKLESFDKNSIIIGLESTAHYGDNLVRYLVAEFYQVCVLNPIKTCQMRKNNVRKTKTDKVDTFVIAKTLMMQDDLRFITFFDLDMMDLKALGRFRQKTIKQRTRLKIQLTTYVDQVFPEIQYFFKSGLHQNAVYALLKEAPSPKEIASMHMTHLANLLKVNSHGHFTKEQAKELRVLAQKSVGANDSAISIQITQTIQQIELLDSQLDKIEAEMTDIMKFNDSVIMTIPGIGYINGGMILGEIGDIHRFSNPNKLLAFAGLDPSVYQSGNFQAKTTRMSKRGSRVLRYALVNAAWNVVRNNATFKAYYDAKRAEGRSHYNALGHCAGKLVRVIWKMLTDEVEFNLE

SEQ ID NO: 12030 - protein, 343 aa, unidentified
  source 1..343: note = protein_5d64874
  REGION 6..148: note = RuvC_domain
  SITE 9: note = RuvC_P1
  SITE 52: note = RuvC_P2
  SITE 87: note = RuvC_P3
  SITE 89: note = RuvC_P4
  SITE 92: note = RuvC_P5
  REGION 211..299: note = Tnp_domain
  SITE 219: note = Tnp_P1
  SITE 249: note = Tnp_P2
  SITE 257: note = Tnp_P3
  SITE 258: note = Tnp_P4
  SITE 270: note = Tnp_P5
MQITTIGLDLAKSIFQVHGVDASGQILVRKSLRRSQMLPFFTKLPPCLVGMEACGTSHYWARELIKLGHEVRLMPPAYVKPYVKRGKTDAADAEAVCEAVTRSTMRFVPVKSPEQQAALSIHRTRDLLVKQRTQLINMIRGLLAEFGVDIPKGLERALLMARQIVDGKAAEVPFEAAKVVGTLSQQALDTHVRVREIDRDLAVLLRSNDVARRLMTIPGIGPVGATALAASVTDPHQFRSGRQFAAWLGLTPLQKSSGGKERLGRITKMGDKYLRKLLIVGMTSRVRRAKQNPTVDPRLADLLARKPTRVATVAMANKTARIIWAIMTRGETYRAGHRPALAA

SEQ ID NO: 12031 - protein, 341 aa, unidentified
  source 1..341: note = protein_52aa2dc
  REGION 7..149: note = RuvC_domain
  SITE 10: note = RuvC_P1
  SITE 53: note = RuvC_P2
  SITE 88: note = RuvC_P3
  SITE 90: note = RuvC_P4
  SITE 93: note = RuvC_P5
  REGION 211..297: note = Tnp_domain
  SITE 219: note = Tnp_P1
  SITE 249: note = Tnp_P2
  SITE 257: note = Tnp_P3
  SITE 258: note = Tnp_P4
  SITE 270: note = Tnp_P5
MTELFIVGVDLAKRVFQVHGVTSTGEVLLRKKLSRAQFARFLAEIPPCIVAMEACASAHYWGREAHSAGHEVRLVPAAYVKPFVKRHKSDAVDAEAISEAALRPSMRFVPVKTPEQQAQAMLFRTRETFVRQRTQTINALRAHLAEFGVILRLRIRNPDTFRREVDEKVVALPELARSLAERLLEQIATISEQVSALDLDIKAHARSSHDAQLMQTMPGVGPMSAMAVEAFCPPVKNFRSGRDFAAWLGLVPRQHSTGGKERLGRVTKMGQKDVRRLLIIGAMSVINSIERRKRCVEPWLARMLETRPRMVVAVALANRMARRLWAMLTTGQQYRIPGAAV

SEQ ID NO: 12032 - protein, 355 aa, unidentified
  source 1..355: note = protein_ffc1085
  REGION 9..154: note = RuvC_domain
  SITE 12: note = RuvC_P1
  SITE 58: note = RuvC_P2
  SITE 94: note = RuvC_P3
  SITE 96: note = RuvC_P4
  SITE 99: note = RuvC_P5
  REGION 219..305: note = Tnp_domain
  SITE 227: note = Tnp_P1
  SITE 257: note = Tnp_P2
  SITE 265: note = Tnp_P3
  SITE 266: note = Tnp_P4
  SITE 278: note = Tnp_P5
MTASYNYHIGVDYHKSYSHLVVQDSSGKTLRSGRVKNDRQSLGGFLERYRENSHAVVEATRNWMAMYDWLDDICDDVVLAHPLKVKAIADAKIKTDKIDATVLAHLLRADLVPEAWAPGERARELRVALRERMFYVRLRTMTKNRIVTVFDRYPEQTAQLKKLGDLFGKAGRIQLAQVNVSEIDRVQIDRGLDFIGDIDVRIKQSEATIRAMTKANAHVKVLKTIPGIGEFFARLIDAEIDDISRFRNPKKLAAYAGLVPSTYSSGGKTFHGKIIKQGKKWLRWAFVEAVSPAIATDAQLRAQYDHLKIRGTNKARVAIARKLLTIAFQILRDQRAYEPRGTSTTEGASTISRLS

SEQ ID NO: 12033 - protein, 320 aa, unidentified
  source 1..320: note = protein_f283809
  REGION 12..158: note = RuvC_domain
  SITE 15: note = RuvC_P1
  SITE 59: note = RuvC_P2
  SITE 99: note = RuvC_P3
  SITE 101: note = RuvC_P4
  SITE 104: note = RuvC_P5
  REGION 195..279: note = Tnp_domain
  SITE 203: note = Tnp_P1
  SITE 232: note = Tnp_P2
  SITE 240: note = Tnp_P3
  SITE 241: note = Tnp_P4
  SITE 252: note = Tnp_P5
MVKMTQYTPTFAGIDVSKAHPDVYLHPAGLHRRFSNGKTGWRALRGWLADAHPDGVVYEATGSYHKGVERYLGERGFAIARLDPRRARRFAEALGVNAKTDPVDARVLAEFGAFLKPATRPLPEPALEQLKELVVARRGLVQQNTRIANRSKTVTSPLLKLQFQQSARQVKQQIAGIDTECRDIVGADPALAQRLAILISIPAIGDVTAMTLLADMPELGLLNDKQVASLMGVAPIARDSGTFRGRRHIRGGRAQVRQDVYMAALVATRFNADMKQKYQTLIENGKPPKVALTAIMRKLIILANALIKDNRLWAEIRPCK

SEQ ID NO: 12034 - protein, 310 aa, unidentified
  source 1..310: note = protein_dc6675f
  REGION 5..150: note = RuvC_domain
  SITE 8: note = RuvC_P1
  SITE 51: note = RuvC_P2
  SITE 91: note = RuvC_P3
  SITE 93: note = RuvC_P4
  SITE 96: note = RuvC_P5
  REGION 187..271: note = Tnp_domain
  SITE 195: note = Tnp_P1
  SITE 224: note = Tnp_P2
  SITE 232: note = Tnp_P3
  SITE 233: note = Tnp_P4
  SITE 244: note = Tnp_P5
MQHIIGVDISKPTLDAFRLSPAEHRQFPNDRAGCAALIRWIGKPAARVVFEPTGAYHRLFEATLVAAGIEAVKVNPRAARRFAEATGRLAKTDRIDAAILARMGAVLDLEGRPAKSETLHDLRELSVARQALVKDRIATTNREQIAVNPLIRRQLRARLKQIGAQLKEIDATIAALTVGDPELSRRRDILTSIPGIGSVTAMAILTEMPELGQLDNKQAASLAGLAPMTRQSGTWTGRARIRGGRAGLRRALYMPALVALRFNDDLARKYQDLKDAGKPSKVAITAIMRKLLILANALLRDGRKWNEKAA

SEQ ID NO: 12035 - protein, 436 aa, unidentified
  source 1..436: note = protein_e5d9379
  REGION 34..198: note = RuvC_domain
  SITE 37: note = RuvC_P1
  SITE 91: note = RuvC_P2
  SITE 137: note = RuvC_P3
  SITE 139: note = RuvC_P4
  SITE 142: note = RuvC_P5
  REGION 310..396: note = Tnp_domain
  SITE 317: note = Tnp_P1
  SITE 347: note = Tnp_P2
  SITE 355: note = Tnp_P3
  SITE 356: note = Tnp_P4
  SITE 369: note = Tnp_P5
MRGCRCSMIMGFTKPIEHSNLITKEVDFMNPLYVGIDVSSKSNVVYFMLPNGDKHSNFSVANSHDGSTQLVKRICSVLSSESLDTVSIGLEATSVYGDNLVYFLREDASLASFNRKIHVLNPKQVNKFKESYNDLPKNDWVDSFVIADCLRFGRINKEVYIGDYHYKALQNLTRARYFAVCNLTKEKQRFMNVLFKKYSTMTQEKVFSDTFSTTALAVYDEFESAEALAYMDLQELTAFIIEKGKNRFPDPDAVAKAIQKAARSSYRLPKTVNDSVNQVLSISITSMKALESQIKEFDKAIAAQMELLPNVLISIPGIGPVYSAGIMAEIGDINRFDNQASLAKYAGLAWTQHQSGNFEAQNTRLIHSGNRFLKYYLCEATFSLVRCDKEYKAFYHQKYKEVNRYQHKRALALTARKFVRLVFTLLKDNRLYRPAE

SEQ ID NO: 12036 - protein, 392 aa, unidentified
  source 1..392: note = protein_da0717a
  REGION 5..164: note = RuvC_domain
  SITE 8: note = RuvC_P1
  SITE 61: note = RuvC_P2
  SITE 102: note = RuvC_P3
  SITE 104: note = RuvC_P4
  SITE 107: note = RuvC_P5
  REGION 267..354: note = Tnp_domain
  SITE 275: note = Tnp_P1
  SITE 305: note = Tnp_P2
  SITE 313: note = Tnp_P3
  SITE 314: note = Tnp_P4
  SITE 327: note = Tnp_P5
MVVSVGIDVSKDKHDCFILSSEGEVLVNVFTIPNTMDGFNCLLQRIQDCTTPQDKMKVGLEATGHYSYNLLGFLLDNGLPTYVLNPLRTNLYRKSLSLRKTKTDRVDARTIASMLLSDAGLKPYTDTAYHNEELKSLTRYRFDKVKERAKLKSSISRLVCILFPELEKLVPSLHIASVYALLAEFPGAKQIAAAHLTRLKTLLKTASKGHYKRDMALEIRDAARNSIGARIPAKSLELQHTIRLIRELDAEIHEIETEIENIMDEIHSPITTIPGIGYRMGAMILAEAGDLSRFDSPDKLLAYAGMSPSTYQSGQLKNCYPHMEKRGSRYLRYALYNATKYVCLWDPTFAAYLAKKRAEGKHYNVALSHAAKKLVRLIFAMEKSKQPYCSAA

SEQ ID NO: 12037 - protein, 338 aa, unidentified
  source 1..338: note = protein_88e5e40
  REGION 14..160: note = RuvC_domain
  SITE 17: note = RuvC_P1
  SITE 64: note = RuvC_P2
  SITE 104: note = RuvC_P3
  SITE 106: note = RuvC_P4
  SITE 109: note = RuvC_P5
  REGION 205..292: note = Tnp_domain
  SITE 213: note = Tnp_P1
  SITE 243: note = Tnp_P2
  SITE 251: note = Tnp_P3
  SITE 252: note = Tnp_P4
  SITE 265: note = Tnp_P5
MQSHDRNSLTETLLAFDVGARTHEFVHETAGKLEQGQLQNDISAVRSFLARLLKDGRRLRVIMEATGIYFLDLALVAHELGAEVVVINPKAGHHFAKGLGLRSKTDAIDARMLLEFLRRMPLTRWEPPARECLQLRQIGRYLVQLTDESTAAKNRLHALESTEETPRFLREDLRRSIRSLEGRLERIRAQAIELIGCSESLNAAFQALNSMVGMGDKSAVAVLGELCVLPRSLSGRACTSHAGLDVRHHQSGTSVNKPGRISKHGNKYLRRALYMPALSAGTHDPHAAAFKQRLQARGKKGLQINTAIMRKMLTAAWAIVRDPTPYDGARLYATIETP

SEQ ID NO: 12038 - protein, 253 aa, unidentified
  source 1..253: note = protein_57d136d
  REGION 6..152: note = RuvC_domain
  SITE 9: note = RuvC_P1
  SITE 53: note = RuvC_P2
  SITE 91: note = RuvC_P3
  SITE 93: note = RuvC_P4
  SITE 96: note = RuvC_P5
  REGION 211..253: note = Tnp_domain
  SITE 219: note = Tnp_P1
  SITE 249: note = Tnp_P2
MTITTVGIDLAKNVFAVHGVDQNGKTVLVKSRVTRAALPGLIASLPPCVIGREACSGAHYWARLFLQYGHEPRLMAAKFVSPYRMAGKSGKNDAADAQAICEAVRRPHMRFVPVKDESQQAMQCLHRTRQGFIEEKTATYNRLRGLISEFGVIAPQSTDALRHMVSAQKSSLPLQVQQCVDDLLEHVDRIEANITEYDRTLSRIAKTDHRSQRLMKLKGVGPTTACALVACIGNAHDFKNGRQLAAWLGLTPS

SEQ ID NO: 12039 - protein, 363 aa, unidentified
  source 1..363: note = protein_112135c
  REGION 18..166: note = RuvC_domain
  SITE 69: note = RuvC_P2
  SITE 106: note = RuvC_P3
  SITE 108: note = RuvC_P4
  SITE 111: note = RuvC_P5
  REGION 230..315: note = Tnp_domain
  SITE 238: note = Tnp_P1
  SITE 268: note = Tnp_P2
  SITE 276: note = Tnp_P3
  SITE 277: note = Tnp_P4
  SITE 289: note = Tnp_P5
MVRRSVPQWLEHKRCKGDHHYGNTHDRNRSRQDDFSLSRPEFARGGCSAKEILASAAATLHGEPAGVFDWDGCGGSHFLGRALREQGHEVRLIPAQYVKPYVKTNKNDFIDAEAIAEAVGRPSMRFVPIKTDDQLDMQSLHRVRERWVTRRTAVVNQMRGLLLERGITLPKGRCHLEAALPMLLKDGDAKLSGVVRLLLAQLKLELEQLAERVEEADALIRHLAQESDVCRRLDAIPGIGPITATALIAAIGNGAAFRKGRDFAAWVGIVPREHSTGGKQKLLGISKRGNCYLRKLLVQGARAVLQFKEKQSSGLSTWLIQLASRTHYNVVGVALANKLARIAWAVLTTGKVYRPAVVASAPA

SEQ ID NO: 12040 - protein, 348 aa, unidentified
  source 1..348: note = protein_d00de73
  REGION 13..161: note = RuvC_domain
  SITE 16: note = RuvC_P1
  SITE 65: note = RuvC_P2
  SITE 101: note = RuvC_P3
  SITE 103: note = RuvC_P4
  SITE 106: note = RuvC_P5
  REGION 230..315: note = Tnp_domain
  SITE 237: note = Tnp_P1
  SITE 268: note = Tnp_P2
  SITE 276: note = Tnp_P3
  SITE 277: note = Tnp_P4
  SITE 288: note = Tnp_P5
MTVTIVETRAITGGVDTHADAHVAAALDPIGGLLGVQEFPATAAGYAQLLDWLGAFGTVCLVGIEGTGSYGAGLARHVTTAGVRVVEVDRADRQDRRRAGKSDPLDAVSAARAAQSGRARGAPKGRDGTVEAIRVLMVAKRSARAERTQTINQARALILTGPEDLRARFSRHDPADLVAELAALRPRPGDVVGYATRVAVRELGRRAGFLDGQLKRLDELIVPLVTARAPGLLALYGVGPDTAALLLVAAGDHPERLRSEAAWAHLCAVAPIPASSGKVSRHRLNPGGDRQANHALWRIVITRMSSHPPTRAYVARRTEEGLSKKEIIRCLKRYAAREIYPHLRAAAG

SEQ ID NO: 12041 - protein, 334 aa, unidentified
  source 1..334: note = protein_68fde46
  REGION 7..149: note = RuvC_domain
  SITE 10: note = RuvC_P1
  SITE 53: note = RuvC_P2
  SITE 88: note = RuvC_P3
  SITE 90: note = RuvC_P4
  SITE 93: note = RuvC_P5
  REGION 209..296: note = Tnp_domain
  SITE 217: note = Tnp_P1
  SITE 247: note = Tnp_P2
  SITE 255: note = Tnp_P3
  SITE 256: note = Tnp_P4
  SITE 268: note = Tnp_P5
MQNVTLIGIDLGKHSFHVHAQDKNGNALLRKKFSRNQLTAFLSTCAASTVVMESCAGAHFMARHISQFGHQVKLISPQFVRPFVKSNKNDFIDAEAICEAASRPSMRFVTPRTEDQQAMSALHRVRDAIVRDRVKTTNQMHAFLLEFGISMPRGIAVIRRLAAVLEEHELPPYLARLLMRLHQHYAYLTEQIEELEQELKTHMADDDTAQRLLTIPGVGLITASLLATKLGDGKSYASSRDFAASTGLVPRQYSTGGKSTLMGISKRGDKNLRRLLVQCARAFMQRLEHNQGRLADWVKAQLSRHHSNVVACGLANKLARIAWSVTTHRTAFIQ

SEQ ID NO: 12042 - protein, 349 aa, unidentified
  source 1..349: note = protein_279166b
  REGION 7..150: note = RuvC_domain
  SITE 10: note = RuvC_P1
  SITE 54: note = RuvC_P2
  SITE 89: note = RuvC_P3
  SITE 91: note = RuvC_P4
  SITE 94: note = RuvC_P5
  REGION 212..303: note = Tnp_domain
  SITE 220: note = Tnp_P1
  SITE 250: note = Tnp_P2
  SITE 258: note = Tnp_P3
  SITE 259: note = Tnp_P4
  SITE 271: note = Tnp_P5
MTKVSMIGLDLAKNVFQVHGIDAAGKVVERRQLRRQQLEKFFAKLPPGVVVGMEACSGAHHWGRVLQKLGHEARMMPAAYVKPYVKRNKNDGRDAEGICEAMGRPTMRFVPVKSLDCQAVMVLHRTRRLLVRQRTMSANALRSALAEFGIVAAQGLKGLHSLMQELEDPASAIPDKARMPLQVLARQWETLNTDICKLETEIVGAAKTDEVARRLMAIPGLGPIGATAILAAVPDARVFKTARDFAAWLGLTPRQFGTGGKQRSGGISKQGDRTLRTLLTIGATSYLRYERARGAKDPWVRDLLARRPFKVAAVAYAAKMARMIWAMLVTGEFYRAPNRSRSVAAQAAT

SEQ ID NO: 12043 - protein, 407 aa, unidentified
  source 1..407: note = protein_5bad4bd
  REGION 6..159: note = RuvC_domain
  SITE 9: note = RuvC_P1
  SITE 57: note = RuvC_P2
  SITE 98: note = RuvC_P3
  SITE 100: note = RuvC_P4
  SITE 103: note = RuvC_P5
  REGION 221..306: note = Tnp_domain
  SITE 229: note = Tnp_P1
  SITE 259: note = Tnp_P2
  SITE 267: note = Tnp_P3
  SITE 268: note = Tnp_P4
  SITE 279: note = Tnp_P5
MTKVIIGVDPHKLSATIEVIDRHEKRLGSGRFGTDQAGYTAMRTYAKNWPDRIWAIEGSNGAGRPLAQRLLEAGEHVVDVPAKLAARVRLFDTGHNRKTDARDAHSIAVVAVRTKTLRVLRADGELEALRMLCDRRDELTRLRVQTVNRLQRLLAELVPGTTKKDLTALQAKAILASVRPRDIAGKTRRKIAADELADLIAVEKKMTKATAELKALVKARGSRLMDLHGVGPVVAARTLADVGDIARFANRNRFASWNGTAPLDASSGEQNRHRLSRAGNRRMNHMIHIAAISQIRLDTEGRAYYRRKLSAGKTKLEALRCLKRRISDALYRQLLADAERAALATAPDSAGTGPGGHCGASQESSAVDLPPHIDTSDQPLPGPAQLTLQPPSTGRKAPPRKAPQTTG

SEQ ID NO: 12044 - protein, 414 aa, unidentified
  source 1..414: note = protein_c70609a
  REGION 10..158: note = RuvC_domain
  SITE 13: note = RuvC_P1
  SITE 64: note = RuvC_P2
  SITE 98: note = RuvC_P3
  SITE 100: note = RuvC_P4
  SITE 103: note = RuvC_P5
  REGION 254..342: note = Tnp_domain
  SITE 262: note = Tnp_P1
  SITE 293: note = Tnp_P2
  SITE 301: note = Tnp_P3
  SITE 302: note = Tnp_P4
  SITE 314: note = Tnp_P5
MLKIVYPICCGMDVHKSFIVACIASTNEQGVTTYKSKRFSTFTGDLRRCARWLAENNCKDVCMESTGKYWIPVYNILETTCNVVLAHPKYVKAIRGKKTDKRDAKWIADIFKHDLVAGSFIPPADIRQLRDLVRYRWKLTNFTTGEKNRAQNCLTVSNFKLDDVFSDVFGKAASAITARILENPTEKITDVSGFRTKGMKATDEQVLAAVDGEMCVEQAEKLRIIRSHMKNLDLCKTNLESLILTTAEKYLSQLNLVMTVPGIQSFAAIGIIAEIGVDMSVFPTSKHLCSWAGLTPQNNESAGKKKTTRISRAGNYIKPLLVQCTLCAIRAKQFQEVRNRYLALKKRRGHKKAIIAIARMILTAIYNILKKNEPYNPELYRNIDRPPVHREVSLEEAVFILQRQGYLVTAPPVA

SEQ ID NO: 12045 - protein, 347 aa, unidentified
  source 1..347: note = protein_3c31514
  REGION 6..148: note = RuvC_domain
  SITE 9: note = RuvC_P1
  SITE 52: note = RuvC_P2
  SITE 87: note = RuvC_P3
  SITE 89: note = RuvC_P4
  SITE 92: note = RuvC_P5
  REGION 212..297: note = Tnp_domain
  SITE 219: note = Tnp_P1
  SITE 249: note = Tnp_P2
  SITE 257: note = Tnp_P3
  SITE 258: note = Tnp_P4
  SITE 270: note = Tnp_P5
MKITAVGIDLAKSVFQIHGVDERGKVMVRKQLKRAEVAKFFANLPPCLIGMEACASAHYWARKLMAFGHTVKLMAPQFVKPYVKTNKSDARDAEAICEAVQRPNMRFVPVKTPEQQAVLALHRARQGFVKARTAQANQIRGLLAEFGIVIPKGIAHLAKRIPEILEDGENGLPGNARQLFAGLLEHFQELHQRMAELEKQIVLWHRSNEQSCKLEKIHVIGPITASALVASIGDAKSFKNARQAAAWVGLVPRQHSTGGKDRLLGISKRGDVYLRTLLIHGARSVVRQAESHADRATSWLKGVLDRRHKNVAAVALANKNMRIAWALLAKERDYESNYAAAPNVAQA

SEQ ID NO: 12046 - protein, 342 aa, unidentified
  source 1..342: note = protein_ab579c7
  REGION 6..148: note = RuvC_domain
  SITE 9: note = RuvC_P1
  SITE 52: note = RuvC_P2
  SITE 87: note = RuvC_P3
  SITE 89: note = RuvC_P4
  SITE 92: note = RuvC_P5
  REGION 211..296: note = Tnp_domain
  SITE 219: note = Tnp_P1
  SITE 249: note = Tnp_P2
  SITE 257: note = Tnp_P3
  SITE 258: note = Tnp_P4
  SITE 270: note = Tnp_P5
MNITTVGIDLAIQVFQVHGVDERGKAVLKKQLKRDQVLPFFANFQCCLIGMEACGSAHFWARKLEALGHTVKLMAPQFVKPYVKTNKNDAADAEAICEAVSRPTMRFVPIKTAAQQAILALHRARQGFVKARTAQANQIRGLLAEYGLAIPQGISHIAKRLPEILEDGENGLPGIFRQLIDRLGMHLKELDRQVDELEAQIHIWHKESTASRKLAAIPGIGPITASAMVASVGDAKNFENGRQLAAWLGLVPRQHSSGGKQTLLGISKRGDSYLRTLLIHGARAVIRVSEHKTNQGRGWLADVIGRRNKNVAAVALANKNARTIWALLAYERNYESNYGITA

SEQ ID NO: 12047 - protein, 411 aa, unidentified
  source 1..411: note = protein_4c8f1cd
  REGION 6..159: note = RuvC_domain
  SITE 9: note = RuvC_P1
  SITE 57: note = RuvC_P2
  SITE 98: note = RuvC_P3
  SITE 100: note = RuvC_P4
  SITE 103: note = RuvC_P5
  REGION 221..306: note = Tnp_domain
  SITE 229: note = Tnp_P1
  SITE 259: note = Tnp_P2
  SITE 267: note = Tnp_P3
  SITE 268: note = Tnp_P4
  SITE 279: note = Tnp_P5
MAHVVIGMDPHKSSATIEIINEKEKILHAGRYSTDAAGYRSMLAAGRKHRDRIWAVEGCNGIGRHIAQRLVADGEPVVDVPAKLSARARLFSTGQGRKTDPVDAHSVALVGLRTGGLRPIREDDATVALRLLIDRRDELGVARTQVVNRIHRLLLELLPGGAKTHLTATQAKVLLAKVRPRDIAGKTRRRLAAELITDLAGLDAKIKTADKELHQLIDTTGSSLRELHGIGPANAARLLGDVGDIARFADKGRFASWNGTAPLDASSGEQHRHRLSRAGNRRINRVLHIMAVVQLRTDTEGRRYYDRKVAAGKSSMEAMRCLKRRLSDVVYRQMRDDATALAAGPGGHSGAALDSSAVDYNPDIDASEKSLPGPATSNATPTRGSRPDRSPARSRRPKTAPARSRRQAQSA

SEQ ID NO: 12048 - protein, 322 aa, unidentified
  source 1..322: note = protein_9fdc819
  REGION 8..159: note = RuvC_domain
  SITE 11: note = RuvC_P1
  SITE 58: note = RuvC_P2
  SITE 98: note = RuvC_P3
  SITE 100: note = RuvC_P4
  SITE 103: note = RuvC_P5
  REGION 197..281: note = Tnp_domain
  SITE 205: note = Tnp_P1
  SITE 234: note = Tnp_P2
  SITE 242: note = Tnp_P3
  SITE 243: note = Tnp_P4
  SITE 254: note = Tnp_P5
MSGSSVMVGIDVACTHVDVACLGAALPAELARVSNDAEGHSALAEALVKLQPALVLMEATGGYEAALACALQAAGLRVAIINPRMARDFARAMQRLAKTDRIDAATLAEFAAVLAQRPDCERFVRPLSEPEQQDLAALVTRRRQLVAMQLSERQRLRLARPVARPSIEALLQAIARQLDDVDAQMLSHVEQHHAAMAKLLQGVAGIGRIAAATLIAELPELGRLNRRQISALVGVAPYANDSGSSRGRRRIVGGRFEVRRALYMATLTATRVNPAIRAFYERLVAAGKLKKVALIACMRKLITHLNAIARNYLNAQHQPLTT

SEQ ID NO: 12049 - protein, 403 aa, unidentified
  source 1..403: note = protein_bada46d
  REGION 4..161: note = RuvC_domain
  SITE 7: note = RuvC_P1
  SITE 60: note = RuvC_P2
  SITE 100: note = RuvC_P3
  SITE 102: note = RuvC_P4
  SITE 105: note = RuvC_P5
  REGION 266..353: note = Tnp_domain
  SITE 274: note = Tnp_P1
  SITE 304: note = Tnp_P2
  SITE 312: note = Tnp_P3
  SITE 313: note = Tnp_P4
  SITE 326: note = Tnp_P5
MFYCGIDIAKYRHEATVIDQAGAAVQESISFANSKEGCEKLLALFQRLDISKEGLLIGMEATGHYWLSVYGYLLEQGFEVKVINPIQSEAFRKMYIRQTKNDRKDSFIIAQIMRFGQFSATNLAEEGIVAMRQLSRYRLALVDTCGDCKRRVIALLDQVFPEYDSLFSDTFGVTSKEVLSQYPTPEGMLTVSIRKLTTLLEKASHGRFGKEKAEQLKAAAASSFGVNFAKDAFAFQIRQLIEQLEFLERQVAELEEQIFSLLKQTGSYITTIPGIGDTLGAIILSEIGDIHRFDAPNKLVAFAGLDVRVTQSGEFTGTRQKISKRGSPYLRRAIWLAASRAAFCDPILSEYYQGLRARGKHHLTAVGAVSRKLCNTIYTILKEDRPWQPIPPKGKKVSNYTEE

SEQ ID NO: 12050 - protein, 406 aa, unidentified
  source 1..406: note = protein_f6a000f
  REGION 4..162: note = RuvC_domain
  SITE 7: note = RuvC_P1
  SITE 57: note = RuvC_P2
  SITE 99: note = RuvC_P3
  SITE 101: note = RuvC_P4
  SITE 104: note = RuvC_P5
  REGION 278..364: note = Tnp_domain
  SITE 285: note = Tnp_P1
  SITE 315: note = Tnp_P2
  SITE 323: note = Tnp_P3
  SITE 324: note = Tnp_P4
  SITE 337: note = Tnp_P5
MNAVGIDVSKGKSTVAVLRPFGEIVASPFDVSHSPKELSELVTLLKTLDGDTKVVMEYTGNYYLPIALFLRNNGLFVSVVNPILVKDYSTKSLTVRKVKTDKKDSLKLASFALDRWKELSPFSAQSEARLLLKSYNRQYNQYNKLKVMLKNNLIALLDQTFPGANTLFSTPTRKADGHEKWGDFVLKYPHAECISKKSLSSFSKSYLSWCSKFGYNFSERKSRTVYDFACNCSPSLSFTESTALLVSNAISQLNCINETLASLTSEMNKIAATLPEYCTVMSMFGVGSVLGSQLIAEIGDVTRFSNKKALVGFAGLDASPFQSGNFNPQSRSIPKRGSAALRKTLLQIMSVILQNSPTNNSVFRFMDKKRAEGKHYFVYMTAAANKFLRIYYARVTEHLKSLQPAV

SEQ ID NO: 12051 - protein, 341 aa, unidentified
  source 1..341: note = protein_4e52b01
  REGION 8..164: note = RuvC_domain
  SITE 11: note = RuvC_P1
  SITE 64: note = RuvC_P2
  SITE 102: note = RuvC_P3
  SITE 104: note = RuvC_P4
  SITE 107: note = RuvC_P5
  REGION 205..292: note = Tnp_domain
  SITE 213: note = Tnp_P1
  SITE 243: note = Tnp_P2
  SITE 251: note = Tnp_P3
  SITE 252: note = Tnp_P4
  SITE 265: note = Tnp_P5
MQTIKYFIGFDISADDFTASCIISPDNPVFSTQKFSNNIDGTNELIELFDKNNIKPSEAILCMEATGVYSEKLCYFLASKGFTVSVEAPHKIKNKIKDSPRKNDFIDALAIAEYAYRYTDKLPKWKPRNEILEQIQVLLSTREHLSVQMIANVNALKTLKHKYYQTPLANQIYQQTISKLKEHIKQIDQEIKSLIDKDDSFKNNVSLAKSVPGVGLLLAANLLVLSKGFTENLNYKHIASYTGICPYEQISGTSLHKPPRSRMCGPSKLRKLLYLAALSVRTHNKNFKKYFLRKVEEGKNKRLILNNIENKLLKIICAVINSGCAYTENYKSINPNRLNTA

SEQ ID NO: 12052 - protein, 339 aa, unidentified
  source 1..339: note = protein_78db4cf
  REGION 6..148: note = RuvC_domain
  SITE 9: note = RuvC_P1
  SITE 52: note = RuvC_P2
  SITE 87: note = RuvC_P3
  SITE 89: note = RuvC_P4
  SITE 92: note = RuvC_P5
  REGION 211..299: note = Tnp_domain
  SITE 219: note = Tnp_P1
  SITE 249: note = Tnp_P2
  SITE 257: note = Tnp_P3
  SITE 258: note = Tnp_P4
  SITE 270: note = Tnp_P5
MELNVVAIDIAKKVFQLHWVEPETGSIERLKLKRAQVLQWFVNRTPSLVLIEACGSAHEWGRQLIKLGHDVRLLPAKMVRPFVQRNKTDAADAQAIWTAGQQPGTRFVPVKTEAQQVVLALHRLRAQLMKMRIMQTNEIRGLMYEFGIVMSEGHRALLKELPAALMEAKSKLPAMFIECIDEQVRRVNDLERDIATIERRLSENLRKSPACKTLAEIPGVGLMTATAVISTMGTPTAFKSAREFAAWIGLVPRQTGTGGRVRQLGISKRGDAYLRTLLMHGARSIVRSDRSTTWPWLSELLKRRPYSVVVAAVANKLARTIWAVLARGQEWRPEAWQAA

SEQ ID NO: 12053 - protein, 263 aa, unidentified
  source 1..263: note = protein_a9e9d5b
  REGION 4..62: note = RuvC_domain
  SITE 7: note = RuvC_P1
  SITE 57: note = RuvC_P2
  REGION 199..263: note = Tnp_domain
  SITE 207: note = Tnp_P1
  SITE 237: note = Tnp_P2
  SITE 245: note = Tnp_P3
  SITE 246: note = Tnp_P4
  SITE 258: note = Tnp_P5
MLYVGIDIAKNKHDVTALNVPGKTVLKPLTFSNNKAGFELLDLSLRQLNQDCLIALKLLSDPNREQFQHDNRQVELKILARHIHRLKKKQSDWKVQYTRCLDIIFPELDKIVEKHSEYTYQLLTCYPNPQKRLEAGFDKLIEIKRLTASKIQDILSVAPRSIGTTSPAREFEIIENIKHYKRLIDKAEKYVNDLMAEFNSVITTVTGIGNRLGAVILAEIQNIHAFDNPAQLQAFAGLDSSIYQSGQIDLAGRMVKRGSPHLR

SEQ ID NO: 12054 - protein, 263 aa, unidentified
  source 1..263: note = protein_5b51ad4
  REGION 4..62: note = RuvC_domain
  SITE 7: note = RuvC_P1
  SITE 57: note = RuvC_P2
  REGION 199..263: note = Tnp_domain
  SITE 207: note = Tnp_P1
  SITE 237: note = Tnp_P2
  SITE 245: note = Tnp_P3
  SITE 246: note = Tnp_P4
  SITE 258: note = Tnp_P5
MLYVGIDIAKNKHDVTALNVPGKTVLKPLTFSNNKAGFELLDLSLRQLNQDCLIALKLLSDPNREQFQHDNRQVELKILARHIHRLKKKQSDWKVQYTRCLDIIFPELDKIVEKHSEYTYQLLTCYPNPQKRLEAGFDKLIEIKRLTASKIQDILSVAPRSIGTTSPAREFEIIENIKHYKRLIDKAETCVNDLMAEFNSIITTVTGIGNRLGAVILAEIRNIHAFDNPAQLQAFAGLDSSIYQSGQIDLAGRMVKRGSPHLR

SEQ ID NO: 12055 - protein, 341 aa, unidentified
  source 1..341: note = protein_f74d4fc
  REGION 7..148: note = RuvC_domain
  SITE 10: note = RuvC_P1
  SITE 53: note = RuvC_P2
  SITE 88: note = RuvC_P3
  SITE 90: note = RuvC_P4
  SITE 93: note = RuvC_P5
  REGION 209..294: note = Tnp_domain
  SITE 217: note = Tnp_P1
  SITE 247: note = Tnp_P2
  SITE 255: note = Tnp_P3
  SITE 256: note = Tnp_P4
  SITE 268: note = Tnp_P5
MDAASLIGIDLGKHCFHLHAQDASGRMVFRKKLTRSQMLTLLGNVPCCTVVMEACAGAHWVARRIQSFGHQAKLISPQFVKPFLTGNKNDFADAQAICEAASRPSMRFVSPHNEAQQVVSALHRVREGLVRDRTGTINQIHAFLLEFGVSLPKGTAVIRRLPAVLASESLPPRLIALLEGLQAHFKYLDEQIVQLERELMQQLREDERSQRLLEIPGIGPITASVLGTELGDAQQFVSARQFAASIGLVPRQYSTGGKPTLLGISKRGDKNLRRLLVQCARTIIQHIERRSDRLGVWVRSLLSRRHSNVVACALANKLARIAWAILARGTHYQGEQAVAAA

SEQ ID NO: 12056 - protein, 345 aa, unidentified
  source 1..345: note = protein_b028ba6
  REGION 7..149: note = RuvC_domain
  SITE 10: note = RuvC_P1
  SITE 53: note = RuvC_P2
  SITE 89: note = RuvC_P3
  SITE 91: note = RuvC_P4
  SITE 94: note = RuvC_P5
  REGION 213..296: note = Tnp_domain
  SITE 221: note = Tnp_P1
  SITE 251: note = Tnp_P2
  SITE 259: note = Tnp_P3
  SITE 260: note = Tnp_P4
  SITE 272: note = Tnp_P5
MNEISTIGLDIAKSVFQVHGVDALGAVVVRRQLRRGELLKFVAGLPSCVVGMEACGSAHYWARQVGALGHEVRLLPPARVKPYVKRGKKNDAADAAALAEAVGRPRMSFVPVKSAEQQSVVMLHRTRDLLVRQRTMLICALRSHLAEFGCIAAQGKGGFGRLVASLDGPEGRMLPKTALAALRLIAAQIDDGNKKIQALETAILMQHRQCETSRRLASIPGIGPITASALVAAVPDASIFKSGRQLAAWLGLVPGQNSSGGKERLGGITKTGDRYLRRLLVIGATGLIRYKRKNIPGGVAWLSGLLNRKPARLVTVALANKMARIAWAVLCRGEIYRAVAAPAAI

SEQ ID NO: 12057 - protein, 391 aa, unidentified
  source 1..391: note = protein_31c9aad
  REGION 4..163: note = RuvC_domain
  SITE 7: note = RuvC_P1
  SITE 60: note = RuvC_P2
  SITE 101: note = RuvC_P3
  SITE 103: note = RuvC_P4
  SITE 106: note = RuvC_P5
  REGION 266..353: note = Tnp_domain
  SITE 274: note = Tnp_P1
  SITE 304: note = Tnp_P2
  SITE 312: note = Tnp_P3
  SITE 313: note = Tnp_P4
  SITE 326: note = Tnp_P5
MIYVGIDVAKDKHDCFITNSDGEILFKSFTISNNREGFETLSQRIKSVSDDLTNVKVGLEATGHYSYNLLGFLLDNGFPTFVINPLHTNLYRKSLSLRKTKTDKVDAHTIASMIMSDVNLKSYSDTSYHNEELKSLTRYRFDKVKERAALKSSISRLVCILFPELEKLVPTLHMASVYALLAEFPGASTVASAHLTRLTNLLSESSKGRYGKDIALTFRDAARNSIGSHMPAKSLELKHTIKLIQELDAEIDEIENEIKSIMDQINSPILTIPGISYRMGAMIIAEIGDFSRFDSPDKILAYAGMSPSIYQSGQLDNCYAHMEKRGSRYLRYALYNATKYVCHWDESFGSYLAKKRAEGKHYNVALSHATKKLVRMIYAMEKSGQAYIKSA

SEQ ID NO: 12058 - protein, 390 aa, unidentified
  source 1..390: note = protein_2aaf8a7
  REGION 4..162: note = RuvC_domain
  SITE 7: note = RuvC_P1
  SITE 60: note = RuvC_P2
  SITE 101: note = RuvC_P3
  SITE 103: note = RuvC_P4
  SITE 106: note = RuvC_P5
  REGION 265..378: note = Tnp_domain
  SITE 273: note = Tnp_P1
  SITE 303: note = Tnp_P2
  SITE 311: note = Tnp_P3
  SITE 312: note = Tnp_P4
  SITE 325: note = Tnp_P5
MIYAGIDVAKDKHDCLIIDSDGVILFDPFTIPNNRIGFNDLFGKLEACSADLSNMKVGLEATGHYSDNLLEFLISKGLHTTVINPLHTNLYRKSLSLRKTKTDRVDAHSIVTMLRTECLKPYSQSSYHVRELKSLTRYRFSLVQDCSRLKTSYVRLCVLLFPELEKLVPSLHIASVYTLLSELPNAKAVAECHLTRLTNLLVSASKGRYGKEKAVEIRNAARVSVGSFSEMKSLELQQTIGLIQIMEKQIEQVESKINPIVDSLHSPIMTIPGISYRMAAIIIAETENLTSFDSAEQVLAYAGLEPSVHQSGQMTSTHAKMVKRGSKYLRYALFNAAKYVCRWDEHFGLYLAKKRSEGKAYNVAVSHAAKKLTRVIFHLVKTNLSFVSQV

SEQ ID NO: 12059 - protein, 401 aa, unidentified
  source 1..401: note = protein_d48a236
  REGION 7..172: note = RuvC_domain
  SITE 10: note = RuvC_P1
  SITE 63: note = RuvC_P2
  SITE 103: note = RuvC_P3
  SITE 105: note = RuvC_P4
  SITE 108: note = RuvC_P5
  REGION 272..357: note = Tnp_domain
  SITE 280: note = Tnp_P1
  SITE 310: note = Tnp_P2
  SITE 318: note = Tnp_P3
  SITE 319: note = Tnp_P4
  SITE 330: note = Tnp_P5
MDPHLCVGVDVGCRVHRVGIARPDGSILEEFDISHDQTGFEEFFHRVEDHRERTALPVAVAMEGYNGYARPLDRLVQEKGYRLFNVNNLKLARFKEVFPGAAKTDPIDTRKILELFRLKDQLPLAKDAIQEVARAPAVNERLKRLSRRRRHLVIEKMRVLNRMQADLQAVCPELLAATNDADNLWFLRFLTCREDLRQLARLRQSTVLQIRGIGQKYAAIIAEWQQHARFSDEVEYVGPMIIQDARRILELHVQIHVLDEAMADLAEQSEIARRISTMAGFGKTSIAELAGEIGTVKRFASEASLALYLGMCPLTRQSGQMCTARAPRQVNTRCKAAMMTAVARHMACVPQSRAYYDRKRAEGKTHNQAIRSLGRHLVRVIWAMLRDGRDYEIREDRHPTP

SEQ ID NO: 12060 - protein, 265 aa, unidentified
  source 1..265: note = protein_2f7e236
  REGION 1..69: note = RuvC_domain
  SITE 9: note = RuvC_P3
  SITE 11: note = RuvC_P4
  SITE 14: note = RuvC_P5
  REGION 133..220: note = Tnp_domain
  SITE 141: note = Tnp_P1
  SITE 171: note = Tnp_P2
  SITE 179: note = Tnp_P3
  SITE 180: note = Tnp_P4
  SITE 192: note = Tnp_P5
MKPYVKSNKNDRVDAEAICEAMGRPTMRFVVVKTAAQQDIQTTHRIREELVQQHTAKANQIRGLVGEYGLVVPVGIGQLRTALPRWLEDAENGLTDDFRFLLAGLAEDLRYLDDRIATVTERIALHAKTDPMAKCLMKLRGFGSITASALAGALGDAKAFKRGRDFAASLGLTPRQHSTGGRDRLLGISKRGDRYLRTLLVHGARVVLRYTEGKEDNLSHWVRQLAERKHVNVAVIALANKTARIAWSITCHDNAYDPDRAARAA

SEQ ID NO: 12061 - protein, 311 aa, unidentified
  source 1..311: note = protein_90701bf
  REGION 7..154: note = RuvC_domain
  SITE 10: note = RuvC_P1
  SITE 54: note = RuvC_P2
  SITE 94: note = RuvC_P3
  SITE 96: note = RuvC_P4
  SITE 99: note = RuvC_P5
  REGION 190..274: note = Tnp_domain
  SITE 198: note = Tnp_P1
  SITE 227: note = Tnp_P2
  SITE 235: note = Tnp_P3
  SITE 236: note = Tnp_P4
  SITE 247: note = Tnp_P5
MTEHTTVGIDIAKDTFDVFISPDGLFLHLENTPHGHQQLLDTLASRTVARIVMEATGRYHNLLAATLELAGLPVAVVNPAQVKHFARALGTLFKTDPNDARIICEFGRRMTPDVRPAPDEQTQRLAMMVSRRRQLVDNRTMEQNRYGSCTDELIRIGIKRHSDWLNGEIKDTDDDIDRQIKVMPLWQEKVKLLEDVKGIGRTTLAVLLSMLPELGQLNRRKISALVGVCPYAHDSGKMKGKRCIWGGRSAVRAALYMAAMSAVRYNPIIQAFFERLRARGKAFKVAMTACVRKLVTILNAMVRDNKKWVAD

SEQ ID NO: 12062 - protein, 342 aa, unidentified
  source 1..342: note = protein_7375d05
  REGION 7..148: note = RuvC_domain
  SITE 10: note = RuvC_P1
  SITE 53: note = RuvC_P2
  SITE 88: note = RuvC_P3
  SITE 90: note = RuvC_P4
  SITE 93: note = RuvC_P5
  REGION 211..296: note = Tnp_domain
  SITE 219: note = Tnp_P1
  SITE 249: note = Tnp_P2
  SITE 257: note = Tnp_P3
  SITE 258: note = Tnp_P4
  SITE 270: note = Tnp_P5
MNEVTIIGLDLAKNIFQAHGAGADGSVIFRRKLSRVQLLKFMGEQPPCVVAMEACASAHHWGRAIGDLGHDIRLIPPAYVKPFVKRQKNDMADAEAIAEAASRPTMRFVAVKSEAQQAMAMVYRTRDLLVRQRTQTINALRAHLAEQGIVAPAGPAHVGRLAAVIDGDDDALPVAVRDLARLHLDQIAGLSGKIADLDADLRRAAGTNDTARRLTTIPGVGPITAAAITTFAPPMETFSKGRDFAAWVGLTPRQHSSGGKERLGRTSKMGQRDIRRLLIIGAVAVVRWAARKGAPEGSWLARMLERKPKMLVAVALANRMARTAWALMRKGEDYRDPAMATA

SEQ ID NO: 12063 - protein, 344 aa, unidentified
  source 1..344: note = protein_6588e40
  REGION 5..152: note = RuvC_domain
  SITE 8: note = RuvC_P1
  SITE 55: note = RuvC_P2
  SITE 92: note = RuvC_P3
  SITE 94: note = RuvC_P4
  SITE 97: note = RuvC_P5
  REGION 212..299: note = Tnp_domain
  SITE 220: note = Tnp_P1
  SITE 250: note = Tnp_P2
  SITE 258: note = Tnp_P3
  SITE 259: note = Tnp_P4
  SITE 271: note = Tnp_P5
MDHFAGLDVSVKETSICIVDDAGKIVREVKVASEPEALLAVLKNPAYHFKRIGLEAGPLSQWLFSALAEAGLPVICVETRHMQAVLKAQINKTDRNDARGIAQMMRVGLYRPVHVKTLRSQKLRMLLTHRKLLQSKAIAIENDLRGTLRNFGLKVGMVGKVKFEARIKELVENLPDLAELVEPLLIVRRVLREQIVILHRRLLAIVRDDEVCRRLMTTPGVGPVVALTYRATVDVPARFRKSKAVGAVFGLTCSKYQSGEVDRNGRISRCGDEMMRVMLYEAAQSMLRSKKWSWLKAWAMQIARRRGMKKAIVALARRLAVIMHRIWVDGTEFRWTREQATAAA

SEQ ID NO: 12064 - protein, 319 aa, unidentified
  source 1..319: note = protein_d273fdb
  REGION 3..148: note = RuvC_domain
  SITE 6: note = RuvC_P1
  SITE 50: note = RuvC_P2
  SITE 90: note = RuvC_P3
  SITE 92: note = RuvC_P4
  SITE 95: note = RuvC_P5
  REGION 189..273: note = Tnp_domain
  SITE 197: note = Tnp_P1
  SITE 226: note = Tnp_P2
  SITE 234: note = Tnp_P3
  SITE 235: note = Tnp_P4
  SITE 246: note = Tnp_P5
MFVGIDVAKAELVVATRPGEAPWAVANDERGVHALTERLRAAAPPLIVLEATGGYELLCVAALAAAALPVVVVNPRQVRDFAKATGQLAKTDRIDAGVLALFAERVRPAGRPLPDADAQELDALLARRRQLLDMLLAERSRLGQVFGRGKQPVRKSLKAHIAFLERDLRTADTDLGAMVRRSPAWREKDDLLQSVPGVGPVLSLTLLADLPELGRLSRREIAKLVGVAPLSRDSGTLRGRRFVQGGRAGVRAVLYMGALVATKRNAVIRGFYQRLLAAGKPKKLALVACMRKLLTILNTMVRTRQWWCAARVTQALVRA

SEQ ID NO: 12065 - protein, 341 aa, unidentified
  source 1..341: note = protein_0878cc2
  REGION 6..148: note = RuvC_domain
  SITE 9: note = RuvC_P1
  SITE 52: note = RuvC_P2
  SITE 87: note = RuvC_P3
  SITE 89: note = RuvC_P4
  SITE 92: note = RuvC_P5
  REGION 211..297: note = Tnp_domain
  SITE 219: note = Tnp_P1
  SITE 249: note = Tnp_P2
  SITE 257: note = Tnp_P3
  SITE 258: note = Tnp_P4
  SITE 270: note = Tnp_P5
MQITTIGLDIAKNVFQVHGIDAAEKVVVRKQLRRGQMMKFFEALPPCLIGMEACATAHYWARELRKVGHQVRLMPAKDVKAYVKRNKNDAADAEAICEAVRRPTMRFVEVKSAEQQGRLMQHRTRDLLLRQRTQVINALRAHLAELGIVAAQGREGLKELLAIIADERDARLPIDARASLIVLATQLQALQTMIGSIEKRIIVQHRASEESKRVATVPGIGTLGASAITATVTDPSAFRSGRDFAAWIGLVPRQDSTGGKQKLGPISKQGDRYLRRILVVGAHSVLRRAKQNPQKYPWLTQLLARRPFKVVAIALANKMARIAWALLASGERYRAPWLAAA

SEQ ID NO: 12066 - protein, 415 aa, unidentified
  source 1..415: note = protein_27f7413
  REGION 20..174: note = RuvC_domain
  SITE 23: note = RuvC_P1
  SITE 71: note = RuvC_P2
  SITE 111: note = RuvC_P3
  SITE 113: note = RuvC_P4
  SITE 116: note = RuvC_P5
  REGION 281..366: note = Tnp_domain
  SITE 289: note = Tnp_P1
  SITE 319: note = Tnp_P2
  SITE 327: note = Tnp_P3
  SITE 328: note = Tnp_P4
  SITE 340: note = Tnp_P5
MRWTELADCENTDVGYAVFCGVDVGKSDHHACALDREGNRVHDRALPNDQAALVQVLTDLSKRGRVLVVVDQPASIGALVIAVARSMAIDVAYLPGLAMRRIADLHPGQGKTDARDAYIIADAARSMPHTLRRVGTDDQTLAELAVLAGYDDDLAAQSTRLTNRLRDALLHIHPALERLLGNAFDRGGVIDLLAAAPTPTALRQLGVGGIGELMRSRSPRLAKTLPAKIIAALDAQTVTVPGTYAFGRVIAGVAAQLRGVRNERDELASDLEIRLEAHPLSKVLTSMPGVGFRTAIKILTIVGDGSAFPTAGHLAAYAGLAPVTRRSGSSIKGETRSQRGNHALKSALFLSAFASLKDPASRTYYDRKRAAGKRHNAALICLARRRVDVLFAMLRDHKPYQTPDTPIDDSQPAAA

SEQ ID NO: 12067 - protein, 395 aa, unidentified
  source 1..395: note = protein_5ab9fc6
  REGION 6..160: note = RuvC_domain
  SITE 9: note = RuvC_P1
  SITE 58: note = RuvC_P2
  SITE 98: note = RuvC_P3
  SITE 100: note = RuvC_P4
  SITE 103: note = RuvC_P5
  REGION 265..352: note = Tnp_domain
  SITE 273: note = Tnp_P1
  SITE 304: note = Tnp_P2
  SITE 312: note = Tnp_P3
  SITE 313: note = Tnp_P4
  SITE 325: note = Tnp_P5
MPRIWAGVDIGKEHHHCVVVDERGERLLSRRVFNDEQALLELITDVLTLSEDALWAVDINHGGAALLIGLLLNHRQPMVYITGLAVHQASTAYRGQGKTDEKDAFVIADQARMRQDLGLLRPGDKIAVDLRTLTARRLDLVNDRTRQTNRLRAQLLEFFPALERALNLSKKGPVVLLTGYQAPAAIRRSGAGRLGTWLKNRKVKNAAVLAETAVEAAKSQHTALPGETLAGAMVARIAKGVLALNEEIAELDALIEARFNEHRHATVIRSLPGMGSLLGAEFIAATGGDMEAFGTADRLASFAGLSPVPRDSGRVSGNMRRPRRYHRGLLRALYLSAMASLRACSASQAYYGRKRNEGKGHKQALLALARRRANVLWAMLRGTCYEVLPTVTAAA

SEQ ID NO: 12068 - protein, 342 aa, unidentified
  source 1..342: note = protein_566b971
  REGION 6..148: note = RuvC_domain
  SITE 9: note = RuvC_P1
  SITE 52: note = RuvC_P2
  SITE 87: note = RuvC_P3
  SITE 89: note = RuvC_P4
  SITE 92: note = RuvC_P5
  REGION 210..296: note = Tnp_domain
  SITE 218: note = Tnp_P1
  SITE 248: note = Tnp_P2
  SITE 256: note = Tnp_P3
  SITE 257: note = Tnp_P4
  SITE 269: note = Tnp_P5
MQVITIGLDIAKNVFQVHGVDNAGNAVLRRKVRRDQLIPLLRDMQPCLIGMEACATAHHWARELIALGHVVKLMPPAYVKAYVKRNKNDAADAEAICEAVTRPTMRFVAVKSADAQSILMLHRARHLLVRQRTAQISAMRAHLAEYGVVAPKGRAHVRGLIEALDKGEGPLPAMARQVLILLARTIEGLGAQIRKIEIELLAWYRTNQVCRRLSTIPGIGFITATALAATVVDAKVFRSGRQFAAWLGLVPKQHSSGGKDRMGGISKMGDRYLRHLLVVGATAVIRYTRRKATTVSTWANQLLERKPARLVTVAVANKVARIAWAVMAREENYRATPSMARG

SEQ ID NO: 12069 - protein, 342 aa, unidentified
  source 1..342: note = protein_4fc88ab
  REGION 6..147: note = RuvC_domain
  SITE 9: note = RuvC_P1
  SITE 52: note = RuvC_P2
  SITE 87: note = RuvC_P3
  SITE 89: note = RuvC_P4
  SITE 92: note = RuvC_P5
  REGION 211..297: note = Tnp_domain
  SITE 219: note = Tnp_P1
  SITE 249: note = Tnp_P2
  SITE 257: note = Tnp_P3
  SITE 258: note = Tnp_P4
  SITE 270: note = Tnp_P5
MEISTIGIDLSKTTFHLIGLSPRGEIVLRKKLSRKQLLTYTATRTPMLIGMEACAGAPYLARALRDQGHDARLMPAQYVKPYVKTNKNDYLDAEAIAEAVQRPTMRFVPIKNDEQLDLQALHRVRDRWVARRTAVMNQIRGFLLERGIAIRKGPSYLVTQLQVIFTDGDSSFSGRLLHLIRELKQEWDELERKIEEASAELARIAKEDDGCHRLMEVPGFGPIVSTALVAAIGNGISFRKGRDLAAWLGLVPRQHSTGGKTRLLGISKLGNEYLRRMMLHGARSVVMQMERKPSALGEWLTSLSARRHRNVTVVALANKMARIAWAILSKGTHYCAPAFVAA

SEQ ID NO: 12070 - protein, 380 aa, unidentified
  source 1..380: note = protein_b09c146
  REGION 6..146: note = RuvC_domain
  SITE 43: note = RuvC_P2
  SITE 83: note = RuvC_P3
  SITE 85: note = RuvC_P4
  SITE 88: note = RuvC_P5
  REGION 253..338: note = Tnp_domain
  SITE 261: note = Tnp_P1
  SITE 291: note = Tnp_P2
  SITE 299: note = Tnp_P3
  SITE 300: note = Tnp_P4
  SITE 312: note = Tnp_P5
MPPPSIALGRRCSTKPLPNSEPQLRELFQRLRARHGTVLVVVDQPASIGALPLAVARDADCLVAYLPGLTMRRIADLYPGEAKTDARDAFIIADAARAMPHTLRTIDATDEKVAELAMIAGFDDDLAGEATRIANRLRGLLTQIHPSLERVLGPRIQHPAVLKLLDQFGSPAQIRKAGRGRLVTLIRPKAPRMAERLVEDTFTALDEQTVVVPGTAAAALIIPSLANSLQSVLDQRKLLAKRIEELLEAHPLSQVLISMPGIGVRTAAHILIDVGDGSGFATAGHLASYAGLAPVTRSSGSSIRGEHPSRRGNKQLKRAFYLAAFASLSQPESRAYYDRKRKEGKHHVAALVALARRRIDVLYAMLRDGTFYQPPTPATA

SEQ ID NO: 12071 - protein, 351 aa, unidentified
  source 1..351: note = protein_e4b0599
  REGION 13..155: note = RuvC_domain
  SITE 16: note = RuvC_P1
  SITE 59: note = RuvC_P2
  SITE 94: note = RuvC_P3
  SITE 96: note = RuvC_P4
  SITE 99: note = RuvC_P5
  REGION 218..302: note = Tnp_domain
  SITE 226: note = Tnp_P1
  SITE 256: note = Tnp_P2
  SITE 264: note = Tnp_P3
  SITE 265: note = Tnp_P4
  SITE 277: note = Tnp_P5
MTHQTASECVATIGIDLGKNTFHLIGMDARGRIVLRRKVSRGQLQSCLANLPVCLIGMEACAGAHHVGRQLAALGHDVRLLPAQYVKPFLKGHKNDYRDAEAIAEAVQRPTMRPVPLKSAEQLDLQALHRVRRRLIGQRTAVINQIRGFLLECGIAVRQGPAGLREALPALLAQRTDVLSPRMIHLIEDLAADWHGLDERIETLTRDITALARQDASCRRLMGIPGVGVITASAMVAAVGTGAAFAKGRDFAAWLGLVPKQISTGDRTILGGLSKRGNRYLRTLFVSGAQALLQRPRYWDGHGFGRWLQAAGARLHRNVLTAALANKLARIAWGVLYRGRDYEAEYATRTA

SEQ ID NO: 12072 - protein, 344 aa, unidentified
  source 1..344: note = protein_77551e9
  REGION 7..150: note = RuvC_domain
  SITE 10: note = RuvC_P1
  SITE 54: note = RuvC_P2
  SITE 89: note = RuvC_P3
  SITE 91: note = RuvC_P4
  SITE 94: note = RuvC_P5
  REGION 213..297: note = Tnp_domain
  SITE 221: note = Tnp_P1
  SITE 250: note = Tnp_P2
  SITE 258: note = Tnp_P3
  SITE 259: note = Tnp_P4
  SITE 271: note = Tnp_P5
MNTIRVVGVDIAKSVFQVCVWNVDGSVAWNKKISRSKLLDTIQQFEPGTLIAMEACVTSHFRGRTFAAMGYCARLIPTQHVKAFVRSQKNDANDALAICETAFRPGIHFVSVKTTEQQDIKALRNTRQLMVEQRTALANQLRSLLAEYGLITPVGSQCLQQHLPELIEDASNELTFTLRRLLYSLREDMQALNERVTGLDKEIAALSSQQTTYRHLLTISGVGPLIAAAFISEVDAGQFSSGRELSAWCGLVPRQHSSGGKQRLSSVTKNGNRSLRTLIIHGARSVMRCVKKRDDNLGLWLQRLEARRGFLKITVALANKLTRIIWRVLTDGVDFNMQKAVAMN

SEQ ID NO: 12073 - protein, 341 aa, unidentified
  source 1..341: note = protein_ed75d82
  REGION 7..149: note = RuvC_domain
  SITE 10: note = RuvC_P1
  SITE 53: note = RuvC_P2
  SITE 88: note = RuvC_P3
  SITE 90: note = RuvC_P4
  SITE 93: note = RuvC_P5
  REGION 209..296: note = Tnp_domain
  SITE 217: note = Tnp_P1
  SITE 247: note = Tnp_P2
  SITE 255: note = Tnp_P3
  SITE 256: note = Tnp_P4
  SITE 268: note = Tnp_P5
MQSVTLVGIDLGKHSFHLHGQDQLGRAVFRKKASRKQLVEFFATFHACTVVMEACAGAHFLARKLTSFGHQVKLVSPQFVRPFVKSNKNDFVDAEAICEAASRPSMRFVTPKTESQQTLAALHRMRESLIRDRTKTTNQIHGFLLEFGISLPVGHAVIARLPSVLAEHSLPARLISILERLHAHFNYLSEQIGEIDRELVRQLADDDLGQRLLSIPGVGPVTASVLAAEMGDGKQYACSRDFAASIGLVPRQYSTGGRANLLGISKRGDKNIRRLLVQCARAYMIRLERQSGRLAEWVRAMLARRHSNVVACALANKLARTAWALATRHTTFNAGANSMAS

SEQ ID NO: 12074 - protein, 404 aa, unidentified
  source 1..404: note = protein_0e2671c
  REGION 6..162: note = RuvC_domain
  SITE 9: note = RuvC_P1
  SITE 60: note = RuvC_P2
  SITE 100: note = RuvC_P3
  SITE 102: note = RuvC_P4
  SITE 105: note = RuvC_P5
  REGION 271..358: note = Tnp_domain
  SITE 279: note = Tnp_P1
  SITE 310: note = Tnp_P2
  SITE 318: note = Tnp_P3
  SITE 319: note = Tnp_P4
  SITE 331: note = Tnp_P5
MPELWAGTDAGKAEHHCTAIDADGTKVLSRRVPNSEDELLQLLGDVLNLADGDPVTWAVDLNAGGAALWITLLVNHGQRLFYIPGRTVHHASGSYRGSGKTDAKDAFVIADQARMRRDLQPLQETSEIAVDLKILTARRLDLSADRTRAINRLRAQMLEYFPALERAFDYSTSKAALILLTGYRTPAALRRIGRARLATWLKNHGVRTVNVAKSAADAAVTAAEAQFTVVPGEKTAATMVHTLAREVIALDQEIAELEVLIEGRFREHPDAEVITSMPGVGDMLGAEFIAATGGDMSAFGSSDRLAGVAGLAPVPRDSGRVSGNLRRPSRYSRRLLRMFYLSAQVAALHCPQSKTFYQRKRAEGKSHKQAVLALARRRLNVLWALIRDHRTFEAVTPSHAVTAA

SEQ ID NO: 12075 - protein, 405 aa, unidentified
  source 1..405: note = protein_1964f65
  REGION 14..168: note = RuvC_domain
  SITE 17: note = RuvC_P1
  SITE 65: note = RuvC_P2
  SITE 105: note = RuvC_P3
  SITE 107: note = RuvC_P4
  SITE 110: note = RuvC_P5
  REGION 275..359: note = Tnp_domain
  SITE 283: note = Tnp_P1
  SITE 312: note = Tnp_P2
  SITE 320: note = Tnp_P3
  SITE 321: note = Tnp_P4
  SITE 333: note = Tnp_P5
MTDVQDHDSIQVFIGVDVGKGAHHAVALTRTGKRVFDSTLPNDEARLRALIAGLRKHGPALLVVDQPATIGALPIAVARDEGIAVAYLPGLAMRRIADLHAGEAKTDARDAAIIADAARCMPHTLRSLKLADEQVAELTMLCGFDDDLVAQMTQTSNRLRGLLTQIHPALERVLGPRIDHPAVLDLLERYPSPERLAALTERQLAKRLLKLAPRMGNSLAAEIVQALSEQTVVVQGTKAVAVVLPSLARQLLTLRRQRDGVAEEVERLVQAHPLFAVLMSMPGVGVRTAARLLTEVTCRAFASAAHLAAYAGLAPVTRRSGSSIRGECPSRRGNKVLKRTLFLSAFAALHDPVSRAYYDRKIQQGKRHNQALIALARRRCDVLFAMLRDGAFYCPPTGSPVLTTT

SEQ ID NO: 12076 - protein, 346 aa, unidentified
  source 1..346: note = protein_1fd2090
  REGION 6..147: note = RuvC_domain
  SITE 9: note = RuvC_P1
  SITE 52: note = RuvC_P2
  SITE 87: note = RuvC_P3
  SITE 89: note = RuvC_P4
  SITE 92: note = RuvC_P5
  REGION 212..294: note = Tnp_domain
  SITE 220: note = Tnp_P1
  SITE 250: note = Tnp_P2
  SITE 258: note = Tnp_P3
  SITE 259: note = Tnp_P4
  SITE 271: note = Tnp_P5
MDIVIVGIDLGKNSCSVVGMDAAGRVVLRRRLRRGTLESFVGELGSCIVAMEACCGAHHLGRIFAARGHEVRLMSPEYVRPYVKAQKNDDLDAEAIAEAATRPTMRFVPVKSQDQSDLQALHRARERLVSERTALINHLRALLLERGIVVPQGRRKLEAELETLAEDGGFAALSPRIRTLIEDLRAEWRSLDQRITGFDAEFVQLARDDVAVRRLTKIPGMGTINATALAAAVGEAQAFKRGRDMAAWLGLVPRQMTTGGKPRLLGISKRGNRYLRKNLIHGARAALPYLVERDTPLGRWARGLLDRAHKNVVVVALAAKLARIAWAVLAHGCDYDAQFEAAAAAA

SEQ ID NO: 12077 - protein, 340 aa, unidentified
  source 1..340: note = protein_ecfb0c6
  REGION 6..148: note = RuvC_domain
  SITE 9: note = RuvC_P1
  SITE 52: note = RuvC_P2
  SITE 87: note = RuvC_P3
  SITE 89: note = RuvC_P4
  SITE 92: note = RuvC_P5
  REGION 211..297: note = Tnp_domain
  SITE 219: note = Tnp_P1
  SITE 249: note = Tnp_P2
  SITE 257: note = Tnp_P3
  SITE 258: note = Tnp_P4
  SITE 270: note = Tnp_P5
MTITTIGIDIAKSVFQLHGVDEAGTVVLRKKLRRSAVLEALRDLEPCLVGMEACATAHYWAREISALGHEVKLMPPVYVKPYVKRQKNDMADAEAICEAVTRPTMRFVPIKSADRQGVLVLHRTRDLLMRQRTMLLNAVRGHLAEFGIIAPQGPRKVMEMITNLRDTEAPGLPEIARSVVLSLGLQLDALVSEIHALERQLLAWHRQDTASQRLETIPGVGIITATALAASVPDPSVFRSGRQFAAFLGLTPRQNSSGGKDRLGRISKMGDGYLRRLLVVGATSVIRRAETNPSATGVWVRSLLTRKPVRVTTVAMANKTARIAWAVLARGETYRAPAMA

SEQ ID NO: 12078 - protein, 386 aa, unidentified
  source 1..386: note = protein_d094603
  REGION 4..159: note = RuvC_domain
  SITE 7: note = RuvC_P1
  SITE 58: note = RuvC_P2
  SITE 98: note = RuvC_P3
  SITE 100: note = RuvC_P4
  SITE 103: note = RuvC_P5
  REGION 262..349: note = Tnp_domain
  SITE 270: note = Tnp_P1
  SITE 300: note = Tnp_P2
  SITE 308: note = Tnp_P3
  SITE 309: note = Tnp_P4
  SITE 322: note = Tnp_P5
MIYVGIDIANLNHFASIISSDGEVLVEPFKFSNDSGGFRLLLSKLDQFESDSLVIGLESTAHYGNNLVEFLVSRHFHVCVINPIQTSAMRKNNIRKTKTDRVDTLLIAKPLMVQLYRFYDKQDIDLMHLKNLGRFRQVLMKQRTSAKIKLTSFLDQAFPELQYFFNGIHHKSVYSLLKEAPSPEKIASMHMTHLAHLLETTSHGRFKKDKAQTLRILAQKSVGSSDSSISIQITQTIEQVELLDSQIHDVEAQITTIVKSLGSVILTIPGISCIEAGMILGEIGDIHRFSSPSKLLAFAGLDPSVYQSGNFNASHTRMSKRGSSVLRYALVYAAHNIVRNNDVFRSFYDAKRSQGKNHYNALGHCAGKLVRVIFKMLTDNVAFCLS

SEQ ID NO: 12079 - protein, 337 aa, unidentified
  source 1..337: note = protein_f914ea2
  REGION 6..148: note = RuvC_domain
  SITE 9: note = RuvC_P1
  SITE 52: note = RuvC_P2
  SITE 87: note = RuvC_P3
  SITE 89: note = RuvC_P4
  SITE 92: note = RuvC_P5
  REGION 211..300: note = Tnp_domain
  SITE 219: note = Tnp_P1
  SITE 249: note = Tnp_P2
  SITE 257: note = Tnp_P3
  SITE 258: note = Tnp_P4
  SITE 270: note = Tnp_P5
MKLTVIGMDIAKHVFQLHAINPVSGETERVKLKRGQLLDFFAKREPSLVAMEACGGAHHWARQLQGLGHDVRLICARSVRPFVLRNKTDATDARAIWTAVQQPDARFVAIKSEAQQAILALHRLRAQLMKFRIMQTNALRGLLHEFGQTLPEGYQALAKAIPDALAVAAEHLPAILVDSLREQWARVQATDKDIAILEHRLKIALRENQQCQRIAEIPGVGLLTATAAVAAIGDPGTFRSGREFAAWLGLVPRQVGTGGKVRQLGLSKRGDTYLRTLLIHGARAVITRGIRSPWLDSLLQRRPFNVVVAAMANKLARTIWAVLYRGTRYHGATTKAA

SEQ ID NO: 12080 - protein, 293 aa, unidentified
  source 1..293: note = protein_2f8ff12
  REGION 7..59: note = RuvC_domain
  REGION 166..251: note = Tnp_domain
  SITE 174: note = Tnp_P1
  SITE 204: note = Tnp_P2
  SITE 212: note = Tnp_P3
  SITE 213: note = Tnp_P4
  SITE 225: note = Tnp_P5
MAASRRTAARTMPHTLRTLDLADEVTAELAMLAGFDQDLAGEANRTSNRIRGLLTQFHPSLERVLGPRLDHPAVTWLLERYGSPQALRKAGRRKLVEVVRPRAPRMAERLVDDIFTALDEQTVVVPGTSTLDVIVPSLAKSLASVHEQRRALETRIEALLEAHPLSQVLTSMPGIGVRTAAVLLATVGDGSSFPTAAHLASYAGLAPATRQSGTSIHGEHAPRGGNRQLKRAMFLSAFAALHDPASRTYYDRCRARGKTHTQALLRLARHRISVLFAMLRDGTFYQPRSPRLA

SEQ ID NO: 12081 - protein, 385 aa, unidentified
  source 1..385: note = protein_16a2bef
  REGION 38..184: note = RuvC_domain
  SITE 79: note = RuvC_P2
  SITE 118: note = RuvC_P3
  SITE 120: note = RuvC_P4
  SITE 123: note = RuvC_P5
  REGION 255..342: note = Tnp_domain
  SITE 263: note = Tnp_P1
  SITE 292: note = Tnp_P2
  SITE 300: note = Tnp_P3
  SITE 301: note = Tnp_P4
  SITE 313: note = Tnp_P5
MQKLNDLSRSLTPLNPDGTLIAVIEMSQSSWLVAGIVPGIERHPLKKLEPNEGELLRLLMRWRAEATKMGCTITRIAVAYEAGRDGFWLARWLRARDIETYVIHPTSVAVSREHRRAKTDRLDTGLLKRVFIGWLRGEPDHCHMAAIPTLAEEDAKRPNREREGIVRERTRIVNRMKSCLARFGVRNFKPTLRKAPERLATLVTPEGVPLPPNTLLELRRDMARLRFVMDQIKEVEEARAQRLEQAPQEKTHAMVRLLARVIGVGIETADMLVHEILSRSLRDRRAVARYAGLTGAPDESGSKRQEKGLAKAGNARVRRGMIQLAWRFLLFQKDSALAQWYRTRTERGGKKRKTMIVALARKLLIALWRLVTTGEVPAGVVLRAA

SEQ ID NO: 12082 - protein, 275 aa, unidentified
  source 1..275: note = protein_b231f9c
  REGION 2..77: note = RuvC_domain
  SITE 17: note = RuvC_P3
  SITE 19: note = RuvC_P4
  SITE 22: note = RuvC_P5
  REGION 141..228: note = Tnp_domain
  SITE 149: note = Tnp_P1
  SITE 179: note = Tnp_P2
  SITE 187: note = Tnp_P3
  SITE 188: note = Tnp_P4
  SITE 200: note = Tnp_P5
MRLIPVQYVKPYVKTNKSGYIDAEAIAEAVGRPKMRFVPIKSDDQLDLQSLHRVGERWVMRRTAVINQIRGLLLERGITLRKGRCYFDAALPGILEDASAKLSGAVRLLLAQLRPELDHLQMRIDEADAAIQKIAGENEACRRLVAIPGIGPVTATAIIAAIGNGAAFKKGRGFSAWLGIVPGEYSTGGKQKLLGISKRGNSYLRRLFVQGARAVLQQSTKQSSGLSAWLAQLTSRTHRNVAAVALANKLARMAWAVLAKNELYRPPMLVGAAKA

SEQ ID NO: 12083 - protein, 330 aa, unidentified
  source 1..330: note = protein_f77f0de
  REGION 7..156: note = RuvC_domain
  SITE 10: note = RuvC_P1
  SITE 58: note = RuvC_P2
  SITE 99: note = RuvC_P3
  SITE 101: note = RuvC_P4
  SITE 104: note = RuvC_P5
  REGION 200..287: note = Tnp_domain
  SITE 208: note = Tnp_P1
  SITE 238: note = Tnp_P2
  SITE 246: note = Tnp_P3
  SITE 247: note = Tnp_P4
  SITE 260: note = Tnp_P5
MRKETEAGIDVSKDVLDVAVRRDRQRLETARFANDPAGHQALARWLTKRGRAVRVVLESTGTYSLDVALALHRVRGMAVMVANPRAVKQFAGALMQRSKTDLTAAAALREYAARMPFVVWQPPAAEVLALRGIARRIAALVVERTRERNRLHAVQATAERLAVVVNDIEVNIRHLERRIELLTADAVTLIREHADLHRAFERLTSVPGIATHSAVQLLPELLVLPDDMTVRQWVAHAGLDPRACQSGTSVDKPARISKVGNAHIRRALFMPALVAVQHEPHVKAFFDQLVGRGKKPLQAYVAVMRKLLHAIYGMFATRTTFVAEKFYAVS

SEQ ID NO: 12084 - protein, 412 aa, unidentified
  source 1..412: note = protein_91d374c
  REGION 14..166: note = RuvC_domain
  SITE 17: note = RuvC_P1
  SITE 65: note = RuvC_P2
  SITE 103: note = RuvC_P3
  SITE 105: note = RuvC_P4
  SITE 108: note = RuvC_P5
  REGION 273..359: note = Tnp_domain
  SITE 281: note = Tnp_P1
  SITE 312: note = Tnp_P2
  SITE 320: note = Tnp_P3
  SITE 321: note = Tnp_P4
  SITE 332: note = Tnp_P5
MSVLHDPPRPRPTAGIDWASDNHAVAVVNSDGAQLDRFNVAHTATGLGQLCRRLKRAGVTEVAIERSDGPIIDALLDTGFTVFVIPPIQVKNLRSRYGSAGNKDDRFDAYVLADTARTDRRRLRPLTPDNPATVTLRATCRARKDLVGHRVALANQLRAHLQIAFPAAVGLFADIDSKITLAFLRRFPGQDRADWLSPKRLAAWLASVGYCGRTDPSVLHARLTSAPRGLTGPDGEARVQITLALIAALEAIRTQIAALEDQIEEQLALHPDADIFTSLPRSGQIRAARLLAEIGDARGRFPTPESLVCLAGVAPSTRQTGKIKIVSFRWAANKQLRDAICDFAGDSRHASPWAAQLYNRARARGHDHPHAVRILARAWLHVIWKCWQTNTPYHPARHGAAQALNRDQHATA

SEQ ID NO: 12085 - protein, 367 aa, unidentified
  source 1..367: note = protein_092e34c
  REGION 22..166: note = RuvC_domain
  SITE 25: note = RuvC_P1
  SITE 70: note = RuvC_P2
  SITE 105: note = RuvC_P3
  SITE 107: note = RuvC_P4
  SITE 110: note = RuvC_P5
  REGION 229..320: note = Tnp_domain
  SITE 237: note = Tnp_P1
  SITE 267: note = Tnp_P2
  SITE 275: note = Tnp_P3
  SITE 276: note = Tnp_P4
  SITE 288: note = Tnp_P5
MSKNTSKKSSLSATDLSACTTVAVDQAKNVFQVAGEDPLGHVVYEKRIKSREAFVTFLGQLPPGITVLMETGPGAQSWARILQNQGNVPRILPAQHVADHSSGPKNDRNDALAILRAGRDIRIHAVPVKTEAGLAMQALHRVRQRYVKQHTAIGNQIRGLLLEHGFSIAQGKVAISRRVTELLADSSQPIPPLLHELIAEVLGEWLSMEERIEVITRRLERTAREDQTTKRLMTIRGVGPILSTAMMAKQTEPERFKSARDFAAYFGTVPEQKSSGNKTRLGKMAKRGDAYIRSLAIQGAHAVFRQLNPNSDHPDDRRLQRWLGRQGLKGAAVRLANRNLRIIWVLLQNEDTYRRQPDRVQEAATGL

SEQ ID NO: 12086 - protein, 396 aa, unidentified
  source 1..396: note = protein_ffa3984
  REGION 9..166: note = RuvC_domain
  SITE 12: note = RuvC_P1
  SITE 68: note = RuvC_P2
  SITE 106: note = RuvC_P3
  SITE 108: note = RuvC_P4
  SITE 111: note = RuvC_P5
  REGION 209..296: note = Tnp_domain
  SITE 217: note = Tnp_P1
  SITE 247: note = Tnp_P2
  SITE 255: note = Tnp_P3
  SITE 256: note = Tnp_P4
  SITE 269: note = Tnp_P5
MRNDVTIYVGIDFSKEKFNACLLMEQGVMGESEFPNSKTGYLKLTKWVKNTSELGRSFASSLVLFCGEHTGTCSIGLCEYLYAKGMKIWLESALKIKYGSGLKRIKDDKADAEMIAYYAKRFYEPGSCALFEPDSADLKTLRTLYQFRNRVVCDRVAIGNRISSGAFDCSTLVRNRMVKHHKEAQKDEKDIEKEMVKLMETSEELASNYQILISFKGIGPITAAALIIYTSNFKKFDNPRKFACYCGIAPFGKQSGTSINTKPHVSRFAHIGIKAAIVQACKSAMQHNAVIKAYAQRLYAKGKHEGIVMNNVKNKVMHIIFKMIQTQTLWEQEYQQKHMKECKAIPGKNGIGATEAAPIINATLKTSSSVVECTFLEEHSFQKNSKKTSSFSCVET

SEQ ID NO: 12087 - protein, 348 aa, unidentified
  source 1..348: note = protein_a46cd97
  REGION 9..151: note = RuvC_domain
  SITE 12: note = RuvC_P1
  SITE 55: note = RuvC_P2
  SITE 90: note = RuvC_P3
  SITE 92: note = RuvC_P4
  SITE 95: note = RuvC_P5
  REGION 214..304: note = Tnp_domain
  SITE 222: note = Tnp_P1
  SITE 252: note = Tnp_P2
  SITE 260: note = Tnp_P3
  SITE 261: note = Tnp_P4
  SITE 273: note = Tnp_P5
MNATPKSVVGVDTAKSVFQLYTVDKETGEVINQQIKRAQFLRWFANRPPCLVGMEACGGSQHWARKLQGLGHEVKLMSGKIVKAFVCGNKNDAADARAIYMATQQPEVKAVAIKTEAQQAVLAMHRIRQQLVKMRTAQINSLRGLLAEYGEVFGTGRKAFDAGMKVALERLAERLPMPLIDTLRDQWNELARLDERMARIEASLLAWMRQDRAATAISAIPGVGLLTATAAVAAMGDAKAFRSGREFAAWIGLIPSQTGSGGKVRLLGMSKRGDTYLRTLLMHGARAVLRRPRMLSPWLQQLSQRRPLNVVIAALANKMARTIWAVLAHDRAYDKDHVSMRPATATAT

SEQ ID NO: 12088 - protein, 407 aa, unidentified
  source 1..407: note = protein_dd47c95
  REGION 4..161: note = RuvC_domain
  SITE 7: note = RuvC_P1
  SITE 57: note = RuvC_P2
  SITE 98: note = RuvC_P3
  SITE 100: note = RuvC_P4
  SITE 103: note = RuvC_P5
  REGION 276..363: note = Tnp_domain
  SITE 284: note = Tnp_P1
  SITE 314: note = Tnp_P2
  SITE 322: note = Tnp_P3
  SITE 323: note = Tnp_P4
  SITE 336: note = Tnp_P5
MISVGIDISKEKITVCALEQGSKIIWKPFDVSLNKTEIEKLIEKLEKLKEEIKITMEATGKYHLPILYELKDRGYFVTVINPLKMKQFCRALNFRKAKNDKIDAKQIAEYGLMYWKELEEYKIDKENYRVLKELNRNYQHYMNLRINQMNYIDQTIHQTFPGIKKLIPHNSGDFSKDKLLDFLEKWWHKDLIIENTEEEFVEEYKTWAKEKRYHPNVNKAKAIYKIAEDSISTQPSHNSKIETNIREGINLIKQINQILKNILSQMIEISEPLEEYQEAKKFSGISEKLAVQIVAELGDLRKFKNKKSLISFIGIDAPPYESGNFKADQRKISKRGNAILRKVGYQAMKCMMSSKNPENEIYNYMIKKEKEGKAKKVCKFAGLNKFLRIYYARVMESKAQKQELKVA

SEQ ID NO: 12089 - protein, 341 aa, unidentified
  source 1..341: note = protein_ce9006e
  REGION 6..147: note = RuvC_domain
  SITE 9: note = RuvC_P1
  SITE 52: note = RuvC_P2
  SITE 87: note = RuvC_P3
  SITE 89: note = RuvC_P4
  SITE 92: note = RuvC_P5
  REGION 211..298: note = Tnp_domain
  SITE 219: note = Tnp_P1
  SITE 249: note = Tnp_P2
  SITE 257: note = Tnp_P3
  SITE 258: note = Tnp_P4
  SITE 270: note = Tnp_P5
MSIFVLGIDLGKNVCSLVGLNEAGAVVLRRRLRRDGVADFVCKMPPCIVAMEACCGAHHVGRVLGAMGHTIRLMSPEYVRPYVKANKNDDRDAEAIAEAATRPTMRFVPVKSEAQSDIQALHRARARLVAERTALINHLRALLLERGIVVAQGRRKLEDTLATFADEEDTRLSPRMRLLIGDLRAEWRGLDERIAAFDAEFVHMAREDASARRLATIPGIGIINATALTAAVGDAQNFGRGRDLAAWLGLTPRQATTGGKPRLLGISKRGNRYLRTNLIHGARAALPHIAAQDTPLGRWVRSLSQRVHKNIVVVALAAKLARIAWAVLRKDRGFEPAMAAA

SEQ ID NO: 12090 - protein, 416 aa, unidentified
  source 1..416: note = protein_a9a24d6
  REGION 18..169: note = RuvC_domain
  SITE 20: note = RuvC_P1
  SITE 68: note = RuvC_P2
  SITE 106: note = RuvC_P3
  SITE 108: note = RuvC_P4
  SITE 111: note = RuvC_P5
  REGION 276..362: note = Tnp_domain
  SITE 284: note = Tnp_P1
  SITE 315: note = Tnp_P2
  SITE 323: note = Tnp_P3
  SITE 324: note = Tnp_P4
  SITE 335: note = Tnp_P5
MSVTETAPSVDPHRPTGGVDWAKDDHAVCVLAPDGEQLQRFSVTHDRTGLRTMVGRLSKAGVVEVGIERPDGPVVDALRQAGLVVFVIPPGQLKNLRSRYGSAGNKDDRFDAYVLADTVRTDRRRLRPLLVDTPTTTALRQSVRARRDLVAHRVAVANQLRAHLQICLPAVIGLFSDIDSQISLRFLERFTTQTQIDWLTPRRLASWLASVGYCGRMDPTVLHTRLTSAPRGHTGPEADTAAAVTAAYVTVLRTLTTQIAELAARISEQLDLHPDAQIFTSLPRAGRVRAARMLAEIGDARGRFPTPDSLACLAGVAPSTRQSGKARAVSFRWGADKQLRDAICDFAGDSIKTNPWAADLYQRARTRGHDHPHAVRVLARAWIGVIWACWHSHTPYDPDRHHALQRVLNQDQPAAA

SEQ ID NO: 12091 - protein, 400 aa, unidentified
  source 1..400: note = protein_64366da
  REGION 9..163: note = RuvC_domain
  SITE 12: note = RuvC_P1
  SITE 61: note = RuvC_P2
  SITE 101: note = RuvC_P3
  SITE 103: note = RuvC_P4
  SITE 106: note = RuvC_P5
  REGION 269..355: note = Tnp_domain
  SITE 277: note = Tnp_P1
  SITE 307: note = Tnp_P2
  SITE 315: note = Tnp_P3
  SITE 316: note = Tnp_P4
  SITE 328: note = Tnp_P5
MAGRDRAWIGVDIGKTHHWVCAVDANGQRWLSLKVLNDEAQILEVITAVGEATADRVWAIDILGTPSALLVALLARAGEQVRYASGRIVAAMGTAYTGEGKTDAKDAYVIAETARIRTDLADVDTDTDLVRTLGVLTGHRSDLVADRVRMINRLRDLLTSVFPALEREFDFASCKGALVLLTGYATPAAIRRMGEARLSRWLRQRRVRGYADVAARAVAAAHSQHTVLAGQDVTASIVAELAGSILSQHERLKLLDQQIQDAFAQHPQAKAIESMPGFGPVLGASLLVAAGDLAAFPTAGHLAAAAGLVPVPNDSGRRAGNLHKPRRYSRPLRHALYLSAQTSMMRAGPNRDYYLKKRDQGRTHSQAVIALARRRIDVLWALLRDNRTWTATPPTKAQAA

SEQ ID NO: 12092 - protein, 369 aa, unidentified
  source 1..369: note = protein_38ebcde
  REGION 34..175: note = RuvC_domain
  SITE 37: note = RuvC_P1
  SITE 80: note = RuvC_P2
  SITE 115: note = RuvC_P3
  SITE 117: note = RuvC_P4
  SITE 120: note = RuvC_P5
  REGION 238..323: note = Tnp_domain
  SITE 246: note = Tnp_P1
  SITE 276: note = Tnp_P2
  SITE 284: note = Tnp_P3
  SITE 285: note = Tnp_P4
  SITE 297: note = Tnp_P5
MEWMPPPDGIKCAIVMFANVTAEEKASMDEVSIVGLDLAKRVFQAHGASPNGDAIFRKKLSRSQVLPFLAKQPKCIVAMEACASAHFWGRAIRELGHEVRLIPPIYVKPFVKRQKNDAADAEAIAEAAVRPNMRFVEVKSESQQAGAMVFRTRDLLVRQRTQLINALRGHFAEHGVVAPQGMTNVRILEAAIEEVKKSIDLLIVETARLYLAQIASLSEQIATLEKVLQKTATKAANSARLLTVPGIGHITAMAIEAFAPPMETFRRGRDFAAWLGLVPVQRSTGGKQVLGRTSKMGQRDIRRLLITGAMTIVRWASRKTPPKGSWLAGMLERKPRMLVAIALANKMARSVWAMLTKGEDYRDPVAVAV

SEQ ID NO: 12093 - protein, 319 aa, unidentified
  source 1..319: note = protein_b554190
  REGION 9..150: note = RuvC_domain
  SITE 12: note = RuvC_P1
  SITE 56: note = RuvC_P2
  SITE 96: note = RuvC_P3
  SITE 98: note = RuvC_P4
  SITE 101: note = RuvC_P5
  REGION 192..277: note = Tnp_domain
  SITE 200: note = Tnp_P1
  SITE 229: note = Tnp_P2
  SITE 237: note = Tnp_P3
  SITE 238: note = Tnp_P4
  SITE 249: note = Tnp_P5
MTQSDLVVVGIDVAKDKIDACIRSVTERKTCPATAPGRRSLIAWLRKHRVGKAVMEASGGYERVWTKALRQAGLEVRIVDPKRVRHFAESAGRLAKNDKIDAEMIAWFAETFSEAPSQVDDPAQEEMKALVKGRQSLIDVRARLEMQKEHEAPALVRKARARLLKKLAEEIAVVETAIAATIEATPDFARRAEIIQSVPGFAEGTAMALLGGVPELGQVSDEIAAALVGVAPYDDDSGKRRGERCIKGGRRWVRNALYMPCVGAATLNNPVFKAFYERLIAKGKPPKVALVACMRKLIIILNTMIARDEKWDPKRYKVA

SEQ ID NO: 12094 - protein, 300 aa, unidentified
  source 1..300: note = protein_9968492
  REGION 3..110: note = RuvC_domain
  SITE 14: note = RuvC_P2
  SITE 49: note = RuvC_P3
  SITE 51: note = RuvC_P4
  SITE 54: note = RuvC_P5
  REGION 173..260: note = Tnp_domain
  SITE 181: note = Tnp_P1
  SITE 211: note = Tnp_P2
  SITE 219: note = Tnp_P3
  SITE 220: note = Tnp_P4
  SITE 232: note = Tnp_P5
MYFAHLKPCLVAMEACGGAHYWAREIRALGHEVKLIAPQYVKPYVKGNKNDYNDAEAIAEAAQRPNMRFVPLKSVEQQDIQNFHRQRERLKKERTALVNQARGLLAEYGVVIPKGVAALRRELPLILEDAENGLSGLSRELFAELLEDLRGLEERFTHCERRIKSMNQGNALCRRLDGILGIGPITASATYAAIGDGKEFNNGRHYSAWLGLVPGQHSTGGKAVLLGISKRGNTYLRQLYIHGARSVLLHSATKQDRFSRWAQSVLARRGHNKACVAVANKLARMAWAVMVKGQAYRLAV

SEQ ID NO: 12095 - protein, 409 aa, unidentified
  source 1..409: note = protein_9d0c679
  REGION 11..166: note = RuvC_domain
  SITE 14: note = RuvC_P1
  SITE 63: note = RuvC_P2
  SITE 103: note = RuvC_P3
  SITE 105: note = RuvC_P4
  SITE 108: note = RuvC_P5
  REGION 274..360: note = Tnp_domain
  SITE 282: note = Tnp_P1
  SITE 313: note = Tnp_P2
  SITE 321: note = Tnp_P3
  SITE 322: note = Tnp_P4
MTEETPDVVYVGLDWAAVVHAVCVMSAAGKVLAQFTIEHTADGIASLVRRLAKYGNPEVVQIGIERPNGRLVDLLLEAGHPVIPVSPNAIKTWREGEVISGAKSDAGDAMVIAEYLRLRHHRLHPVQPYSSETKALRTVVRTRDDIVEMRVAATNQLSALLDDFWPGAKAIFADVESPISLAFLRRYPTAVTAAHLGEKRLAAFLTKHGYSGRRPASELLSRLRGAPTGTTDPVLAEALHDAVLALVTVLEALNSAGKNLDRSVVAHLGEHPDAAIFTSLPRSGQINAAQVLAEWGDSRAAYDGPDAVAALAGVTPVTKASGKQRAVHFRWACNKRFRKALTTFADNSRHESPWAAHIYTQARARGHDHPHAIRILARAWTRVIYRCWHTEQPYDANLHGGAQRLPIAA

SEQ ID NO: 12096 - protein, 371 aa, unidentified
  source 1..371: note = protein_03a84fb
  REGION 41..185: note = RuvC_domain
  SITE 83: note = RuvC_P2
  SITE 121: note = RuvC_P3
  SITE 123: note = RuvC_P4
  SITE 126: note = RuvC_P5
  REGION 255..340: note = Tnp_domain
  SITE 263: note = Tnp_P1
  SITE 292: note = Tnp_P2
  SITE 300: note = Tnp_P3
  SITE 301: note = Tnp_P4
  SITE 313: note = Tnp_P5
MRVVADQSAAPAAIRTDLGAIFVSLELSKSTWLITSLSPGSGEKMSKHAVRGGDITGLLACFAQLQDKAQARTGRHFALVVIQEAGLDGFWIHRTLEVEGIESHVVDAASIATSRRRRRAKTDKIDGEALVRALLAYKRGEPRVCAMVRVPSVKEEDHRRIGRERKVLVSERTCHVNRIKGLLFAQGITGYEPLRRDRRHRLEELQTGDGRALPEHLKEQIRRELDRLELVIAQIKEVQAERDALLAIDVAETPTATLLDLKGIGPECAAILYTEGLFRHFDNRRQVAAYAGLAPTPWQSGSVQHEQGVSKAGNPRLRTTMIELAWLWLRNQPGSSLTRWFHERVMRNQGRLKRQPSSPLQGSCSWRCGNT

SEQ ID NO: 12097 - protein, 414 aa, unidentified
  source 1..414: note = protein_5f9d38c
  REGION 6..172: note = RuvC_domain
  SITE 9: note = RuvC_P1
  SITE 69: note = RuvC_P2
  SITE 109: note = RuvC_P3
  SITE 111: note = RuvC_P4
  SITE 114: note = RuvC_P5
  REGION 281..366: note = Tnp_domain
  SITE 288: note = Tnp_P1
  SITE 319: note = Tnp_P2
  SITE 327: note = Tnp_P3
  SITE 328: note = Tnp_P4
MRVLFVGDDWAEEHHDVEVIDQAGQVLARARLQEGVAGMSRLHALIGQFTADLVDDATGEPVEPVVMVGIETDRGPWVQALIAAGYRVYPINPLQVARYRQRFVVSGAKSDPQDAHVLADMVRTDAHQLRPAAGDSDVAEAVKVVSRAHKNLIWERTRHTQRLRNALREFFPAALQAYPDLDAPDALELLAKAPDPRSAARLTCPQIEAALKRAHRRNRAAKAVEIQAALRSPQLGRTPLVTGAYATAVRAQVAILTVLVEQVTAMETAVTAHFGQHPDVDIYLSQPGMGSVLGARVLAEFGDDPHRYADARARKNYAGTSPITRQSGKKRLVMARYIHNDRLLDTVTRQAFCALQASPGARAYYDKQRARDVGHHAALRQLANRLTGILHGCLKTGTPYDENTAWNHTTHAAA

SEQ ID NO: 12098 - protein, 320 aa, unidentified
  source 1..320: note = protein_7362463
  REGION 8..157: note = RuvC_domain
  SITE 11: note = RuvC_P1
  SITE 56: note = RuvC_P2
  SITE 96: note = RuvC_P3
  SITE 98: note = RuvC_P4
  SITE 101: note = RuvC_P5
  REGION 195..279: note = Tnp_domain
  SITE 203: note = Tnp_P1
  SITE 232: note = Tnp_P2
  SITE 240: note = Tnp_P3
  SITE 241: note = Tnp_P4
  SITE 252: note = Tnp_P5
MSVLSVTVGIDVAKAHVDVFVLGTKSDAKRLNNDAEGHSALAASLLPLDVELVVMEATGGYEAALACALQAAGLPVAVVNPRQARDFAKSMGRLAKTDTVDARMLAELASVLVRREDLARFLRPLANEHQQWLAALVTRRRQLLSMLHSERQRLQITPKKLHASIETIVKAIKAQLDEIEGQMVGHVREHFGDLDRLLQSAAGIGPVASATMIAELPELGRLNRREIAALVGVAPIANDSGNKKGRRRVQGGRFEIRRVLYMATLTATRHNPAIKAFYERLKAAGKLPKVALVACMRKLLTTLNAMVRTGKPWDKSLHGT

SEQ ID NO: 12099 - protein, 386 aa, unidentified
  source 1..386: note = protein_2b79778
  REGION 4..159: note = RuvC_domain
  SITE 7: note = RuvC_P1
  SITE 58: note = RuvC_P2
  SITE 98: note = RuvC_P3
  SITE 100: note = RuvC_P4
  SITE 103: note = RuvC_P5
  REGION 262..349: note = Tnp_domain
  SITE 270: note = Tnp_P1
  SITE 300: note = Tnp_P2
  SITE 308: note = Tnp_P3
  SITE 309: note = Tnp_P4
  SITE 322: note = Tnp_P5
MIYVGIDIAKLNHFASAVSSDGEVMLQPFKFTNDYDGFHKLKSSLDSLDPDQLIIGLESTAHYGNNLVEFLVLSGYKVCVINPIQTSTLRKNNIRKTKTDKVDTLVIAKALMMNPTRLFTKYDISLLHLKELGRFRMKLIKKRTQAKIQLTSYIDQAFPEIQYFFNGVHHKSCYALLKEAPTAGMVASMHMTHLAHLLEVASHGHFKKDTAQEIRVLAQKSVGINDSSVALQITQTIELIELLDKQVTTVESDMESLVGSLDSVIMTIPGIGAINGGMILGEIGDISRFSNPSKVLAFAGLDPAVYQSGNFEARHTKMSKRGSRPLRFALVNAAHNVVKNNKTFNDYYAQKRSEGKSHYNALGHCAGKLVRVIYKMLTDNIAFDLK

SEQ ID NO: 12100 - protein, 403 aa, unidentified
  source 1..403: note = protein_c719036
  REGION 4..160: note = RuvC_domain
  SITE 7: note = RuvC_P1
  SITE 57: note = RuvC_P2
  SITE 97: note = RuvC_P3
  SITE 99: note = RuvC_P4
  SITE 102: note = RuvC_P5
  REGION 274..361: note = Tnp_domain
  SITE 282: note = Tnp_P1
  SITE 312: note = Tnp_P2
  SITE 320: note = Tnp_P3
  SITE 321: note = Tnp_P4
  SITE 334: note = Tnp_P5
MNAVGIDVSKGKSMVAALRPFGEIVAKPFEVPHTSSGFHQLVDQLNSLDGSTRIIMEHTGRYYEPMARWLSDSGFFVSTVNPKLIKDYGNNTLRKVKTDKADSVKIARYALDNWQDLRQYTSMDIIRNQLKTMNHQFSFYMKQKTSYKNNLISLLDQTYPGINDFFDSPARSDGSQKWVDFVSSFWHVDCVRSLGLATFTERYQKWCKRHGYNFQPEKPAQIYSFSKELISVFTKDSVTKFLVKQAVEQLNTVSFTVEQLRLEMNRLAAQLPEYQVVMAMKGVGPSLGPQLMAEIGDLSRFSHREALTAFAGVDPGVNQSGTYEARSVRTSKRGSPQLRKTLFQIMDVLIKSAPSDDAVYRFLDKKRLEGKPYYVYMTAGANKFLRIYYGRVKEYLAALPKPE

SEQ ID NO: 12101 - protein, 407 aa, unidentified
  source 1..407: note = protein_72ae286
  REGION 9..163: note = RuvC_domain
  SITE 12: note = RuvC_P1
  SITE 60: note = RuvC_P2
  SITE 100: note = RuvC_P3
  SITE 102: note = RuvC_P4
  SITE 105: note = RuvC_P5
  REGION 271..357: note = Tnp_domain
  SITE 279: note = Tnp_P1
  SITE 309: note = Tnp_P2
  SITE 317: note = Tnp_P3
  SITE 318: note = Tnp_P4
  SITE 330: note = Tnp_P5
MNSRYAVVIGLDVGKSGHHACALDPGGKKLFDKPLPQDEAQLRQVLSGLQKHGEVLMVVDQPNTIGALPIAVARDAGCTVAYLPGLAMRKAADLYPGRSKTDARDAFIIADTARTMPHTLRQVDRDSEVLSSLKVLAGFDEDLAHETTRALNRIRSLLTQIHPALERVFAGGRLSTALVLDLLEKFGGPTGLNTAGRGKVLRFARSHSRRDPEALIDQIFTALGEQTVTVPATAAVELVIPRVAGQVKELKEQRATVAREVEGMLEDFPLAGVLMSMPGIGIKTAAQILMAIGDGTTFETPGHLAAYAGIAPVTRRSGTSIRGEFPARSGNKRLKNALFYSAWVASHSDPVSKAYYDRKRAEGKRHNAAVICLARRRCNVIFAMLRNGTYYQPPATTPSQEPAALAA

SEQ ID NO: 12102 - protein, 285 aa, unidentified
  source 1..285: note = protein_e79a0d1
  REGION 2..117: note = RuvC_domain
  SITE 20: note = RuvC_P2
  SITE 60: note = RuvC_P3
  SITE 62: note = RuvC_P4
  SITE 65: note = RuvC_P5
  REGION 158..242: note = Tnp_domain
  SITE 166: note = Tnp_P1
  SITE 195: note = Tnp_P2
  SITE 203: note = Tnp_P3
  SITE 204: note = Tnp_P4
  SITE 215: note = Tnp_P5
MHCAQHCNRTRGTATLAVCEATGGHEDTLLGALLELAIPAHRADPAKVKAYIGSFGKRAKTDPIDARWLSHYGRDGAAVLPRWQPADPCQQQFALFVARRLDLVAMRVQEKNRMKAPRSRLIADNISARLAEPDRPIETLNAQIGTLIAESHNLALRAKALRSVPGIGPVLVSLLLAVMPELGSLNRRQAASLAGCAPHPKDSGKASWHRSTTGGRRQIRPALFIAALAACRGDNHLAIAYNALLNTAKPKRVALTAIMRKIITIANARIRDALNQQNETTEIHA

SEQ ID NO: 12103 - protein, 398 aa, unidentified
  source 1..398: note = protein_d1ad5d1
  REGION 10..164: note = RuvC_domain
  SITE 13: note = RuvC_P1
  SITE 61: note = RuvC_P2
  SITE 101: note = RuvC_P3
  SITE 103: note = RuvC_P4
  SITE 106: note = RuvC_P5
  REGION 271..356: note = Tnp_domain
  SITE 279: note = Tnp_P1
  SITE 309: note = Tnp_P2
  SITE 317: note = Tnp_P3
  SITE 318: note = Tnp_P4
  SITE 330: note = Tnp_P5
MGRREYAVFLGLDVGKEEHHACGVDPDGQRVHDKPLPQSEAKIRAVFEALSVRGSVLVVVDQPASIGALAVTVARELGIDVAYLPGLAMRRIADLHPGNAKTDARDAYIIAEAARSMPHTLRRVGTDDDALADLQVIVGYDDDLAGEVTRVSNRIRGLLTQIHPALERALGPNVQHPAVLELLTRFGGPQGLATATRRQLVAATKPRAPRSYAKLVDAIERALTEQTVTVPGTRAAELVVPQLATTLAGLLTQRADAARQIEEMLDAHPLSKVLTSVPGIGVRTGARILLEVGDGTAFPTSGHLAAYAGLAPVTRRSGTSIRGEHPSRGGNKQLKRAFFLAAFAALSDPTSRAYYDRKRAAGKKHNAALICLARRRIDVLHAMLRTRTLYKHPTPTAA

SEQ ID NO: 12104 - protein, 411 aa, unidentified
  source 1..411: note = protein_647184f
  REGION 24..182: note = RuvC_domain
  SITE 27: note = RuvC_P1
  SITE 81: note = RuvC_P2
  SITE 121: note = RuvC_P3
  SITE 123: note = RuvC_P4
  SITE 126: note = RuvC_P5
  REGION 286..375: note = Tnp_domain
  SITE 294: note = Tnp_P1
  SITE 324: note = Tnp_P2
  SITE 332: note = Tnp_P3
  SITE 333: note = Tnp_P4
  SITE 346: note = Tnp_P5
MGLEPSWKGRRNSKQGVRKLQPVVGVDVAKGSSVVQAFRTRNEPFGKAVDIVHEKSGFEQFSRILDGLQAETGLAPVIVLEATGHYHRALVSYLERSGYTYYIVNPLQSKRAKGTQLRKVKTDAVDAWHLAEMYYRGDVKPHRTWEETFTELQHLTRQHEFVTGIFVQAKLNSRALLEQVFPAYEGLFSNVFSATSLMVLARCLEGSTADWIEVIQGNTGRSRSRMWASEKNDKLKEMLGDWKEARHSQSQSQALLGMVKLLLTMIEQLDELEQQMEEVAAGLPEVELVKSIPGIGTKLAAAIVAEMGDIRQFSDAKQLVAFAGLDPGIFSSGKFTATNTRITKRGSKRLRRSLYLAVQCGIRKNANARIGSYYEKKRKEGKPYKVVVIACANKLLHHIFAILQKGLPYQV

SEQ ID NO: 12105 - protein, 363 aa, unidentified
  source 1..363: note = protein_7675cf7
  REGION 23..176: note = RuvC_domain
  SITE 26: note = RuvC_P1
  SITE 74: note = RuvC_P2
  SITE 115: note = RuvC_P3
  SITE 117: note = RuvC_P4
  SITE 120: note = RuvC_P5
  REGION 238..323: note = Tnp_domain
  SITE 246: note = Tnp_P1
  SITE 276: note = Tnp_P2
  SITE 284: note = Tnp_P3
  SITE 285: note = Tnp_P4
  SITE 296: note = Tnp_P5
MPEVRLPTAASHPASGRYLMITIGIDPHKSTLTAVAVQTDGAQLAQIRLPVTAGINEQLLHFAAGWPERRWAVEGATGLGLGVAQQLSSAGETVLDVPAKLAARARLLATGHGRKTDALDATSVAAVAQHSTTMQTVTAEDDTVPLRLISDHRDDLVNERTRALNRLHRLLRELIPGGAKRQLSTAQAAGLLRTVRPLTTADTYRKQLARDLLDNVRRLDTRINAFTDQLTVLVKHSQTGLTDIRGIGPVIAAKIIGHSGNVARFADRNHYASYNGTAPSDASSGEQNRHRLSRLGNRQLNAAIHVIAVCQSSRPCQGRDLYLRKLSENKTPNEARRTLKRRLSDVVYRQLVHDHQKRTSTAT

SEQ ID NO: 12106 - protein, 375 aa, unidentified
  source 1..375: note = protein_0c5b49d
  REGION 8..154: note = RuvC_domain
  SITE 11: note = RuvC_P1
  SITE 58: note = RuvC_P2
  SITE 95: note = RuvC_P3
  SITE 97: note = RuvC_P4
  SITE 100: note = RuvC_P5
  REGION 223..309: note = Tnp_domain
  SITE 231: note = Tnp_P1
  SITE 261: note = Tnp_P2
  SITE 269: note = Tnp_P3
  SITE 270: note = Tnp_P4
  SITE 282: note = Tnp_P5
MPTNLRYLGLDVHAETIAAAIAEPDGEVRALGILPNRPEAITKLIRKLEPRHGLHACYEAGPCGYVLYWQLTQLGVHCDVVAPTLVPTKPGDRIKTDRRDAARLARCYRAGDLTPVWVPDAAHEALRDLVRAREAAKQDQLRARHRLGKLLLRRGIRPPPAAKPWTQRHRRWLDTLQLDPPALQATLDDYLHEVDHAAARVERLEGALDNAIAAAPAPLRAVITALQTLRGVRQVTAATIVSEVGTLSRFTHPRQLMGYSGTVPSEHSSGASVHRGAITKTGNAHLRRVLVEAAWAYRFPPRCGKALRTRQRGQPDTITAIAWKAQHRLNTRYRRLLGRGKPTAQVVTAVARELVGFIWAIGVATERASTAAAAA

SEQ ID NO: 12107 - protein, 353 aa, unidentified
  source 1..353: note = protein_9d00fc4
  REGION 4..158: note = RuvC_domain
  SITE 7: note = RuvC_P1
  SITE 56: note = RuvC_P2
  SITE 97: note = RuvC_P3
  SITE 99: note = RuvC_P4
  SITE 102: note = RuvC_P5
  REGION 220..306: note = Tnp_domain
  SITE 228: note = Tnp_P1
  SITE 258: note = Tnp_P2
  SITE 266: note = Tnp_P3
  SITE 267: note = Tnp_P4
  SITE 278: note = Tnp_P5
MIVIGIDPHKSTHTATAVNPVTNTDLGSIRIDATLADYKKLIAWAKAWPTREWAVENAEGLGHHLAQWLLVLGEIVLDVPATATARVRQLSRGGRRKNDRIDAAAAACVAALQGDARPVAPEGPTDVLALLDERRTNMCNSRTRIVNQLHALLRQLLAGGAPTSLTATAATALLRGFRARSEVDRIRVGLCRDLIADIRRLDGQLAENEKQMTRALDAQGTGLREVDGIGPVTAARLIGRTGRVSRFPTAAAYANYNGSAPVQIASADTDRHRLSRYGDRQLNSALYTIAMVQIRMPASAGRAYYDKKIAEGKSPRAATRSLKRHLSDHVWRIMLADEKHSHRQHEKESDRAA

SEQ ID NO: 12108 - protein, 407 aa, unidentified
  source 1..407: note = protein_f5d4679
  REGION 4..163: note = RuvC_domain
  SITE 7: note = RuvC_P1
  SITE 60: note = RuvC_P2
  SITE 100: note = RuvC_P3
  SITE 102: note = RuvC_P4
  SITE 105: note = RuvC_P5
  REGION 271..357: note = Tnp_domain
  SITE 279: note = Tnp_P1
  SITE 310: note = Tnp_P2
  SITE 318: note = Tnp_P3
  SITE 319: note = Tnp_P4
MLFVGDDWAQDHHDVEVQDETGRRLAKGRLPEGVAGIARLHALIGRHLAEDAGPEQVVVGIETDRGPWVRALVAAGYQVIAVNPLQAARYRERYSTSGAKSDAGDAHSLADMVRTDRHQLRPVAGDSDTAEAVKIVARAHQNLIWDRTRQTQRLRSALLEFFPAALAAFDDLDTPDALELLAKAPSPAEAARLTVAQISAALRHARRRKIPERAAAIRAALRAEQLPVTPAATTAYAAVVRAQAGLLAALNGEIARLEEQVADHFDQHPDAKILLSQPGLGPVLAARVLAEFGDDPTRYADAKARKNYAGTSPITRASGKKKTVLARYARNNRLADALHQQALSALSASPGARSYYDAIRARGTSHHAALRQLGNRLVGILHGCLKTHTPYSEATAWTQKATLDVAA

SEQ ID NO: 12109 - protein, 378 aa, unidentified
  source 1..378: note = protein_35b0d9a
  REGION 38..191: note = RuvC_domain
  SITE 41: note = RuvC_P1
  SITE 89: note = RuvC_P2
  SITE 130: note = RuvC_P3
  SITE 132: note = RuvC_P4
  SITE 135: note = RuvC_P5
  REGION 253..338: note = Tnp_domain
  SITE 261: note = Tnp_P1
  SITE 291: note = Tnp_P2
  SITE 299: note = Tnp_P3
  SITE 300: note = Tnp_P4
  SITE 311: note = Tnp_P5
MRSALARCGSTEACAHLKSGCPSRLPHSGDERRAVITIGIDPHKTSVTAAALDPVGETVGHRRVACTAKTADQLIGWADAWPDRRWAVEGASGLGRGVAQQLIAAGEQVIDVPAKLAARARLLGSGSSRKSDLVDAVSVGSVALYNSKLRTVEREDEAVVLRLLSDRRDDLVSERTRTVNRLHVLLRDLVPGGARRDLSTLQAGRFLSGIRPLTTVDIERKRIARALLEDLRRADRQLRAISTTIETAVAASNSSLTEVFGIGPVLAAKIAGHTGDITRFASKAHFASYSGTAPIEASSGDLRRHRLNRRGNRQLNTALHTAAVCQIRSPGPGQDHYRRKLAELKTTKEAQRSLKRQLSNVVYRHLVDDHRRRQLTFD

SEQ ID NO: 12110 - protein, 338 aa, unidentified
  source 1..338: note = protein_c9d48d1
  REGION 6..152: note = RuvC_domain
  SITE 9: note = RuvC_P1
  SITE 53: note = RuvC_P2
  SITE 91: note = RuvC_P3
  SITE 93: note = RuvC_P4
  SITE 96: note = RuvC_P5
  REGION 211..298: note = Tnp_domain
  SITE 219: note = Tnp_P1
  SITE 249: note = Tnp_P2
  SITE 257: note = Tnp_P3
  SITE 258: note = Tnp_P4
  SITE 270: note = Tnp_P5
MAILTVGIDLAKNVFAVHGVNGAGKSELVRSAVPRDKLYGLVATLPPCVIGMEACSGAHHWARLFQAAGHTVRLVAPKFVTPYRMSGKRSKNDAADAAAICEAVQRPHMRFVPIKSIEQQSRLMVHRARQGFVQQRTATLNRIRGLLSEFGIVLPLKASSVRRRACECLEDLPGYANTVIGDLLSEVTRLDERITQYDRHITAMAKDDARAKRLMQLSGVGATTATCMLAMIGNGHEFDSGRQFAAWLGLAPSQYSSGGKSRLGRITKAGDAYLRTLLILGARSMLVAAKNKIDAVSRWAVALAERRGYWRAVVAIAAKNARMAWAVLRKGEAFALPA

SEQ ID NO: 12111 - protein, 345 aa, unidentified
  source 1..345: note = protein_db624f8
  REGION 5..152: note = RuvC_domain
  SITE 8: note = RuvC_P1
  SITE 55: note = RuvC_P2
  SITE 92: note = RuvC_P3
  SITE 94: note = RuvC_P4
  SITE 97: note = RuvC_P5
  REGION 212..300: note = Tnp_domain
  SITE 220: note = Tnp_P1
  SITE 250: note = Tnp_P2
  SITE 258: note = Tnp_P3
  SITE 259: note = Tnp_P4
  SITE 271: note = Tnp_P5
MDQYAGIDVSLESSSICIVDAQGKIIKEAKVASEPEALIAWFAAHEGPVIRIGLEAGPLSQWLYAGLRAAGFAVELLETRHVRDAFKAMPVKTDRKDARGIAQLMRLGWFRPVHCKSLPAQEVRALLTSRKLLQGKRHDVEMSLRGVLRGFGLKVGPTTPRTFEARVRELVEHHPTLSLIADALLKAWASLAQEFRRIEKKLLALARADTQVRCLMTTPGVGALVALTFTSAIDDPGRFRSSRAVGAHFGLTPKKYQSGETDVTGRISRIGDHGVRTALYEAANVMLTRPVKGSALKRWALSLAKRAGMRKAKVALARKLAVVLHTMMRHGKPFSLVGQLGAAMA

SEQ ID NO: 12112 - protein, 338 aa, unidentified
  source 1..338: note = protein_f18e2b2
  REGION 7..149: note = RuvC_domain
  SITE 10: note = RuvC_P1
  SITE 53: note = RuvC_P2
  SITE 88: note = RuvC_P3
  SITE 90: note = RuvC_P4
  SITE 93: note = RuvC_P5
  REGION 209..297: note = Tnp_domain
  SITE 217: note = Tnp_P1
  SITE 247: note = Tnp_P2
  SITE 255: note = Tnp_P3
  SITE 256: note = Tnp_P4
  SITE 268: note = Tnp_P5
MSTATLVGIDLGKHSFHLHGQDKSGREVFRKKTTRQQMMRLLSNLPSCIVVMEACAGAHFTARQLVGFGHEVKLIAPQFVRPFVKGNKNDFIDAEAICEAASRPTMRFVTPKTEAQQTLSVLHRIRESLVHDRTKTANQVHGFLLEFGISLPKGLSSVRRLPSTLSERELPPRLSMLLMRLHSHFCYLEQQLVELDKELANELAEDDLGNRLMSVPGVGPITASLLSAELGDGKQYGCSRDFAASLELVPRQYSTGGRNTLLDISKRGDKNLRRLLVQCARSYLQRVDRHQGDWVRSLRERRHSNVVACALANKLARIVWAIAANHSEFEARPSVCSA

SEQ ID NO: 12113 - protein, 346 aa, unidentified
  source 1..346: note = protein_ac7f657
  REGION 5..152: note = RuvC_domain
  SITE 8: note = RuvC_P1
  SITE 55: note = RuvC_P2
  SITE 92: note = RuvC_P3
  SITE 94: note = RuvC_P4
  SITE 97: note = RuvC_P5
  REGION 212..300: note = Tnp_domain
  SITE 220: note = Tnp_P1
  SITE 250: note = Tnp_P2
  SITE 258: note = Tnp_P3
  SITE 259: note = Tnp_P4
  SITE 271: note = Tnp_P5
MKHYVGLDVSVKETAICIVEETGTVCREVKVPSHPEDLARVLKDPAWRLERVGLEAGPLSQWLFEGLAKAGLPMICIETRHTKAFLKAQVNKTDRNDARGIAQMMRVNLFRPVHVKTLTSQKRRALLTARKLLKDKAIAIENDIRGLLRNFGLKVGKVGAVKFEERIRELTEVMPDLVEIVEPLLDARRKLRQNYAALHRKLLAIVRDDEVCRQLLSIPGVGPVVSLAYTATIDIPARFRNSKAVGPILGLTPALHESGESRRVGGISLCGDGMMRTLLYEAAQTLLTRVTKWSWLKAWAMDVAKRRGQQKAIVALARRLAVIMHRIWSDGTQFRWTRTEIMPVAG

SEQ ID NO: 12114 - protein, 410 aa, unidentified
  source 1..410: note = protein_be98e32
  REGION 4..163: note = RuvC_domain
  SITE 7: note = RuvC_P1
  SITE 60: note = RuvC_P2
  SITE 100: note = RuvC_P3
  SITE 102: note = RuvC_P4
  SITE 105: note = RuvC_P5
  REGION 273..359: note = Tnp_domain
  SITE 281: note = Tnp_P1
  SITE 312: note = Tnp_P2
  SITE 320: note = Tnp_P3
  SITE 321: note = Tnp_P4
MLFIGDDWAEAHHDIEIVDAEGRRLARRRLPEGVEGLATLHSLIADHLTEDDDADQVAIGIETDRGPWVGALIAAGYIVYAVNPLQAARYRERHGTSGAKSDPGDAHVLAELVRLDRAHHRPVAGDSATAEHVKVLARAHQSLIWSRQRQTNALRSMLREFYPAALAAFGEELDGRDALAILAIAPSPEAGRRLSQSKIAAALRRAGRQRNLEPTAERIQATLRAPQLAAHPGVVGAYATAVRSLVAVIAEMATQIEGLRAQVEAGFGQHPDAEIYLSQPGLGPVLGARVLAEFGDDPTRYTDSKARKNYSGMAPITRASGTRRIVLARYARNRRLADALYCQSFSALTSSPGARAYYDRQRARGATHHQALRALANRLVGILHGCLHHHRRYDETTAWPAENMEASIAA

SEQ ID NO: 12115 - protein, 320 aa, unidentified
  source 1..320: note = protein_abfbfcd
  REGION 1..97: note = RuvC_domain
  SITE 34: note = RuvC_P3
  SITE 36: note = RuvC_P4
  SITE 39: note = RuvC_P5
  REGION 199..284: note = Tnp_domain
  SITE 207: note = Tnp_P1
  SITE 236: note = Tnp_P2
  SITE 244: note = Tnp_P3
  SITE 245: note = Tnp_P4
  SITE 257: note = Tnp_P5
MLAISRARLAGLGVAYLPGLAAHQAARLFAGDAKTDERDALVIAKTALGIPDALLPVPEPDEALEAARSLAAQRSHMVTCATRDKNRLRSILLESRPAFEALADLGDRHWLNMLEELGGPWGCIDAGKPAFGAVTKGANRARMDAAWNAAMASTRPPKRRVDAENPQVRMLARRIREALEEADGIDREITALLAGDGTYECLVTIPGIGPRTASELVIGINIEDFPDHDHLASYCGIAPRNRQSGTSISSVSASRQGNRRLKNLLIFSCNSLVRSENRFGEYYRACRGRGMCHGEALKAVARKRLKVIYAIMRDKVPYSA

SEQ ID NO: 12116 - protein, 387 aa, unidentified
  source 1..387: note = protein_5c9e560
  REGION 4..159: note = RuvC_domain
  SITE 7: note = RuvC_P1
  SITE 58: note = RuvC_P2
  SITE 98: note = RuvC_P3
  SITE 100: note = RuvC_P4
  SITE 103: note = RuvC_P5
  REGION 263..350: note = Tnp_domain
  SITE 271: note = Tnp_P1
  SITE 301: note = Tnp_P2
  SITE 309: note = Tnp_P3
  SITE 310: note = Tnp_P4
  SITE 323: note = Tnp_P5
MIYVGIDIAKQNHVASAMSADGEIIFEPFGFTNDNSGFQKLLDNLSSLDKEEMLIGMESTAHYAENLTCFLFSRGFNICIINPIQTAALRKTNIRKTKNDRVDTYLIIKALIMNQCRLFTQRDLQSLKLKNLCRFRQKLMKARTKVKIQLVTYVDLLFPELQYFFKSGIHIKSCYALLKECSNPDRIANMHLTRLTNLLYKTSRGHFNKQSAIALKELARNSVGTKNDTLSLQITQSIIQIELFTEQLDEVEDTINDIMDSMDSVIKTIPGIGNLNGGMIIGEIGDIHRFESPCKLLAYAGLDPSVYQSGKFNASHTQMSKRGSKLLRYALINAAWQLTLNNKTFKDYYDLKISQGRGHYNALGHVAHKLVRVIHKIMIDNIEFNLA

SEQ ID NO: 12117 - protein, 345 aa, unidentified
  source 1..345: note = protein_d5dd374
  REGION 6..148: note = RuvC_domain
  SITE 9: note = RuvC_P1
  SITE 52: note = RuvC_P2
  SITE 87: note = RuvC_P3
  SITE 89: note = RuvC_P4
  SITE 92: note = RuvC_P5
  REGION 211..296: note = Tnp_domain
  SITE 219: note = Tnp_P1
  SITE 249: note = Tnp_P2
  SITE 257: note = Tnp_P3
  SITE 258: note = Tnp_P4
  SITE 270: note = Tnp_P5
MQITTIGLDLAKNVFQVHGVDAEGTVVVRRKLRRTQVREFFVGLAPCLIGMEACGTAHFWARELIAMGHQVKIMPPSYVKAYVRRGKNDAADAAAICEAVMRPHMRFVPVKTEEQQAALMLHKTRELLVRQQTMLINAIRGHMAELGMIAPQGAAKVKDLIAVIQESEDQSIPALAQAALQPLVRQLHTLDEQVEILDREIKAWHKTNETGRRLATIPGIGILTASAIAATVPDPSFFKSGREFAAWLGLTPRQNSTGGKDRLGRISKKGNTYIRRLLVTGATSMLRYARAKTAAGADWVNGLLQRRPARLVTVAMANKTARIAWAVMVKGENFRVPVRPMTEAA

SEQ ID NO: 12118 - protein, 345 aa, unidentified
  source 1..345: note = protein_eb452ac
  REGION 6..147: note = RuvC_domain
  SITE 9: note = RuvC_P1
  SITE 51: note = RuvC_P2
  SITE 86: note = RuvC_P3
  SITE 88: note = RuvC_P4
  SITE 91: note = RuvC_P5
  REGION 210..299: note = Tnp_domain
  SITE 218: note = Tnp_P1
  SITE 250: note = Tnp_P2
  SITE 258: note = Tnp_P3
  SITE 259: note = Tnp_P4
  SITE 272: note = Tnp_P5
MKNTIVGVDLAKDVIQVCVYASKKVQSNTEMTHHEFLEWLFTSSSTTVVFEACGTSNYWKQKATEAGHAAHLISADLVSKIRQNQKTDKNDALAIVQASMLPDISFIKGKTIEQQQLQTILRLRELSVKQKTASGNQLKALLLEFNIRVSARNGGLGGVIESVLEDAENEFSAAFREALHTAWQHHLSIIKSIAIYDGCLEELVEQHEDCKRLLKLEGVGVINAVNLYIALGCADLGSFCKGKDASACIGLTPIQHTSGGKVKLGSIGRYVKNSLLRSQLITGAMAVVAQVCKRTAVTSKEVWIQQLVARRGKKIAAVALANKNVRTAFAMLTQGTEYKADPVAV

SEQ ID NO: 12119 - protein, 408 aa, unidentified
  source 1..408: note = protein_0b189c4
  REGION 11..166: note = RuvC_domain
  SITE 14: note = RuvC_P1
  SITE 62: note = RuvC_P2
  SITE 102: note = RuvC_P3
  SITE 104: note = RuvC_P4
  SITE 107: note = RuvC_P5
  REGION 273..358: note = Tnp_domain
  SITE 281: note = Tnp_P1
  SITE 311: note = Tnp_P2
  SITE 319: note = Tnp_P3
  SITE 320: note = Tnp_P4
  SITE 332: note = Tnp_P5
MSTPDDVDVWIGLDVGKEDHFADVLDDDGESLFARSVANDEADLVAVIERACGHGTPGLVIDQPGSIAQLAIAVANRHEVPVAYVPGLVMRRAADLYPGEAKTDRRDAFVIADTARTRRRSVHWLDAGSDELLDQLRVLNGFDVDLAADLTRLTNRLRDSLVSVSPALERAVGSRLHQAGVRDLLARFPTPTALRAAGRARINTAVKKRSPRVAAKVVDAVVAALDAQTVTMPAEAAVGRVIAELAVELDRIHTRRDALAAEIEEVFLAHPFGQVLVTLPGIGPRTGARILAEIGDGTRFANGSKLASYAGLAPVTRQSGTSIRGESQSRRGNHRLKNAMFLAAFASLRSTESKAFYDRKRAEGKKHNAAVICLARRRCDVILAMLRNLEPYRAPATPANDDTTSIAA

SEQ ID NO: 12120 - protein, 342 aa, unidentified
  source 1..342: note = protein_524a0f3
  REGION 6..147: note = RuvC_domain
  SITE 9: note = RuvC_P1
  SITE 52: note = RuvC_P2
  SITE 87: note = RuvC_P3
  SITE 89: note = RuvC_P4
  SITE 92: note = RuvC_P5
  REGION 209..294: note = Tnp_domain
  SITE 217: note = Tnp_P1
  SITE 247: note = Tnp_P2
  SITE 255: note = Tnp_P3
  SITE 256: note = Tnp_P4
  SITE 268: note = Tnp_P5
MNITTLGLDLAKSVFQAHGIDASGKTVLVKKLHRKQMLPFFSKLAPCVIGVEACATAHHWARTLIAMGHDVRIMPPSYVKGYVKRGKSDAIDAEAICEAVQRPTMRFVPVKTVEQQSVLMAHRTRSLIVRQRTMAANALRAHLAEFGLVANPGIANLVKLADNAFADEALPAYAHRALEILIRRITELNEEIGELDKELRIWHAENEASRRLAAIPDVGVITATAIAATVKDPDQFQSGRQFAAWLGLTPQQQSTGGKTRLGGISKQGDRYLRRLLVVGATAVMRHAKRNPTPMTDWVTGLMERKPFRLASVALANKLARIAWAILTGEKHINPTGGLHKHA

SEQ ID NO: 12121 - protein, 338 aa, unidentified
  source 1..338: note = protein_0f211b9
  REGION 6..147: note = RuvC_domain
  SITE 9: note = RuvC_P1
  SITE 52: note = RuvC_P2
  SITE 87: note = RuvC_P3
  SITE 89: note = RuvC_P4
  SITE 92: note = RuvC_P5
  REGION 212..300: note = Tnp_domain
  SITE 220: note = Tnp_P1
  SITE 250: note = Tnp_P2
  SITE 258: note = Tnp_P3
  SITE 259: note = Tnp_P4
  SITE 271: note = Tnp_P5
MNLSRIGLDLAKQVFQVHGVDRHEHVVCRRQLKRAQVRDFFRQLPPCLVAMEACGSAHYWARELRELGHTVRLIAPQFVKPYVKGDKHDAHDAEAICEAASRPSMRYVPVKSAEQQAVQSVHRVRSRLVRARTALCNEVRGLLGEFGLIATRRGRAATMALLETVMATEPASLPAPMGELLRELKDELQTLEARIARLERQIQAHVRGDARIQRLLAVEGIGPISASAVAASAGDARQFRTGRQFAAWLGLVPRQHSTGGQQRLGNISKRGDTYLRTLLIHGARAVVRCCANKTDARSRWLQGLLQRRPANVVAVALANKNARILWALLSRETCYRPG

SEQ ID NO: 12122 - protein, 394 aa, unidentified
  source 1..394: note = protein_06eecc8
  REGION 4..161: note = RuvC_domain
  SITE 7: note = RuvC_P1
  SITE 60: note = RuvC_P2
  SITE 100: note = RuvC_P3
  SITE 102: note = RuvC_P4
  SITE 105: note = RuvC_P5
  REGION 267..354: note = Tnp_domain
  SITE 275: note = Tnp_P1
  SITE 305: note = Tnp_P2
  SITE 313: note = Tnp_P3
  SITE 314: note = Tnp_P4
  SITE 327: note = Tnp_P5
MFFIGIDVAKRSHQAAVTDISGNVIVKPFNFKNSSDGFTKFLSAVESNAIEKNDCIIGLESTGHYWYPLYFFLIENGFDVKVFNPIQTAAFREITIRKVKNDNLDSLLIADFTRFGRYSETYIPDENMLALKNLTRFRLSISDICGSLKKKVIAILDQVFPEYTGVFSDVFGKTSKQLLEQFSTPDEFMDISTTKLTNLLLKVSRGRNGREKAELIKTAAQSSIGISYAIDAFSFELKQLLAQIEFMENQLSDVDAEMEKLLSQSEYGIITTISGIGPMLGSVIVSEIGDINRFENSSKLVAYAGLDASVKQSGEFNSSKNKISKRGSPYLRRALWMAAFMSLQCDPALYDYYSRLRARGKTHRCATTAVARKLCIIVWAIMKSKKPYSPVLKN

SEQ ID NO: 12123 - protein, 250 aa, unidentified
  source 1..250: note = protein_23efca8
  REGION 5..147: note = RuvC_domain
  SITE 8: note = RuvC_P1
  SITE 51: note = RuvC_P2
  SITE 86: note = RuvC_P3
  SITE 88: note = RuvC_P4
  SITE 91: note = RuvC_P5
  REGION 209..250: note = Tnp_domain
  SITE 217: note = Tnp_P1
  SITE 247: note = Tnp_P2
MNDMIGVDLAKNVFQLHGASMTGDVKYRKKLSRVQFFRFMSEQSPALVVMEACGSAHYWARELVKLGHAVKLIAPQYVRPFVKRQKNDAVDAEAIVIAARQPEMRFVEPKTADQQARAVLFRARERIVRQRTELVNALRAVLYEYGQVVPQGIGHIKRIEEILENTEIDVPEMVQEECRDLLAQISEKTARIEAKARKLAELSRRSGAARRLQTMPGVGPLTALAVEAFAPAMQSFRCGRDFAAWLGLVP

SEQ ID NO: 12124 - protein, 344 aa, unidentified
  source 1..344: note = protein_d3714f8
  REGION 7..149: note = RuvC_domain
  SITE 10: note = RuvC_P1
  SITE 53: note = RuvC_P2
  SITE 88: note = RuvC_P3
  SITE 90: note = RuvC_P4
  SITE 93: note = RuvC_P5
  REGION 211..295: note = Tnp_domain
  SITE 219: note = Tnp_P1
  SITE 249: note = Tnp_P2
  SITE 257: note = Tnp_P3
  SITE 258: note = Tnp_P4
  SITE 270: note = Tnp_P5
MTAATVIGIDLAKNVFQLHGVNEHGRVVLRKQIKRNQMASFFANIPRALIGMEACSSAHFWARKLQSMGHVVRLMAPQFVKPYVKTNKNDAADAEAISEAVTRPNMRFVPVKNVEQQAVLALHRARQGFVRARTAQANQIRGLLGEYGYSIPQGMAHMPQVFDVIEDASNDLPGVFRQLILRLMDHLKVLHQQVTEIDVQIKAWHRNSDLAKKLEKIPGIGPVTATALVATIGDAKHFENGRQLAAWLGLVPRQHSSGGKQNLLGISKRGDSYLRTLLIHCARSVISASKRKGNCEGWVHELIRRRNHNVAAVALANKIARTVWALWAHDREYLAGYPSAGAAA

SEQ ID NO: 12125 - protein, 348 aa, unidentified
  source 1..348: note = protein_68d1be1
  REGION 7..148: note = RuvC_domain
  SITE 10: note = RuvC_P1
  SITE 53: note = RuvC_P2
  SITE 88: note = RuvC_P3
  SITE 90: note = RuvC_P4
  SITE 93: note = RuvC_P5
  REGION 212..305: note = Tnp_domain
  SITE 220: note = Tnp_P1
  SITE 250: note = Tnp_P2
  SITE 258: note = Tnp_P3
  SITE 259: note = Tnp_P4
  SITE 271: note = Tnp_P5
MKNVTTVGLDLAKSAFQVHCADDDGRPVVRRKLRRSQVAGFFAQLPACLIGLEACASAHHWARTLQALGHEVRLIPPQYVKPFVKTNKNDAVDAEAICEALMRPTMRFAPVKSAEQQAVLTLHRARELLVRQRTMVSNALRGHCAEFGLVVAQGTSSVRKLIEIIEDRDDERLPDLARQSLGFLVEQLHMLRSRITGLERKLMAWHRANEASRRLVTIPGVGVMTATALVATIGDASQFHSGRQLAAWLGLVPKQNSSGGKERLGRISKRGDGYLRRLLVHGARAVLRWSRDSNKRGLKQGRTAWQRSLLARRPTNVVLVAMANKTARIVWAMLTRGEVYRAEALQAA

SEQ ID NO: 12126 - protein, 341 aa, unidentified
  source 1..341: note = protein_76755a7
  REGION 7..148: note = RuvC_domain
  SITE 10: note = RuvC_P1
  SITE 53: note = RuvC_P2
  SITE 88: note = RuvC_P3
  SITE 90: note = RuvC_P4
  SITE 93: note = RuvC_P5
  REGION 211..298: note = Tnp_domain
  SITE 219: note = Tnp_P1
  SITE 249: note = Tnp_P2
  SITE 257: note = Tnp_P3
  SITE 258: note = Tnp_P4
  SITE 270: note = Tnp_P5
MGEVVTVGLDIAKSVFQVHGVDGAGEVAVRRQLRRAQVLAFFAKLPACLIGIEACATAHHWARELAALGHQVRLMPPSYVKPYVKRQKNDAADAEAICEAVTRPTMRFVEVKSPEQQSVMVLHRVRQTLMRQRILLSNTIRAHMAEFGLVAAIGREGLLGLIQLIEARDPRVPEEARTCLEFLVAQLRLVNLQVLETDRKIRTSARSTEVGRRLMTIPGVGPVLASALVATVAEPKAFKSGPNLAAWIGLVPKQNSSGGKERLGGITKQGDRYLRQLMVVGALAVVRYAERHGTRRPWLVQLLAKRPTKVATVALANKIARIAWAIMTSGENYREPEPAAA

SEQ ID NO: 12127 - protein, 347 aa, unidentified
  source 1..347: note = protein_76cbebf
  REGION 7..147: note = RuvC_domain
  SITE 10: note = RuvC_P1
  SITE 53: note = RuvC_P2
  SITE 88: note = RuvC_P3
  SITE 90: note = RuvC_P4
  SITE 93: note = RuvC_P5
  REGION 210..302: note = Tnp_domain
  SITE 218: note = Tnp_P1
  SITE 248: note = Tnp_P2
  SITE 256: note = Tnp_P3
  SITE 257: note = Tnp_P4
  SITE 269: note = Tnp_P5
MEKVTRIGVDTSKNVFQLHGVNAEEKPVLRKKLTRPKMIAFFKDLAPTVIAIEACGSAHHWARPLSSFGHEVKLIAPQLAKPYVKRGKNDAADAEALCEAMSRPTMRYVPVKTADQQAALMLVGMRDRLVRNRTQLANAIRGYAAEFGLTVAKGICRVEVLLTDIASDDTLPELARDLFAIHRREYELLQVEIEKVEARLMEWHRKDECSQRLSRIPGVGPIGASLLMMKTPDPRLFKSGRDFAAWMGLTPKDHSTAGRARPGGITRAGDELLRSVLVNGATAVLKQVRAGRGRNASPWLQKLLEHKKPKLVAVALANRTARIAWKMMVSGESYRATPVQPVLAKAA

SEQ ID NO: 12128 - protein, 339 aa, unidentified
  source 1..339: note = protein_961a931
  REGION 6..147: note = RuvC_domain
  SITE 9: note = RuvC_P1
  SITE 52: note = RuvC_P2
  SITE 87: note = RuvC_P3
  SITE 89: note = RuvC_P4
  SITE 92: note = RuvC_P5
  REGION 210..299: note = Tnp_domain
  SITE 218: note = Tnp_P1
  SITE 248: note = Tnp_P2
  SITE 256: note = Tnp_P3
  SITE 257: note = Tnp_P4
  SITE 269: note = Tnp_P5
MNSMAVGVDIAKNVFQVHYVDQATGEVVNRPIKRAKFLEHFANRAACLMGMEACGGAHHWARELTRMGHDVRLMPAEFVKAFNIRNKNDAADARAIWLAVQQPGKPVAVKTEMQQAMLALHRMREQLVKFRTMQINGLRGLLTEYGEVMSKGRAKLDKEIPAALGRIAERLPAALIDTLREQWNGLTRLDEQVAEIERRMREWKKEDRAVKSISEIPGVGLLTATAAVAMMGDPKAFRSGREFAAWTGLVPKQTGSGGKVNLHGISRRGDTYLRTLLIHGARAVLTHAKEPGPWVAEMKKRRPTNVVVVALANKMARTIWAVLAHNRPYRKDYVSVKLA

SEQ ID NO: 12129 - protein, 328 aa, unidentified
  source 1..328: note = protein_5d1896d
  REGION 4..155: note = RuvC_domain
  SITE 7: note = RuvC_P1
  SITE 60: note = RuvC_P2
  SITE 100: note = RuvC_P3
  SITE 102: note = RuvC_P4
  SITE 105: note = RuvC_P5
  REGION 200..286: note = Tnp_domain
  SITE 208: note = Tnp_P1
  SITE 237: note = Tnp_P2
  SITE 245: note = Tnp_P3
  SITE 246: note = Tnp_P4
  SITE 259: note = Tnp_P5
MRYLGMDVAKAKLDCCLLLDEDSEKRKTKSVTNSRSGVADFLAWIGKQHISPAELHVIMEGTGVYHEQAALALADAGVTVSIVNPAQVKDFGRGLAVRTKTDGMDSFVLARYGALLKPAAWIPPAPEARVLQALLARRDAIAQDLQRERNRQEKAGATDTPMLIRQSLSDSIEFLSGQLAQLQQDIDQHIDRHPGLKDDLALLQSIPAVGPQVGNNMLAVMHSHDFGSAEQLAAYLGLVPIERQSGSSVLGRARLSKAGPARIRAVLYMAAVVATRCNPHVKAVYDRLLARGKSKMSALGAAMRKLVHLCFGVLRTRQPYQRDYAKID

SEQ ID NO: 12130 - protein, 334 aa, unidentified
  source 1..334: note = protein_9bbbe31
  REGION 7..149: note = RuvC_domain
  SITE 10: note = RuvC_P1
  SITE 53: note = RuvC_P2
  SITE 88: note = RuvC_P3
  SITE 90: note = RuvC_P4
  SITE 93: note = RuvC_P5
  REGION 209..296: note = Tnp_domain
  SITE 217: note = Tnp_P1
  SITE 247: note = Tnp_P2
  SITE 255: note = Tnp_P3
  SITE 256: note = Tnp_P4
  SITE 268: note = Tnp_P5
MNSVSLIGIDLGKNSFHVHCQDNTGKALTRKKFTRPKLFEFLVNCPPAIVVMEACAGAHYMARKISDMGHEPKLISPQFVRPFVKSNKNDFVDAEAICEAASRPSMRFVAPRTESQQSVLALHRVRESLVRDKVKTTNQMHAFLLEFGISMPKGLAVIRRLSDVLADNELPPYLTKLLMRLHDHYLYLVEQIKDIENELEQAAKQDETTQRLMTIPAVGPITASVLMVHLGNGSQYKQSRDFAAATGLVPRQYSTGGKPTLLGISKRGDKNLRRLLVQCARVFILHLEHQSGYLAEWVKSQLTRKHSCIVACALANKLARIAWAITTKKTVFQS

SEQ ID NO: 12131 - protein, 343 aa, unidentified
  source 1..343: note = protein_5420636
  REGION 7..149: note = RuvC_domain
  SITE 10: note = RuvC_P1
  SITE 53: note = RuvC_P2
  SITE 88: note = RuvC_P3
  SITE 90: note = RuvC_P4
  SITE 93: note = RuvC_P5
  REGION 211..296: note = Tnp_domain
  SITE 219: note = Tnp_P1
  SITE 249: note = Tnp_P2
  SITE 257: note = Tnp_P3
  SITE 258: note = Tnp_P4
  SITE 270: note = Tnp_P5
MTKDTMIGVDLAKNVFQLHAASMTGQPQFCRKMSRQSFPGFMAKQPPAVVVMEACGSAHYWAREMAKLGHEVKLIAPRYVKPFVKRQKNDAADAEAIVIAAQRPEMRFVLPKGADQQSWAILFRARERLVHQRTELVNALRASLYEYGHVVPQGIRQIKRIAEILEAPNNDLPDLMREECRDMVEQIAEQTTRINARTRKIQALANEADIARRLQTIPGVGPMTALAVEAFAPAMENFSCSRDFAAWLGLVPRQFSSGAKERLGRTSKAGQADIRRLLIIGAMSRLNWLGRKSIPEDSWLARISSRKPRMLVAIALANKMARMIWALIIRNEDYRVPAQVVAT

SEQ ID NO: 12132 - protein, 417 aa, unidentified
  source 1..417: note = protein_c372305
  REGION 18..170: note = RuvC_domain
  SITE 21: note = RuvC_P1
  SITE 69: note = RuvC_P2
  SITE 107: note = RuvC_P3
  SITE 109: note = RuvC_P4
  SITE 112: note = RuvC_P5
  REGION 277..363: note = Tnp_domain
  SITE 285: note = Tnp_P1
  SITE 316: note = Tnp_P2
  SITE 324: note = Tnp_P3
  SITE 325: note = Tnp_P4
  SITE 336: note = Tnp_P5
MSIAPDCADAPIVVRITAGLDWAKDDHAVCVVGDQGQVIDRFTVAHDAAGLKRMTARLLRAGVDQVGIERGDGPVVDALLGAGLTVFVIPPGQVKNLRSRYGSAGNKDDRFDSYVLADVVRTDARRLHPMVFDSEQTTALRSATRTRKDLVTHRVAAANQLRAHLQIVFPAAATLFADIDSAISLSFLERFTTQDAADWLTAARLAAWLKKVHYSGGIEPAVLHARLLAAPAGKTGPHARLHAGTTRALVALLRVLNTQVHALAVSIGEQLDAHPDKKIFTSLPRSGTVRAARLLAEIGDARGRFPTRDSLTCLAGVAPSTRQSGKVTSVTFRWGANKQLRDALCDFAGDSRHANPWAAALYAKAIARGCDHPHAVRILARAWGHIIWRCWQENHPYDPAAHGALQTILNQDQPAAA

SEQ ID NO: 12133 - protein, 460 aa, unidentified
  source 1..460: note = protein_ea04e0b
  REGION 59..214: note = RuvC_domain
  SITE 62: note = RuvC_P1
  SITE 111: note = RuvC_P2
  SITE 151: note = RuvC_P3
  SITE 153: note = RuvC_P4
  SITE 156: note = RuvC_P5
  REGION 322..408: note = Tnp_domain
  SITE 330: note = Tnp_P1
  SITE 361: note = Tnp_P2
  SITE 369: note = Tnp_P3
  SITE 370: note = Tnp_P4
MTLPPPASPEPRSDDKRTRRRAPVSDHSAVGSLASAWRLPRVTNGKATGLSLPDALFFVGIDWAAAEHAVCVLDPTGRKVAAFTIAHTAAGFAELVRKLGKLADCERAPVAIERPDGRLVDTLLEAGYPVVPVKPNAIKTWREAEVLSGAKSDPGDAHVIADYLRVRAHRLRPATPFSSHTKALRATVRSRTDLVEARVAAINQLGALLDAHWPGAKAIFADIESAIALAFLTRYPTAASAARLTEKQLAAFCAKQGYSGRKPAAVLLARLRDTPAGMTDPVTCHGVRDAVLAQVGVLTALNTAIKNLDRSIAEQMDTHPDAEIFRSFPRAGTINAAQILAEWGDAREAFGHPDAIAALAGITPVTKASGKQRGVSFRWACNKRLRTAITTWAANSRFSSDWAADIYNRARAEGKDHPHATRILARAWIRVMWRCWQNNTPYDPILHGAARRQAEHQIAA

SEQ ID NO: 12134 - protein, 404 aa, unidentified
  source 1..404: note = protein_985cb87
  REGION 4..157: note = RuvC_domain
  SITE 7: note = RuvC_P1
  SITE 56: note = RuvC_P2
  SITE 94: note = RuvC_P3
  SITE 96: note = RuvC_P4
  SITE 99: note = RuvC_P5
  REGION 265..351: note = Tnp_domain
  SITE 273: note = Tnp_P1
  SITE 304: note = Tnp_P2
  SITE 312: note = Tnp_P3
  SITE 313: note = Tnp_P4
MWYVGLDWADTHHDVDVLDEAGKHVGARRFSHSQEGLHDLKQFLLSFTSQPEELACILETNHGLLIAFLLSAGLPVYPVNPKTINGLRKVAGGKTDRIDARLLAKAGYFNLAELHRLEPDSPTVQELKMLTRDQDALVQMQTRLVNQLTACLKEYYLVALKLFSKLQQPSTLRFLQAYPTPQAAQCASVEEITATLRLGTFPNPAQAAASMVEELHHPQLVASEVTVRAKSRLMLSLVKQLLVVIEDLASYEKAIQTLFLTHKDHAIWSSLPRAGKRLAPRLLAEWGDDRTRYADANSVQELAGTAPVPYQSGNYAKAHKRFACVKPWRNDLYQFAWQSTLSEPWAASYYQRKLAEGKTHSMALRALANIWVRIMYRMWMSETCYQAETFEAAKLAHAPRQRAA

SEQ ID NO: 12135 - protein, 387 aa, unidentified
  source 1..387: note = protein_248160f
  REGION 4..159: note = RuvC_domain
  SITE 7: note = RuvC_P1
  SITE 57: note = RuvC_P2
  SITE 98: note = RuvC_P3
  SITE 100: note = RuvC_P4
  SITE 103: note = RuvC_P5
  REGION 263..347: note = Tnp_domain
  SITE 269: note = Tnp_P1
  SITE 299: note = Tnp_P2
  SITE 307: note = Tnp_P3
  SITE 308: note = Tnp_P4
  SITE 320: note = Tnp_P5
MYFVGIDISKFKHDCAVIDEIGDTIQPSWSFGNDREGFSLLKERLDSLPGDKKIGLEATGHYGQNLKLFLEANGFAFMEFNPLLVSRFVRGKSLRNTKTDPIDARNVAQYLMTVEYKPYPPSFYHLDQLKSLTRFRSSLVRQRSRQLVHLTNVLDKMFPEFKPFFKGKFSATALYILDHYQSPERIANMNARSYESLRKISRGHFSLNDFVNLKALAKNTVGCTTDFLLQEMSILLELYTQLDAKVEELDAQIEECVRGIDPPMLSIPGVGASSTAVILSEYGDFSKFKNPAKMLAFAGLEPGYFQSGQSESTGHMVKHGSPHLRCAILNCCLPLVSNEPVFAEFYAKKRAEGKTHQVAMTHVAKKLLRVIYTLQTKNIPYDPTLIR

SEQ ID NO: 12136 - protein, 332 aa, unidentified
  source 1..332: note = protein_e1b2dbe
  REGION 4..145: note = RuvC_domain
  SITE 7: note = RuvC_P1
  SITE 49: note = RuvC_P2
  SITE 84: note = RuvC_P3
  SITE 86: note = RuvC_P4
  SITE 89: note = RuvC_P5
  REGION 206..295: note = Tnp_domain
  SITE 214: note = Tnp_P1
  SITE 244: note = Tnp_P2
  SITE 252: note = Tnp_P3
  SITE 253: note = Tnp_P4
  SITE 265: note = Tnp_P5
MHMLAIDLGKQSFHIYGISDDGEVVSRKVGRAKLVDAVTRLQPRLVAMEACASSHHWGRTFEALGHEVRLIHPRFVKPFVKGSKNDAVDAEAIFEAATRPTMRFVPLKSVEQQDLQALHRTRDRLVVQRTALINHTRGLLAEYGIVMPAGASRFRLKIDKMIETAELSDLAKPLFRQLVEEYRDLDTRVSALDDMLVKICRTDERCKRLTTLPGVGPIVATSLVAAIDDGQHFKSGRALSAWIGLVPRQYTTGGKPRLGGIGSRANHYLRRQLIHGARSALLRISKHEDRRSKWAQDLLSRAGHNKTLVAMANKTARMAWAILRSGESYKIA

SEQ ID NO: 12137 - protein, 340 aa, unidentified
  source 1..340: note = protein_92f1b90
  REGION 6..146: note = RuvC_domain
  SITE 9: note = RuvC_P1
  SITE 52: note = RuvC_P2
  SITE 87: note = RuvC_P3
  SITE 89: note = RuvC_P4
  SITE 92: note = RuvC_P5
  REGION 211..296: note = Tnp_domain
  SITE 219: note = Tnp_P1
  SITE 249: note = Tnp_P2
  SITE 257: note = Tnp_P3
  SITE 258: note = Tnp_P4
  SITE 270: note = Tnp_P5
MKISTIGIDLAKSVFQVHGVDAAGQVVVRRKLRRAEVLKFFEALPPCRVGMEACATSHFWAREISALGHDVRLMPPSYVKAYLRRQKNDAADAEAICEAVTRPSMRFVPVKSAEQQSVLVLHRTRDLLVRQRTMLINAIRGHCGEFGIIAPQGARRSAELTEQLSNAPAPVFPDLARSALLMLADQLDALAVQIHALDRQLMIWHRQNEASQRLATIPGVGIITATALAASVPEPGLFRSGREFAAFLGLVPRQNSSGGKDRLGRISKMGDGYLRKLLVVGATSVIRRAAVNASATGVWVRSLMTRKPSRLVTVAMANKTARIAWAVLTRGEVYRAPVIV

SEQ ID NO: 12138 - protein, 387 aa, unidentified
  source 1..387: note = protein_0edcd9a
  REGION 5..158: note = RuvC_domain
  SITE 8: note = RuvC_P1
  SITE 56: note = RuvC_P2
  SITE 97: note = RuvC_P3
  SITE 99: note = RuvC_P4
  SITE 102: note = RuvC_P5
  REGION 220..305: note = Tnp_domain
  SITE 228: note = Tnp_P1
  SITE 258: note = Tnp_P2
  SITE 266: note = Tnp_P3
  SITE 267: note = Tnp_P4
  SITE 278: note = Tnp_P5
MKVIIGMDPHKRSATIEIIDPAAAVLATGRYDTDNAGYSAMLTAARRYPDRVWAIEGCNGIGRHLAHRLVHDGETVVDVPAKLSAQVRVFATGNGRKTDPVDAHSVALAALRSPNLHRVQADSELIALGMLADRRDELGRARTDTVNRLHRLLLELLPGGAKKFLSAMQARKLVATVKPRDPAGKVRRRLTVELIGQLEVIDRKIKTADKELRELVAERGSTLTDLNGIGPAGAARLLADVGDLHRFRDRNRFASWNGTAPLDASSGQQQRHRLSRAGNRKINRVLHIMAIVQLRNPSAGRTYYDRRKAAGKTSMEATRALKRRLSNIVYARMLADQQRRETASPGGQSGATLDSSATGSTPHTGTSDKPQPGLTDNQNTPDLRIMS

SEQ ID NO: 12139 - protein, 301 aa, unidentified
  source 1..301: note = protein_ba49799
  REGION 7..149: note = RuvC_domain
  SITE 10: note = RuvC_P1
  SITE 53: note = RuvC_P2
  SITE 88: note = RuvC_P3
  SITE 90: note = RuvC_P4
  SITE 93: note = RuvC_P5
  REGION 209..272: note = Tnp_domain
  SITE 217: note = Tnp_P1
  SITE 247: note = Tnp_P2
  SITE 255: note = Tnp_P3
  SITE 256: note = Tnp_P4
  SITE 268: note = Tnp_P5
MNEVTLIGIDLGKHVFHVHGQDAKGHAIFRKKLSRLQLLPFFSNLKAVTVVMEACTGSHWLARKLIAMGHVARLISPQYVRPFVKSNKNDYIDAEAICEAASRPSMRFVEPRTEAQQLLAALHRACEGLVTERTATINRIHALLLEFGIIVPLSRATLRRLSDALAVHDLPLRPAQMIHRLHEHYRYLDQEVADIERDLTVQLREDENAARLLSIPGIGTITASLLASEIGNVAQFAGGRNFAASIGLVPWQHSTGGRSTLCGISKRGDKHYVICSCKEQERLYSVQTSEPTGLVSGSDQC

SEQ ID NO: 12140 - protein, 402 aa, unidentified
  source 1..402: note = protein_a03654c
  REGION 4..160: note = RuvC_domain
  SITE 7: note = RuvC_P1
  SITE 57: note = RuvC_P2
  SITE 97: note = RuvC_P3
  SITE 99: note = RuvC_P4
  SITE 102: note = RuvC_P5
  REGION 274..361: note = Tnp_domain
  SITE 282: note = Tnp_P1
  SITE 312: note = Tnp_P2
  SITE 320: note = Tnp_P3
  SITE 321: note = Tnp_P4
  SITE 334: note = Tnp_P5
MNSVGVDISKGRSTVAVMRPFGEVVISPFEVDHTASELSTLAKRLKSLNGETRVIMEATGNYHMPVAQSLHDAGLYVTVVNPKLVHGYGNNELRRVKTDKKDAVKLANYGIDRWLALPRYVPEENIRLLLKNCYRQYRQYSKVQTVLKNNLISLLDTVFPNVNRLFTSPVRIDGSEKWVDFAAEFWHCECISGHSEKAFTNKYQRWCKKLGYNFSTTKAHSIYAAACEHIGCMPKCNTTKLLIDQAVAQLRATSAALAALKNEMQTLASQLPEYSVVMGMFGVGDTLGPQLMAEIGDVRRFYSKKALVAYAGIDAPPNDSGDVIGRHKRMSKIGTSSLRRTLFLVMSIYLRCAPLNEPIYQFMDRKRAEGKPYRVYMMASANKFLRIYYAAVKEYLDALEQA

SEQ ID NO: 12141 - protein, 309 aa, unidentified
  source 1..309: note = protein_26bd1c1
  REGION 8..149: note = RuvC_domain
  SITE 11: note = RuvC_P1
  SITE 54: note = RuvC_P2
  SITE 94: note = RuvC_P3
  SITE 96: note = RuvC_P4
  SITE 99: note = RuvC_P5
  REGION 190..274: note = Tnp_domain
  SITE 198: note = Tnp_P1
  SITE 227: note = Tnp_P2
  SITE 235: note = Tnp_P3
  SITE 236: note = Tnp_P4
  SITE 247: note = Tnp_P5
MKQRIVYIGVDVAKEYLDVAWQRQSRRFGNNKSGHAALVAWIKQSPTVVQLICEASGGYERGLLESLERNAVKVTLVQANRVRQYARAAGILAKTDKVDARVLAAFGAAMQPKPTVPASAKQKRLREYDAQRRHLSRILLAEQNRLAQLGCVQLRSLSRSLISKIKNQIATLDTSISDLIAQDQELRLKAQKLTSVIGVGARTAALVLAQLPELGQLNRRQTAALGGLAPFNRDSGTLRGKRAIFGGRRALRSGLYMAALSAARRNHILSPFYQRLRAKGKPHKLALTAVMRKLLIVLNQILKPIPFPA

SEQ ID NO: 12142 - protein, 391 aa, unidentified
  source 1..391: note = protein_7eced79
  REGION 4..163: note = RuvC_domain
  SITE 7: note = RuvC_P1
  SITE 60: note = RuvC_P2
  SITE 101: note = RuvC_P3
  SITE 103: note = RuvC_P4
  SITE 106: note = RuvC_P5
  REGION 266..353: note = Tnp_domain
  SITE 274: note = Tnp_P1
  SITE 304: note = Tnp_P2
  SITE 312: note = Tnp_P3
  SITE 313: note = Tnp_P4
  SITE 326: note = Tnp_P5
MIYVGIDVAKDKHDCFITNSDGEVLFKAFTIANNLNGFNDLYQKIESVMEDITKVKVGLEATGHYSYNLLGYLIDKGLAAYVINPLHTNLYRKSLSLRQTKTDKVDARTIASMLMSDVNLKSYSDTSYHNEELKSLTRYRFDKVQERAKLKTSVSRLVCILFPELEKLVPTLHMASVYALLSEFPSAHAVASAHLTRLANLLSENSHGRYNKDTAILFRETARNSIGSNMPAKSLELKHTIKLIHELTSEIDEIEAEIKSIMDTINSPILTIPGISYRMGAMIIAEIGDFSRFDSPDKILAYAGASPSTYQSGQLDGAYSHMEKRGSRYLRYALYNAAKYVCHWDPTFAEYLAKKRSEGKHYNVAISHAVKKLVRVIYHLEKTNQQYIKAA

SEQ ID NO: 12143 - protein, 397 aa, unidentified
  source 1..397: note = protein_473d6f5
  REGION 9..163: note = RuvC_domain
  SITE 12: note = RuvC_P1
  SITE 60: note = RuvC_P2
  SITE 100: note = RuvC_P3
  SITE 102: note = RuvC_P4
  SITE 105: note = RuvC_P5
  REGION 270..355: note = Tnp_domain
  SITE 278: note = Tnp_P1
  SITE 308: note = Tnp_P2
  SITE 316: note = Tnp_P3
  SITE 317: note = Tnp_P4
  SITE 329: note = Tnp_P5
MTVDYAVFCGLDVGKDTHHATALDHAGSRLHDGELPQDEARLRALFTGLQSRGPVLVVVDQPATIGALPIAVARACGCQVAYLPGLAMRRLADLHPGQAKTDARDAFVIADAARTLPHTLRRVDVGEEALAELKVLVGFDDDLAGEVTRLSNRVRGLLTQVHPARERALGPHVQQKGGLALLARFGGPDGMRQAGRRRLVAAASKASPRAGAALAERVWEALGEQTVTVPGTGAAEAVLPRLARSLAEVLDQRRQIATEVEKVLDAHPLAEVLISMPGVGVRTAARILLEVGDGSSFPTAGHLAAYAGLAPVTRRSGSSIRGEHPPRSGNKHLKRAFFLSAFAALHDPTSRAYYDRKRAEGKKHNAALICLARRRCDVLFAMLRDQQPYRPPMPSAA

SEQ ID NO: 12144 - protein, 323 aa, unidentified
  source 1..323: note = protein_95ab3bd
  REGION 8..150: note = RuvC_domain
  SITE 52: note = RuvC_P2
  SITE 92: note = RuvC_P3
  SITE 94: note = RuvC_P4
  SITE 97: note = RuvC_P5
  REGION 191..278: note = Tnp_domain
  SITE 199: note = Tnp_P1
  SITE 229: note = Tnp_P2
  SITE 237: note = Tnp_P3
  SITE 238: note = Tnp_P4
  SITE 251: note = Tnp_P5
MNKDIKFFGIDICHLVFDVADSNGNFYQFKNTLSGFKKFAKILDIDSHCVMEATGYYHYQLAYYLLESGIRVSVENPLAVKRFIQMKLSKIKTDKSDAKQICEYAKQVELKLWKGNSKHQTECLQITRLLAIYTKQSTMIKNKLHGESVLGNPSKAVVSSLKRSLKQLQKEIKMLEDKLLILVKQEHQEVLTRLKSIPGIGNKTALMLVVLTDGFKRFKSGSELCSYAGWTPVIKRSGSSVTGRSKISKMGNQKLRNLLFMCSFNACKYNKACRDIYERLVAKGKSKKLALIAVCNKLLKQAFAIAKSGLIYEDSYRSSLVRN

SEQ ID NO: 12145 - protein, 307 aa, unidentified
  source 1..307: note = protein_03ed8fa
  REGION 8..151: note = RuvC_domain
  SITE 11: note = RuvC_P1
  SITE 54: note = RuvC_P2
  SITE 94: note = RuvC_P3
  SITE 96: note = RuvC_P4
  SITE 99: note = RuvC_P5
  REGION 190..274: note = Tnp_domain
  SITE 198: note = Tnp_P1
  SITE 227: note = Tnp_P2
  SITE 235: note = Tnp_P3
  SITE 236: note = Tnp_P4
  SITE 247: note = Tnp_P5
MKEEVVYCGIDVAKAQLEVRLGQQGESFANTPGGQRRLVAWLHKRRARVHVICEASGGYEQALVQALDQAGIALSIIQPNRVRQFARASGVLAKTDRIDAEVLRRYGYALRPAATVPLAGDALRLRQWDRQRTHLMRLIVAEENRLEHLACPQLRRFSRSLIKQMQKQITRIDQCLTQWVARDQVLAQKARLLTSFSGVGSRTAIMLLAQLPELGRLNRRQVAALAGLAPFNRDSGTLRGRRSVYGGRRSLRSGLYMAALTAAHRNHVLAPFYQRLITAGKPPKVALTAVMRKLLIALNSALCLQPT

SEQ ID NO: 12146 - protein, 405 aa, unidentified
  source 1..405: note = protein_58508ff
  REGION 5..161: note = RuvC_domain
  SITE 8: note = RuvC_P1
  SITE 58: note = RuvC_P2
  SITE 98: note = RuvC_P3
  SITE 100: note = RuvC_P4
  SITE 103: note = RuvC_P5
  REGION 275..362: note = Tnp_domain
  SITE 283: note = Tnp_P1
  SITE 313: note = Tnp_P2
  SITE 321: note = Tnp_P3
  SITE 322: note = Tnp_P4
  SITE 335: note = Tnp_P5
MYNAVGIDASKGKSTVTVLQPGGRVVRKPFDVTHSSSELKKLTDYILSLDGDTKVVMESTGRYHEPLLRTLSDQGIFVSVVNAHLIKNFGNNTIRKVKSDPADSRKIARYTLDNWADLRQYSSMDTTREQLKTLNSQMSFFTRQKVAAKNNLISLLDMTYPGVNTLFDSQTRSDGSEKWVDYAASFWHVDCVRKIGLKSFTERYRAFCKRHGYCFKEGKPEELFNASLDLVAVFPKEKAYKDMIQMSIKQLNIISANVEHIRQEMDRLASTLPEYNTVMGMRGVGPTFGPQLIAEIGDITRFSHREALTAYAGVDPGVNESGSFKSKSNSASKCGPARLRKTLYLIMASLLQSKPLDDPVYRFLDKKRMEGKPYHVYMTAGANKFLRIYYGTVKAYFRSLEKPEI

SEQ ID NO: 12147 - protein, 343 aa, unidentified
  source 1..343: note = protein_e63e1cc
  REGION 6..150: note = RuvC_domain
  SITE 9: note = RuvC_P1
  SITE 54: note = RuvC_P2
  SITE 89: note = RuvC_P3
  SITE 91: note = RuvC_P4
  SITE 94: note = RuvC_P5
  REGION 213..297: note = Tnp_domain
  SITE 221: note = Tnp_P1
  SITE 251: note = Tnp_P2
  SITE 259: note = Tnp_P3
  SITE 260: note = Tnp_P4
  SITE 272: note = Tnp_P5
MKLKRIGVDLAKNVFQIHGVDSHERPVWRQRLPRDRWLQAVLEKIEPGCEIGMESCGGAHHWARQLQARGYRVKMIAPQFVKPYVKSNKNDANDAEAICEAMSRPSMRFVAVKSIEQQDIQATHRIRSGLIEQRTAKANQIRGLVSEYGLVAPKELLALRRAIPCWLEDGDNGLTVRFRRLLDGVWNDLRALDARVDELDREIAEIANNEPAAVRLQQLRGVGPITSTALLAAIGDASQFTNGRQLAASLGLTPRQHSSGGKDRLLGISKRGDAYVRSLLVHGARAMIRTAKAKDDGLSRWVIALADRSHPNVACVALANKTARMAWAMLRNNTDYQPERAAA

SEQ ID NO: 12148 - protein, 338 aa, unidentified
  source 1..338: note = protein_85ec888
  REGION 7..149: note = RuvC_domain
  SITE 10: note = RuvC_P1
  SITE 53: note = RuvC_P2
  SITE 88: note = RuvC_P3
  SITE 90: note = RuvC_P4
  SITE 93: note = RuvC_P5
  REGION 211..296: note = Tnp_domain
  SITE 219: note = Tnp_P1
  SITE 249: note = Tnp_P2
  SITE 257: note = Tnp_P3
  SITE 258: note = Tnp_P4
  SITE 270: note = Tnp_P5
MLLIKVLGIDLGKSTFHLVGHNSSGQEIVRKKLSRAKLLAFISKLPETLVAMESCGGSHWLARQCINYGHQVKLIPPQYVKPYVKTNKNDFIDADAIAEAATRPSMRFVSVKSEEAQIISVIQRIRTSYIKERTACMSRIGAILLEFGMSLPNGHGYMKKLFQWLAEQKTKLPQLLMRELSEHHNHYMQLNRKIAEQDKKLKAIVNQSERAQLLKSIPGIGDLVASRCLSDIANPGDFKNGRHMAAWIGLVPHQFSTGGKTNLLGISKRGNKALRTLFIHGARALLSKPDLVVRYFGCWIVELMARKPFNVVTVALANKLARIAWSVMTTNRAFEKRV

SEQ ID NO: 12149 - protein, 291 aa, unidentified
  source 1..291: note = protein_e82ce17
  REGION 1..104: note = RuvC_domain
  SITE 9: note = RuvC_P2
  SITE 47: note = RuvC_P3
  SITE 49: note = RuvC_P4
  SITE 52: note = RuvC_P5
  REGION 155..242: note = Tnp_domain
  SITE 163: note = Tnp_P1
  SITE 193: note = Tnp_P2
  SITE 201: note = Tnp_P3
  SITE 202: note = Tnp_P4
  SITE 215: note = Tnp_P5
MDEALFCMETTGSYDLPLCHWLHKNGLNVWRESALQIHCSKGFQRGKSDKEDSEVIAQYAARHQSRYTAFVPDAEAIADLKELICYRDSLVERRKECKVRLANKKETLVNRNSKAWKCIERLSKAEIKRLDKVIGECDEEIRNLMKEDEEMEKNYQHLTSIVGIGLINGAALIAYTGNFKKITTPNKMSCYCGCFTFYEDSGTSVHRKSPYRNACCKMLKGYLRMAAKSAMLANTELRKYSERLREKGKPYAVILNNVANKLLHIMFSLVKHDYDYEYNHEMVRRMEREIA

SEQ ID NO: 12150 - protein, 312 aa, unidentified
  source 1..312: note = protein_c424d5a
  REGION 5..149: note = RuvC_domain
  SITE 8: note = RuvC_P1
  SITE 52: note = RuvC_P2
  SITE 92: note = RuvC_P3
  SITE 94: note = RuvC_P4
  SITE 97: note = RuvC_P5
  REGION 188..272: note = Tnp_domain
  SITE 196: note = Tnp_P1
  SITE 225: note = Tnp_P2
  SITE 233: note = Tnp_P3
  SITE 234: note = Tnp_P4
  SITE 245: note = Tnp_P5
MNEFIGIDVSKSQLDVRAHVSEATMVVENAQAGLEELIEWLKAVEPELVVMEASGGYERLCAAMLTQAGFAVAVVNARQVRAFALASGVLAKTDRVDARVLAHFAAAIRPAGQPLADEQRQLLDELMGRRRQLVGMMVMEKNRLGQARDRRVRRDIKSLIEILEKRIGVCDGELQQLIQASPVWRAQEDLLRSFKGIGPVNARTLLIELPELGKLNRKKIAALVGLAPIAHDSGKHRGRRMIAGGRGQVRCALYMAAISAIQANSIIRAFYERLRAAGKPGKVAITACMHKMLTILNAMMRNQTRWQEPKIA

SEQ ID NO: 12151 - protein, 350 aa, unidentified
  source 1..350: note = protein_1f149ad
  REGION 6..147: note = RuvC_domain
  SITE 9: note = RuvC_P1
  SITE 52: note = RuvC_P2
  SITE 87: note = RuvC_P3
  SITE 89: note = RuvC_P4
  SITE 92: note = RuvC_P5
  REGION 211..298: note = Tnp_domain
  SITE 219: note = Tnp_P1
  SITE 249: note = Tnp_P2
  SITE 257: note = Tnp_P3
  SITE 258: note = Tnp_P4
  SITE 270: note = Tnp_P5
MELHTIGIDLGKTVFHLVGLNQRGEVVVRKKFSRKQLLHFTANLWVELIGMEACGGSHFLGRALREQGHEVRLMPAQYVKPYVKTNKSDYIDAEAIAEAVERPKMRFVPIKSDDQLDLQSLHRVRERWVTRRTAVINQIRGLLLERGITLRQGRRHIDAALPGILEDASAQLSGALRLLLAQLRLELDHLQMRIDEADAVINKIAGDNDACRRLVAIPGIGPVTATAIIAAIGNGAAFKKGRGFSAWLGIVPGEYTTGGKQKLLGISKRGNSYLRRLFVQGARAVLQQSAKQSSGLSAWLAQLTTRTHSNVAAVALANKLARMAWAVLAKNEPYRPPMLAGAATECLACR

SEQ ID NO: 12152 - protein, 400 aa, unidentified
  source 1..400: note = protein_bcf36c3
  REGION 10..164: note = RuvC_domain
  SITE 13: note = RuvC_P1
  SITE 62: note = RuvC_P2
  SITE 102: note = RuvC_P3
  SITE 104: note = RuvC_P4
  SITE 107: note = RuvC_P5
  REGION 270..356: note = Tnp_domain
  SITE 278: note = Tnp_P1
  SITE 308: note = Tnp_P2
  SITE 316: note = Tnp_P3
  SITE 317: note = Tnp_P4
  SITE 329: note = Tnp_P5
MSERRAQVWAGIDAGKGHHWAAVVDETGATLWSKKIENDESVILNALGEILDLAEKVSWAVDISGTSSALLLALLSAHGQQAVYVPGRTVNRMSGAYRGEAKTDARDAYVIAETARHRRDFAEIDVPAQLAADLALLTAHRSDLVADRVRMINRLRDVLTGVFPALERAFDYSSNKGALVLLTRCQSPAAIRRRGRARLTAWLANRSVRSADSVAAIALEAAQAQRTVLPGEDVAGRIVADLAAQLLALDDRLKRIDKQIRETFRSHPQAEIIESLPGMGPILGAEFIVAAGDLTTYVDAGHLASAAGLVPVPRDSGRRTGNLHRPKRYSRRLRRVFYMSAQTSIIRDGPNRSFYLKKRSEGCKHVQAVIALARRRASVLWALLRDDRLFTPVPPVAQES

SEQ ID NO: 12153 - protein, 333 aa, unidentified
  source 1..333: note = protein_d7880ef
  REGION 9..163: note = RuvC_domain
  SITE 12: note = RuvC_P1
  SITE 68: note = RuvC_P2
  SITE 108: note = RuvC_P3
  SITE 110: note = RuvC_P4
  SITE 113: note = RuvC_P5
  REGION 209..296: note = Tnp_domain
  SITE 217: note = Tnp_P1
  SITE 247: note = Tnp_P2
  SITE 255: note = Tnp_P3
  SITE 256: note = Tnp_P4
  SITE 269: note = Tnp_P5
MSRIVKQVAGIDVAQKELVVTLGRISDDFSIELFAYKVFKNSNSGFISLVEWTNKLTENETDVRYVMEATGVYHQKFAYFLSENKYEVSIVLPNKISSYMRTLELKTITDKSCSQAIAQFGLERKLDLWHKPKTVYKELQQLTRERDQIVQERSIIKNQIHAERTEAEPNQKSMERMQARIRFLNSQEKEIKEDINCIVKENPDLKQIIDRIITIPGVGELTAVIVLAETNGFELIRNKSQLSSYAGLDVKEKQSGTSVKGKPRISKKGNRNLRKSMHLPALTAVKWDDNFKGIYARLVSKHGIKMKALVAIQRKILELIYILFKNETIYDKD

SEQ ID NO: 12154 - protein, 345 aa, unidentified
  source 1..345: note = protein_fd15f0e
  REGION 4..160: note = RuvC_domain
  SITE 7: note = RuvC_P1
  SITE 59: note = RuvC_P2
  SITE 99: note = RuvC_P3
  SITE 101: note = RuvC_P4
  SITE 104: note = RuvC_P5
  REGION 264..343: note = Tnp_domain
  SITE 272: note = Tnp_P1
  SITE 302: note = Tnp_P2
  SITE 310: note = Tnp_P3
  SITE 311: note = Tnp_P4
  SITE 324: note = Tnp_P5
MFLLGIDIAKLDHVASCIDSSSNEVIFSNFKFKNDFRGFSSLLDKIRTFDAENLIIGMESTSHYGENLISFLFKQHFKVALINPLQTSHLRKANIRDAKNDNLDSLNIAKALSFAKLNFISKKNIDCFSLKKLTRFRSNLIKQRSKTKIQLTSLLDLLFPELQYLFKSKIHSRAIYSLLKKYPSAEEIAALKDDEISNLLYASSKGHFKKAKSIELKSLAKTSVGIKDTSISLHVVQLIELIELYDKQIKDIVSKISDTVDKMDTKLLSVPGINIIACAIILGETNNFENFSSSKKLLAFAGLDPKIRQSGNFYASSCRMSKKDSPYLRRFSFYCMEHCQTLRKV

SEQ ID NO: 12155 - protein, 341 aa, unidentified
  source 1..341: note = protein_ccd15c7
  REGION 7..148: note = RuvC_domain
  SITE 10: note = RuvC_P1
  SITE 53: note = RuvC_P2
  SITE 88: note = RuvC_P3
  SITE 90: note = RuvC_P4
  SITE 93: note = RuvC_P5
  REGION 212..299: note = Tnp_domain
  SITE 220: note = Tnp_P1
  SITE 250: note = Tnp_P2
  SITE 258: note = Tnp_P3
  SITE 259: note = Tnp_P4
  SITE 271: note = Tnp_P5
MNSSMTIGIDLAKSIFFVVALSPSGKQLQRKKLRRAQVLSYLANQPQCVVALEACSGAHYWAREIQALGHEVKLLPPQHIKAYLRRQKNDYNDAEAIAEAAQHGRIRPVAPKTVEQVLNQNLHRIRKALVADQTRLINRTRALLAEHGVVIPEGKARFGSTVAALLEEGENSLPWRLRQLLDRQYQQYRLWEEELAWYTQEIESQAKQDEVCQNLISIPGFGPISSSAFRSWMGNGQQFKCGRDAAAALGLVPRQHSTGGKSILGRITKSGDKYLRALLIHGARSAIRYAHKHNDRLRQWVLSLVERRGYNKATVALANKMARIGWAVITRSERYQAAPCA

SEQ ID NO: 12156 - protein, 308 aa, unidentified
  source 1..308: note = protein_0c48427
  REGION 1..72: note = RuvC_domain
  SITE 10: note = RuvC_P3
  SITE 12: note = RuvC_P4
  SITE 15: note = RuvC_P5
  REGION 178..264: note = Tnp_domain
  SITE 186: note = Tnp_P1
  SITE 216: note = Tnp_P2
  SITE 224: note = Tnp_P3
  SITE 225: note = Tnp_P4
  SITE 237: note = Tnp_P5
MSGAYRGEAKTDARDAYVIAETARHRRDFTTIDVPAQLAADLALLTAHRSDLVADRVRMINRLRDILTGVFPALERAFDYSDSKGALVPLTGYQTPAAIRRRGQARLTTWLTTRKVRSAPTVAATAVEAAQAQHTVLPGGSIAAQLVADLATQILALDERIKNLDRQIGATFRTHPQAAIIESMPGIGPILGAELLVTAGDLANYADAGHLASAAGLVPVPRDSGRRKGNMHRPKRYSRRLRRVFYMSAQTSIIKDGPNRDFYLKKRGEGCKHVKAVIALARRQVDVLWALMRDNRIFTPDPPVTRTA

SEQ ID NO: 12157 - protein, 400 aa, unidentified
  source 1..400: note = protein_a924a4d
  REGION 10..164: note = RuvC_domain
  SITE 13: note = RuvC_P1
  SITE 62: note = RuvC_P2
  SITE 102: note = RuvC_P3
  SITE 104: note = RuvC_P4
  SITE 107: note = RuvC_P5
  REGION 270..356: note = Tnp_domain
  SITE 278: note = Tnp_P1
  SITE 308: note = Tnp_P2
  SITE 316: note = Tnp_P3
  SITE 317: note = Tnp_P4
  SITE 329: note = Tnp_P5
MSKRQVRVWAGIDAGKGHHWAAVVDDTGATLWSKKIDNDESAILTALGEILGLADEVHWAVDIAGTSSALLLALLAAHGQRTVYVPGRTVNRMAGAYRGEAKTDARDAYVIAETARHRRDFTTIDVPAQLAADLALLTAHRADLVADRVRMINRLRDMLTGIFPALERAFDYSAHKGALVLLTGYQTPAAIRRRGRARLTAWLANRAVRGADAVAATALEAAQAQQTALPGEDVAAQLVADLATQILALDDRLKQIDKQIRERFRSHPQAEIIESLPGMGPILGAEFIVAAGDLTAYTDAGHLASAAGLVPVPRDSGRRTGNLHRPKRYSRRLRRVFYLSAQTSIIREGPNRDFYLKKRDEGCKHVQAVIALARRRASVLWALLRDNRAFTPAPPATQTA

SEQ ID NO: 12158 - protein, 410 aa, unidentified
  source 1..410: note = protein_8f68cb2
  REGION 11..166: note = RuvC_domain
  SITE 14: note = RuvC_P1
  SITE 63: note = RuvC_P2
  SITE 103: note = RuvC_P3
  SITE 105: note = RuvC_P4
  SITE 108: note = RuvC_P5
  REGION 274..361: note = Tnp_domain
  SITE 282: note = Tnp_P1
  SITE 313: note = Tnp_P2
  SITE 321: note = Tnp_P3
  SITE 322: note = Tnp_P4
  SITE 334: note = Tnp_P5
MIIDEALPVYVGLDWAAEIHAVCVLDHNGHHLAAFTIEHTADGIALLIRRLAKHGAPADIQVGIERPNGRLVDLLLEAGHPVIPVSPNAIKTWREGEVVSGAKSDAGDAAVIAEYLRLRNHKLRPVQPYSPQTKALRTVVRSRDDLVQMRVAATNQLEALLDAHWPGAKAIFADTASAISLAFLRRYPTPAAAAHLGEKRLTAFTAKQGYSGKRPAAELLARLRNAPAGTTDEALSAAIHDSVSAFVEVVTALNNAIKQLDKSVATRLGEHPDAKIFTSLPRSGQINAAQVLAEWGDVREAYDHPDAVAALAGVTPVTKESGKRQHAVHFRWACNKRFRVALTTFADNSRHASPWAADIYNRARARNIDHPHAIRILARAWIRVIYRCWNDSTLYDPSLHGGARKLDIAA

SEQ ID NO: 12159 - protein, 340 aa, unidentified
  source 1..340: note = protein_39dc3de
  REGION 6..148: note = RuvC_domain
  SITE 9: note = RuvC_P1
  SITE 52: note = RuvC_P2
  SITE 87: note = RuvC_P3
  SITE 89: note = RuvC_P4
  SITE 92: note = RuvC_P5
  REGION 210..296: note = Tnp_domain
  SITE 218: note = Tnp_P1
  SITE 248: note = Tnp_P2
  SITE 256: note = Tnp_P3
  SITE 257: note = Tnp_P4
  SITE 269: note = Tnp_P5
MQITTIGLDIAKNVFQLHGVDDAGQPVLRRKVRRDQLLAVLGGFEPCLIGIEACATAHYWARQLQCLGHEVKLMPPAYVKAYVKRNKNDAADAEAICEAVRRPTMRFVAIKSADAQSVLMLHRARHLLVRQRTAQVSALRAHLAEYGIVAPRGRAHVRELVGVLNAGEAAIPELARQTLLLIAGMIDGLSQQIRQIEIELMAWHRANAACKRLETIPGIGFITATALVATVGDAAIFRSGRQFAAWLGLVPKQHSSGGKERMGAISKMGDRYLRHLLVVGATAVVRYTRRKQTTVSIWANQLLERKPARLVTVAVANKMARIAWAVMARDENYRAGPVTA

SEQ ID NO: 12160 - protein, 340 aa, unidentified
  source 1..340: note = protein_4541207
  REGION 7..149: note = RuvC_domain
  SITE 10: note = RuvC_P1
  SITE 53: note = RuvC_P2
  SITE 88: note = RuvC_P3
  SITE 90: note = RuvC_P4
  SITE 93: note = RuvC_P5
  REGION 211..300: note = Tnp_domain
  SITE 219: note = Tnp_P1
  SITE 249: note = Tnp_P2
  SITE 257: note = Tnp_P3
  SITE 258: note = Tnp_P4
  SITE 270: note = Tnp_P5
MEKASMIGLDIAKTVFEVHGRSAAGEVVLRRSLKRGQVEKFFAKLPKATIGLEACGSAHYWARVLCQLGHEVRLMPPAYVKPYVKRNKSDAIDAEACWEAMSRPNMRFVQIKTAEQQASLSLHRSRDLLVRQRTQLGNALRSLLSEFGIVAAKGRAGLASLVDELRAATLALPQEATFAALTLADQRAALELSIKQLERRITAQAKADDRAALLQTAPGVGPLGAHAALATVPDPTVFKSGRAFAAWLGLTPRLDGTGGRIRTGHITRQGDQTLRRLLVLGATAWLRQVRAHPEKASPWLRGMLARRPFKVVATAQAARTARILWAMLTHNQPYRAPAIG

SEQ ID NO: 12161 - protein, 342 aa, unidentified
  source 1..342: note = protein_c9c2aa7
  REGION 7..148: note = RuvC_domain
  SITE 10: note = RuvC_P1
  SITE 53: note = RuvC_P2
  SITE 88: note = RuvC_P3
  SITE 90: note = RuvC_P4
  SITE 93: note = RuvC_P5
  REGION 211..296: note = Tnp_domain
  SITE 219: note = Tnp_P1
  SITE 249: note = Tnp_P2
  SITE 257: note = Tnp_P3
  SITE 258: note = Tnp_P4
  SITE 270: note = Tnp_P5
MNNVTIIGIDLAKRVFHAHGAYIDGSVAFRKRLSRAQVLPFLATQASCVVAMEACASTHEWGRAIQQLGHDVRLIPPSYVKPYVKRQKNDTADAEAIAEAGSRPTMRFVAVKTEEQQARSMVFRTRDLLVRQRTQLINALRGHLAEHGVVAPQGPAQLKTLSSVLENADVAVPQLVRDIGRVYLEQIEQLSARVASLEKTLRHEAQCGEETRRLQMMPGIGPITTMAVEAFAPPMKTFKRGRDFAAWLGLVPAQHSTGGKQRLGRTSKMGQRDIRRLLIIEAMAVIRWVFRRGARPGSWLSHIMDRKPLMSVAVALANKMARSIWAMLTKKEDYQDPDLAAA

SEQ ID NO: 12162 - protein, 395 aa, unidentified
  source 1..395: note = protein_0623a79
  REGION 10..150: note = RuvC_domain
  SITE 13: note = RuvC_P1
  SITE 68: note = RuvC_P2
  SITE 108: note = RuvC_P3
  SITE 110: note = RuvC_P4
  SITE 113: note = RuvC_P5
  REGION 245..338: note = Tnp_domain
  SITE 252: note = Tnp_P1
  SITE 281: note = Tnp_P2
  SITE 289: note = Tnp_P3
  SITE 290: note = Tnp_P4
  SITE 303: note = Tnp_P5
MPESIPYLSVGLDVGADLIWMSIMLPNGTLTGKPFKILHSDPQSRELAVTKIKEAQEMCSLESRCFLESTGIYHIPLLYFLRDKRFDCSVINPIITKNTTNMNVRKLHNDKFDSKKAAKVGLDASLKTSTYLGVFSKVTTQTSLKLLESYPLAADMLAAPKDEIVETIRSTICFGEKYALAKYDAICQAAKDVAVFGRALPSNAVRIKLYIDSCKEYQKHLDAILDTLHESVDKLRGTPVYDRICLLQSLHGVGFLSSVVLIAEMGFFDLFSSTKIYAYFGLDPAVKQSGKFKGDKAHMSKRGSSLARRILHMIALNNLKVGETTKEPVNPVIHSYYADKCKSKKKNVAVGAVMHKICNIIFAMLRDNKPFERITPQEHCERYASEHPDKVSKAA

SEQ ID NO: 12163 - protein, 331 aa, unidentified
  source 1..331: note = protein_166907f
  REGION 7..154: note = RuvC_domain
  SITE 10: note = RuvC_P1
  SITE 59: note = RuvC_P2
  SITE 97: note = RuvC_P3
  SITE 99: note = RuvC_P4
  SITE 102: note = RuvC_P5
  REGION 202..289: note = Tnp_domain
  SITE 210: note = Tnp_P1
  SITE 240: note = Tnp_P2
  SITE 248: note = Tnp_P3
  SITE 249: note = Tnp_P4
  SITE 262: note = Tnp_P5
MEIKEIIGIDVSKLTLDAHIHLKGVAERFTNTVDGIKEMCVWANENLGPAMDGLLFVFEHTGLYSDTLEEFLDTARLPYRIVPGLEIKRSLGIARGKDDRADAKRIALYGWRTREEFVPRQRPDAKLADMKRLMSLRRKLVAQRAGHIANLGEQRRVLGGDPHQRLYSCQKAIIDCLDKEIAALESDIDGLIARDPKLNGMFTLLLTVKGIGKVTARFLIVYTNGFKWFASWRKFASYVGIAPFPNTSGTSLKGRTKVNRMANKEGKVLLNMCACTAVQYSHEMKRYYEKRIGEGKDKMSTMNIIRNKVLARAFAVVRRGTPYVDTMKFIS

SEQ ID NO: 12164 - protein, 319 aa, unidentified
  source 1..319: note = protein_5e7928a
  REGION 3..147: note = RuvC_domain
  SITE 6: note = RuvC_P1
  SITE 50: note = RuvC_P2
  SITE 90: note = RuvC_P3
  SITE 92: note = RuvC_P4
  SITE 95: note = RuvC_P5
  REGION 189..273: note = Tnp_domain
  SITE 197: note = Tnp_P1
  SITE 226: note = Tnp_P2
  SITE 234: note = Tnp_P3
  SITE 235: note = Tnp_P4
  SITE 246: note = Tnp_P5
MFVGIDVAKAELVISVLPSAERFTVENDERGVRTLVQRVASNRPQLIVLEATGGYELLAVAALAAASLPVVVVNPRQVRDFAKATGQLAKTDRIDADILARFADVVRPEVRLIPDAAAHELDALLTRRRQLLEMLQAERNRVGQVFGTGKKQVRKSLKSHITFLERELRSTDTDLGEMVRQSPVWRERDELLRSVPGVGPVLSRTLLADLPELGRLSRRAIAKLVGVAPLSRDSGTMRGRRFVQGGRATVRGVLYMAALVASRRNTVIREFYLRLVAAGKPKKLALVACMRKLLTILNTMMRTKTTWSAKAATAILVVA

SEQ ID NO: 12165 - protein, 363 aa, unidentified
  source 1..363: note = protein_fd30a4c
  REGION 41..192: note = RuvC_domain
  SITE 44: note = RuvC_P1
  SITE 97: note = RuvC_P2
  SITE 137: note = RuvC_P3
  SITE 139: note = RuvC_P4
  SITE 142: note = RuvC_P5
  REGION 237..323: note = Tnp_domain
  SITE 245: note = Tnp_P1
  SITE 274: note = Tnp_P2
  SITE 282: note = Tnp_P3
  SITE 283: note = Tnp_P4
  SITE 296: note = Tnp_P5
MHLPLIQLWTVTKRSDVAFTRKDGGHLKQYFSLGEFVMFYLGIDVSKNKLDCCFFYEKDYPKKKNKIFPNQTKGFDALNLWLSNLKVDPQQTIVLMEATSIYHEPLAEFLFSKDFNVCVANPARARYFAKSMSKLNKTDKVDSEVLAQFAMTSDLHYWKPLAPHIKLLNALLERRAVLLEDLLRERNRLEKADFINLVEPVLASIQASIQYLQCQIKDLDQQINDHIDQNSDLKKDRKLLCSIPAIADQTSLLMLSFFHSHTFEKASQAAAFVGLVPIHRQSGSSVRGRSQLSKAGSAKIRSGLYMSAVVATQHNPHIKELSERLLSNAKSKMMAIGAAMRKLIHICFGVLKHQQPYQANYST

SEQ ID NO: 12166 - protein, 339 aa, unidentified
  source 1..339: note = protein_b2e23ad
  REGION 6..147: note = RuvC_domain
  SITE 9: note = RuvC_P1
  SITE 52: note = RuvC_P2
  SITE 87: note = RuvC_P3
  SITE 89: note = RuvC_P4
  SITE 92: note = RuvC_P5
  REGION 211..296: note = Tnp_domain
  SITE 219: note = Tnp_P1
  SITE 249: note = Tnp_P2
  SITE 257: note = Tnp_P3
  SITE 258: note = Tnp_P4
  SITE 270: note = Tnp_P5
MKGTIIGLDLAKDIFHIAVLNQAGKQARKKKLRRRQLRLYFTQTEPCKVAMEVCASAHYWAREFQRRGHEVVLLPPQHVKGYLRGQKNDYNDALAIAESAQHGAIRPVIIKSIEQQDTQSFHRIRRQLVGEQTRLANQIRGLLAENGIVMRKGVSVVRRDIPEILGDADNGLSERFRALLCRQHQRFLDLDEELAWYKAQLVAEAKSDETCRRLSDVPGFGPVVSSAFKSWIGDGKQFKRGRDASAALGVVPRQHSTGGKELLLGISKRGDSYVRSLVIHGARSVVSHAGKKTDPLSVWINRLVATRGFNKAVVALTNKLIRIAWVVVARGEDYRPQAV

SEQ ID NO: 12167 - protein, 345 aa, unidentified
  source 1..345: note = protein_5631403
  REGION 6..147: note = RuvC_domain
  SITE 9: note = RuvC_P1
  SITE 52: note = RuvC_P2
  SITE 87: note = RuvC_P3
  SITE 89: note = RuvC_P4
  SITE 92: note = RuvC_P5
  REGION 211..297: note = Tnp_domain
  SITE 219: note = Tnp_P1
  SITE 249: note = Tnp_P2
  SITE 257: note = Tnp_P3
  SITE 258: note = Tnp_P4
  SITE 270: note = Tnp_P5
MELHTIGIDLGKTVFHLVGLNLRGEAVVRKKLSRRQLLQFTANLHVDLIGMEACGGAHFLGRALRAQGHEVRLMPAQYVKPYVKTNKNDYIDAEAIAEAVARPTMRFVPIKTDDQLDMQSLHRVRERWVMRRTAIVNQIRGLLLERGITLRKGRRYVDAALPGILEDADSKLSGALRVLLAQLKLELDQMAIRIDDADAVLNKTAHENEACQRLVEIPGIGPVTATALIAAIGNGAAFRKGREFAAWMGVVPREHSTGGKQKLLGISKHGNSYLRRLFIQGARAVLQQRTKQTPALSVWLAQLTIRAHQNVVAVALANKLARIAWAVLAKEEQYQPQALTSLEAA

SEQ ID NO: 12168 - protein, 393 aa, unidentified
  source 1..393: note = protein_281c2f8
  REGION 5..162: note = RuvC_domain
  SITE 8: note = RuvC_P1
  SITE 62: note = RuvC_P2
  SITE 101: note = RuvC_P3
  SITE 103: note = RuvC_P4
  SITE 106: note = RuvC_P5
  REGION 269..355: note = Tnp_domain
  SITE 277: note = Tnp_P1
  SITE 307: note = Tnp_P2
  SITE 315: note = Tnp_P3
  SITE 316: note = Tnp_P4
  SITE 328: note = Tnp_P5
MYLNIGIDIAKDAHEACILDDEGKQIGRYIQIKNLKSSIEKFIERVESVSNRLNSIPRIGMEATGIYWYAIYSELSKHYEIHAYNPSQVKGFAAVNIRGSKTDKIDAKTIAAILQFGEAPKTCYGDKKRMELKEYCGFHFKLKSNVANLKKRLIRNVHLIFPRYDQMFSSIFTKTSIAILNEVPRPSDMLGMGEEKLYEFMKKTSRNHYSPEKTRKLLEMAKDSISPDFIEEALLFEVKSLLNLIEYMESQIKEVETRILAAWETLKDKHYLQTIPGISDLMAAMIWAELGDVENFQHPDQIVAFAGYDPKVKKSGNKEVISGPNKRGSRLLRWVLGRAVVQAKMHNPVIKQYFMKKISEGKHYNTALCAAAKKMIRIIWSVEKNKKPFQVPT

SEQ ID NO: 12169 - protein, 451 aa, unidentified
  source 1..451: note = protein_55c343c
  REGION 9..153: note = RuvC_domain
  SITE 12: note = RuvC_P1
  SITE 57: note = RuvC_P2
  SITE 92: note = RuvC_P3
  SITE 94: note = RuvC_P4
  SITE 97: note = RuvC_P5
  REGION 285..371: note = Tnp_domain
  SITE 291: note = Tnp_P1
  SITE 323: note = Tnp_P2
  SITE 331: note = Tnp_P3
  SITE 332: note = Tnp_P4
  SITE 343: note = Tnp_P5
MDVVNFNAAGIDIGSRSHYAAIGQELEDVKEFGVYAEDLTSLCEWFVSNDVTTVAMESTGDYWQNLYTELISFGFEVVLVNGKFTKNAKGKKTDVKDCRWIQKLHTLGLLTGSFLPDLVTEHLRTYCRQRTNWIELASSATHKMQKYLKLLNFRLDVVVKDVCGLTGMKIIEDICKGNLDPYNLAEHRHFNCRKPKEEIAKALHGNNREDFLFGLQQELKSYQFFQRNIKACDKKIEQFIKQELKQYPERKKLKTTEKTYKRINKNAPKIKNMNQIAFRYFDGVDLFAIEGLSHSSILSIMSEIGPEGFKKFPTAKHFTSWLRLAPNNKISGGKILSNRVPKGSNRLKIALRQAANAIGNLKDTHLSDFFRRVAYRKGRHSAVSATARKLAVIIWNMITKKIQYQPPKLYLFLDQKRKLGLVKRIKKQIDKFDLKPEDLGFNNSIIINKQN

SEQ ID NO: 12170 - protein, 339 aa, unidentified
  source 1..339: note = protein_cff330d
  REGION 6..148: note = RuvC_domain
  SITE 9: note = RuvC_P1
  SITE 52: note = RuvC_P2
  SITE 87: note = RuvC_P3
  SITE 89: note = RuvC_P4
  SITE 92: note = RuvC_P5
  REGION 211..302: note = Tnp_domain
  SITE 219: note = Tnp_P1
  SITE 249: note = Tnp_P2
  SITE 257: note = Tnp_P3
  SITE 258: note = Tnp_P4
  SITE 270: note = Tnp_P5
MKVTTIGLDLAKNVFQIHGIYQDGEVAFNRALRRAQVLKFFESLEPCLVGIEACGTSHHWARELIKLGHDVKLIPPVYVKPYVKRGKSDAVDAEAICEAVTRPTMRFVEVKTPEQQAILAVHRTRDLIVRQRTQTINMLRAQLAEFGIVLPQGIYHALGFAKNCLNGEQTNLPSVVGDVIFELCEQLLFLHSKINRYIREMNKIARQEKRVGLLRTIPGVGPITASAIVATVGSGKQFNNGREFAAWLGLTPINKSSGGKERLGHISKMGDQYIRRLLVLGMTSRIRSIRAEPEKFDPWFADILARKPARLAAVAMANKTARMIWAVLTRNEPYKVRAT

SEQ ID NO: 12171 - protein, 270 aa, unidentified
  source 1..270: note = protein_e008fa7
  REGION 8..157: note = RuvC_domain
  SITE 11: note = RuvC_P1
  SITE 62: note = RuvC_P2
  SITE 100: note = RuvC_P4
  SITE 103: note = RuvC_P5
  REGION 222..270: note = Tnp_domain
  SITE 230: note = Tnp_P1
  SITE 260: note = Tnp_P2
  SITE 268: note = Tnp_P3
  SITE 269: note = Tnp_P4
MGDGIRFVGLDVHKRQTVVALADCGREGEVRHYGAVETDRSSIEKLARKLARGGKPLRFCYEAGPCGYGIQRWLTGLGHGCEVVAPSLIPCRPGERVRTDRRDAIKLARLHRAGELTAVWVPEPAHEAMRDLVRARAVAVYAVRRARQQLSGFLLRHDRIYSRKAWTGAHRRWLAELKFEHAAQRIVLEDYINAVGTAEQRRDGLTAQIRELLPSWSLAPIVEVVQALRGVAAIVAIIIVAELGDPRRFDSPRQLMAYLELVPSEASSGE

SEQ ID NO: 12172 - protein, 371 aa, unidentified
  source 1..371: note = protein_66ddad6
  REGION 12..141: note = RuvC_domain
  SITE 38: note = RuvC_P2
  SITE 78: note = RuvC_P3
  SITE 80: note = RuvC_P4
  SITE 83: note = RuvC_P5
  REGION 236..322: note = Tnp_domain
  SITE 244: note = Tnp_P1
  SITE 275: note = Tnp_P2
  SITE 283: note = Tnp_P3
  SITE 284: note = Tnp_P4
MPQVAAGLEEGITGIDRLHSLLATHTDPGADPDEVVIGIETERGPWVRALLAAGYRVHAINPLQVARYRERQTISGAKSDAGDAHALADMVRTDGHQLRTIAGDSDTAAALKVVARAHKTLVWERTRHVLRLRHALRDFFPAALAAFDDLTAPDALELLTKAPDPAAAARLTTTQITVAAAIRVALRTPHLTQPAAVTAAYAAVVRSQAAILGALRTEITTLQTEVETLFTRHPAAEVYLSQPGLGSILAARVLAEFGDDPTRYDGARARKNYAGTSPITRASGKSRAVHARHVHNDQLLDALGRQAYAALSGSPGARAYYDQLRSRGTPHHAALRQLANRLVGILHGSLKTGTPYNETTAWNHHTPPLAA

SEQ ID NO: 12173 - protein, 319 aa, unidentified
  source 1..319: note = protein_52372d2
  REGION 6..148: note = RuvC_domain
  SITE 9: note = RuvC_P1
  SITE 52: note = RuvC_P2
  SITE 87: note = RuvC_P3
  SITE 89: note = RuvC_P4
  SITE 92: note = RuvC_P5
  REGION 186..272: note = Tnp_domain
  SITE 194: note = Tnp_P1
  SITE 224: note = Tnp_P2
  SITE 232: note = Tnp_P3
  SITE 233: note = Tnp_P4
  SITE 245: note = Tnp_P5
MEITTVGIDLAKNVFQVHAISGTGEVLARRALRRAQVMPFFRKLAPCLIGMEACGTSHHWARELAALGHTVRLMPPAYVKPYVKRGKTDAADAEAICEAVTRPTMRFVPVKSVEQQAALSLHRTRDLLVRQRTQLISMIRGLLAEFGIDIPKGITHALAEQAIEAQDRIRQLERDLLAWYRSNDLARRIATVPGVGLLEASALAATVTDPTQFRSGRQFAAWLGLTPLNNSSGGKERLGRISKMGDQYLRRLLVTGMTSLVRRNRHHPDAADPRVTALLGRKPIRLVTVALANRAARAIWVIMVRGEIYRMPAPRLAAT

SEQ ID NO: 12174 - protein, 398 aa, unidentified
  source 1..398: note = protein_b4ec90e
  REGION 9..162: note = RuvC_domain
  SITE 12: note = RuvC_P1
  SITE 60: note = RuvC_P2
  SITE 101: note = RuvC_P3
  SITE 103: note = RuvC_P4
  SITE 106: note = RuvC_P5
  REGION 224..309: note = Tnp_domain
  SITE 232: note = Tnp_P1
  SITE 262: note = Tnp_P2
  SITE 270: note = Tnp_P3
  SITE 271: note = Tnp_P4
  SITE 282: note = Tnp_P5
MSKTKGEIIGVDPHKMSVTIEVVDTHERLLGSGRFETTNAGYAAMQRYVKQWPDRLWAVEGANGAGRPLAQRLVAAGEQVVDVPAKLAARVRLFDTGHNRKTDALDAHSIAVVAVRTEGLRVLVEDGELEALRMLTDRRDELAHQRVQTVNRLQRLLSELLPGQRKRDLSAAQAKAMLVTVRPRDIAGKTRRRMAAEEIADLVAVDAKLKKIKAELEAAVTARGSHLMDIYGIGPAGAARVLADVGDVARFADRNRFASWTGTAPLDASSGEQARHRLSRAGNRRMNHVLHVAAIVQIRHDTKGRAYYRRKLAAGKTPMEALRCLKRRLSDVVYRQLIADAQQQDGADPGGHCGAALQSSAVDSHPLIDTSDQPLPGPANPTLRPESDPVKNLVPSTR

SEQ ID NO: 12175 - protein, 320 aa, unidentified
  source 1..320: note = protein_dad1664
  REGION 10..156: note = RuvC_domain
  SITE 13: note = RuvC_P1
  SITE 55: note = RuvC_P2
  SITE 95: note = RuvC_P3
  SITE 97: note = RuvC_P4
  SITE 100: note = RuvC_P5
  REGION 190..276: note = Tnp_domain
  SITE 198: note = Tnp_P1
  SITE 227: note = Tnp_P2
  SITE 235: note = Tnp_P3
  SITE 236: note = Tnp_P4
  SITE 248: note = Tnp_P5
MAMEVQPIDIGIDVGKNELTLARSDLEGIRSIDNTPSAISAWLRSLPGPARLAVEATGIFHVELIERAHRAGHTVYVIDGYRLNRYREGIGGRAKTDPGDARLLLRYLQREANDLRPWSPPPKGYRALQQLLLRRARLVQAKTRLDQSLRGLPQLGPSRRSLIRHLDQLDQILIRRMRKVLLGQQWKEHARRLQAVEGIGEITAAALVMAFHRGRFTGADAFIAFLGLDVRVRESGSYRGRRKLTKKGAPELRRLLYMAAMAARRSSTWEGFYRRHRDRGLSRIQSLVALARKLARIAFALLKNGSEYQPRIRQEGCIAT

SEQ ID NO: 12176 - protein, 401 aa, unidentified
  source 1..401: note = protein_6b0a80e
  REGION 9..162: note = RuvC_domain
  SITE 12: note = RuvC_P1
  SITE 60: note = RuvC_P2
  SITE 101: note = RuvC_P3
  SITE 103: note = RuvC_P4
  SITE 106: note = RuvC_P5
  REGION 224..309: note = Tnp_domain
  SITE 232: note = Tnp_P1
  SITE 262: note = Tnp_P2
  SITE 270: note = Tnp_P3
  SITE 271: note = Tnp_P4
  SITE 282: note = Tnp_P5
MSSSKHVIIGVDPHKMSVTIEVVDIHERLLGSGRFATDKAGYAAMQRYVKQWPDRVWAVEGANGAGRPLAQRLVAAGENVVDVPAKLAARVRLFDTGHNRKTDALDAHSIAVVAVRTDGLRVLVEDGHLEALRMLTDRRDELAHQRVQTVNRLQRLLSELLPGLRKRDLSAAQAKAMLATVRPRDIAGKTRRRMAAEEIRDLVTVDAKLKKIKAELKAAVLERGSHLMDIYGVGPAGAARVLADVGDVARFADRNRFASWTGTAPLDASSGEQTRHRLSRAGNRRMNHLLHVAAIVQIRHDTEGRAYYRRKLATGKTPMEALRCLKRRLSDVVYRQLVADAQRAQQRDGADPGGHCGATLHSSAADLHPLIDTSDQPLPGPAQPTLRRAPAIRKTLTRAAP

SEQ ID NO: 12177 - protein, 311 aa, unidentified
  source 1..311: note = protein_5de19ba
  REGION 5..147: note = RuvC_domain
  SITE 8: note = RuvC_P1
  SITE 52: note = RuvC_P2
  SITE 92: note = RuvC_P3
  SITE 94: note = RuvC_P4
  SITE 97: note = RuvC_P5
  REGION 188..272: note = Tnp_domain
  SITE 196: note = Tnp_P1
  SITE 225: note = Tnp_P2
  SITE 233: note = Tnp_P3
  SITE 234: note = Tnp_P4
  SITE 245: note = Tnp_P5
MQDIIGIDISKDRLDAFRLSDRQHNAFGNDKAGFKALLKWIGSAEGLRIVYEPTGPYHRGMEAALADVGHALVKVNPRQARRFAEATGTQAKTDRVDAMLLARMGLALDLPPRPVRGELMNELRELHVARLALIKDRTATGNRADTATIGLIRRQAKARLAIIEKQLAEVDEAITARIADDPDLAERLGILTSIPGIGAVTACMLLIEMPELGTLEPKQAASLAGLAPFTRRSGKWKGKEMIRGGRASLRAAIFMPALVAIRFNADLKRKYQQLIDGGKAPKLAITAVMRKLILLANALLRDGRKWADRPT

SEQ ID NO: 12178 - protein, 319 aa, unidentified
  source 1..319: note = protein_32debff
  REGION 3..148: note = RuvC_domain
  SITE 6: note = RuvC_P1
  SITE 50: note = RuvC_P2
  SITE 90: note = RuvC_P3
  SITE 92: note = RuvC_P4
  SITE 95: note = RuvC_P5
  REGION 189..273: note = Tnp_domain
  SITE 197: note = Tnp_P1
  SITE 226: note = Tnp_P2
  SITE 234: note = Tnp_P3
  SITE 235: note = Tnp_P4
  SITE 246: note = Tnp_P5
MLVGIDVAKAELVVGTRPAAERWTVANDERGVRTLVERLTRDAPALIVLEATGGYELLAVGALVAAGLPVVVVNPRQVRDFARATGQLAKTDRIDADVLALFAERVRPEVRPLKGEAAQELDALLARRRQLLDMLQAEKNRLGQVFGRGHVRVKKSLKTHIAYLERELRIADTDLGTMIRQSPVWRERDELLRSVPGVGPVLSRTLLADLPELGRLSRREIAKLVGIAPLSRDSGTLRGRRFIHGGRASVRAVLYMAALVATKRNRVIRAFYQRLVAAGKPKKLALVACMRKLLTILNVMVRTHQRWCAELAQPALANA

SEQ ID NO: 12179 - protein, 347 aa, unidentified
  source 1..347: note = protein_b791d6e
  REGION 7..149: note = RuvC_domain
  SITE 10: note = RuvC_P1
  SITE 53: note = RuvC_P2
  SITE 88: note = RuvC_P3
  SITE 90: note = RuvC_P4
  SITE 93: note = RuvC_P5
  REGION 212..304: note = Tnp_domain
  SITE 220: note = Tnp_P1
  SITE 250: note = Tnp_P2
  SITE 258: note = Tnp_P3
  SITE 259: note = Tnp_P4
  SITE 271: note = Tnp_P5
MKHASIIGLDLAKNVFQVHGADAGGSPVFNRKLRRGEVLRFFEKLPSCLVGIEACGSAHYWAREIAALGHDVRLIPPAYVKPFVKRGKTDAADAEAISEAVIRKTMRFVPIKTAEQQAEAMMLKSRGLLVKQQTQAVNALRSHLAELGIITAAGLAKVATLVAIVRDETDPRLPSAARFALMAIADQIEALMDQIDRLERAIVAAARRDEDMRRLTTIPGVGAITAATIKALVPDPNGFKSARHFAAWLGLTPRPHSSGGKERLGRISKMGNPELRCLLVLGATSVLRIARKDDRARPWLKALLARRPFKVAAIALANKMARIIWALLNKGGIYQRPEPLTMTARAI

SEQ ID NO: 12180 - protein, 287 aa, unidentified
  source 1..287: note = protein_28e0a03
  REGION 14..96: note = RuvC_domain
  SITE 35: note = RuvC_P3
  SITE 37: note = RuvC_P4
  SITE 40: note = RuvC_P5
  REGION 159..245: note = Tnp_domain
  SITE 167: note = Tnp_P1
  SITE 197: note = Tnp_P2
  SITE 205: note = Tnp_P3
  SITE 206: note = Tnp_P4
  SITE 218: note = Tnp_P5
MNRIVVGVDIAKRVFQLHWVQPERRMVKPFVVGNKNDAADARGIWMAVQQPGIKAVAVKSEEQQAVLALHRMREQLVKFRTAQINGLRGLLTEYGEVMPQGRAGIKRDISSALGRLSDRLPAMVIDALREQYARLNELDEQIAQIERRLRQWQRGDSATQRIAAIPGVGLLCATAAVATMGDPKAFKSGREFAAWLGLVPRQTGTGGRVQLLGISKRGDKYLRTLLIHGARSVLTHSKSPPEWLTELLKRRPKNVAVVAMANKMARTIWALTAHERAYQSGYVSRPA

SEQ ID NO: 12181 - protein, 403 aa, unidentified
  source 1..403: note = protein_81c7574
  REGION 10..161: note = RuvC_domain
  SITE 12: note = RuvC_P1
  SITE 60: note = RuvC_P2
  SITE 98: note = RuvC_P3
  SITE 100: note = RuvC_P4
  SITE 103: note = RuvC_P5
  REGION 269..354: note = Tnp_domain
  SITE 276: note = Tnp_P1
  SITE 307: note = Tnp_P2
  SITE 315: note = Tnp_P3
  SITE 316: note = Tnp_P4
  SITE 327: note = Tnp_P5
MEHGTIRFGSVDWGSEGHAACVVDAEGTAIDEFQVAHTGAGLTELCRRFRRAGVQRVAIERPDGPVVDALMDAGLEVVVVSSRAVKGLRTRYGLAGNKDDRSDAFMLADCLRTDGHRWASLQPDQPQTLALRAAVRTRKDLVATRIATANQLRAHLQLVFPGAVGLFADIDSAVSLDFLERFSTAAKAAWLSERRLAAWLAANAYSGRTGVGTLLQRLQGAPAGLHGAAAQAQAAVTLALVRVLRTLLTEIASLEAQIREQLALHPDGFIFQSLPRSGCIRAASLLAEIGDCRARFPSPESLAALAGAVPSTRSSGKLHVVTFRWACDKKLRDAILDFAQDSMRANAWADRLYHQHRARGHTHPHASRVLARAWIYVIWRCWQDRVAYQPERHRALQALRVAA

SEQ ID NO: 12182 - protein, 400 aa, unidentified
  source 1..400: note = protein_4bb7cce
  REGION 11..166: note = RuvC_domain
  SITE 14: note = RuvC_P1
  SITE 63: note = RuvC_P2
  SITE 103: note = RuvC_P3
  SITE 105: note = RuvC_P4
  SITE 108: note = RuvC_P5
  REGION 273..358: note = Tnp_domain
  SITE 281: note = Tnp_P1
  SITE 311: note = Tnp_P2
  SITE 319: note = Tnp_P3
  SITE 320: note = Tnp_P4
  SITE 332: note = Tnp_P5
MIDISDIDVFLGLDVGKGEHHATAVTSAGKKALDKRLPNSEPKLREVFTKLQAKHGIVLVVVDQPASIGALPLAVARAVGCQVAYLPGLTMRRIADLYPGEAKTDARDAFIIADAARAMPHTLRSIELDDETVAELEMLVGFDDDLVAEANRLSNRLRGLFTQVHPHLERVLGPRMQHPAVLVLLERLGSPAQIRQTGRRKVTHLLRPKAPRMAARLTEDVFTALDEQTVVVPGTEAAALIVPSLARSLTAVLDQRRLLEKRLDELLETHPLSQVLTSMPGVGVRTAARLLIDVGDGTRFPSAAHLAAYAGLAPTTRSSGSSIRGEQQSRRGNKQLKRAFFLSAFAALSDPASRTYYDKKIKEGKHHTQALLCLARRRADVLFAMLRDGTFYQPPTPVAP

SEQ ID NO: 12183 - protein, 420 aa, unidentified
  source 1..420: note = protein_16d868b
  REGION 9..157: note = RuvC_domain
  SITE 12: note = RuvC_P1
  SITE 63: note = RuvC_P2
  SITE 97: note = RuvC_P3
  SITE 99: note = RuvC_P4
  SITE 102: note = RuvC_P5
  REGION 256..344: note = Tnp_domain
  SITE 264: note = Tnp_P1
  SITE 295: note = Tnp_P2
  SITE 303: note = Tnp_P3
  SITE 304: note = Tnp_P4
  SITE 315: note = Tnp_P5
MKVVYQTCCGVDVHKSFLVATIIKTTSGIEPSYQKKRFSTFNNSILQFKDWLLKNHCRDVCMESTGKYWVPVSNLLEDEINVTIANPKWVKAVNGNKDDVKDSKWIGDLFRLGLVPGSYIPCKPIRILREFTRYRYKLTCCRSSEKNRYQNALTVCNVALDSVVSDIFGKSATSVIDYLIEQSGNSVNHEEIASRLLRSLKKKSDSVIESIEGYQMTDSQKYRMRLVCAHLDYITSTINDIDTMLDSLVAPYENAVQLLCTIPGVDRNSAITVISEIGTDMTTFSNSKRLCCWAGLTPGSNKSAGKKKSVRITRAGVYLKPALVQAAHAAVKSNKSPYYKQKYERIMKRRGKKRAIIAIARMILTAIYQMLSTGEAWNPTDLYKIDMPEPLKEKQKEKAIKQAKKLLIREGILSESQFAS

SEQ ID NO: 12184 - protein, 403 aa, unidentified
  source 1..403: note = protein_ddbd524
  REGION 5..160: note = RuvC_domain
  SITE 8: note = RuvC_P1
  SITE 57: note = RuvC_P2
  SITE 97: note = RuvC_P3
  SITE 99: note = RuvC_P4
  SITE 102: note = RuvC_P5
  REGION 268..354: note = Tnp_domain
  SITE 276: note = Tnp_P1
  SITE 307: note = Tnp_P2
  SITE 315: note = Tnp_P3
  SITE 316: note = Tnp_P4
MRIYIGLDWGSQQHAVCALDAQGQRLTQFMIGHDRAGLAELRQRLAKISASSEISVAIERPTGLLVDTLVEAGYTVVPIHPNTVKATRPRYHIAGGKTDSSDAFLLADLLRTDGHRFHPLTPESDAIKALRAWVRTRDDLVAARLALANQLRALLDSFWAGASVIFADLDSPIALAFLSRYPTPSSAAHLGEKRLASFLAQHHYCGRRPLPELLARLKGAPCGHCGPLESEAKGELVRSLAAVLSTLLEQLKQLTARIEHEIASLEDGQHLMSFPRIGRVNAAQLLAELGSVRERFPTDAALAGEAGVSPVTRQSGKSHAVVFRWACNKRLRAALTTFADNSRHASPWAASLYAKARARGIDHPHAIRILGRAWLRVIWRTWIDHKPYDPTKHRNAVPLLTPA

SEQ ID NO: 12185 - protein, 316 aa, unidentified
  source 1..316: note = protein_d231b19
  REGION 10..156: note = RuvC_domain
  SITE 13: note = RuvC_P1
  SITE 55: note = RuvC_P2
  SITE 95: note = RuvC_P3
  SITE 97: note = RuvC_P4
  SITE 100: note = RuvC_P5
  REGION 190..277: note = Tnp_domain
  SITE 198: note = Tnp_P1
  SITE 227: note = Tnp_P2
  SITE 235: note = Tnp_P3
  SITE 236: note = Tnp_P4
  SITE 248: note = Tnp_P5
MAMAVETLQLGVDVAKAELVLCQGWDEQLVTLVNERRAIRSYLKHLSGPTALAVEATNRFHLALVEEAQALGHTVYVVDGYRLNAYRKSIGGRAKTDASDARLLLRYLRHEQTSLRPWSPPPAGYNRLIRLLRRRASLIQAKVALTQSLQELPELKAAVRSLLRQFARLDLLIQTRLRQALAEHGWAADAQRCQAIEGIGPLTAAGLVTVFRRGAFHSSDAFIAFLGLDVRVRDSGQFTGRRKLTKQGDPELRRLLHNAAMAACRCATWQPFYQRYRNRGLSTTQCLVILARKLARIAFALLKNQSTYQPNSTPMP

SEQ ID NO: 12186 - protein, 345 aa, unidentified
  source 1..345: note = protein_053725d
  REGION 4..158: note = RuvC_domain
  SITE 7: note = RuvC_P1
  SITE 55: note = RuvC_P2
  SITE 96: note = RuvC_P3
  SITE 98: note = RuvC_P4
  SITE 101: note = RuvC_P5
  REGION 221..305: note = Tnp_domain
  SITE 228: note = Tnp_P1
  SITE 258: note = Tnp_P2
  SITE 266: note = Tnp_P3
  SITE 267: note = Tnp_P4
  SITE 278: note = Tnp_P5
MITIGIDPHKSSLTAVALDHTGHQLGARRFPLNAGTLRALLGWAVGWPQRQIAVEGAHGLGRGIAQQLTATGEHVLDVPATLAARVRLLTTGGGRKADTHDAHAVAQVAQHQQQRLRVVVAEDQTVILRLLSERRDDLTAERTRLLNRLHQLLRELIPGGADLHLTADKAAALLRGVRPATATDACRRDLARDLLADLRRLDRRLADNETQLRDALAATRSGLPEIHGLSVITAAKILGLVGDVTRFPSSGHFASYSGTAPLDASSGQRVRHRLNTGGNRQLNATLHTIAVCQARDPGPGRIYYLRKLAENKTPNEARRALKRRLANVIYRQLLQDQRRSASPAA

SEQ ID NO: 12187 - protein, 391 aa, unidentified
  source 1..391: note = protein_aad1ef0
  REGION 4..163: note = RuvC_domain
  SITE 7: note = RuvC_P1
  SITE 60: note = RuvC_P2
  SITE 101: note = RuvC_P3
  SITE 103: note = RuvC_P4
  SITE 106: note = RuvC_P5
  REGION 266..353: note = Tnp_domain
  SITE 274: note = Tnp_P1
  SITE 304: note = Tnp_P2
  SITE 312: note = Tnp_P3
  SITE 313: note = Tnp_P4
  SITE 326: note = Tnp_P5
MIYVGIDVAKDKHDCFITNSDGEVLFKSFTIANNREGFETLFQRIQSVSDDLTKVKVGLEATGHYSYNLLGFLLDNGLPTFVINPLHTNLYRKSLSLRKTKTDKVDSHTIASMIMSDVNLKSYSDTSYHNEKLKSLTRYRFDKVKERAKLKSSVSRLVCILFPELEKLVPQLHIASVYALLSEFPSAHAVASAHLTRLTHLLSESSKGRYGKDMAIIFREAARNSIGSNMPAKSLELKHTIKLIRELTSEIDEIEIEIKSIMDDINSPILTIPGISYRMGAMIIAEIGDFNRFNSADKILAYAGMSPSTYQSGQLDNCYSHMEKRGSRYLRYALYNATKYVCHWDPTFAEYLAKKRAEGKHYNVAISHAVKKLVRVIYAMEKSGQVYNKAS

SEQ ID NO: 12188 - protein, 343 aa, unidentified
  source 1..343: note = protein_429abbf
  REGION 6..149: note = RuvC_domain
  SITE 9: note = RuvC_P1
  SITE 54: note = RuvC_P2
  SITE 89: note = RuvC_P3
  SITE 91: note = RuvC_P4
  SITE 94: note = RuvC_P5
  REGION 213..300: note = Tnp_domain
  SITE 221: note = Tnp_P1
  SITE 251: note = Tnp_P2
  SITE 259: note = Tnp_P3
  SITE 260: note = Tnp_P4
  SITE 272: note = Tnp_P5
MQISRVGIDLAKDVFQLHGVDCHEKAVWHRRLKRNNWLKVLLKTVEPGCEIGMEACAGAHHWARLLIQKGFTVKLIAPQFVKPYVKSNKNDAKDAEAICEAMSRPSMRFVSVKTVEQQDIQATHRIRSELISQRTAKANQIRGLVAEYGLVAPQRMNHLRVAIPMWLEDAENGLTDRFRCLLHGLWHDLKTLDNRVDELGCEINRIAENDPAAKRLQQLRGVGPMIATALVAAVGNAQQFANGRQMSASLGLTPRQHSSGNKDRLLGITKRGDAYLRCLLIHGARAAIYAAKGKDDRLSQWVTELAARRHPNVAAVALANKTARIAWAMLTQGTDYKPDFIAA

SEQ ID NO: 12189 - protein, 325 aa, unidentified
  source 1..325: note = protein_ef05db9
  REGION 5..155: note = RuvC_domain
  SITE 8: note = RuvC_P1
  SITE 58: note = RuvC_P2
  SITE 98: note = RuvC_P3
  SITE 100: note = RuvC_P4
  SITE 103: note = RuvC_P5
  REGION 196..281: note = Tnp_domain
  SITE 204: note = Tnp_P1
  SITE 234: note = Tnp_P2
  SITE 242: note = Tnp_P3
  SITE 243: note = Tnp_P4
  SITE 255: note = Tnp_P5
MTIVVGVDIAKKTFDIAVLQSNGKYRTKGNLSNDSSGFRAFEQWLQQYAEPGAWIVVEATNIYHEALGDFLLARGYRVCVMNPARIASYAQSQMQRVKTDKVDAKLIALYGARHVGDLQPWQPEPLSVRQLQALVRRYEELKELFQMEVNRLETAKTDPVKESILSVAAHLERQIEQTAKAIRDHIDDDPDLRGKRDLLKSIDGISDQTAALLLAELGTISRFDSARAVVAFAGLNPRLRESGQHKGQTSISKMGSRLLRAGLFMPAISAMRHNAPIRALRIRLKKNGKVGKQIICAAMRKLLQIAYGVLKSGQPFNPELALARG

SEQ ID NO: 12190 - protein, 334 aa, unidentified
  source 1..334: note = protein_29d6534
  REGION 7..149: note = RuvC_domain
  SITE 10: note = RuvC_P1
  SITE 53: note = RuvC_P2
  SITE 88: note = RuvC_P3
  SITE 90: note = RuvC_P4
  SITE 93: note = RuvC_P5
  REGION 209..296: note = Tnp_domain
  SITE 217: note = Tnp_P1
  SITE 247: note = Tnp_P2
  SITE 255: note = Tnp_P3
  SITE 256: note = Tnp_P4
  SITE 268: note = Tnp_P5
MENIALIGIDLGKNSFHIHCQDRHGKAVYRKKFTRQKLYEFLATCPATTIVMEACGGAHFMVRKLSEMGHTPKLISPQFVRPFVKTNKNDFVDAEAICEAASRPSMRFVQPRTESQQAMYALHRVRESLVRDKVTATNQIQAFLLEFGISAPKGPTLMKRLAEILETNDLPPYLVTLLEKLRKHYDYLVEQIKDLETQLKITLKEDSTAQRLLSIPCVGPLTASLLSTQLGDGKQYDSSRDFAASTGLVPRQYSTGGRTTLLGISKRGNKKLRALLVQCSRVYLRTLEYQSGKLADWVRELLLRKNNFVVTCALANKLARIAWALTTRQQSFEA

SEQ ID NO: 12191 - protein, 340 aa, unidentified
  source 1..340: note = protein_03114d1
  REGION 5..151: note = RuvC_domain
  SITE 8: note = RuvC_P1
  SITE 53: note = RuvC_P2
  SITE 90: note = RuvC_P3
  SITE 92: note = RuvC_P4
  SITE 95: note = RuvC_P5
  REGION 207..293: note = Tnp_domain
  SITE 215: note = Tnp_P1
  SITE 245: note = Tnp_P2
  SITE 253: note = Tnp_P3
  SITE 254: note = Tnp_P4
  SITE 266: note = Tnp_P5
MKHYAGLDVSQQTTSLCIVDEEGKIVAERKVASSPDAIAEALKPFAVTRAGLETGPMSVWLWNGLKERGVPIVCMDARHANAALKMMPAKTDRNDAIGLAQIIRTGWCRSVHVKSTASHEARALLATRSQFVQIRCDLENQIRGVLRTFGILFGKRVGGFAKRAEEIINGELHASPTIQAVVEALMRARANILEQVRLLDAKVRSVVRRLMSVPGVGVITALGFTATIDDPTRFKRSSSAGAYLGLTPRIYASGETMRSGRVSKRGDDFLRRSLYEAANALLTRVPQFSSLKSWGLRIARRNGYRKAKVAVARKLTVILHAMWISGESFRWSSQDSKELA

SEQ ID NO: 12192 - protein, 344 aa, unidentified
  source 1..344: note = protein_4d6509b
  REGION 6..147: note = RuvC_domain
  SITE 9: note = RuvC_P1
  SITE 52: note = RuvC_P2
  SITE 87: note = RuvC_P3
  SITE 89: note = RuvC_P4
  SITE 92: note = RuvC_P5
  REGION 211..294: note = Tnp_domain
  SITE 219: note = Tnp_P1
  SITE 249: note = Tnp_P2
  SITE 257: note = Tnp_P3
  SITE 258: note = Tnp_P4
  SITE 270: note = Tnp_P5
MSIAILGIDLGKNSCSVVGVNTAGAVIVRRTMRRQTLIDYVAKLPSCVVAMEACCGAHHLGRLFTEQGHEIRLMSPEYVRPYIKAQKNDDRDAEGIAEAASRPTMRFVELKSEEQLDIQTLHRVRSRLVAERTNLLNQMRAILLERGVIFPAGRLKFERELDRMLFESNDALSPRMQHLIGGLRAEWKELDEKIGALNREFVQLARNDAAARRLTSIPGIEVLNATALIAAVGDASGFAKARDLGSWLGLVPRQYSTGGKPRLLGISKRGNTYLRTLLIHGARAALPSLSASNTPMGRWLTAMIERGVHRNAIVVALANKLARIAWATLRKKTNFERGYLAATA

SEQ ID NO: 12193 - protein, 345 aa, unidentified
  source 1..345: note = protein_7c0c260
  REGION 6..163: note = RuvC_domain
  SITE 9: note = RuvC_P1
  SITE 68: note = RuvC_P2
  SITE 106: note = RuvC_P3
  SITE 108: note = RuvC_P4
  SITE 111: note = RuvC_P5
  REGION 212..299: note = Tnp_domain
  SITE 220: note = Tnp_P1
  SITE 250: note = Tnp_P2
  SITE 258: note = Tnp_P3
  SITE 259: note = Tnp_P4
  SITE 272: note = Tnp_P5
MKKIVFGIDVSKEKIDVTAIEVRDGFMGAKKLGYNEYENRPRGFHKMLSWAKRLATKDGLKDVLFCCETTGGYDRCLCDYLYGKDCDIWRESALQIKRSCGLRKGKDDKADSEMIAEYAMRHMDKAVSYESPDSNIRDLKALLSYRDKLMRQKTSLSVRMNEIKSTAAKSKTQSLIMQDEKRHIRELEKSIKKCEKEILQIIEQDEQLKKNYLHLTSIKGVGIVNATAMIVYTNNFKNISTANQMASYWGAAPFREQSGTSVNRKAHVGKYSSSRLKAWLTEAAKHTVKENGIYREYYIRMKSKGKPEGVILNNAKNKLLHLAFELIKNDMDYEENHEILRLRRA

SEQ ID NO: 12194 - protein, 327 aa, unidentified
  source 1..327: note = protein_33c66a2
  REGION 7..149: note = RuvC_domain
  SITE 10: note = RuvC_P1
  SITE 53: note = RuvC_P2
  SITE 88: note = RuvC_P3
  SITE 90: note = RuvC_P4
  SITE 93: note = RuvC_P5
  REGION 211..299: note = Tnp_domain
  SITE 219: note = Tnp_P1
  SITE 249: note = Tnp_P2
  SITE 257: note = Tnp_P3
  SITE 258: note = Tnp_P4
  SITE 270: note = Tnp_P5
MGEVSMIGLDIAKNVFQAHGVDALGRVVFRKKIARRKLIEFFVTQPSCLVALEACGGAHHWGREIRKLGHTVRLIPPAYVKPFVKRQKNDAADAEAICEAAQRPYMRFVAVKDEAQQASSVVFRARDLLVRQRTQCVNALRGHLAEYGCIAPKGMTHVETLIAFVKDRTNALPNGARLMLEVLIRSLASLKENIAVLDAEIVRRAKEDPVARRLTTVPGVGPITAAAIAALAPQAESFKRGRDFAAWLGLTPLQRSTGGKTRLGATSKMGERTIRRLLIIGASAVVRQACRRSAASSPWLNRMLARKPRMLVTVAAANKTARKSGRS

SEQ ID NO: 12195 - protein, 400 aa, unidentified
  source 1..400: note = protein_7427f77
  REGION 5..163: note = RuvC_domain
  SITE 8: note = RuvC_P1
  SITE 62: note = RuvC_P2
  SITE 102: note = RuvC_P3
  SITE 104: note = RuvC_P4
  SITE 107: note = RuvC_P5
  REGION 273..362: note = Tnp_domain
  SITE 281: note = Tnp_P1
  SITE 311: note = Tnp_P2
  SITE 319: note = Tnp_P3
  SITE 320: note = Tnp_P4
  SITE 333: note = Tnp_P5
MNPVVGLDVAKGESQVQAFLDKSKPFGKSYSMKHTREDLDRFIGFLHEIEVMTGQMPIVILESTGHYHSPVIQCLEENEVLYILLNPIISYQAKRSSLRKVKTDAIDAYQLCMLYYKEDFEPHKKRGIQLLNLRNLSRQQEIVTNMYVEAKLQFHTILDQVFPEYRKVFGDLYSKVSLLMLKKYPTSEDVITAGESKLAECVMEFCPRRSSLWALEKAKKLMDSAYRNPFQKVVYHSHLINLQMYIEMLFQYQGHLSELEVRIVTLADELEDYKIVQSIPGIGEKIAATIISEIGEIERFNHPKKLVAFAGVDPSVHSSGKFTATTNRITKRGSSRLRHALYLAVLCGIRSSKNNKLKEFYDKKKSEGKPAKVAIVACINKLLHWIYALLNSKETFQDIA

SEQ ID NO: 12196 - protein, 337 aa, unidentified
  source 1..337: note = protein_e4d5649
  REGION 6..148: note = RuvC_domain
  SITE 9: note = RuvC_P1
  SITE 52: note = RuvC_P2
  SITE 87: note = RuvC_P3
  SITE 89: note = RuvC_P4
  SITE 92: note = RuvC_P5
  REGION 208..298: note = Tnp_domain
  SITE 216: note = Tnp_P1
  SITE 246: note = Tnp_P2
  SITE 254: note = Tnp_P3
  SITE 255: note = Tnp_P4
  SITE 267: note = Tnp_P5
MKLTTYGVDIAKRVFQIHWVVPETGEIQRKKLKRADVMAFFRLQAPGRVVMEACGAAQHWARQWQPLGHTVQLIHPKFVRPFVMTNKNDAADAQAIWTAAQQPGMRFVLIKSEAAQAVLALHRIRSQLVKFRTMQMNQLRGLLGEFGIELPGGREAGLAALRDIDWERVPALLHAALQMQMQRLRELDEQMALIERQLAQWLRSDDTCSRVAEIPGVGLLTATAMIAAMGDAHHYRSGRAFAASLGLVPRHSGTGGHVQLGGISKRGDRYLRTLLMHGARSVILHQGKDKASPWLRDLLARRPFNVAVAALANKMARTIWALVAHQRRYESGYGIVA

SEQ ID NO: 12197 - protein, 342 aa, unidentified
  source 1..342: note = protein_82330d2
  REGION 6..148: note = RuvC_domain
  SITE 9: note = RuvC_P1
  SITE 52: note = RuvC_P2
  SITE 87: note = RuvC_P3
  SITE 89: note = RuvC_P4
  SITE 92: note = RuvC_P5
  REGION 211..296: note = Tnp_domain
  SITE 219: note = Tnp_P1
  SITE 249: note = Tnp_P2
  SITE 257: note = Tnp_P3
  SITE 258: note = Tnp_P4
  SITE 270: note = Tnp_P5
MQITTVGLDLAKNVIQLHAINQHGKAVLKKALRRDQVLPFFANLTPCLIGMEACSSAHYWARKLQAMGHTVRLMAPQFGKPYVKTNKNDAADAEAICEAVARPNMRFVPVKDIEQQAVLSVHRARQGFVKARTAQANQIRGLLGEYGIILPQGMIHLTQGLSAALEKASDDLQAVFRQLIQRLHDHLKELDRQVGELEQQIQLWHRESATSQKLAQIPGIGAITASAMVASIGDARCFKNGRQLAAWLGLVPRQHSSGGKPTLLGISKRGDAYLRTLLIHGARAVLRVAERKANYAGSWLANLMSRRHQNVAAVALANKNARIIWALLAHNRDYQANFQLEE

SEQ ID NO: 12198 - protein, 400 aa, unidentified
  source 1..400: note = protein_4b26f0b
  REGION 5..163: note = RuvC_domain
  SITE 8: note = RuvC_P1
  SITE 62: note = RuvC_P2
  SITE 102: note = RuvC_P3
  SITE 104: note = RuvC_P4
  SITE 107: note = RuvC_P5
  REGION 273..362: note = Tnp_domain
  SITE 281: note = Tnp_P1
  SITE 311: note = Tnp_P2
  SITE 319: note = Tnp_P3
  SITE 320: note = Tnp_P4
  SITE 333: note = Tnp_P5
MNPVIGLDVAKGESQVQAFLQRKSPYKKSFKFKHHLQGLHTFYQFYQEVEQVSGQPPAVIFESTGHYHEPVLQFLEDQAITYYVINPVISYEARKTSLRKVKTDKIDAFHLGELYYKEDLEVFQRKTEQYLNLRQLTRQHSALTDSYVEIKLQFQAALDQIFPEFHSVFSNLCGKLSLNTLLHYPTSADIEGVSQQALATEMRQVGARRSDTWFLDKAAQLQDAAARNPFQEPICRGHVLSLQMYIQMIFQYQEHLSKLRKEINALAKTFDDYALVQSVPGVGEKIAATIISEIGGIDLFERPKQLAAYAGLDPSVFESGKFKASINRITKRGSSRLRQALYTAVQCGIAKNRNKKLIAFYNRKRSEGKPHKVAVIACANKLIHWIHVMLKRQEAFVDQS

SEQ ID NO: 12199 - protein, 338 aa, unidentified
  source 1..338: note = protein_3cc1e88
  REGION 7..149: note = RuvC_domain
  SITE 10: note = RuvC_P1
  SITE 53: note = RuvC_P2
  SITE 88: note = RuvC_P3
  SITE 90: note = RuvC_P4
  SITE 93: note = RuvC_P5
  REGION 211..297: note = Tnp_domain
  SITE 219: note = Tnp_P1
  SITE 249: note = Tnp_P2
  SITE 257: note = Tnp_P3
  SITE 258: note = Tnp_P4
  SITE 270: note = Tnp_P5
MNDTIIIGVDLAKNVFVLHGMRTDGSIAFRRKLSRAKFLSFFSAHPPCVVAMEACASAHYWGREIGKLGFEVRLIAPQYVKPFVKRQKNDAADAEAIAEAASRPTMRFVAVKSAEKQSQAMAFKTRDLLMAQRTQTINALRGHLAEYGVVAPKGPQNIGHLIRALEDPDAALPIAVIDLGKELINHLEVLDERIAALDERVKESARTDETARRLMTIPGIGPITAAAMVAVAPEPSTFIKGRDFAAWLGLTPKQNSTGGKTRLGKTSKMGQRDLRRLLIIGAMAVVRHAAQRTTNTWLGHMLVRKPKMLVAVALANKIARVAWALMARGGVYQSPAAA

SEQ ID NO: 12200 - protein, 379 aa, unidentified
  source 1..379: note = protein_04b172d
  REGION 3..111: note = RuvC_domain
  SITE 11: note = RuvC_P2
  SITE 51: note = RuvC_P3
  SITE 53: note = RuvC_P4
  SITE 56: note = RuvC_P5
  REGION 228..322: note = Tnp_domain
  SITE 235: note = Tnp_P1
  SITE 265: note = Tnp_P2
  SITE 273: note = Tnp_P3
  SITE 274: note = Tnp_P4
  SITE 287: note = Tnp_P5
MYSLKSRCFLESTGIYHIPLLCFLRDKGFDCSVINPIITKNSTNINIRKLHNDKFDSKKAALVGLNVSLKTSIIPDDSVVDLRNLVRDYYYFKDRQSAVALKLTAEPKVSFPAYAKVFSKVTIQSSLKLLSSYPLPEDMLAASKENIVDIIRSTARFGEAYALRKYEAIIAAAKDAAVFGRALPSNAVRIRLYVDTYQEYQKHLDTLLKALHETVEKLQDTLIYDQICLLQSLCGIGFLSAVVLIAEMGDFKLFSSPKKLYAYFGLDPAVKQSGKLNGDKVHMSKRGSSLARRILHMAALNNVKVSKGSGTPVNPVIYDYYTQKCTGKKKPVAMGAVMHKICNIIFAMLRDKKPFEIITPEEHCRHFAAKHPDKIRKSA

SEQ ID NO: 12201 - protein, 406 aa, unidentified
  source 1..406: note = protein_8ca87b8
  REGION 4..161: note = RuvC_domain
  SITE 7: note = RuvC_P1
  SITE 60: note = RuvC_P2
  SITE 100: note = RuvC_P3
  SITE 102: note = RuvC_P4
  SITE 105: note = RuvC_P5
  REGION 277..363: note = Tnp_domain
  SITE 284: note = Tnp_P1
  SITE 315: note = Tnp_P2
  SITE 323: note = Tnp_P3
  SITE 324: note = Tnp_P4
  SITE 336: note = Tnp_P5
MNYLGIDISKSTARCVILDNDGEKSVKPFTLKNNKYEFNELIERFKKHSLNSENLLIGIEATGIWWENIYCFLTEQKFKIVVLNPHQTNKFREALRKKAKTDDIDAYVIAGLMRSNEYAQSFVPEETVQILKDFTKLRYRLIKDQKDYKRQALSLLALVFPEYEQTKLKKPFGIAAASILKKFSTAKHLAQAKPKHIEKIVRSIKGNNFNIKEIIHLIQTAKDSIYSGRAANARAINLNIMIEQVQNINKSIDELNQEIENILSSKDDNEPFDFPGGNLLSIPGVGLKTIASIISAVGVDAQSFKDSKKIIGYVGFYPKIYQSGETFKANKIAKRGPAYLRSALYIAAVACIKHNTEFRALYQKKRSQGKAGKQALIYVAKKLAHLCLSMLKSGELYRPERVFMPV

SEQ ID NO: 12202 - protein, 323 aa, unidentified
  source 1..323: note = protein_e0a72cb
  REGION 8..150: note = RuvC_domain
  SITE 11: note = RuvC_P1
  SITE 52: note = RuvC_P2
  SITE 92: note = RuvC_P3
  SITE 94: note = RuvC_P4
  SITE 97: note = RuvC_P5
  REGION 191..278: note = Tnp_domain
  SITE 199: note = Tnp_P1
  SITE 229: note = Tnp_P2
  SITE 237: note = Tnp_P3
  SITE 238: note = Tnp_P4
  SITE 251: note = Tnp_P5
MNKDIKYFGIDISHLVFDVTDSNGNYHQFKNTPMGFKKFEKLLDFNSHCVMEATGYYHYQLAYFLLESGIKVSVENPLSVKRLIQMKLSKIKTDKSDSKLICEYAEQVEVKLWKGNSKHQTECLQMTRLLSVYTKQSTMLKNKLHGEKVLGDPSKSVLRSLKRSLKHVQIELMALEKELLVMVKQVHQGVLTRLKSIPGVGNKTALMLVVLTDGFERFTSGSELCSYAGLTPVIRKSGSSVNGRSRISKMGNQKLRNLLFMCSFTACKYNKACREIYERIVAKGKSKKLALIAVCNKLLKQAFAIAKSGLVYDGAHRSTLVEN

SEQ ID NO: 12203 - protein, 311 aa, unidentified
  source 1..311: note = protein_4ec4e4c
  REGION 1..95: note = RuvC_domain
  SITE 33: note = RuvC_P3
  SITE 35: note = RuvC_P4
  SITE 38: note = RuvC_P5
  REGION 204..260: note = Tnp_domain
  SITE 212: note = Tnp_P1
  SITE 243: note = Tnp_P2
MWIALLVNHGQRLFYTPGRTVHHASGSYRGDGNSDAKDAFVIADQARMRRDLQPLQETSEIAVDLKILTARRLDLSADRTRAINRLRAQILEYFPALERAFDYSTSKVALILLTGYRTPAALRRIGRARLTVRLKNHGVRTLRTAKSAADTAVTAAEAQSTVVPGEKTAARMVHTLAREVMALDEEISELNALIEGRFREHPDAEVITSMPGIGDMLGAEFIAATGGDMTAFGSPDRLAGVAGLAPAPATRARSAATCAGPDAIAADCCACSTYPPRSPRCTAPSPRPSASANAPRESPTSKPSSRWPDAA

SEQ ID NO: 12204 - protein, 306 aa, unidentified
  source 1..306: note = protein_6ce09a8
  REGION 13..155: note = RuvC_domain
  SITE 16: note = RuvC_P1
  SITE 59: note = RuvC_P2
  SITE 94: note = RuvC_P3
  SITE 96: note = RuvC_P4
  SITE 99: note = RuvC_P5
  REGION 218..301: note = Tnp_domain
  SITE 226: note = Tnp_P1
  SITE 256: note = Tnp_P2
  SITE 264: note = Tnp_P3
  SITE 265: note = Tnp_P4
  SITE 277: note = Tnp_P5
MNNHNVNGNITVLGIDLAKQSFQLHGTDKHGKVVLKKKLTRNKLSAFIANLAPCLIGLEACRGAHYWVRIFKAQGHKVRMIAPQFVKPYVKSNKNDAVDAEAICEAVQRPSMRFVPEKSIVQQDIQSLHRVRSQLVTRRTAQVNQIRGLLQEYGLIIPKGISNVRKAIPMILEDADNTLTCLFRAILSELYDELVHLDGRIKILEQKLDMICRESDDCQRLLTIPGIGLLSATALIAAIGNISVFNSGRELAAWLGLVPKQHSTGGVPTLLGISKRGNSYLRTLLIHGGRAVVRIAPSVFFKIVFA

SEQ ID NO: 12205 - protein, 403 aa, unidentified
  source 1..403: note = protein_2a4d248
  REGION 6..159: note = RuvC_domain
  SITE 9: note = RuvC_P1
  SITE 57: note = RuvC_P2
  SITE 98: note = RuvC_P3
  SITE 100: note = RuvC_P4
  SITE 103: note = RuvC_P5
  REGION 221..306: note = Tnp_domain
  SITE 229: note = Tnp_P1
  SITE 259: note = Tnp_P2
  SITE 267: note = Tnp_P3
  SITE 268: note = Tnp_P4
  SITE 279: note = Tnp_P5
MTGVIIGVDPHKLSATIEVVDHHGHLLGSGRFTTDKAGYTAMRSYVKAWPERTWAVEGANGTGRPLAQRLVETGERVVDVPAKLAARVRLFDTGHNRKTDALDAHSIAMVALRTAGLRVLTPDGDLEALRMLTDRRDELARLRVQTLNRLQRLLSEPIPGQRKKDPSALQAKAMLATVRPRDIAGKTRRRMAAEELADLVAVDKKLKKIKTELKDAVAARGSTLMEVHGIGPAGAARILADVGDIARFPDRNRFASWTGTAPLDASSGEQIRHRLSRAGNRRMNHVIHIAAIVQLRHDTEGRAYYRRKLAAGKTPLEALRCLKRRLSDVIYRRLVADARAAQDRAADAGPGGHCGATQESSAVDLPPHIDTSDQPLPGPATPTLQPAGRARKTPKRTTPQPAA

SEQ ID NO: 12206 - protein, 304 aa, unidentified
  source 1..304: note = protein_b562b94
  REGION 11..88: note = RuvC_domain
  SITE 14: note = RuvC_P1
  SITE 64: note = RuvC_P2
  REGION 177..264: note = Tnp_domain
  SITE 185: note = Tnp_P1
  SITE 216: note = Tnp_P2
  SITE 224: note = Tnp_P3
  SITE 225: note = Tnp_P4
  SITE 237: note = Tnp_P5
MSLKGGFDCFVGVDISKDKFDACGITGEEVKLFQFSAAMDRKGFEKLKGHLAAVSISSVLIGMESTASYHVNLVHMAGIFTKSILKLLQQYPSAFTLRDANLGQLSQMLIADSYGHKREAFAAELIKAAHLSIGSKSPAKDMILKQKIALLRHLEDALQEITGMLIEMSRKLMEEEINLMISLKGIGEKAAANFLIEMGGDINQFDRSGKIIAMAGLDPAVYQSGKHDGKGRITKRGNRHLRKIIWLMTTKVIQYTDVFSVYYLKRRKEGLPYKMAVLATAHKLIRVIYAMLTQRKTFCPQVNS

SEQ ID NO: 12207 - protein, 441 aa, unidentified
  source 1..441: note = protein_19538f6
  REGION 16..162: note = RuvC_domain
  SITE 19: note = RuvC_P1
  SITE 66: note = RuvC_P2
  SITE 101: note = RuvC_P3
  SITE 103: note = RuvC_P4
  SITE 106: note = RuvC_P5
  REGION 289..373: note = Tnp_domain
  SITE 295: note = Tnp_P1
  SITE 326: note = Tnp_P2
  SITE 334: note = Tnp_P3
  SITE 335: note = Tnp_P4
  SITE 347: note = Tnp_P5
MAKVKSKLEITNPNAAGIDVGSAVHYVCVPEGSDEQRIQKFSCFTEDLYNIAKWLKKCKVNTVAMESTGVYWIPLFQVLESHGFEVKLVNAKHVKNVPGRKSDVQDCQWIQQLHSYGLLQGSFRPDDQMCVLRSYVRQRKNLIENASTHTLRMQKALTQMNIQLHRVISDTTGVTGMQIIKAIIDGESNPEKLAELRDGRIKSDKSVIAKALAGNYRKEHLFTLKQEFELYNIYQEKVAECDRSIEEYYKTFETKSDESKKLGEEKNKHRKSKPNFALHEELYRVTGIDFTKIPGLDILTVQTIISEVGVNYNKWRSEKHFTSWLGLSPANKITGEKVFSTRTRKVINRAANAFRMAAHCVSRSNSGIGAYCRRLKKRLGAPKAITATARKLACIFYSMLKYGQEYVERGMDYYETRYKERVVKNLIKKAQEFGYILVQQE

SEQ ID NO: 12208 - protein, 392 aa, unidentified
  source 1..392: note = protein_89b4f9c
  REGION 4..159: note = RuvC_domain
  SITE 7: note = RuvC_P1
  SITE 57: note = RuvC_P2
  SITE 98: note = RuvC_P3
  SITE 100: note = RuvC_P4
  SITE 103: note = RuvC_P5
  REGION 264..351: note = Tnp_domain
  SITE 272: note = Tnp_P1
  SITE 302: note = Tnp_P2
  SITE 310: note = Tnp_P3
  SITE 311: note = Tnp_P4
  SITE 324: note = Tnp_P5
MFYLGIDIGKNTHVASLIDEKAKVIFKAHSFSNTSDGAATLLEKITPYVAELEIGMEATGHYWLSLYSFLVENHLVVHVINPIQTDGWRKGTEIRKRKTDIIDSVLIAHFIRYGDFLETSLADEDTMSLRNLSRFRNYLVGSIGDLKRKTICVLDQIFPEYHHAFSDIFGKTSKELLLQLNSPSDYEDVTSEQLEELLSQVTLKGYAAKKFKDVSSLAKTSFGITFCVESFSFQLKLLIEQINFIEKQVSDVEKQMAELLENIQTPITTIPGIGNVIGATILGEIGDINRFSNGAKLVAYAGIDASVFQSGEYESTNNHMSKRGSPYLRKAIFRAAFVASNTDPVFKAYYQKKRMEGKHHNVAVGAVARKLCYTIYAVLKNDVPYEVQAPQE

SEQ ID NO: 12209 - protein, 369 aa, unidentified
  source 1..369: note = protein_1f643d4
  REGION 6..147: note = RuvC_domain
  SITE 9: note = RuvC_P1
  SITE 52: note = RuvC_P2
  SITE 87: note = RuvC_P3
  SITE 89: note = RuvC_P4
  SITE 92: note = RuvC_P5
  REGION 212..298: note = Tnp_domain
  SITE 220: note = Tnp_P1
  SITE 250: note = Tnp_P2
  SITE 258: note = Tnp_P3
  SITE 259: note = Tnp_P4
  SITE 271: note = Tnp_P5
MQVSVLGIDLGKNVCSIVGLDAAGAVVLRRRAKRETLIGLVAKLPPCIVAMEACCGAHDLGRMFAGHGHDVRLMSPEYVRPYIKAQKNDDHDAEGIAEAATRPTMRFVELKAQDQLDMQTLHRSRDRLVGERTALINQLRAIVLERGIVIPQGKRNLERHLAALLDGQDRQGLSPRMRLLIADGRAQWQELDRRIAVFDAEFAAFTKENEDTKRLATIPGVGIMIASAMIAAIGKAETFEHGRDLAAWLGLVPRQSTTGGKPRLFGISKRGDKYLRKLLIHGARAAFSTHRRTRHSAWPMGQEIARPRASECRRCGLGQQAGADRLGGVATRRNIHRKGSVPGGVAIGWSAHEALIGRRCLRVVDREMA

SEQ ID NO: 12210 - protein, 272 aa, unidentified
  source 1..272: note = protein_7f44241
  REGION 1..75: note = RuvC_domain
  SITE 15: note = RuvC_P3
  SITE 17: note = RuvC_P4
  SITE 20: note = RuvC_P5
  REGION 137..227: note = Tnp_domain
  SITE 145: note = Tnp_P1
  SITE 175: note = Tnp_P2
  SITE 183: note = Tnp_P3
  SITE 184: note = Tnp_P4
  SITE 196: note = Tnp_P5
MIAPQLAKPYVKRNKNDAADAQGLCEAMSRPTMRFVPVKTVAEQAALMLISVHTRLIANRTQLANAIRGYANEFGVSAAKGLAHIPLLLERIQADGTVPELAQELFMSQAEEYAELERKIADVEAKVKAWQRNNERSMRLNIIPGIGPIGSALLIMKTPAPELFQSGRQFAAWIGLTPKDHSTGGKLRLGGITRAGDEALRAVLVAGATPVIHHARRSGKASPWLAELLTRKPPKLAAVALANKMARIAWKLMVSGETYAAQSGSTLTGCAA

SEQ ID NO: 12211 - protein, 341 aa, unidentified
  source 1..341: note = protein_691f9dc
  REGION 6..147: note = RuvC_domain
  SITE 9: note = RuvC_P1
  SITE 52: note = RuvC_P2
  SITE 87: note = RuvC_P3
  SITE 89: note = RuvC_P4
  SITE 92: note = RuvC_P5
  REGION 210..297: note = Tnp_domain
  SITE 218: note = Tnp_P1
  SITE 248: note = Tnp_P2
  SITE 256: note = Tnp_P3
  SITE 257: note = Tnp_P4
  SITE 269: note = Tnp_P5
MQVNTIGIDLAKNVFQVHGVDAAGTVVITKKLRRSQLLAFLEKVPPCLVGMEACATSHHWGRELKALGHDVRLMPASYVKAYVKRNKNDAADAAAICEAVTRPSMRFVLVKSAEQQSTLMLHRTRDLLVRQRTQLINAMRAHLAELGLVAARGREGVQTLIALVRDEASQLPDLARKALQAILGQLDALGQQIGEIERHIHAQHRSNEASQRLETIPGIGVIGATAIAATVTDPMVFKSGREFAAWIGLVPRQSSSGGKERLGSISKQGDRYLRRLLVIGATAVIRQARTHPDKHPWLIQLLARRPAKVVAVALANKTARIAWAVLARGETYRAPVLAARA

SEQ ID NO: 12212 - protein, 331 aa, unidentified
  source 1..331: note = protein_670a96b
  REGION 7..149: note = RuvC_domain
  SITE 10: note = RuvC_P1
  SITE 53: note = RuvC_P2
  SITE 88: note = RuvC_P3
  SITE 90: note = RuvC_P4
  SITE 93: note = RuvC_P5
  REGION 211..296: note = Tnp_domain
  SITE 219: note = Tnp_P1
  SITE 249: note = Tnp_P2
  SITE 257: note = Tnp_P3
  SITE 258: note = Tnp_P4
  SITE 270: note = Tnp_P5
MSTIKVIGIDLGKSSFHLVGHDHTGREQLRQHLSRSKLIQFLSQTAQTTIAMESCGGSHWLARKCQALGHEVKLIPPQYVKPYVKTNKNDYIDADAIAEASTRPSMRFVGVKTEAAQVISVIQRIRASYVKERTACMSRIGAILLEFGMSFPKGHGKMKVLFQWLADNGEPLPAMLMQELLEHHEYYLQLNKRIAGQDKKLKQLVEQNEDAQLLKSIPGVGDLTASQCLADISDAGNFKNGRQLAAWIGLVPHQYSTGGKTTLLGISKRGNKALRTLFIHGARSILSRPDVAVAVFGEWILELRARKPFNVAVVALANKLVRIAWSVLSTK

SEQ ID NO: 12213 - protein, 344 aa, unidentified
  source 1..344: note = protein_ef42674
  REGION 7..149: note = RuvC_domain
  SITE 10: note = RuvC_P1
  SITE 53: note = RuvC_P2
  SITE 88: note = RuvC_P3
  SITE 90: note = RuvC_P4
  SITE 93: note = RuvC_P5
  REGION 212..307: note = Tnp_domain
  SITE 220: note = Tnp_P1
  SITE 250: note = Tnp_P2
  SITE 258: note = Tnp_P3
  SITE 259: note = Tnp_P4
  SITE 272: note = Tnp_P5
MTKPNLLAIDLAKNVFQVCKLCPNGKVIYNREVSRAKLKEILINEKQALVAMEACGSAHYWARFAISAGHIVKVINARAVKAFQTKQKTDRNDALAIGVAAQQEHIHGTHIHSTEEQALQSLERMRHLAKVQLVAQSNQMRGVLAEFGVILPQGLSKLRKEIPFILEDADNSLPDSFRTALHRSWSHLLCQIEHLQELDRQLESLVKSHHICKKLMKLEGVGPLGALGLALRLGRGENFSNGREASANIGLTPKQNSSGGKERIGHISKYSADKRLRSILFQGALSVITHVLNRPATTNKEQWLQALVERRGKKIAAIALANKTVRTAYALLKNDSDYQPIKLS

SEQ ID NO: 12214 - protein, 388 aa, unidentified
  source 1..388: note = protein_8e567da
  REGION 6..159: note = RuvC_domain
  SITE 9: note = RuvC_P1
  SITE 57: note = RuvC_P2
  SITE 98: note = RuvC_P3
  SITE 100: note = RuvC_P4
  SITE 103: note = RuvC_P5
  REGION 221..306: note = Tnp_domain
  SITE 229: note = Tnp_P1
  SITE 259: note = Tnp_P2
  SITE 267: note = Tnp_P3
  SITE 268: note = Tnp_P4
  SITE 279: note = Tnp_P5
MTAVIIGMDPHKRSATIEVMAGDETILGGGRYATDVVGYREMLRFGKRFPERTWAVEGCQGIGKHIVNRLLADGELVVDVPPKLSARTRMLVAGQGRKTDETDAHTVAVVGTRMSGLRPVVNDEQLAVLRILVDRRRSLGEDHTRMVSQLHQLLLELIPGGAQKSLSAAQAKALLAKVRPRDAAGKTRRRVAAELISDLERVYARKKAANKELNELLAATDTTLTDLHGIGPSGAARLLVEVGDITRFPSKAHFASWNGTAPIDASSGDQTRHRLSRRGNRQINRVLHIMATVQLRNPTEGRAYYDRKKAEGKTSMEAMRALKRRLSDVVYRQLLTDALTTKATGPGGQAGASLQSSAADSHPDAGTSDQSLPGPATDKPRTDLAAVS

SEQ ID NO: 12215 - protein, 310 aa, unidentified
  source 1..310: note = protein_c3255b0
  REGION 8..148: note = RuvC_domain
  SITE 11: note = RuvC_P1
  SITE 53: note = RuvC_P2
  SITE 93: note = RuvC_P3
  SITE 95: note = RuvC_P4
  SITE 98: note = RuvC_P5
  REGION 189..270: note = Tnp_domain
  SITE 197: note = Tnp_P1
  SITE 226: note = Tnp_P2
  SITE 243: note = Tnp_P5
MIIPLRYVGIDVSKQHLDIFDEGLGVPERIANAPQAITQIVARWRCDVLVVFEATGVYDLELREALGQAGIRFARINPARARDFARASGQLAKTDPIDARMLAAFARALKPATEQIANPARNALARLAKRRDQLVLMRAQEKNRRSEADDRAMADRIGRLIEVLDGEIAEIEADISTLIKTEPEISGDAQLIRSLPGVGPVTCMQLIAQMPELGKVGPKQVAALAGLAPFNVAYRGKRKIAGGRKRVRDALYMAALNAVRRADPFKVFYVRLRQAGKPAKLALIAVARKLLTVLNAMMRDRKPYLNVKPT

SEQ ID NO: 12216 - protein, 344 aa, unidentified
  source 1..344: note = protein_435165e
  REGION 5..152: note = RuvC_domain
  SITE 8: note = RuvC_P1
  SITE 55: note = RuvC_P2
  SITE 92: note = RuvC_P3
  SITE 94: note = RuvC_P4
  SITE 97: note = RuvC_P5
  REGION 212..300: note = Tnp_domain
  SITE 220: note = Tnp_P1
  SITE 250: note = Tnp_P2
  SITE 258: note = Tnp_P3
  SITE 259: note = Tnp_P4
  SITE 271: note = Tnp_P5
MEHFAGLDVSVNETSICIVDDTGKIVREVKVASEPEALLAVLKNSAYHFKHIGLEAGPLSQWLYSAFAEADLPAICVETRHMRAVLKAQINKTDRNDARGIAQMMRAGLYRPVHVKTLRSQKLRMLLTHRKLLQSKAIAIENDLRGTLRNFGLKVGMVGTARFEVRIRELVENSPDLTTLVEPLLVVRRVLREQIAVLHQRVVAVARDDDVCRRLMTVPGVGPVVALTFRATVDVPARFRNSRAVGAVLGLTPCKYQSGESDRTGAISKCGDEMMRVMLYEAAQVLLVRSTKWSWLKAWAMQIARRRGVKKAIVALARRLAVIMHRIWVDGTEFRWTRQEIAAA

SEQ ID NO: 12217 - protein, 389 aa, unidentified
  source 1..389: note = protein_65fd608
  REGION 4..159: note = RuvC_domain
  SITE 7: note = RuvC_P1
  SITE 58: note = RuvC_P2
  SITE 98: note = RuvC_P3
  SITE 100: note = RuvC_P4
  SITE 103: note = RuvC_P5
  REGION 262..349: note = Tnp_domain
  SITE 270: note = Tnp_P1
  SITE 300: note = Tnp_P2
  SITE 308: note = Tnp_P3
  SITE 309: note = Tnp_P4
  SITE 322: note = Tnp_P5
MNYIGIDVGKFNHCCAVMNSEGEVLVEPFFFANNSDGFDALLHIIKPFQSSRHMSGLESTGHYGDNLLRFLLANDFQVGIINPISTDAKRKQKIRKTKNDKKDSLTICAVLQSRDYTHMTKNKLSLREGKQLTRYHHDLTASLNQAKNKLQKCIDIVFPEYNSIFATKYSKAYMAVLKECGSAKVIRETHLKHLKKIVSDASHGKINSDYPTRLKESAKTSIGEDNAVMTLEIKQLIASIELLMDQLDIVDRKIEELARTLNSPIFTIPGIGWITGMSILCELGPIDNFSSHTKVIAYTGLDCAVYQSGQYNADKTAITKRGSPHIRLSLYQAALPLCRFNATFNEYYNRKRSEGKSHRCAQGHVVRKLLRVIFKLLTENMSFDSALCK

SEQ ID NO: 12218 - protein, 334 aa, unidentified
  source 1..334: note = protein_d524864
  REGION 7..149: note = RuvC_domain
  SITE 10: note = RuvC_P1
  SITE 53: note = RuvC_P2
  SITE 88: note = RuvC_P3
  SITE 90: note = RuvC_P4
  SITE 93: note = RuvC_P5
  REGION 209..296: note = Tnp_domain
  SITE 217: note = Tnp_P1
  SITE 247: note = Tnp_P2
  SITE 255: note = Tnp_P3
  SITE 256: note = Tnp_P4
  SITE 268: note = Tnp_P5
MENIALIGIDLGKNSFHIHCQDRRGKAVYRKKFTRPKLIEFLATCPATTIAMEACGGSHFMARKLEELGHSPKLISPQFVRPFVKSNKNDFVDAEAICEAASRPSMRFVQPRTESQQAMRALHRVRESLVQDKVKTTNQMHAFLLEFGISVPRGAAVISRLSTILEDNSLPLYLSQLLLKLQQHYHYLVEQIKDLESQLKRKLDEDEVGQRLLSIPCVGTLTASTISTEIGDGKQYASSRDFAAATGLVPRQYSTGGRTTLLGISKRGNKKIRTLLVQCARVFIQKLEHQSGKLADWVRDLLCRKSNFVVTCALANKLARIAWALTARQQTYEA

SEQ ID NO: 12219 - protein, 318 aa, unidentified
  source 1..318: note = protein_b85f738
  REGION 1..123: note = RuvC_domain
  SITE 27: note = RuvC_P2
  SITE 62: note = RuvC_P3
  SITE 64: note = RuvC_P4
  SITE 67: note = RuvC_P5
  REGION 186..271: note = Tnp_domain
  SITE 194: note = Tnp_P1
  SITE 224: note = Tnp_P2
  SITE 232: note = Tnp_P3
  SITE 233: note = Tnp_P4
  SITE 245: note = Tnp_P5
MSNRKVKRDKLLDTIRQLPEKTALAMESCATSHHWGRVFQELGYTVALIPAQHVKPFVGRQKNDANDARAICEAFSRPNIHFVPVKSVEQQDLKAIRSVRKRLVENRTALANQIRGLAAEYGVVFPLSVKALRSHLPLAIEDAENEFPPVMRSLLQTLYCDFIDISDEIDEVTQSITKLSQQHPRYKAIKNIPGFGPVLTAAIISEVGSGKQFQNGRQFSAWCGLVPKQNSSGGKSSLGALSKNGNRDLRTLLIHGARAVVRCRTNSKDPMGAWLRNLVTRRGKAKAIVALANKLGRVVWRVLSTDCEYDINRAFKPL

SEQ ID NO: 12220 - protein, 345 aa, unidentified
  source 1..345: note = protein_e91dbdc
  REGION 7..149: note = RuvC_domain
  SITE 10: note = RuvC_P1
  SITE 53: note = RuvC_P2
  SITE 88: note = RuvC_P3
  SITE 90: note = RuvC_P4
  SITE 93: note = RuvC_P5
  REGION 212..303: note = Tnp_domain
  SITE 220: note = Tnp_P1
  SITE 250: note = Tnp_P2
  SITE 258: note = Tnp_P3
  SITE 259: note = Tnp_P4
  SITE 272: note = Tnp_P5
MIESNVIAIDLAKNVFQVCKLSSRGQVIWNKQVNRSKLIALLVNEPVSLVAMESCGGTHYWARFAKTCGHSIKAMSARRVKAFLQGHKTDANDAIAIGLAALQPAVKSSRTITLEEQCQQGITMMRDLAVRQKVALAKQLRDQLLELGHPINKGDAALLRRVPEIVEDAENGLPDFYREALYHQYQQLRAFFAHVDALEKRFKEAVRQDPVCRRLSALEGVGPVGAMLLKLALSQPGHFNNARQAAACVGVTPVQHSSGGKEKLGSISKLAGDKKLRSVLFEGALAVIRSLDKREAKTIKEQWLKQLIHRRGKKVTAIALANKTVRTAYAMLKKNTDYQPALLAG

SEQ ID NO: 12221 - protein, 317 aa, unidentified
  source 1..317: note = protein_8ca8f57
  REGION 6..141: note = RuvC_domain
  SITE 9: note = RuvC_P1
  SITE 49: note = RuvC_P2
  SITE 86: note = RuvC_P3
  SITE 88: note = RuvC_P4
  SITE 91: note = RuvC_P5
  REGION 194..280: note = Tnp_domain
  SITE 202: note = Tnp_P1
  SITE 232: note = Tnp_P2
  SITE 240: note = Tnp_P3
  SITE 241: note = Tnp_P4
  SITE 253: note = Tnp_P5
MEAPSSGIDVSKDKLIVYFQGKLYEFTNDKRGYEEIRKILPKGCKVGIESTGVYHVNLAKYLSNEYDVRIINPFILKKFKGFRGKKSDKNDAKKLAEIVVSMGSEFVTSEARELTSQWDFITRSIARVKNRLRRDLVLLGYSDSLSKRNLEEVLRGGGDGIVLAEVRFLLEELERLESRKREIEDRLRELVPKDSLIFTIPGIGKTLGCIILARVGDVKRFSDRKRFVAYCGLDPVVESSGKSVITRGISKRGDAVLRRAFYLAALTAIKVNPVIKRFYEEHKGRLRGRKLIIACARKLAVITWAVLYYNKPFDASE

SEQ ID NO: 12222 - protein, 428 aa, unidentified
  source 1..428: note = protein_dbfa3a5
  REGION 11..159: note = RuvC_domain
  SITE 14: note = RuvC_P1
  SITE 66: note = RuvC_P2
  SITE 100: note = RuvC_P3
  SITE 102: note = RuvC_P4
  SITE 105: note = RuvC_P5
  REGION 257..345: note = Tnp_domain
  SITE 265: note = Tnp_P1
  SITE 296: note = Tnp_P2
  SITE 304: note = Tnp_P3
  SITE 305: note = Tnp_P4
  SITE 316: note = Tnp_P5
MDFEVKHLICAGLDVHKKTVVAAVCITDPVTLEATYKVKSFSTNNSQIAAMRDWLLSYNCLHVCMESTGKYWIPVFNILEPHMHVILTHPKYVKAIKGKKTDKRDAKWIANLFRFDIVKASFIPPADIRALRELSRYRLKLSYMRSAEKNRYQNSMTISRIRIDCVLTDPFGKTASSIMNYLLSDVPFDEKECAKLIHGGIKVSNEEIFDSIRGFEILSEQRFKMSHAKQHMELLSSYMDEIETELFRLSRPYDEVIKRISRIAGFTERSALFVISEIGADMGVFESDKHLCSWAGLTPANNESANKKKSTRCSKAGQYLKPLLIQCALAAVKSRKNPYYAIKYNRLAKRRGRKKAIIAIARMMLTSIYHMILNNEEWKPDDYEAIIHPSKPEKVALTLDNVIQFLGEQGADPETLKLLQQQCAVHSG

SEQ ID NO: 12223 - protein, 388 aa, unidentified
  source 1..388: note = protein_2a7aa7a
  REGION 4..160: note = RuvC_domain
  SITE 7: note = RuvC_P1
  SITE 58: note = RuvC_P2
  SITE 99: note = RuvC_P3
  SITE 101: note = RuvC_P4
  SITE 104: note = RuvC_P5
  REGION 262..348: note = Tnp_domain
  SITE 270: note = Tnp_P1
  SITE 300: note = Tnp_P2
  SITE 308: note = Tnp_P3
  SITE 309: note = Tnp_P4
  SITE 321: note = Tnp_P5
MYLIGIDISKYKHDCFIATEAGESIKAFSFDNNRLGFDTFLETLKSIDQSKEIRIGLESTGHYGSNLKQFICASGYTYLEFNPYLTHMFSKALSLRKTKTDKVDAKTISSMLGSVDYKTLHTRFYHINELKQLVRYRHSQMVNRSKTLIELTNILDRIFPEFKPFFNERLAGSAIFILKRFKSRARISKLSTKDYEAIRSYSKGKITYARIQKLKSLAASSVGYETKSDLLLLKHSITHYEDLTEVLDSVEHEIIHLMENIDQTLTTIPGINIISAAIIIAELGDFKNFTNSAQIISFAGLDTSVNQSGTMETRGHLVKRGSGLLRMTLWQITFSSLRLNPKLYDYYLKKRAEGKHHKVAMVHCARKMIRVIYYLGVNQLTFDHSQFR

SEQ ID NO: 12224 - protein, 398 aa, unidentified
  source 1..398: note = protein_05385b4
  REGION 4..160: note = RuvC_domain
  SITE 7: note = RuvC_P1
  SITE 57: note = RuvC_P2
  SITE 97: note = RuvC_P3
  SITE 99: note = RuvC_P4
  SITE 102: note = RuvC_P5
  REGION 274..361: note = Tnp_domain
  SITE 282: note = Tnp_P1
  SITE 312: note = Tnp_P2
  SITE 320: note = Tnp_P3
  SITE 321: note = Tnp_P4
  SITE 334: note = Tnp_P5
MISIGIDVSKGKSMVCIMKPYGEVIRMPYEIKHTKKDLSDLASMIMAFDEESRVVLEATGAYHLPVLNYLKQKNIFVAVINPLIMKKYASIAIRKGKTDKIDSIKIANYGLDNWFHLNNYSASDELYEELDMLCRQYNQYVSIKVKCKVNLVNLLDKTMPGITTLLRNHDYIGKYKLNSFVKEYWHYDNITKKSEKQFIASYLKWAKREGYHANEDKGKSIYALAQESITTLNPKMKSTKMLVTEAIRVFQEVEKTVRMILLQMQELAKKLDEYNIVREMQGVGDVLAPRLIASIGDIRRFHNAKALIAYAGIDTPPYESGNFKGTKQRISKRGSAYLRKTGYEIMASLKAIKPSVDSVVYDYILKKESEGKAKKVAKIAGLNKFLRIYYARVKEVYS

SEQ ID NO: 12225 - protein, 258 aa, unidentified
  source 1..258: note = protein_7783216
  REGION 1..135: note = RuvC_domain
  SITE 38: note = RuvC_P2
  SITE 75: note = RuvC_P3
  SITE 77: note = RuvC_P4
  SITE 80: note = RuvC_P5
  REGION 195..258: note = Tnp_domain
  SITE 203: note = Tnp_P1
  SITE 233: note = Tnp_P2
  SITE 241: note = Tnp_P3
  SITE 242: note = Tnp_P4
  SITE 254: note = Tnp_P5
MVDATGKLFREVKVGSEPECLLGYFDQLDFLVERIGLEAGPLSQWLYAALVAAGHDVVLLETRHVKMAFSAMTVKTDRKDARGIAQLLRMGWYRPVHAKSSPAQNTRALLVGRKLLQYKLLDVELSIRGIMRDYGLKVGEVSRGRFEARIRELIAGHSTLSMVIDTMLTARAALWGEFTKLHREMLRIACADKVCQRLMSAPGVGALVALTYCSAVDDPVRFEKSSTVGAYFRLTPKKYQSGATDRDGGVSKVGEATV

SEQ ID NO: 12226 - protein, 329 aa, unidentified
  source 1..329: note = protein_ffcfb93
  REGION 4..155: note = RuvC_domain
  SITE 7: note = RuvC_P1
  SITE 60: note = RuvC_P2
  SITE 100: note = RuvC_P3
  SITE 102: note = RuvC_P4
  SITE 105: note = RuvC_P5
  REGION 200..285: note = Tnp_domain
  SITE 208: note = Tnp_P1
  SITE 237: note = Tnp_P2
  SITE 245: note = Tnp_P3
  SITE 246: note = Tnp_P4
  SITE 259: note = Tnp_P5
MFYLGIDIAKAKIDCCLILEDSAGKKKTKTFPNTPKGFEQLQAWLNHHAAGPAQAIALMEATSVYHERLAGYLFDAGFQVCVANPARARYFAQSMSRLNKTDKADSEVLARFAMTADLHFWQPLPGHIQLLNALLDRRAVLGEDLQREENRLEKAESTFTIEPVLQSIHKNIKQLSRHIQDLDRQIDDHIDQHPDLKNDKALLSSIPAIADRTSLLMLSFLRSHAFERASQAAAFAGLVPIQRQSGSSIHGRSRLSKAGPSKIRAGLYMAAIVATRHNPHIKGMNDRLLANGKTKMMAVGAAMRKLIHLCYGVLKHQRPYQENYCANSQ

SEQ ID NO: 12227 - protein, 419 aa, unidentified
  source 1..419: note = protein_23cd9f7
  REGION 33..192: note = RuvC_domain
  SITE 36: note = RuvC_P1
  SITE 89: note = RuvC_P2
  SITE 130: note = RuvC_P3
  SITE 132: note = RuvC_P4
  SITE 135: note = RuvC_P5
  REGION 295..382: note = Tnp_domain
  SITE 303: note = Tnp_P1
  SITE 333: note = Tnp_P2
  SITE 341: note = Tnp_P3
  SITE 342: note = Tnp_P4
  SITE 355: note = Tnp_P5
MTVYVERGYIRQRALWINNSISTLYGGFFMIYVGIDVAKDKHDCCILGSNGDVLFPPFTFPNSLQGFDLLYERIGSLTSDLSKIKVGLEATGHYHLNLLRSLLDNGLASYVINPLHTNLFRKGLSLRKTKTDKVDASSIAMMLLTDRTLKPYTDTSYHNEELKSLTRYRFDKVRERSKLKASVSRLVSILFPELETLVPTIHLVSVYALLSEFPGASFVASAHLTRLTHLLKESSKGRYGRETAISFRAAAVSSIGSVFPAKSLELKHTIHLIEVLTEEIDEIEAAINDIMDTLNSPITTIPGIKNRMGAIILAEIGDFSKFENADQILAYAGLSPSTYQSGQMTSSHARMEKRGSRYLRYALFNATQYVCIWDPAFKAYLAKKRAEGKHYFVATSHACKKLVRLIYRMQLTGEAYRIA

SEQ ID NO: 12228 - protein, 345 aa, unidentified
  source 1..345: note = protein_464b821
  REGION 16..160: note = RuvC_domain
  SITE 19: note = RuvC_P1
  SITE 63: note = RuvC_P2
  SITE 103: note = RuvC_P3
  SITE 105: note = RuvC_P4
  SITE 108: note = RuvC_P5
  REGION 202..289: note = Tnp_domain
  SITE 210: note = Tnp_P1
  SITE 240: note = Tnp_P2
  SITE 248: note = Tnp_P3
  SITE 249: note = Tnp_P4
  SITE 262: note = Tnp_P5
MFDVVILKLILTMTYIGIDVSKATFVVAYSSAKDSKTKTYANTASGIHKFIQTLPSEAHCVMEATGNYSMLLLYLLDKANITVSMENPLKIKNFARVMLSVVKTDEIDAKLIALYGERMQPKPFKMRSDSLMLLKQKRTVLRQLKKQLVANTNLQESMEALPFVDSISKKVLEKTIKFLQKQIKQMEEELASLANIEYKKQMSLLTSIKGIGVTLATALIVATGGFTYFDNAKQLTRYLGLSPTYQQSGTSVNVKGRINHNGDSYLRSQLYVAAFSSLRCNKECKACFDRLRSNGKPGKVAVVAVANKLVRQAFAVVTKNKPYIDGYKSVKPENTPAEGAPAARG

SEQ ID NO: 12229 - protein, 408 aa, unidentified
  source 1..408: note = protein_30d3f72
  REGION 6..162: note = RuvC_domain
  SITE 9: note = RuvC_P1
  SITE 58: note = RuvC_P2
  SITE 99: note = RuvC_P3
  SITE 101: note = RuvC_P4
  SITE 104: note = RuvC_P5
  REGION 269..356: note = Tnp_domain
  SITE 277: note = Tnp_P1
  SITE 309: note = Tnp_P2
  SITE 317: note = Tnp_P3
  SITE 318: note = Tnp_P4
  SITE 329: note = Tnp_P5
MKRYHLGVDWGDEFHQVWVNDPQGKKVVEMTIEQSAKGLSELGRWLRERQAEGIELWAAIEKPHGRIVDFLLDHGVVVYPINPKALDRARDRFRMSQSKSDSFDAYVLAEFVRTDHAHLRALEPSSEPAQELKLLTRDHHRLMRHKTRLINQIEVTLKEYYARPLEVFSDLESKIALDFLEQYPTPQALSDLTRRQWNRFAKREHRLGEERSKELWETLSQPQLKIPEHVVRVKAQLLLVLIVQLKALIQAVESYSEKVQRFFASMPAAKLVETLPGGKSGTIVPMLWAELGDAKSRWKSFRHLQAEAGAVPVTKASGKYRVVQFRFACNKLLRYASYWLSFVSLNRCEWANKYYRDQRAKGHSHSQALRALGAKWLKIIFVVWRDHKPYDENCHLANIARQRMRQVI

SEQ ID NO: 12230 - protein, 391 aa, unidentified
  source 1..391: note = protein_a78edde
  REGION 4..163: note = RuvC_domain
  SITE 7: note = RuvC_P1
  SITE 60: note = RuvC_P2
  SITE 101: note = RuvC_P3
  SITE 103: note = RuvC_P4
  SITE 106: note = RuvC_P5
  REGION 267..353: note = Tnp_domain
  SITE 274: note = Tnp_P1
  SITE 304: note = Tnp_P2
  SITE 312: note = Tnp_P3
  SITE 313: note = Tnp_P4
  SITE 326: note = Tnp_P5
MIFVGIDVAKDKHDCFIRNSEGTVLADVFTIANNRIGFETLLSRIQSCSQGESKIKVGLEATGHYSYNLLGFLLDSGLTTYVINPLHTNLYRKSLSLRRTKTDRIDARTIAMMLMSDVDLKSYSNTAYHNEELKSLTRYRFDKVKERAKLKSSVARLVNILFPELEKLVSSLHIAVVYALLSNYPGASYIANANTEELAETLCTASKGRYTKSKTAEIQVAAGVSIGSKMPAKSMELKHTIALIRELDKEISEVESAIDKITSQMDSPIFTIPGIGRHMGAMILAEVGDFSNFASADKLLAYAGLSPSTYQSGQLQNCYAHMEKRGSRYLRYALFNAAKYVCLWCPTFSAYLEKKRSEGKHYNVAISHASKKLVRLIFAMQRSGKAFLADY

SEQ ID NO: 12231 - protein, 397 aa, unidentified
  source 1..397: note = protein_3167d42
  REGION 4..160: note = RuvC_domain
  SITE 7: note = RuvC_P1
  SITE 57: note = RuvC_P2
  SITE 97: note = RuvC_P3
  SITE 99: note = RuvC_P4
  SITE 102: note = RuvC_P5
  REGION 274..361: note = Tnp_domain
  SITE 282: note = Tnp_P1
  SITE 312: note = Tnp_P2
  SITE 320: note = Tnp_P3
  SITE 321: note = Tnp_P4
  SITE 334: note = Tnp_P5
MIAVGIDVSKSKSTVAILNGDGSIRAKPFDVHHTIDELGALTEYIKGTSEVPTILMEPTSHYHYPLLKAFQDASLPVCLINPYQMKKFGDTELRKAKTDKRDALRIAQYALEKSYSLVPYTPADQKYDDLRFLSRQYSQRISTLTVSKVQLLRLLDQTMPGITTLLPLKSRDPDNCVLLRFVKRFKSFDIIRKMGKTRFLDSYLVLVRKTKDRFAGAKGLAIYELVLNSVTTRGDNPLTAMTQDQCVDLISTSQKAADEINLHMLNISQTIPEYKVLRSMAGVGDRLGPIILAEIGDIRRFHSGKALNAYAGNDAPPYQSGQFESRNRHISKRGNPALRKACFEVMQALKLTKPQDDPVYLFLLKKEQEGKPYNVAKMAAVNKFLRIYYARAMELYK

SEQ ID NO: 12232 - protein, 397 aa, unidentified
  source 1..397: note = protein_5e4ca28
  REGION 4..160: note = RuvC_domain
  SITE 7: note = RuvC_P1
  SITE 57: note = RuvC_P2
  SITE 97: note = RuvC_P3
  SITE 99: note = RuvC_P4
  SITE 102: note = RuvC_P5
  REGION 274..361: note = Tnp_domain
  SITE 282: note = Tnp_P1
  SITE 312: note = Tnp_P2
  SITE 320: note = Tnp_P3
  SITE 321: note = Tnp_P4
  SITE 334: note = Tnp_P5
MIAVGIDVSKSKSTIAIVDSSGEILMKPTDFMHNESSFSHLATILHSYSDDVKIVMEATGHYHQPVLKYLLQENFFVCVVNPYVIKKYGDNDLRKSKTDKKDAIRIAFYTLEKAYSLTPYTILDQKYDELKFLSRQYNQCVSMRVKARVQLSNLLDELMPGIQNILNSRTADPEDNFLYHFIEKYESYEKIRSMSEKRFINSYVKFSNKTHARNPESKALKIYETAQNNLYTRTNTLSTEIAMKQCIELLKQTELAANAIMRQMQSIATTLPEYPVVTAMGGVGPRLAPRLIAEIGDTRRFKSGKALNAYAGNDAPPYQSGQYESTNRHISKRGSASLRKACYEVMQCLKMHKPQDDPVYLFMIKKESEGKPLNVAKMAGVNKFLRIYYARVMEVYK

SEQ ID NO: 12233 - protein, 350 aa, unidentified
  source 1..350: note = protein_e9b23e8
  REGION 7..149: note = RuvC_domain
  SITE 10: note = RuvC_P1
  SITE 53: note = RuvC_P2
  SITE 88: note = RuvC_P3
  SITE 90: note = RuvC_P4
  SITE 93: note = RuvC_P5
  REGION 210..299: note = Tnp_domain
  SITE 218: note = Tnp_P1
  SITE 248: note = Tnp_P2
  SITE 256: note = Tnp_P3
  SITE 257: note = Tnp_P4
  SITE 269: note = Tnp_P5
MTNITTIGIDIAKRIFQFHGVDKNGKTVLKKKLMRDQVLTFIANLPKCLVGMEACGGANYWAREISKLGHEVKLMAPQFVKPYVKTNKNDQADAEAICEAVSRPNMRFVPIKSIEQQDILSIHRVRARLVKNRTALANEIRGLLHEFGMIIPQGINKITSKLTEVLDSGKLSPISQQTFSDLKEEFIENDKKIKCLESRLKIMASELDKYQQIIAIPGIGLITSTALIASIGNGNCFENGRQLSAWLGLVPRQASSGGKEKLLGISKRGDIYLRTLLIQGARAVLNTKLRFTTESQKAKKDYSKFTQWMFNLHDRSGHNKTIVAVANKLARVVFAVLSSGNDYIENKVCS

SEQ ID NO: 12234 - protein, 343 aa, unidentified
  source 1..343: note = protein_eaf9b0f
  REGION 6..147: note = RuvC_domain
  SITE 9: note = RuvC_P1
  SITE 52: note = RuvC_P2
  SITE 87: note = RuvC_P3
  SITE 89: note = RuvC_P4
  SITE 92: note = RuvC_P5
  REGION 211..296: note = Tnp_domain
  SITE 219: note = Tnp_P1
  SITE 249: note = Tnp_P2
  SITE 257: note = Tnp_P3
  SITE 258: note = Tnp_P4
  SITE 270: note = Tnp_P5
MSIMILGIDLGKNSCSVVGVDATGAIVTRRTMRRQTLIDYVTKLPACIVAMEACCGAHHLGRLFTERGHEVRLMSPEYVRPYIKAQKNDDRDAEGIAEAASRPTMRFVDLKSQEQLDIQTLHRVRSRLVAERTNLINQLRAILLERGVIFPAGRRKLELGVDSMLAEDVKLLSSRVQQLVRELRAEWQELDTKIGALNTELIQLARNDAATRRLTTIPGIGVLNATALVAAVGNASSFAKARDLGAWLGLVPRQYSTGGKPRLLGISKRGNTYLRTLLIHGARASLPSLSKSDTPTGRWLKAMMERGVHRNVMVVALANKLARIAWAVLRKETGFDRSCPAVA

SEQ ID NO: 12235 - protein, 325 aa, unidentified
  source 1..325: note = protein_3b41e3e
  REGION 8..155: note = RuvC_domain
  SITE 11: note = RuvC_P1
  SITE 55: note = RuvC_P2
  SITE 95: note = RuvC_P3
  SITE 97: note = RuvC_P4
  SITE 100: note = RuvC_P5
  REGION 195..281: note = Tnp_domain
  SITE 202: note = Tnp_P1
  SITE 232: note = Tnp_P2
  SITE 240: note = Tnp_P3
  SITE 241: note = Tnp_P4
  SITE 254: note = Tnp_P5
MQSQTNYAGIDISKSFFDVAVPNGEQYRYYKFSNDALGFDALLKVLCIENQVLMEASGPYYLRLACYLNTKGIRVSVINPLVIRRFCQMRMSRAKTDKKDARMIAEYGKAEKPVLWQPPQQHVITLQQMEALMFNLNKEYTALSNQLGSFISSGMLDRQLEGIISKELIHKQVLINKLTEEMQQIAEAHYSAMLINLQSIPGMGKKTAMMLIVLSGGFNRFDDYRKLSSYIGLCPRIFESGTSVKGKARICKMGMSRIRAMLYICSWSAKRCNNACRELYERLLAKGKAKLLALIAVANKLLKQAFAIATNQTKYNENYSKYICF

SEQ ID NO: 12236 - protein, 412 aa, unidentified
  source 1..412: note = protein_61a0e33
  REGION 5..166: note = RuvC_domain
  SITE 8: note = RuvC_P1
  SITE 63: note = RuvC_P2
  SITE 108: note = RuvC_P3
  SITE 110: note = RuvC_P4
  SITE 113: note = RuvC_P5
  REGION 283..370: note = Tnp_domain
  SITE 291: note = Tnp_P1
  SITE 321: note = Tnp_P2
  SITE 329: note = Tnp_P3
  SITE 330: note = Tnp_P4
  SITE 343: note = Tnp_P5
MKLLVGIDVSSKTLEVVMMTSEALKPVFQGAFENDLNGATELKTIILALNEQRHFEQITIGMESTSIYSFHPAYFFMNDDDLAQFNTEAVVLNPRDTKRYKDVFEDNKNDHIDALYIADYLRNGRFTTSLVREDEYIALQRLTRSRFELVTSLARSKQHFLENLYYKVNKLAVNSSGEKVAVFGSSIFNLLTDEMTTDELINASTEDLIDYLNAAGHGRFADAEKTAKAIQRAVRGSYRLPKVIQNSIDINVSIYATEIRTYQKLIKELDKQIEAVVMVLPETEILQSVPGIGSVYSAGILAEIGQIERFDKETQLARYAGLAWKQNQSGDFNGQITPRTHTGNKYLRYYLIEAAGSVTRYDPVFRSYFEKKMSEVTKTPRKRGLALTARKLIRVLDVLLRRHQLYQKEESV

SEQ ID NO: 12237 - protein, 390 aa, unidentified
  source 1..390: note = protein_1d88daa
  REGION 6..154: note = RuvC_domain
  SITE 9: note = RuvC_P1
  SITE 52: note = RuvC_P2
  SITE 92: note = RuvC_P3
  SITE 94: note = RuvC_P4
  SITE 97: note = RuvC_P5
  REGION 259..346: note = Tnp_domain
  SITE 267: note = Tnp_P1
  SITE 298: note = Tnp_P2
  SITE 306: note = Tnp_P3
  SITE 307: note = Tnp_P4
  SITE 319: note = Tnp_P5
MTAIWAGIDAGKTHHHCVVIDDTGKRLLSRRVANDEAELLKLLGDDAMWGIDLADGGAALVIAILLNHGRQLLYIPGRTVNRASEGYRGDGKTDAKDAAVIADQARIRRDLTPLRPGDELVSELKVLTRHRRDLSDDRTRTINRLRGHLTEIFPGLERELDLGNVGPLVLLTGYQTPAVIRRAGRRRLVTWLRNRKVRSADELAARAVQAAEAQHTSVPGEDMTAHVVHSLAREVMALNEKLAETDKLIEGRFRRHRNAEVIASMPGIGSLLGAELLAATGGDMDAFASADRLAAFAGVSPTPRDSGKISGNLHRPTRYSRRLQRVFYTSALISIRSCDESRRFYDRKRAEGKRHSQAVTALARRRVNVLWALLRDGRCYNPIPPVTPAT

SEQ ID NO: 12238 - protein, 400 aa, unidentified
  source 1..400: note = protein_ece5a79
  REGION 4..161: note = RuvC_domain
  SITE 7: note = RuvC_P1
  SITE 57: note = RuvC_P2
  SITE 98: note = RuvC_P3
  SITE 100: note = RuvC_P4
  SITE 103: note = RuvC_P5
  REGION 276..364: note = Tnp_domain
  SITE 284: note = Tnp_P1
  SITE 314: note = Tnp_P2
  SITE 322: note = Tnp_P3
  SITE 323: note = Tnp_P4
  SITE 336: note = Tnp_P5
MISVGIDVSKGKSTVCVLKPYGEIVCRPFEMKHVEKDMEDFHNLLQKLDGEIRIVMEATGIYHLPVLTFLHDKGYFVSVVNPFAMKKYAKDNSIRGAKTDKLDSIMIANYGIEKWFKLKGYEGDEETYAELKLLGRRYRYYMELHVKALQELTHILDYVMPGLKNLFNSWNETNGKDKLSDFVERFWHFDLITSMSLEKFTEEYLAWAKEKKYHQSRSKAETVYELASSGISTLSSSTPSTKMLVQEAVSVLRTVDSSLSLILTRMKELAKSLPEYSTVREMGGVGDVLAVKLIAEIGDVRRLHNAKALIAWAGIDPPPYESGQFIGSKRKITKRGSSTLRKVGYEVMRVLKSHPAPKDDAVYNYILKKESEGKSKKHAKIAGLNKFLRIYYARVIAVYQ

SEQ ID NO: 12239 - protein, 406 aa, unidentified
  source 1..406: note = protein_ed54019
  REGION 4..161: note = RuvC_domain
  SITE 7: note = RuvC_P1
  SITE 60: note = RuvC_P2
  SITE 100: note = RuvC_P3
  SITE 102: note = RuvC_P4
  SITE 105: note = RuvC_P5
  REGION 276..363: note = Tnp_domain
  SITE 284: note = Tnp_P1
  SITE 315: note = Tnp_P2
  SITE 323: note = Tnp_P3
  SITE 324: note = Tnp_P4
  SITE 336: note = Tnp_P5
MNYLGIDVSKSTSRYVLLDNDGEKSTKAFTLDNNQQAFTQLLDRLKELNLQPDNLLIGIEATSIWWENIYCFMTEQKFKVIVLNPHQTNKFREALRIKAKTDDIDAYVIAGLLRSGEYAASYIPEETIQILREIVKLRHQLVTNRQNFERQAQALLGLLFPEYEKTAIKNPFGVASLAILKAYPTVKHLAEAKSKNIEKIVRHIKGNNLNITEIKNLLETAQNSIYSGRAKDARGMNLNILLTHVETLLHSIAQLDKRMEDILSPQNPDDAMSFPGANLLSIPGVGPKTLAAILSVVGADGSAYPDGKSFIGYIGFFPQIYESGETRHDNIISNRGPNYIRRALYISAVACLKHNAEFKSLYDRKVSQGKTAKQALIYVAKKLAHLCLSMLKSGEFYNPSRVFMPA

SEQ ID NO: 12240 - protein, 315 aa, unidentified
  source 1..315: note = protein_14a9e9d
  REGION 8..149: note = RuvC_domain
  SITE 11: note = RuvC_P1
  SITE 54: note = RuvC_P2
  SITE 94: note = RuvC_P3
  SITE 96: note = RuvC_P4
  SITE 99: note = RuvC_P5
  REGION 189..273: note = Tnp_domain
  SITE 197: note = Tnp_P1
  SITE 226: note = Tnp_P2
  SITE 234: note = Tnp_P3
  SITE 235: note = Tnp_P4
  SITE 246: note = Tnp_P5
MPHTQVFVGIDVSKAQLDAAVRPAGRFAAPNDEAGVAQVLARLRAVPPTLVVVEATGGLEIPLVGALATAGVPVVVVNPRQVRDFAKATGKLAKTDAVDAQVLAHFAEVMRPEPRPLPDEQTQALAALVARRRQLVEMLTAEQNRLASARGPVRQNLRAHIAWLVRALGHADADLAQAIRNSPVWREKEALLRSTPGVGPVLTTTLLANLPELGTVTGKQIAALVGVAPFNRDSGTWRGKRTVWGGRAQIRAVLYMGALVAARFNPVIRAFYLRLCAAGKAKKVALTACMRKLLLILNAMLKQRTPWRTEPVPCA

SEQ ID NO: 12241 - protein, 343 aa, unidentified
  source 1..343: note = protein_d40c2c7
  REGION 6..147: note = RuvC_domain
  SITE 9: note = RuvC_P1
  SITE 52: note = RuvC_P2
  SITE 87: note = RuvC_P3
  SITE 89: note = RuvC_P4
  SITE 92: note = RuvC_P5
  REGION 211..297: note = Tnp_domain
  SITE 219: note = Tnp_P1
  SITE 249: note = Tnp_P2
  SITE 257: note = Tnp_P3
  SITE 258: note = Tnp_P4
  SITE 270: note = Tnp_P5
MQIRSVGIDLGKTTFHLVALGAASKVLIKKKFSQKQLLAFTANMQTSLIGLEACSGAHFLGRALRQQGHDVRLIPAQFVKPFVKSNKNDFVDAEAIAEAVERKNMRFVPIKTDDQLDLQAIHRIRNRLVSRRTAVINQIRAFLLERGMVFAQKPAKLKAGMADVLENADNALTPMMRKLIGLLYEEWKSVEEQIDELTDSLEQIAANDAGCCRIQKIPGIGPVVATAIVAAIGNGAAFRKGRDFAAWLGLVPRQYSTGGKARLLGISKRGNIYLRKILIHGARAAAMRIKRDRYSIEAWMNALEARAPRNVLVVAMANKLARIAWAVLSSGEDYRPVASLAAA

SEQ ID NO: 12242 - protein, 302 aa, unidentified
  source 1..302: note = protein_2b6d4ba
  REGION 2..110: note = RuvC_domain
  SITE 15: note = RuvC_P2
  SITE 50: note = RuvC_P3
  SITE 52: note = RuvC_P4
  SITE 55: note = RuvC_P5
  REGION 174..260: note = Tnp_domain
  SITE 182: note = Tnp_P1
  SITE 212: note = Tnp_P2
  SITE 220: note = Tnp_P3
  SITE 221: note = Tnp_P4
  SITE 233: note = Tnp_P5
MLLEKIEPGCEIGMEACSGAHHWARLLQAKGFTVQLIAPQFVKPYVKSNKNGANDAEAICEAMSRPSMRFVGVKTVEQQDIQAVHRVRSGLMEQRKAKANQLRGLASEYGLVAARELPHLRSAIPRWLEDQENGLSERFRKLLRGLWQDLQVLDERVEELDREIVQLARQDPVALRLQQVRGIGPLTATALLATVGDASQFANGRQMAASFGLTPKQNSSGGKERLLGISKRGDAYLRSLLVHGARAVIRTAQAKTDRLSIWAMRIATTRHPNIAAVALANKTARVAWAMITRGTDYQAQPA

SEQ ID NO: 12243 - protein, 391 aa, unidentified
  source 1..391: note = protein_99b10d3
  REGION 6..163: note = RuvC_domain
  SITE 9: note = RuvC_P1
  SITE 61: note = RuvC_P2
  SITE 102: note = RuvC_P3
  SITE 104: note = RuvC_P4
  SITE 107: note = RuvC_P5
  REGION 267..351: note = Tnp_domain
  SITE 273: note = Tnp_P1
  SITE 303: note = Tnp_P2
  SITE 311: note = Tnp_P3
  SITE 312: note = Tnp_P4
  SITE 324: note = Tnp_P5
MSMYFVGIDISKYKHDCCILSATDQKVVSKFAFKNDKSGFEQLNLILNSLSTPEDIRIGFESTAHYALNLELFLENAHHSFMEINPVFIKDFKKSQTLRRTKTDSIDCELIARWLMTVEYKPHSKGFYHAYSLKSLTRLRDRLVRQRSFYLVKLTNVLDHTFPEFKPFFQERFSKTALYLLETYGSAEKMVRMNSASYEKLRSISRGKFSPQQFIRLKELAANTVGVNNSIFDVELGSLLSLYKSLVYEIETLEREINRLVEEVHPHYMSIPGIGPISAAIIYAEYGDISNFSSPNQMLAFAGIEPSVHESGTEAYNGRMVKHGSSQLRYVLINCCLPLIRFDVTFATYYAKKRAENKPHRVAITHVAKKLVRVIYALESQDIDFDTKKLR

SEQ ID NO: 12244 - protein, 326 aa, unidentified
  source 1..326: note = protein_e804e99
  REGION 5..157: note = RuvC_domain
  SITE 8: note = RuvC_P1
  SITE 62: note = RuvC_P2
  SITE 102: note = RuvC_P3
  SITE 104: note = RuvC_P4
  SITE 107: note = RuvC_P5
  REGION 202..287: note = Tnp_domain
  SITE 210: note = Tnp_P1
  SITE 239: note = Tnp_P2
  SITE 247: note = Tnp_P3
  SITE 248: note = Tnp_P4
  SITE 260: note = Tnp_P5
MQAFVGIDVSKDKLDCLWLRDPELLKVKTKVLKNTPSGIESLAHWLVKTTQQPAENIIVVMEATGIYHENLAYRLYEQDFSVVVANPAQIKSYAKSLGSTHKTDKCDSLVIARYGKSHNPMLWKPEPPEIRELKALIARLEAIEKDYQREYNRREKAEITTVSEIVMSSIEQTMEYLKQEKARLESQIDDHIDRHPHLKKDRELLQTIPAVGSTLSRLMLCVIRSRRFKTAAQLAAYLGLIPKLVESGVFKGRSSLTKSGPASVRAKLYMAAVCAGQHNPDIARQKKRLLANGKNKMQALGAAMRKLVQICFGVLKNQKEYMPQVC

SEQ ID NO: 12245 - protein, 344 aa, unidentified
  source 1..344: note = protein_0e586ba
  REGION 7..149: note = RuvC_domain
  SITE 10: note = RuvC_P1
  SITE 53: note = RuvC_P2
  SITE 88: note = RuvC_P3
  SITE 90: note = RuvC_P4
  SITE 93: note = RuvC_P5
  REGION 212..300: note = Tnp_domain
  SITE 220: note = Tnp_P1
  SITE 250: note = Tnp_P2
  SITE 258: note = Tnp_P3
  SITE 259: note = Tnp_P4
  SITE 272: note = Tnp_P5
MLKTNIIGIDLAKNVLQVCHISTHGELLSNKAVSRQKLKELIAKSKPSLVAFEGCAGCHYWGRYAESFGHEVRIINPKKVKAYVDGHKTDANDALAIANASLQIGIKYSKPKSVDQQTLMSIESSRQFLSKTVVSLGLHIRSLIHEYGMIAAKGPKGLAELVTTALDNEQSNLPASVSIVLAKLWQQYLQIKQELDDLQKSMNATTRQIEPCKILMELEGVGETTASMLYATLGNGSQFVNGRQASAFVGVTPKQYSSGGKVTMVGIDKVGGVKDLRSMLYLGAMAYIYRLPEQPKTLKQDWLIKLVNRVGFKRACIALANKTVRTAWAMLRNETKYQPQTLLY

SEQ ID NO: 12246 - protein, 341 aa, unidentified
  source 1..341: note = protein_d187969
  REGION 6..147: note = RuvC_domain
  SITE 9: note = RuvC_P1
  SITE 52: note = RuvC_P2
  SITE 87: note = RuvC_P3
  SITE 89: note = RuvC_P4
  SITE 92: note = RuvC_P5
  REGION 211..295: note = Tnp_domain
  SITE 219: note = Tnp_P1
  SITE 249: note = Tnp_P2
  SITE 257: note = Tnp_P3
  SITE 258: note = Tnp_P4
  SITE 270: note = Tnp_P5
MQIMILGIDLGKNSCSLVGLDESGMVVVRKRLRRDGVIGFAAKLSPCVIAMEACCGAHHMGRSLAALGHEVRLMSPEYVRPYVKAQKNDDRDAEAIAEAATRPTMRFVELKSEEQLDVQTLHRVRDRLVGERTSLTNQIRSLLLERGHVVAQGHARLRFLLGELLDTDAVALSPRMVFLLGDMRTRWEELDRRIAAFDAEFAAMARADVRARRLTEIPGIGALNATALVAAVGDAATFAKGRDLAAWLGLAPRQATTGGRPKLLGITKRGSKYLRKMLIQGARSAMPTLAKSDTAIGAWLRGLLARSHSNVAVVALAAKMARTVWALLHHERSYKSMPVTA

SEQ ID NO: 12247 - protein, 388 aa, unidentified
  source 1..388: note = protein_07ce804
  REGION 4..160: note = RuvC_domain
  SITE 7: note = RuvC_P1
  SITE 58: note = RuvC_P2
  SITE 98: note = RuvC_P3
  SITE 100: note = RuvC_P4
  SITE 103: note = RuvC_P5
  REGION 264..351: note = Tnp_domain
  SITE 272: note = Tnp_P1
  SITE 302: note = Tnp_P2
  SITE 310: note = Tnp_P3
  SITE 311: note = Tnp_P4
  SITE 324: note = Tnp_P5
MIYVGIDIAKLNHFASAISSDGEELIKPFKFTNDNDGFHLLISKLDPLDKDSLIIGLESTAHYGDNLVRYLVAKNYKVCVLNPIKTSTMRKNNIRKTKTDKVDTFIICKTLMMQESLRFVTFYDLDLMDLKALGRFRQKTIKQRTRLKIQLTSYVDEIFPELQYFFKSGLHQKSVYALLKEAPTPEAVASMHMTHLAHLLKVNSHGRFNKEMAQQLRVLAQKSVGANDSSLSIQVTHTIQQIELLDSQLERVEAEMTEIMKFNDSVIMTIPGIGYINGGMILGEIGDIHRFSCPNKLLAYAGLDPSVYQSGNFQAKKTRMSKRGSKVLRYALVNAAHNVVKNNATFKAYYEAKMVEGRTHYNALGHCAGKLVRIIWKMMTDNVEFNLD

SEQ ID NO: 12248 - protein, 374 aa, unidentified
  source 1..374: note = protein_e1cd43e
  REGION 32..173: note = RuvC_domain
  SITE 35: note = RuvC_P1
  SITE 78: note = RuvC_P2
  SITE 113: note = RuvC_P3
  SITE 115: note = RuvC_P4
  SITE 118: note = RuvC_P5
  REGION 237..323: note = Tnp_domain
  SITE 245: note = Tnp_P1
  SITE 275: note = Tnp_P2
  SITE 283: note = Tnp_P3
  SITE 284: note = Tnp_P4
  SITE 296: note = Tnp_P5
MLLPRQQVKLGGGTEDKEHAMSQNPITAIATVGIDIGKNSFHVFGLDQRGAIVLRQKWSRGQVEARFANMPPCLIGMEACVGAHHLSRKLKALGHDARLMPAKYVRPYSKGQKNDFRDAEAIAEAVQRPTMKFVATKTADQLDLQALHRVRERLVSQRTGIINQIRAFLLERGIAVRQGQRFLRAELPRILATPPDVLSPRMVRLIEDLASDWRRLDERVESLSGEIEAVARQDADCERLMSVPGIGPIISSAMVAAIGRGEVFAKGRDFGAWLGLVPKQTSTGDRTILGKISKRGNRYLRVLFVQAAWVVLIRPKSWERHGLKPWIEAAKKRLHPNVLAIALANKLARIAWSVLARGRNFEARTNINATAQAA

SEQ ID NO: 12249 - protein, 406 aa, unidentified
  source 1..406: note = protein_989cb31
  REGION 6..164: note = RuvC_domain
  SITE 9: note = RuvC_P1
  SITE 59: note = RuvC_P2
  SITE 101: note = RuvC_P3
  SITE 103: note = RuvC_P4
  SITE 106: note = RuvC_P5
  REGION 278..364: note = Tnp_domain
  SITE 286: note = Tnp_P1
  SITE 316: note = Tnp_P2
  SITE 324: note = Tnp_P3
  SITE 325: note = Tnp_P4
  SITE 338: note = Tnp_P5
MNMNAVGIDVSKRKSTVAILRPGGEIVKKPFDVPHLSSDFRSLTRLIQDLDGETRIVMECTGHYYKPIARRLSQAGFFVSAVNPHIIRNFQGHDNPLRKVKTDKADSVKIARYTLDSWGNLKQYTLMDELRSQLKTMNRQFSFYTKHKTAMKNNLIGLIDQTYPGANTYFNSPVREDGCQKWVDFVDTYWHVDCVRKMSLTAFINHYQKWCHRRRYIFSKSKAEEIYGKAKELVPVLPKDNFTKRIIKQAIAQLNTTSKTVEELRNLMNETASKLPEYPVVMAMEGVGPSLGPQLMAEIGDVMRFTHKGAITAFAGVDPGVNASGEYSQKSVHASKHGSPVLRKTLFQIMEVLIKNKPDDAVYLFMDKKRAQGKPYYVYMTAGANKFLRIYYGRVKEYLLNLSELN

SEQ ID NO: 12250 - protein, 306 aa, unidentified
  source 1..306: note = protein_466b676
  REGION 18..149: note = RuvC_domain
  SITE 49: note = RuvC_P2
  SITE 89: note = RuvC_P3
  SITE 91: note = RuvC_P4
  SITE 94: note = RuvC_P5
  REGION 185..269: note = Tnp_domain
  SITE 193: note = Tnp_P1
  SITE 222: note = Tnp_P2
  SITE 230: note = Tnp_P3
  SITE 231: note = Tnp_P4
  SITE 242: note = Tnp_P5
MESTFRKSAWIAQWPLPQEEVFAVGNDHAGIDELVARLKAIGADAIALEATGGFEMLAVAGLSSAGLTVLVVNPAQVRAYAHAIGRRAKTDPIDAAVIAAFVLATKPEIRPLRDAETQALSELVARRRQIVQMVVAEENRLRMALAKQAQKSIKRLLKALRRELESLDADLDSHIRKSPVWRVREALLTSVPGVGATTARTLLAELPELGSLDRRQIASLAGLAPWTRQSGKWKGKSFIGGGRGKVRAVLFMAALVASRYNPDLKAFRDRLVAAGKPKIVAIVATMRKLLTILNAIIRDGRPWQNA

SEQ ID NO: 12251 - protein, 334 aa, unidentified
  source 1..334: note = protein_d692b12
  REGION 7..149: note = RuvC_domain
  SITE 10: note = RuvC_P1
  SITE 53: note = RuvC_P2
  SITE 88: note = RuvC_P3
  SITE 90: note = RuvC_P4
  SITE 93: note = RuvC_P5
  REGION 209..299: note = Tnp_domain
  SITE 217: note = Tnp_P1
  SITE 247: note = Tnp_P2
  SITE 255: note = Tnp_P3
  SITE 256: note = Tnp_P4
  SITE 268: note = Tnp_P5
MENIALIGIDLGKNSFHIHCQDRRGKAVYRKKFTRPKLIEFLATCPATTIAMEACGGSHFMARKLEELGHSPKLISPQFVRPFVKSNKNDFVDAEAICEAASRPSMRFVQPRTESQQAMRALHRVRESLVQDKVKTTNQMHAFLLEFGISVPRGAAVISRLSTLLEDSSLPLYLSQLLLKLQQHYHYLVEQIKDLESQLKRKLDEDEVGQRLLSIPCVGTLTASTISTEIGDGKQYASSRDFAAATGLVPRQYSTGGRTTLLGISKRGNKKIRTLLVQCARVFIQKLEHQSGKLADWVRELLCRKSNFVVTCALANKLARIAWALTARQQTYEA

SEQ ID NO: 12252 - protein, 365 aa, unidentified
  source 1..365: note = protein_5aa690f
  REGION 4..160: note = RuvC_domain
  SITE 7: note = RuvC_P1
  SITE 57: note = RuvC_P2
  SITE 97: note = RuvC_P3
  SITE 99: note = RuvC_P4
  SITE 102: note = RuvC_P5
  REGION 274..361: note = Tnp_domain
  SITE 282: note = Tnp_P1
  SITE 312: note = Tnp_P2
  SITE 320: note = Tnp_P3
  SITE 321: note = Tnp_P4
  SITE 334: note = Tnp_P5
MNCVGIDVSHGKSIIVVMRPFGEVVVSPFEVLHTDSELSKLAGLLKSLDGETRVVMESTGYHHTPVAWLLHDAGLYVSVVNAMLVHDYGNNSLKRAKTDKKDAVKLANCGLDHWLTLPRYVPEEDTRLMLKTCYRKYQQYSKVQTMLKNNLISLLDIAFPDANRLFTSPPRADGSEKWVDFVAAFWHCECVCNLSEKAFTAKYHKWCRKHRYKFCEDKTLDIYSSACGHFGVIPKTDTAKLLVEQAVFQIRATSTTLAALKQEMQSLAASLPEYPVVMGMFGIGPALGPPLMAEIGDVRRFHSKKALVAVAGIDAPPYQFGQMDVRSHSISKRGSASLRRTHFLVMSVILQHAPMNEPVYQFMNK

SEQ ID NO: 12253 - protein, 365 aa, unidentified
  source 1..365: note = protein_f38d132
  REGION 4..160: note = RuvC_domain
  SITE 7: note = RuvC_P1
  SITE 57: note = RuvC_P2
  SITE 97: note = RuvC_P3
  SITE 99: note = RuvC_P4
  SITE 102: note = RuvC_P5
  REGION 274..361: note = Tnp_domain
  SITE 282: note = Tnp_P1
  SITE 312: note = Tnp_P2
  SITE 320: note = Tnp_P3
  SITE 321: note = Tnp_P4
  SITE 334: note = Tnp_P5
MNCVGIDVSKGKSMIAVMRPFGEVVVSPFEVRHTASELSELARLLKSLDGETRVVMESTGYHHTPVAWLLHDAGLYVSVVNAMLVHDYGNNSLKRAKTDKKDAVKLANYGLDHWLTLPRYAPEEDTRLMLKTCYRQYQQYSKVQTMLKNNLISLLDTAFPDANRLFTSPPRADGSEKWVDFVATFWHCECVCGLSKKAFTAKYQKWCRKHGYNFSQDKALDIYASACGRFGVMPKTNTAKLLVEQAISQLQTTSAALAALKQEMQSLAASLPEYPVVMEMFGVGPTLGPQLIAEIGDVRRFHSKKALVAFAGIDAPPYQSGQIDVRSRSISKRGSASLRRTLFLVMSVILQRAPMDEPVYQFMNK

SEQ ID NO: 12254 - protein, 398 aa, unidentified
  source 1..398: note = protein_c5f7a71
  REGION 4..160: note = RuvC_domain
  SITE 7: note = RuvC_P1
  SITE 57: note = RuvC_P2
  SITE 97: note = RuvC_P3
  SITE 99: note = RuvC_P4
  SITE 102: note = RuvC_P5
  REGION 275..362: note = Tnp_domain
  SITE 283: note = Tnp_P1
  SITE 313: note = Tnp_P2
  SITE 321: note = Tnp_P3
  SITE 322: note = Tnp_P4
  SITE 335: note = Tnp_P5
MISVGIDVSKEKSTVCILKPCGEIVKSPYEVTHTENHLLELTSLIKCFNEEVRVVMEATGTYHLPVLSFLKEHGIFVTIINPLVMKKYASIVLRKGKTDKLDAIKIASYGIDNWFHLVNYESSEDVYNELRLLGRQYSHYIKLRVESKLSLTSMLDHTMPGIKKMLQNRSDKPEKDKLNDFVEEYWHYDNIAVKSKEQFINSYKNWAKKKGYQQSEAKAIKIYDLAQQGIPTLSSNAPSTKMLVLEAVRVLREVDKTLALILSQMQELAKSLKEYAVVREMGGVGDIIAPRLIAEIGDIRRFHSGKALIAYAGIDAPPYQSGQFNGTRRRISKRGSATLRKTGFEIMKYLKINKPESNSVYLFILKKEAEGKASKVAKIAGLNKFLRIYYARIKEVYK

SEQ ID NO: 12255 - protein, 268 aa, unidentified
  source 1..268: note = protein_291f26b
  REGION 6..143: note = RuvC_domain
  SITE 9: note = RuvC_P1
  SITE 61: note = RuvC_P2
  SITE 102: note = RuvC_P3
  SITE 104: note = RuvC_P4
  SITE 107: note = RuvC_P5
  REGION 144..228: note = Tnp_domain
  SITE 150: note = Tnp_P1
  SITE 180: note = Tnp_P2
  SITE 188: note = Tnp_P3
  SITE 189: note = Tnp_P4
  SITE 201: note = Tnp_P5
MSMYFIGIDISKYKHDCCIISAANQKVVSKVIIKNNKAGFNELLTIIHSLANPADIRIGFESTAHYALNLELFLENSLLTFMEVNPVLISEYKKSKTLRRTKTDSVDCESIARWLMTVEYKPLVKEIDTIKKEINQLIEEVHPHYMSVPGIGPLSAAVIYSEYGDISNFTNPGQMLAFAGIEPGINESGTESHGGKMVKRGSSQLRYTLINCCLPLIRFDMTFATYYAKKRGEGKPHRVAITHVAKKLIRVIYALESQDIDFNAQELR

SEQ ID NO: 12256 - protein, 283 aa, unidentified
  source 1..283: note = protein_9b4b954
  REGION 1..114: note = RuvC_domain
  SITE 17: note = RuvC_P2
  SITE 57: note = RuvC_P3
  SITE 59: note = RuvC_P4
  SITE 62: note = RuvC_P5
  REGION 159..244: note = Tnp_domain
  SITE 167: note = Tnp_P1
  SITE 196: note = Tnp_P2
  SITE 204: note = Tnp_P3
  SITE 205: note = Tnp_P4
  SITE 217: note = Tnp_P5
MIKNTNLKAQDIVITTEPTGVYSEPLMYFLYEQGFILLHVNPGKAKQYASSLGLVHKTDKSDATMLARYGHDQQHSLLSWQPEPVEARELKVMTRRLEALEQDLRREENRYEAVGFSGASTRVTQSIEDMIAVLKTEIGKLKNDIDEHIDRHPQLKKNRKLLQSIKGVGEVISRMMVSLLACKQFKNAKQLACYLGLIPKLNESGKRAGKTTLSKEGPGYIRAKLYMAAVVAVQHNPDIKAQNKRLVGQGKTKMQAIGAAMRKLTHICFGVVKNQTEYQPQAI

SEQ ID NO: 12257 - protein, 344 aa, unidentified
  source 1..344: note = protein_0b28858
  REGION 6..147: note = RuvC_domain
  SITE 9: note = RuvC_P1
  SITE 52: note = RuvC_P2
  SITE 87: note = RuvC_P3
  SITE 89: note = RuvC_P4
  SITE 92: note = RuvC_P5
  REGION 212..299: note = Tnp_domain
  SITE 220: note = Tnp_P1
  SITE 250: note = Tnp_P2
  SITE 258: note = Tnp_P3
  SITE 259: note = Tnp_P4
  SITE 271: note = Tnp_P5
MKLKRIGVDLAKNVFQIHGVDSHERVKLRKQVKRTQMLALFGRIEPCVVAMEACGSAHYWARELGKLGHEVKLIAPQFVKPYVKSGKNDANDAQAICEAASRPSMRYVVVKTPQQQTDQAVHRVRSRLIRARTALVNEIRGLLSEFGLIGPAKGVGACRRFVAYALEDAHNELPGAMRELAAQLMEELADKNAHIARLDDQLKRQCAQDERIRRLMEIEGVGLVSASAMVAAVGHARQFTSGRDLAAWLGLVPRQHSSGGKERLGAISKRGDTYLRTLLIHGARSVVNTCREKTDRKSQWIRSLVTRRNKNIATVALANKNARIIWTVLSRGEDYRPGWSNGVA

SEQ ID NO: 12258 - protein, 347 aa, unidentified
  source 1..347: note = protein_5b40560
  REGION 8..150: note = RuvC_domain
  SITE 11: note = RuvC_P1
  SITE 54: note = RuvC_P2
  SITE 89: note = RuvC_P3
  SITE 91: note = RuvC_P4
  SITE 94: note = RuvC_P5
  REGION 213..300: note = Tnp_domain
  SITE 221: note = Tnp_P1
  SITE 251: note = Tnp_P2
  SITE 259: note = Tnp_P3
  SITE 260: note = Tnp_P4
  SITE 272: note = Tnp_P5
MTCVATVIGLDISKNVFVAVGREDQGREAFRKKLSRRQVLTFFARATPAKVGIEACSGAHYWARSLAGQRHDVCLIAGQHVKAYLTGNKNDANDAAAIAEARRRAMTKYVPLNTEAQQDLQMMHRVRQSLIERRTGVINQDRGLLGEYGIVIATGAQTFRRELGAILASDAHGLSASALDNFRDLSHQLDDLEEHLAQYDSRIRHAARSDERARRLMEVPGVGVLTATALLASLNDASPFDSGRHFAANIGLVPHEHSTGGRQRLFGITKRGDRYLRMLLIHGARSALQWAHKRSDRILRWAADLQQRKGTNVAAVALANKLARIVWALLAHGRHYESAHLAGMTAR

SEQ ID NO: 12259 - protein, 368 aa, unidentified
  source 1..368: note = protein_9f301da
  REGION 4..125: note = RuvC_domain
  SITE 22: note = RuvC_P2
  SITE 62: note = RuvC_P3
  SITE 64: note = RuvC_P4
  SITE 67: note = RuvC_P5
  REGION 233..319: note = Tnp_domain
  SITE 241: note = Tnp_P1
  SITE 272: note = Tnp_P2
  SITE 280: note = Tnp_P3
  SITE 281: note = Tnp_P4
MIGQCLGDDVDVDDVAARVKIGIETDRGPWVQALVAAGYTVHAVNPLQAARYRQRLALSGAKSDAADAHMLADMVRTDSHQLRPIAGDSAEAEAVKVVTRMHKTLIWERTRAVQRLRHALREYFPAALAAFEDLDAADTLELLAKAPDPAAAARLSISQISAALKRARRRNTAAKATAIQAVLRAEHLGQSTVVTAAYAASVRALVALLVTLNEQVKALQGQVEAHFGRHPDAEIILSQPGLGAVLGARVLAEFGDDHNRYTSAKARKNYAATSPITRASGKKKTVAARFVHNDRLIDALMTQAFTALTASPGARAYYDRQRARGATYNAALRQLANRLVGILHGCLKTGTRYDEATAWSHHLNKAAA

SEQ ID NO: 12260 - protein, 307 aa, unidentified
  source 1..307: note = protein_c8a7281
  REGION 25..86: note = RuvC_domain
  SITE 28: note = RuvC_P5
  REGION 193..274: note = Tnp_domain
  SITE 201: note = Tnp_P1
  SITE 231: note = Tnp_P2
  SITE 239: note = Tnp_P3
  SITE 240: note = Tnp_P4
  SITE 252: note = Tnp_P5
MRSSASSRPSTAPCSWSLTSPPRSGPCDAFVIADAARSMPHTLRAIDPADETVAELEMIAGFDDDLAGEATRVSNRLRGLLTQIHPHLERVIGPRIQHPAVLALLERFGSPAQIRKAGRHRLVNLLRPKAPRMAERLVDDIFTALDEQTVVVPGTDAAALIVPSLATSLTAVLDQRKLLAGRIEELLEAHPLSKVLTSMPGIGVRTGARILIDVGDASGFPSAAHLAAYAGLAPATRSSGSSIRGEQPSRRGNKQLKRAFFLSAFAALADPVTLLLNSAERPGSRPRPAPTLSRRAWQALVPAGSPN

SEQ ID NO: 12261 - protein, 405 aa, unidentified
  source 1..405: note = protein_bf00849
  REGION 6..162: note = RuvC_domain
  SITE 9: note = RuvC_P1
  SITE 58: note = RuvC_P2
  SITE 99: note = RuvC_P3
  SITE 101: note = RuvC_P4
  SITE 104: note = RuvC_P5
  REGION 271..357: note = Tnp_domain
  SITE 279: note = Tnp_P1
  SITE 310: note = Tnp_P2
  SITE 318: note = Tnp_P3
  SITE 319: note = Tnp_P4
MGKVFVGHDWAEDHHDVFVEDDIGCRLAGGRLPEGVDGIARFHELVAGRVEDPADVVIATETDRGLFVNALVAAGYTVLAVNPMSTSRYRQRHSTSGAKSDPGDAKVLADLARTDAHNHRTVAGDSELGEAIKVLARAHQSMIWTRQRQTNQLRSTLREFYPAALEAFDELAGRDALAVLTIASTPTAGSHLSLSKIASALGRAGRQRRLAQRAAEIQTALRSEQLAAPALIAEAMGATVTALAAVIVELNTQIASLETRLADHFEQHPDAKIIRSLPGLAMTLGARVLGEFGDAPNRYVDAKSRKNYSGMSPITKASGKHHVVLARHARNKRLSDACYLWAFAALTASPGARAFYDQHRANGNTHNRALRALANRLVGILHGCLRHDALYDEHTAWAHRHQHAA

SEQ ID NO: 12262 - protein, 402 aa, unidentified
  source 1..402: note = protein_8098d6a
  REGION 7..160: note = RuvC_domain
  SITE 10: note = RuvC_P1
  SITE 59: note = RuvC_P2
  SITE 97: note = RuvC_P3
  SITE 99: note = RuvC_P4
  SITE 102: note = RuvC_P5
  REGION 266..351: note = Tnp_domain
  SITE 273: note = Tnp_P1
  SITE 304: note = Tnp_P2
  SITE 312: note = Tnp_P3
  SITE 313: note = Tnp_P4
  SITE 324: note = Tnp_P5
MRNSVFVGLDWAYRSHAVCVVDAQGSVLKHLTVSHDAQGLGELRHALAAFGKALPIAIERPSGLIVDALVEAGHQVFAIHPNAVKASRPRYRSTNAKSDAGDAFMLADLLRTDGHRWHALQPQSAAIRGLRTLVRTRDDLVATRVRLANQLTALLDAYWPGATCIFAAVDSPIALAFIEQWSTARKLTARQIAAFCKRQGYSGRRSPGVLLDRLQAAAPSLCEPMLAQAYATAALALVALLKPLAAQIKSLDGHIALSMAALPQAISVMSLPRAGCICAAQILAELGDVPERFASAEQLCSEAGVVPVTYESGKSRAVTFRWACNHRLRRAITCLADNSRHASPWAASVYQAARKRGCDHPHAVRILARAWTRVLWRIWTDGTEYNPAIHSSACRIENTQAG

SEQ ID NO: 12263 - protein, 344 aa, unidentified
  source 1..344: note = protein_f114870
  REGION 5..152: note = RuvC_domain
  SITE 8: note = RuvC_P1
  SITE 55: note = RuvC_P2
  SITE 92: note = RuvC_P3
  SITE 94: note = RuvC_P4
  SITE 97: note = RuvC_P5
  REGION 212..297: note = Tnp_domain
  SITE 220: note = Tnp_P1
  SITE 250: note = Tnp_P2
  SITE 258: note = Tnp_P3
  SITE 259: note = Tnp_P4
  SITE 271: note = Tnp_P5
MYHYAGIDVSLECSTICVVDGAGKILREAKVASEPAALIAWFRSLGVSLERIGLEAGPLSQWLYGALRDAGLAVELLETRHVRDAFKAMPVKSDRNDARGIAQLMRLGWFRPVHCKSIEAQETRAILTARKLLQSKLRDVENSVRGVLRGFGLKVGKTTERSFAGRIRELVAGHPGLELVAKALLEAHAVVLREFNGLDKHTQKLARSHPPARLLMTTPAVGPIVALTYAAAIDDPTRFRSSKATGAHFGLTPKKYQSGQTDYSGRISKIGDASVREALYQAAHVMLTKPLKGCSALKSWAMRIARRAGMSKAKVALARKLAVILHRMLTDAKPFNPMAKGAVI

SEQ ID NO: 12264 - protein, 341 aa, unidentified
  source 1..341: note = protein_cc8bd78
  REGION 5..159: note = RuvC_domain
  SITE 8: note = RuvC_P1
  SITE 57: note = RuvC_P2
  SITE 98: note = RuvC_P3
  SITE 100: note = RuvC_P4
  SITE 103: note = RuvC_P5
  REGION 221..306: note = Tnp_domain
  SITE 229: note = Tnp_P1
  SITE 259: note = Tnp_P2
  SITE 267: note = Tnp_P3
  SITE 268: note = Tnp_P4
  SITE 279: note = Tnp_P5
MSVIIGIDPHKATHTAVAINRDEQPIARLQVVADRCQTERLLAWAAAFGCERTWAIESAGGLGKLLAQQLVGAGEQVVDVPPTLSARVRLLGSTKAAKNDSNDALSTAIAGLRHCELRTVGGEDQTAVIRLLIDRYDGLVALRTQATCRLHAVLRELVAGGAPRRLSANRAAKLLRSIHPAGAVAIERKRLAVDLLADLRRLDRDIAATRSRITDAVEDSKTTLLELHGVGPIVAAYILGHVGNPARFATPERFASYNGTAPLEASSGPRKRHRLNPRGNRKLNHAMHLVAVTQIRNDTAGRVYFQRKLAEGKSKKEALRALKRRISDAVWRQLQVDRKLR

SEQ ID NO: 12265 - protein, 342 aa, unidentified
  source 1..342: note = protein_ed4d8b5
  REGION 7..148: note = RuvC_domain
  SITE 10: note = RuvC_P1
  SITE 53: note = RuvC_P2
  SITE 88: note = RuvC_P3
  SITE 90: note = RuvC_P4
  SITE 93: note = RuvC_P5
  REGION 209..294: note = Tnp_domain
  SITE 217: note = Tnp_P1
  SITE 247: note = Tnp_P2
  SITE 255: note = Tnp_P3
  SITE 256: note = Tnp_P4
  SITE 268: note = Tnp_P5
MSKVDITAVDLGKHSYHAHEQDERGHPLLRKKFNRAGLLQHLASIEPCTVVMEACGGAHFMAQQVAMLGHTPKLIAPHLVRPYVKSNKNDFADAEAICEAASRPTMRFVAVKTQAQQALAMLNSVRDSLIKERTGAVNRIHAGLLEVGVSLAPGFKSIKEVPALLEAASFHGLIKKLLQGLYDHYVYLDRQVKVLDKEVESQVAEDDLASRLMTIPCVGPITSSVLAAELGDGKQFKCGRGYSASIGLVPKQHSTGGKTVLLGISKRGDRSQRRLFVQCARIYLMHLDKQKGSLADWVRKLLAGHRHSNLVVCALANKLARIAWSIAANHTEFDAGPSAMNA

SEQ ID NO: 12266 - protein, 409 aa, unidentified
  source 1..409: note = protein_3210c81
  REGION 4..163: note = RuvC_domain
  SITE 7: note = RuvC_P1
  SITE 60: note = RuvC_P2
  SITE 100: note = RuvC_P3
  SITE 102: note = RuvC_P4
  SITE 105: note = RuvC_P5
  REGION 272..358: note = Tnp_domain
  SITE 280: note = Tnp_P1
  SITE 311: note = Tnp_P2
  SITE 319: note = Tnp_P3
  SITE 320: note = Tnp_P4
MLFVGDDWAEDHHDVEVVDESGRRLVRRRLPEGVAGMAALHGLIADYLPDEAEASDVVVGIETDRGPWVTALVAAGYQVYAVNPMQAARYRDRYSTSGAKSDRGDAHVLAELVRLDRAHHRQVAGGSDLSEAVRVLARSHQNLIWTRQRQTNQLRSMLREFYPAALQAFADLAGRDALAVLAAAPTPAAGRALTVESITELLRRSGRKRYLASTAATIHTALQTEQLSALPAVAQAFGASTRALVAVIDALTTQIATLQAEVDAHFGQHPDAEIYLSQPGLGVILAGRVLAEFGDDTHRYATGKARRNYAGTSPITRASGTKTTVLARYARNRRLGDALFQQAFAALTRSPGARAHYDAMRARGIGHNDALRRLANRLVGILHGCLRHHVTYNETTAWPPPQQDQQAAA

SEQ ID NO: 12267 - protein, 335 aa, unidentified
  source 1..335: note = protein_ef52a3e
  REGION 5..147: note = RuvC_domain
  SITE 8: note = RuvC_P1
  SITE 53: note = RuvC_P2
  SITE 87: note = RuvC_P3
  SITE 89: note = RuvC_P4
  SITE 92: note = RuvC_P5
  REGION 203..288: note = Tnp_domain
  SITE 211: note = Tnp_P1
  SITE 241: note = Tnp_P2
  SITE 249: note = Tnp_P3
  SITE 250: note = Tnp_P4
  SITE 262: note = Tnp_P5
MVEYIGLDVSLKDTAISIREDGKRIWRGKYPSDPQLLAQIIRKHAPHAKRVVFETGPLSTWFYHALTAQGIPAICIEARHAQKVLNETDANDADGLAQLAEAGFYKSVRVEAFDSMLTRALVAARNQLLSISTQLSNQIRGLMKTFGLIVPKGRDGNVRELLDENDGLASIIVPLLEAWRDIRKRAADLDHQLLAAARESQATKLLMTIPGVGAVTAVSYVAAIEDPENFRTSRSVGAWLGLTTRRYQSGEVDYDAHISRRGDNHLRGLLYEAATVLLTRTSAETECSLKSWGLKLRERLGFKRAAVAVARKLAVVMHSMLKTGKVFNALAGAPA

SEQ ID NO: 12268 - protein, 342 aa, unidentified
  source 1..342: note = protein_b15d78e
  REGION 7..147: note = RuvC_domain
  SITE 10: note = RuvC_P1
  SITE 53: note = RuvC_P2
  SITE 88: note = RuvC_P3
  SITE 90: note = RuvC_P4
  SITE 93: note = RuvC_P5
  REGION 212..298: note = Tnp_domain
  SITE 220: note = Tnp_P1
  SITE 250: note = Tnp_P2
  SITE 258: note = Tnp_P3
  SITE 259: note = Tnp_P4
  SITE 271: note = Tnp_P5
MNNATTIGLDISKRVFHLVQLDESNNIMMRKKLRRSQLEPFFSELPICILAMESCGSAHYWARKFIAMGHTVKLLPPQHVKGYLRGQKNDFNDALAIAEATVHAAIRPVGIKTLEQQDEQAQHRMRSLIIRDRVALSNHIRSFLYERGIVLILGISVIEKQVPSLLEDAENDLSDNGRELLARLYQQFERLSEDVQWFTKRIEAQAKQDEISVRLTAIPGIGPIVSSALKGWMGDGQHFKKGRDASAALGLVPRQHSTGGIDKLLGITKKGDSYVRALVVHGARSVVVRSANKSDSLSLWVNRIKERRGYNKAVIALANKMVRIAWVVIARGEDYQPKIVVA

SEQ ID NO: 12269 - protein, 350 aa, unidentified
  source 1..350: note = protein_2287628
  REGION 8..161: note = RuvC_domain
  SITE 11: note = RuvC_P1
  SITE 67: note = RuvC_P2
  SITE 107: note = RuvC_P3
  SITE 109: note = RuvC_P4
  SITE 112: note = RuvC_P5
  REGION 208..295: note = Tnp_domain
  SITE 216: note = Tnp_P1
  SITE 246: note = Tnp_P2
  SITE 254: note = Tnp_P3
  SITE 255: note = Tnp_P4
  SITE 268: note = Tnp_P5
MAYLKQCIGIDISKDSFTACLCKREDSEGFSFSKVASFTNEKTGFNQLLRWVKSESESSVELVYLMEATGVYYESLAHHLYKLKKTVHVALPNTTKHYFASLNIKTKTDAIDAKWLSQFGVERDHKLWIPPSPILIELRNLTRYYVQLQEQRTALGNIKHSKDCSHGVQKFILQSNKNLILQLDKQILKCKQEIERLITTDETLHSTVKKLLTIKGVGLLTIATILAETGCFERFQNIKQVVSFAGYDVVQRESGTSVKGKTRISKKGNRYIRNALYFPAMVACRYNPIMKETYIRINQKKASKMIGQVAIQRKLLALIFTLWKNESIFEPAYKKVVPVKTETTQDSLTS

SEQ ID NO: 12270 - protein, 320 aa, unidentified
  source 1..320: note = protein_a58cdeb
  REGION 10..154: note = RuvC_domain
  SITE 13: note = RuvC_P1
  SITE 55: note = RuvC_P2
  SITE 95: note = RuvC_P3
  SITE 97: note = RuvC_P4
  SITE 100: note = RuvC_P5
  REGION 191..274: note = Tnp_domain
  SITE 198: note = Tnp_P1
  SITE 227: note = Tnp_P2
  SITE 235: note = Tnp_P3
  SITE 236: note = Tnp_P4
  SITE 248: note = Tnp_P5
MTTFDSQVVVGVDVAKDEIVVHRRDLDKTQIIANETPALKKWLRSLPSDSAIAIEATNIYHVETVELAYSMGHRVFVVDPGKLSKYRDSLGKRAKTDASDAALLARYLAHEGAALRLWSPPPEVYTELKNLLHRRAKLVSIQVTLKQSWGNHADLPKEFGAVIDSLKALDQAIQNLMKDILNKAGLMPQIKRCEGIEGVGFLTATAFLTAYMRGDFASSDAYIAYLGLDLCVRDSGKKTGRRRLTKKGDPEIRRLGHNASMAACRSETWKPFYQRHLDSGKARTQALVILTRKLARVAFALMKNQTDYRPNSIFGASPQT

SEQ ID NO: 12271 - protein, 421 aa, unidentified
  source 1..421: note = protein_31960a4
  REGION 22..174: note = RuvC_domain
  SITE 25: note = RuvC_P1
  SITE 73: note = RuvC_P2
  SITE 111: note = RuvC_P3
  SITE 113: note = RuvC_P4
  SITE 116: note = RuvC_P5
  REGION 281..367: note = Tnp_domain
  SITE 289: note = Tnp_P1
  SITE 320: note = Tnp_P2
  SITE 328: note = Tnp_P3
  SITE 329: note = Tnp_P4
  SITE 340: note = Tnp_P5
MKSASTTPNSTLPDEPPNGLTGGLDWSRDDHAVSVVSDRGRELVRHTVQHTADGLRELVAVLIDAGCHEVAIERPDGPVVDALLAAGLTVVVINPNKVKNLRGRYGSAGNKDDRFDAFVLADTLRTDRARLRPLIPDTPPTVALRRAVRARRDLVANRVGTANQLRDHLKRVFPGAVGLFADLDSAISLAFLTRFTTQQQADWLTPIRLGTWLAKQGYSGKVDPAVLHARLLTAPRGPIGTEADAHAAITRGYVAVLTVLLEQIKALSTEIETQLASHADAHIFTSLPRAGKVRAARLLAEIGDCRARFPTRESLASLAGVTPSTRQSGKSHVVAFRWACDKQLRDAVTDFAGDTRRANPWAADLYNRARTRGHDHPHAVRILARARLNIIWHCWQTHQAYDPEQHLALQRILKQDQLEAA

SEQ ID NO: 12272 - protein, 408 aa, unidentified
  source 1..408: note = protein_e456802
  REGION 6..162: note = RuvC_domain
  SITE 9: note = RuvC_P1
  SITE 58: note = RuvC_P2
  SITE 99: note = RuvC_P3
  SITE 101: note = RuvC_P4
  SITE 104: note = RuvC_P5
  REGION 269..356: note = Tnp_domain
  SITE 277: note = Tnp_P1
  SITE 309: note = Tnp_P2
  SITE 317: note = Tnp_P3
  SITE 318: note = Tnp_P4
  SITE 329: note = Tnp_P5
MKRYYVGVDWADREHQLYVGDEEGGKITEKKVQEIPEEMAQLGRWLDESRATGIELWAAIEKPHGRIVDFLLDHGVVVYPVNPKALDRVRDRYRMSQSKSDPFDARVLSEFLRTDHVHLRPLRPNSEQAQELKLLTRDQHRLVRHNTRLLNQLKITLKEYYPRPLEVFGDLGTKIAQDFLRAYPTPAALSQLSRTKWNRFAQQQHHLGKARCDELWEKLNKPQLVVPQHVVRAKAQLVEVLLDQLKPSITAVKTYTERVERFFASTPAAELTHTLPGGKSGTLVPTIWAELGDAQGRWESFQHLQAEAGVVPVTRSSGKSHVVQFRFACNKHLRHAAYLFAFAALNRSEWANRYYRDQRAKGHSHPQALRALGTKWLKIIFVMWRDHKPYDENYHLANITRQRMRQAA

SEQ ID NO: 12273 - protein, 400 aa, unidentified
  source 1..400: note = protein_5e5913e
  REGION 10..164: note = RuvC_domain
  SITE 13: note = RuvC_P1
  SITE 62: note = RuvC_P2
  SITE 102: note = RuvC_P3
  SITE 104: note = RuvC_P4
  SITE 107: note = RuvC_P5
  REGION 270..356: note = Tnp_domain
  SITE 278: note = Tnp_P1
  SITE 308: note = Tnp_P2
  SITE 316: note = Tnp_P3
  SITE 317: note = Tnp_P4
  SITE 329: note = Tnp_P5
MRERRSRVWAGIDAGKVHHWAAVVDATGATLWSKRIENDESAILTAFGEILEIADEVRWAVDISGTSSALLLALLAAHGQQAVYVPGRTVNRMAGAYRGEAKTDARDAYVIAETARQRRDFAAIDVPAQLAAELALLTAHRSDLVADRVRMINRLRDVLTGVFPALERAFDYSAHKGALVLLTGYQTPAAIRRRGRARITAWLANRGVRGADAVAATALGAAQAQQTALPGEDVAGQIVADLAAQILALDDRLKRIDKPIRETFRSHPQAQIIESLPGMGPILGAEFVVAAGDLAAYADAGHLASAAGLVPVPRDSGRRTGNLHRPKRYSRRLRRVFYMSAQTSIIREGPNRDFYLKKRGEGCKHVQAVIALARRRASVLWALLRDNRVFSPVLPETQAA

SEQ ID NO: 12274 - protein, 342 aa, unidentified
  source 1..342: note = protein_45c3842
  REGION 5..152: note = RuvC_domain
  SITE 8: note = RuvC_P1
  SITE 55: note = RuvC_P2
  SITE 92: note = RuvC_P3
  SITE 94: note = RuvC_P4
  SITE 97: note = RuvC_P5
  REGION 212..298: note = Tnp_domain
  SITE 220: note = Tnp_P1
  SITE 250: note = Tnp_P2
  SITE 258: note = Tnp_P3
  SITE 259: note = Tnp_P4
  SITE 271: note = Tnp_P5
MNHYAGIDVSLECSSVCVVDANGKILREAKVASEPAALIAWFHLLGFGLERIGLEAGPLSQWLFAAMREAGLAVELLETRHVRKAFEAMPVKSDRNDARGIAQLMRLGWFRPVHCKSMSAQETRTLLTARKLVQSKLRDVENSLRGILRGFGLKVGKTTELKFAGRIEELVAGHPHLQVVAEALLAVRAVLRSEFAAFQKQTRKMAQSDARTRLLMSTPAVGPIVALTYASAIDDPARFKSSKQAGAHFGLTPKKYQSGETDYTGRISKIGDSSVRTALYEAAHIMLTKPLKGCTQLKSWAMRIARRAGMSKAKVALARRLAVIMHRMLADGTPFNAAAAAA

SEQ ID NO: 12275 - protein, 341 aa, unidentified
  source 1..341: note = protein_f1e4359
  REGION 5..159: note = RuvC_domain
  SITE 8: note = RuvC_P1
  SITE 57: note = RuvC_P2
  SITE 98: note = RuvC_P3
  SITE 100: note = RuvC_P4
  SITE 103: note = RuvC_P5
  REGION 221..306: note = Tnp_domain
  SITE 229: note = Tnp_P1
  SITE 259: note = Tnp_P2
  SITE 267: note = Tnp_P3
  SITE 268: note = Tnp_P4
  SITE 279: note = Tnp_P5
MSVIIGVDPHKGTHTAVAIDRDEQPIARLEVVADRCQTERLLAWAAPLGFERTWAIESANGLGKLLAQQLVGAGEQVVDVPPTLSARVRLLGSTKAGKNDNNDALSTAIAGLRHCELRTVRGEDHTAVIRLLIDRYDGLVALRTQATCRLHAVLRELIAGGAPRRLSANRAAKLLRSIHPAGPAAIERKRLAVDLLADVRRLDQQITTTRSRITDAVGHSNTTLLELHGVGSIVAGYILGHVGNPARFATPERFASYNGTAPIEASSGPRKRHRLNPRGNRKLNHAMHLIAVTQIRNDTPGRVYFQRKLAEGKSKKEALRALKRRISDAVWRQLQADLKRR

SEQ ID NO: 12276 - protein, 269 aa, unidentified
  source 1..269: note = protein_9e8a377
  REGION 1..75: note = RuvC_domain
  SITE 14: note = RuvC_P3
  SITE 16: note = RuvC_P4
  SITE 19: note = RuvC_P5
  REGION 138..229: note = Tnp_domain
  SITE 146: note = Tnp_P1
  SITE 176: note = Tnp_P2
  SITE 184: note = Tnp_P3
  SITE 185: note = Tnp_P4
  SITE 197: note = Tnp_P5
MPPRYVKAYVKIQKNDAADAEAICEAVTRPTMRFVELKTSEQQSILILHRTRQLFVRQRTTLINAIRAHLAEFGIVAPVGRNGVEKLLQTIGDGQDSRIPEVARTCLEALAMQLQPANRQILEADRRVLAWYRSNEASRRLDRIPGIGPLIATALVASVPNPQAFKSGRDLAAWIGLVPKQNSSGGEERLGGISKHGNRYLRTLLTVGALSVIRYAETHGTAHRPWLARLLERRPAKVAAVALANKIARMAWAVMARGEAYREPKVQTA

SEQ ID NO: 12277 - protein, 320 aa, unidentified
  source 1..320: note = protein_26a7f60
  REGION 10..152: note = RuvC_domain
  SITE 13: note = RuvC_P1
  SITE 57: note = RuvC_P2
  SITE 97: note = RuvC_P3
  SITE 99: note = RuvC_P4
  SITE 102: note = RuvC_P5
  REGION 193..278: note = Tnp_domain
  SITE 201: note = Tnp_P1
  SITE 230: note = Tnp_P2
  SITE 238: note = Tnp_P3
  SITE 239: note = Tnp_P4
  SITE 250: note = Tnp_P5
MMAQNDLVVVGIDVAKDRVDACIRALALRQSCPNTAQGHHKLVAWLRKYHVSRAVMEASGGYEREWRKVLHNAGIEVRIVDPKRVRSFALSAGRLAKNDAIDAEMIAWFAETFSEAPNQTHDAAHEELVALVKARIGLVELKTRLQSQDAHAAPGQVRKTHARVLKGLAAEIEKLEAAIAAKVKATADFAERAAIIESVPGFAETTSANLLAGMPELGHVSDEIAAALIGLAPYDDDSGQRRGERHIRGGRRWIRNAIYMPCLGAATQNNPVIKAFYDRLIAKGKPPKVALVACMRKLIIILNTLIARRQKWDPSRYVVG

SEQ ID NO: 12278 - protein, 341 aa, unidentified
  source 1..341: note = protein_e44d8aa
  REGION 6..147: note = RuvC_domain
  SITE 9: note = RuvC_P1
  SITE 52: note = RuvC_P2
  SITE 87: note = RuvC_P3
  SITE 89: note = RuvC_P4
  SITE 92: note = RuvC_P5
  REGION 211..296: note = Tnp_domain
  SITE 219: note = Tnp_P1
  SITE 249: note = Tnp_P2
  SITE 257: note = Tnp_P3
  SITE 258: note = Tnp_P4
  SITE 270: note = Tnp_P5
MEISVLGIDLGKNSCSVVGLDGTGRVVVRRRMRRETVITFAASLAPCVVAMEACCGAHHMGRALAAHGHTVRLMSPEYVRPYVKAQKNDDRDAEAIAEAATRPTMRFVELKSQEQLDMQTLHRIRDQLVGERTSLMNQIRSLLLERGHIVPQGRAKLAVRLGEILEAQEPVLGFRIHRLVTDMRARWVALDERIADLDAEFAQAARTDERTQRLLTIPGIGALNATALVAAVGDARTFARGRDLAAWLGLVPRQATTGGKPRLLGITKRGSRYLRKILIQGARSSLPTMSKSDTRLGAWVRGLLSRAHQNTVVVALAAKMARIVWALLRHGRTYEPTLLAA

SEQ ID NO: 12279 - protein, 399 aa, unidentified
  source 1..399: note = protein_d451d30
  REGION 6..159: note = RuvC_domain
  SITE 9: note = RuvC_P1
  SITE 57: note = RuvC_P2
  SITE 98: note = RuvC_P3
  SITE 100: note = RuvC_P4
  SITE 103: note = RuvC_P5
  REGION 221..306: note = Tnp_domain
  SITE 229: note = Tnp_P1
  SITE 259: note = Tnp_P2
  SITE 267: note = Tnp_P3
  SITE 268: note = Tnp_P4
  SITE 279: note = Tnp_P5
MDHVVIGVDPHKLSATIEVVDEKERRLGQGRFTTDKAGYAAMLKYAKAWPDRVWAVEGANGVGRPLAQRLLASGEQVVDVPAKLAARVRLFDTGHNRKTDAHDAHSIAMVAVRTTGLRVLAMDGELEALRMLVERREALSRRRVQTVDRLQALLAELLPGQAKKDLTTGQAKRMLACVRPRDIAGRTRRRIAVEELAELVAVEAKMKKATAELKTIVLSRGSHLMDLHGVGPVVAARILADVGDVSRFADRNRFASWTGTAPLDASSGERSRHRLSRAGNRRVNHMIHIAAISQIRLDTDGRAYYRRKRAEGKRPLEAIRCLKRRISDAIYRQLVDDAHVAAVEGANAGPGGHCGASLASSAAGLNPHTGASDQPLPGPAPTTLRPAIETRKSHLEATG

SEQ ID NO: 12280 - protein, 342 aa, unidentified
  source 1..342: note = protein_0eee8a8
  REGION 7..148: note = RuvC_domain
  SITE 10: note = RuvC_P1
  SITE 53: note = RuvC_P2
  SITE 88: note = RuvC_P3
  SITE 90: note = RuvC_P4
  SITE 93: note = RuvC_P5
  REGION 212..297: note = Tnp_domain
  SITE 220: note = Tnp_P1
  SITE 250: note = Tnp_P2
  SITE 258: note = Tnp_P3
  SITE 259: note = Tnp_P4
  SITE 271: note = Tnp_P5
MMRIAMLGVDLGKNSCSLVGLDEAGKVVLRRRMRRETVIAFAGKLPTCVVAMEACCGAHHMGRILAGQGHEVRLMSPEYVRPYVKAQKNDDRDAEAIAEAATRPTMRFVTLKSEEQLDMQTLHRVRDRLVAERTSLMNQIRSLLLERGHVVPQGRARLAAALVDLLDGLEPRLSTRMAMLVGDMRDRWRSLDERIATFDREFAQAAEQDGQARRLLTIPGIGALNATALVAAVGDAGTFARGRDLAAWLGLVPRQATTGGKPKLLGITKRGSRYLRKLLIQGARSAMPTLRKTDTRLGAWLRGLLARAHPNTAVVALAAKLARIVWALLRHERTYHMPALSA

SEQ ID NO: 12281 - protein, 342 aa, unidentified
  source 1..342: note = protein_fc9e3bf
  REGION 7..148: note = RuvC_domain
  SITE 10: note = RuvC_P1
  SITE 53: note = RuvC_P2
  SITE 88: note = RuvC_P3
  SITE 90: note = RuvC_P4
  SITE 93: note = RuvC_P5
  REGION 211..295: note = Tnp_domain
  SITE 219: note = Tnp_P1
  SITE 249: note = Tnp_P2
  SITE 257: note = Tnp_P3
  SITE 258: note = Tnp_P4
  SITE 270: note = Tnp_P5
MKLASMIGLDLAKRSFQVHGALVDGGVAFRKKLSREKVLGFLAEQPRCVVAMEACGSAHHWGRAIRDLGHEVRLIPPVYVKPFVKRQKNDAADAEAIAEAAVRPTMHFVAVKSEEQQARAMLFRTRDLLVRQRTQLINALRGHLSEHGVVAAQGTANLKVLEEAVEGQETSLPLLVVELARVFLDQIEGLSKRISELEKVAIHEAACGETTRRLQTMPGVGPITALAIETFAPPMDVFKRGRDFAAWLGLVPRQHSTGGKQVLGKISKMGQRDIRRLLITGAMAVVCSALRKGPPEGSWLQRMLARKPKMLVAIALANKMARSSWAMLTKGQDFRVPAVAAS

SEQ ID NO: 12282 - protein, 316 aa, unidentified
  source 1..316: note = protein_573a51f
  REGION 10..152: note = RuvC_domain
  SITE 13: note = RuvC_P1
  SITE 57: note = RuvC_P2
  SITE 97: note = RuvC_P3
  SITE 99: note = RuvC_P4
  SITE 102: note = RuvC_P5
  REGION 193..277: note = Tnp_domain
  SITE 201: note = Tnp_P1
  SITE 230: note = Tnp_P2
  SITE 238: note = Tnp_P3
  SITE 239: note = Tnp_P4
  SITE 250: note = Tnp_P5
MSIEPVRQHIGVDISKSTLDAHMYPEGRTITVPNDKKGFRQLLTWMAGCHLEQLLYEPTGQYHLAFEKFFLKAEIPLGKVNPRQARRFADALGVSAKTDTIDAGLIAKYGAMISVRRVSDRTIKFNEMKELQSARRALVKDRTRASNRSSARIAPLLRRQARERIEQIDRHMKAIDAALRLLVRDDEFLKARFDILQTIPGIGETTAIMLLTEMPELGFIDHKAAASLAGLAPIARDSGTFRGKRYIQGGRAHLRQALYMPTLVSIKHNPEFSAKYQMMVATGKAPKLAITAIMRKLIVLANSLLRDSRNWVPSRT

SEQ ID NO: 12283 - protein, 339 aa, unidentified
  source 1..339: note = protein_a232e52
  REGION 6..152: note = RuvC_domain
  SITE 9: note = RuvC_P1
  SITE 53: note = RuvC_P2
  SITE 91: note = RuvC_P3
  SITE 93: note = RuvC_P4
  SITE 96: note = RuvC_P5
  REGION 211..298: note = Tnp_domain
  SITE 219: note = Tnp_P1
  SITE 249: note = Tnp_P2
  SITE 257: note = Tnp_P3
  SITE 258: note = Tnp_P4
  SITE 270: note = Tnp_P5
MAILYVGIDLAKNVFAIHGVDEHGKAVLVRPSVLRARLHQLVAALPPCTIGMEACSGAHHWARLFAVHGHTVRLMAPKFVAPYRMSGKRGKNDAADAQAICEAVQRPNMRFVPVKSQDEQARLCIHRVRQGAVEQRTATINRIRGLLSEFGIVLPQRAATVRREAATHLEELPGWANTAVGDSLSELHRLDERIAEYDRHVVHMAREDERSRALMQLQGIGSTTASALVSTIGNARDFKNGRQLAAWLGLVPGQYSSGGKTRLGGITKAGDGYLRTLLVLGAKAVLAAARNKDDRLSRWAMAIEVRRGYWKAVVAIAAKNARMAWAVLAKGESFKPLEA

SEQ ID NO: 12284 - protein, 463 aa, unidentified
  source 1..463: note = protein_47bc693
  REGION 6..159: note = RuvC_domain
  SITE 9: note = RuvC_P1
  SITE 57: note = RuvC_P2
  SITE 98: note = RuvC_P3
  SITE 100: note = RuvC_P4
  SITE 103: note = RuvC_P5
  REGION 221..307: note = Tnp_domain
  SITE 229: note = Tnp_P1
  SITE 259: note = Tnp_P2
  SITE 267: note = Tnp_P3
  SITE 268: note = Tnp_P4
  SITE 279: note = Tnp_P5
MAAVMIGVDPHKGSHTAVVVSASEEPLGELRVRACAAQAGELVAWAAAWPERTWAVEGAGGLGRLLAQQLVAAGQRVLDVQPKLACRVRLLQAGDTNKNDPNDALSVAVAALRSRACRQVTADDYPAVLKVWSKRHRDLGRTRNQVACRLHAVLCDLVPGGHSKEISAAQAAKILEQVTPSGAVARARAELAAEFLADLRRLDAQLRGTRKKLAAAVKDSGTTLAQVFGVGPVVAGTIIGDVGDVARFPGRDHFAAYNGTAPVEVSSGNRKACRLSLRGNRRVNHAIHMAAITQIRHRHSDGRAYYEKKLAEGKTHKEALRSLKRRISDAIFARLQADARRAAEASVTGPGGQPGNDSASSAAGSHPARRLFGQATPGPATTIRPGATAGIPSGPRSSRAESRGRAGHSPVAATQPSAKRQAQVERPERSADERPGGTARRRPHSAARKAPVGTTSKKNPTPT

SEQ ID NO: 12285 - protein, 340 aa, unidentified
  source 1..340: note = protein_efbc462
  REGION 7..149: note = RuvC_domain
  SITE 10: note = RuvC_P1
  SITE 53: note = RuvC_P2
  SITE 88: note = RuvC_P3
  SITE 90: note = RuvC_P4
  SITE 93: note = RuvC_P5
  REGION 212..299: note = Tnp_domain
  SITE 220: note = Tnp_P1
  SITE 250: note = Tnp_P2
  SITE 258: note = Tnp_P3
  SITE 259: note = Tnp_P4
  SITE 271: note = Tnp_P5
MGNVTTIGLDLAKSVFQVHGVDADGEAVLRQRLTRGRMLKFFAKLPRCLVGIEACASSHFWARELVALGHDVKLMPAQYVKPYVKRSKNDAADAEAICEAVTRPTMGFVGIKSPEQQSAMMLHRVRLILSRQRTQLSNALRAHLAEFGIVAPIGRNGIDRLLGVVADATDDRVPTTARICLEMLVAQLSIVKEQILANDRRIMASARETELGRRLMEIPGVGPLLASAVVASVPDPAVFRSGRDLSAWIGLVPRQNSSGGKERLGSISKAGHGYLRQMLIVGAMAVVRYAERNGTKRPWLVQLLARRKAKVAAVALANKTARTIWAMMNSGERYREPQTA

SEQ ID NO: 12286 - protein, 354 aa, unidentified
  source 1..354: note = protein_621ab1c
  REGION 12..153: note = RuvC_domain
  SITE 15: note = RuvC_P1
  SITE 58: note = RuvC_P2
  SITE 93: note = RuvC_P3
  SITE 95: note = RuvC_P4
  SITE 98: note = RuvC_P5
  REGION 217..302: note = Tnp_domain
  SITE 225: note = Tnp_P1
  SITE 255: note = Tnp_P2
  SITE 263: note = Tnp_P3
  SITE 264: note = Tnp_P4
  SITE 276: note = Tnp_P5
MSQKLDASPAVIGIDIGKNSFHIIGQNQRGGIVLRQKWSRGQVETRLANLPPCLIGMEACVGAHHLSRKLQTLGHDARLMPAKYVRPYSKGQKNDFRDAEAIAEAVQRPTMKFVATKTADQLDLQALHRVRERLVGQRTGVINHIRAFLLERGIAVRQGLRSLRSELPGILATRTDVLSPRMLRIIEDLAGDWRRLDERIEDLSSEIEALARQDKGCERLMTVPGIGPIISSAMVAAIGTGDVFSKGRDFGAWLGLVPKQISTGDRTILGKISRRGNRYLRALFVQAAWVVLVKVKGWERYGLKSWIEAAKKRLHHNVLAIALANKLARIAWAVLNKGRAFECVNTEETASRAA

SEQ ID NO: 12287 - protein, 344 aa, unidentified
  source 1..344: note = protein_6c735e9
  REGION 7..149: note = RuvC_domain
  SITE 10: note = RuvC_P1
  SITE 53: note = RuvC_P2
  SITE 88: note = RuvC_P3
  SITE 90: note = RuvC_P4
  SITE 93: note = RuvC_P5
  REGION 212..301: note = Tnp_domain
  SITE 220: note = Tnp_P1
  SITE 250: note = Tnp_P2
  SITE 258: note = Tnp_P3
  SITE 259: note = Tnp_P4
  SITE 271: note = Tnp_P5
MGEVSTIGLDIAKSVFQVHGVDSSGAVVIRKRVSRLKLLEFFAALPPCLVGIEACPSAHHWGRELQGLGHTVRLMPPRYVKAYLKRSKNDANDAAAICEAVTRPSMRFVPIKTKEQQAALMLHRARQLLVRQRTMLSNALRGHLAELGIVSAKGRNGISELLRIIADGADNRIAAATRAILDVMARQYSAIGAEIRSIDKSILTWHRSCEASRRLEEIPGIGPIVATALVAEVGDWKEFRSGRNLAAWIGLVPKQRTTGGKDRLGSITKQGNRYLRWLLVAGAMAVIRYAQKHGTKNRPWLGRLMERRPTMVAAVALANKIARMAWAVMVRGERYKEPTLLMAA

SEQ ID NO: 12288 - protein, 319 aa, unidentified
  source 1..319: note = protein_517bc9c
  REGION 9..155: note = RuvC_domain
  SITE 12: note = RuvC_P1
  SITE 56: note = RuvC_P2
  SITE 96: note = RuvC_P3
  SITE 98: note = RuvC_P4
  SITE 101: note = RuvC_P5
  REGION 193..278: note = Tnp_domain
  SITE 201: note = Tnp_P1
  SITE 230: note = Tnp_P2
  SITE 238: note = Tnp_P3
  SITE 239: note = Tnp_P4
  SITE 250: note = Tnp_P5
MSQSIMAYAGIDTGKHKLDVAVHGAKARLQVTNDEAGHAKLVTWLRRQRVRRVGIEASGGYEKAVVARLRQDGFEVVVFQPAQVRAYARYRLQRAKNDRIDATLIAACTADCEAEDIHAPPDPRLAARAEQLTFIEQLTEDVARLETRRASCRDDAILRHWDLEIRRLKQELKRQLAGLVADLRQHPDLAQRLDLIESVRGIGLRTAVAILIRMPEIGSLSHEKAAALAGLAPYDDDSGDHHGQRHIAGGRRRLRNSLFAAALPAAFQWNPQLQALYRRLVAKGKAHKLALIACARKLLLFANAVVARGSPWVQKSAES

SEQ ID NO: 12289 - protein, 310 aa, unidentified
  source 1..310: note = protein_d9f8e57
  REGION 6..149: note = RuvC_domain
  SITE 9: note = RuvC_P1
  SITE 53: note = RuvC_P2
  SITE 93: note = RuvC_P3
  SITE 95: note = RuvC_P4
  SITE 98: note = RuvC_P5
  REGION 187..271: note = Tnp_domain
  SITE 195: note = Tnp_P1
  SITE 224: note = Tnp_P2
  SITE 232: note = Tnp_P3
  SITE 233: note = Tnp_P4
  SITE 244: note = Tnp_P5
MFSYPAGIDVSKDSLEARVNQVDVGVNCANAEEDFPGLIGWLLLHQVGRVVLEATGGYERKVIKALQAAGLEVICINPRRAKSFSRAMGQQAKTDPIDAKSLAHYAAVLDSPSARVTSPEHDKLRALVQQREHFVQQRDDDRRRLKTASCDAVKPALQNHIDYLSMAVEAIDQLIRQSAYELDSEKVARLCSVKGIGLVTATSLMAYLPELGEIGGRPIAALAGLAPYNNDSGRHKGARHISGGRFSVRRSLYMACWVVIRDQPEFGARYKALRDKGKCAKVALIACMRVLLVRLNAMLRDRTEWKERTD

SEQ ID NO: 12290 - protein, 403 aa, unidentified
  source 1..403: note = protein_74173c9
  REGION 6..158: note = RuvC_domain
  SITE 9: note = RuvC_P1
  SITE 57: note = RuvC_P2
  SITE 95: note = RuvC_P3
  SITE 97: note = RuvC_P4
  SITE 100: note = RuvC_P5
  REGION 266..352: note = Tnp_domain
  SITE 274: note = Tnp_P1
  SITE 305: note = Tnp_P2
  SITE 313: note = Tnp_P3
  SITE 314: note = Tnp_P4
  SITE 325: note = Tnp_P5
MSTVFAGLDWASQNHVVCVIDEHAGVRLQLEVAHDAPGLAELMRRLRAVGAHAIAIERPSGLLVDALMEAGFAVVPIHPNVVKATRPRYRSHGGKSDASDAFLLADLLRTDGHRFKPLQAQSDDIRALRALVRGRDDLVATRVQLANQLRSLLQSFWSGAAEIFAEVDSPIALDFIQRYPTPESARRLGPKRMAAFCAQHGYSGRRSSEELLERLHQAPQVPLGEMEVEAKGELALALARTLARVVEQIRLLSSRIEHHVASHDDGRILMSFPRAGRICAAQILAELGSVRERFDSDEHLAAEAGVAPVTYASGKSKAVTFRWACNHRLRSALTCLADNSRHASGWAAAVYARAKARGCDHPHAIRILARAWLRVIWRAWTDRQPYDPARHGGLQILLKTTGG

SEQ ID NO: 12291 - protein, 404 aa, unidentified
  source 1..404: note = protein_a786609
  REGION 4..161: note = RuvC_domain
  SITE 7: note = RuvC_P1
  SITE 60: note = RuvC_P2
  SITE 100: note = RuvC_P3
  SITE 102: note = RuvC_P4
  SITE 105: note = RuvC_P5
  REGION 266..353: note = Tnp_domain
  SITE 274: note = Tnp_P1
  SITE 304: note = Tnp_P2
  SITE 312: note = Tnp_P3
  SITE 313: note = Tnp_P4
  SITE 326: note = Tnp_P5
MFYCGIDIAKYKHEATVIDEAGTALPDSISFANSKEGCEKLLALFERLGVSNDGLLIGMEATGHYWLSVYGYLLEQGFEIKVINPIQSEAFRKMYIRQTKNDRKDSFIIAQIMRFGQFSTTSLSEETIVALRQLSRYRLALVDTCGDCKRRVIALLDQVFPEYDALFSDTFGVTSKEVLSQYPTPEDLLTVSTRKLSNLLEKTSHGRLGKEKAEQLKAAAANSFGVSFARDAFAFQIRQLVEQMEFLERQVTELEAQISSLLKQTGSYITTIPGIGDTLGAIILSEIGDIHRFNAPNKLVAFAGLDVRVTQSGEFTGTRQKISKRGSPYLRRAIWLAASRAAFCDPILSEYYQSLRARGKHHLTAIGAVSRKLCNIIFAILSEDRPYEAIPPKEIRHHSADFTM

SEQ ID NO: 12292 - protein, 353 aa, unidentified
  source 1..353: note = protein_b2b764d
  REGION 6..148: note = RuvC_domain
  SITE 9: note = RuvC_P1
  SITE 52: note = RuvC_P2
  SITE 87: note = RuvC_P3
  SITE 89: note = RuvC_P4
  SITE 92: note = RuvC_P5
  REGION 211..297: note = Tnp_domain
  SITE 219: note = Tnp_P1
  SITE 249: note = Tnp_P2
  SITE 257: note = Tnp_P3
  SITE 258: note = Tnp_P4
  SITE 270: note = Tnp_P5
MKITTIGLDLAKNAFQVHGVDERGKAVLKKQLKRAQVLPFFADLKPCLVGMEACGGAHYWARKLAELGHTVKLVAPQFVKPYVKSNKHDAADAEAICEAVARPNMRFVPVKTVEQQAILALHRARQGFVKARTAQANQIRGLVAEFGIILPQGIHSIAQRIPDILEDGENGLPDMLRQLLERLSVNLKELSRQADECEARIQAWYRENEASRRLADIPGIGPITASALVASVGDAKCFANGRQLAAWLGLVPRQSSTGGKQKLLGISKRGDTYLRTLLVHGARSVIRVAERKADKHENWLHRVMGRRHKNIAAVALANKNARTVWALLAHERLFQLNYRAAMTSEESTRVPIE

SEQ ID NO: 12293 - protein, 379 aa, unidentified
  source 1..379: note = protein_32dd57d
  REGION 49..142: note = RuvC_domain
  SITE 80: note = RuvC_P3
  SITE 82: note = RuvC_P4
  SITE 85: note = RuvC_P5
  REGION 248..334: note = Tnp_domain
  SITE 256: note = Tnp_P1
  SITE 286: note = Tnp_P2
  SITE 294: note = Tnp_P3
  SITE 295: note = Tnp_P4
  SITE 307: note = Tnp_P5
MRVPAAADKAWAGIDVGKRHHWVCVVDRDGRQLLSARVANDEAGIAAVIGSVLSQSGQHVRYASGRLVAAMSGAYTGEGKTDPKDAFVIAETARIRRNLPVTGHKGELVCNLSLLTAHRADLIADRVRMINRLRDVLTSVFPALEREFDYSSCKGALVLLTGYACPARIRRIGQARLASWLRQRRVRGYASVAARAITAAQAQRITLPGQDIAADIIAELARNLLALDERVTELDTQIAALFAEHPQAEIIQSMPGFGPVLGATLLVTAGDLAAFPSPGHLAAAAGLVPVPNDSGRRSGNLHKPRRYSRPLRRVFYLSAQTSMMREGPSRDYYLKKRQHARPHNQAVIALARRRIDVLWALLRDNRTYAATPPAPAKAA

SEQ ID NO: 12294 - protein, 414 aa, unidentified
  source 1..414: note = protein_f9e5b02
  REGION 18..170: note = RuvC_domain
  SITE 21: note = RuvC_P1
  SITE 69: note = RuvC_P2
  SITE 107: note = RuvC_P3
  SITE 109: note = RuvC_P4
  SITE 112: note = RuvC_P5
  REGION 274..360: note = Tnp_domain
  SITE 282: note = Tnp_P1
  SITE 313: note = Tnp_P2
  SITE 321: note = Tnp_P3
  SITE 322: note = Tnp_P4
  SITE 333: note = Tnp_P5
MKSARNTLPTEPANGLTCGIDWACDDHAVSIVDAKGREITRKTIGHNAVGLRDLLTTLQRAGVSEVAIERPDGPVVHALLDAGITVVVISPNQLKNLRGRYGSAGNKDDRFDAFVLADTLRTDRTRLRPLQPDSPATVALRQTCRARKNLVAHRVAIANQLRAHLMIVFPGAVGLFADIDSPISLAFLARFDCQDRADWLSVTRMANWLASVGYSGRTHASELHRRLTAAPRGAAGIDGATITATFVEVLSTVSAQIKTLDQSIAEQLDAHADTHIFTSLPRSGTFRAARLLAEIGDCRARFPTPESLACLAGVAPSTRQSGKVKHVGFRWAADKQLRDAVCDFAGDSRRANPWAADLYNRARARGHDHPHAVRILARAWLYIIWHCWHDEVAYDPTQHRALQKLINQDQPRAA

SEQ ID NO: 12295 - protein, 344 aa, unidentified
  source 1..344: note = protein_9f7020e
  REGION 6..147: note = RuvC_domain
  SITE 9: note = RuvC_P1
  SITE 52: note = RuvC_P2
  SITE 87: note = RuvC_P3
  SITE 89: note = RuvC_P4
  SITE 92: note = RuvC_P5
  REGION 211..298: note = Tnp_domain
  SITE 219: note = Tnp_P1
  SITE 249: note = Tnp_P2
  SITE 257: note = Tnp_P3
  SITE 258: note = Tnp_P4
  SITE 270: note = Tnp_P5
MELHTIGIDLGKTVFHLVGMNPRGEVVVRKKFSRTQLLRFTVNLKVDFIGMEACGGAHFLGRALREQGHEVRLMPAQYVKPYVKTNKSDYIDAEAIAEAVARPTMRFVPIKSDDQLDLQSLHRVRERWVMRRTAVVNQIRALLLERGITLRQGRRHLDHALPGILEDADAKLSSALRLLLAQLKLELDQLAERVDQADMAIAQSVRQSEACQRLMAIPGVGPVTATAMIAAIGNGAAFRKGRDFAAWLGVVPTEHSTGGKQKLLSIGKRGNTYLRRLFIQGARAVLRQRMKQTSGLSAWLTQLTVRAHPNIVAVALANKLARMAWAVLAKGETYRPPVLLVGLA

SEQ ID NO: 12296 - protein, 391 aa, unidentified
  source 1..391: note = protein_37c2aa5
  REGION 4..163: note = RuvC_domain
  SITE 7: note = RuvC_P1
  SITE 60: note = RuvC_P2
  SITE 101: note = RuvC_P3
  SITE 103: note = RuvC_P4
  SITE 106: note = RuvC_P5
  REGION 266..353: note = Tnp_domain
  SITE 274: note = Tnp_P1
  SITE 304: note = Tnp_P2
  SITE 312: note = Tnp_P3
  SITE 313: note = Tnp_P4
  SITE 326: note = Tnp_P5
MILVGIDVAKDKHDCYIMNSNGEVLFSAFTIKNDLDGFDNLYGKILSLSPESDNIKVGLEATGHYSYNLLGYLLDKGLPTFVINPLHTNLYRKSLSLRKTKTDVIDARTIARMLLSDISLKPYSIVAYHNDELKSLTRYRFDKVKQRAKLKSSISRLVNILFPELEKQVSSLHLKAVYALLETYPSAKAIASAHLTTLSHLLYKASKGRFDKVKTLRIRNAARRSIGSSMPAKSMELKHTIHLILELSAEIDEIETAIQSIMDNLASPILTIPGISYHLGAMIVAEIGDITCFSSPDKLLAYAGMSPTTYQSGQLTSSRAKMEKRGSKYLRYALFNATQYVCHWDPAFSAYLSKKRKEGKHYYVAISHAAKKLVRVIFHLMKCGEVYSPIY

SEQ ID NO: 12297 - protein, 345 aa, unidentified
  source 1..345: note = protein_7dea59b
  REGION 5..152: note = RuvC_domain
  SITE 8: note = RuvC_P1
  SITE 55: note = RuvC_P2
  SITE 92: note = RuvC_P3
  SITE 94: note = RuvC_P4
  SITE 97: note = RuvC_P5
  REGION 212..300: note = Tnp_domain
  SITE 220: note = Tnp_P1
  SITE 250: note = Tnp_P2
  SITE 258: note = Tnp_P3
  SITE 259: note = Tnp_P4
  SITE 271: note = Tnp_P5
MKHYAGLDVSVKETSLCIVDETGRICREAKLVSHPDDLLAALNDPIWRFDRIGLEAGPLSQWLFSGLAEAGLPVICIETRHAKAFLKAQVNKSDRNDARGIAQMMRVGLFRPVHVKTLISQKRRVLLAGRKLLQEKAIAIENDIRGLLRNFGLKVGIVGVIGFEQRIHELVGGQPELAELMEPLLVARRVLREQFTQLHRKVLLLARESEVCRRLMTIPGVGPVTSLAFISTIDVPARFKSSKAVGPSLGLTPVLNQSGESHRIGRISLCGDEAMRALLYEAAQVMLTRVQKWSWLKAWAMQIAKRRGQQKAIVALARRLAVIMHRMWSDGTEFRWTREATPAAQ

SEQ ID NO: 12298 - protein, 344 aa, unidentified
  source 1..344: note = protein_efafc15
  REGION 6..146: note = RuvC_domain
  SITE 9: note = RuvC_P1
  SITE 52: note = RuvC_P2
  SITE 87: note = RuvC_P3
  SITE 89: note = RuvC_P4
  SITE 92: note = RuvC_P5
  REGION 211..298: note = Tnp_domain
  SITE 219: note = Tnp_P1
  SITE 249: note = Tnp_P2
  SITE 257: note = Tnp_P3
  SITE 258: note = Tnp_P4
  SITE 270: note = Tnp_P5
MHIASIGIDLGKTTFHLVALGERNKVLVRKKFSRAQLLAYTANLPSSLIGLEACAGAHFMGAALREQGHEVRLIPAQFVKPYRKSNKNDFIDAESIAEAVTKENMRFVQIKTQEQLDVQAMHRVRDRLVQRRTALINEIGGFLLERGITFAAQPIYLRKNLPTVIEDAEQNLSPRLRWLLQRMWQEWKQVEIDIKAMTDEIERISNENALCRRLRQIPGFGPLVSTATVAAIGNGAAFRRGRDFAAWVGVVPRQYSTGGKQKLFGISKRGNVYLRRMLIHGARAVLLRVKYDTEGFGQWVHRLAQRAPRNKVVVAIANKLARIAWAVLSSGKDYQHQPLQITAA

SEQ ID NO: 12299 - protein, 409 aa, unidentified
  source 1..409: note = protein_469f6df
  REGION 11..166: note = RuvC_domain
  SITE 14: note = RuvC_P1
  SITE 63: note = RuvC_P2
  SITE 103: note = RuvC_P3
  SITE 105: note = RuvC_P4
  SITE 108: note = RuvC_P5
  REGION 274..360: note = Tnp_domain
  SITE 282: note = Tnp_P1
  SITE 313: note = Tnp_P2
  SITE 321: note = Tnp_P3
  SITE 322: note = Tnp_P4
MSEETAEIIYVGLDWAAATHAVCVLSAVGKILAQFMIDHTADGIATLIRKLSKFGDPADVHIGIERPNGRLVDLLLEAGHPVIPVSPNAIKTWRDGEVISGAKSDAGDALVIAEYLRLRHHRLRPAAPYSSSTKALRTVVRTRDDVVAMRVAATNQLSALLDDHWPGAKAIFADVESPISLAFLRRYPTAASAARLGEKRLAAFLVKHSYSGRRPVKELLTRLRSAPAGTTDPVLTIAVRDVVLALVSVIEALNSAGKALDRSVIARLGEHPDAEVFTSLPRSGQINAAQVLAEWGDSRAAYDGPDAVAALAGVTPVTKSSGKQHAVHFRWACNKRFRRALTTFADNSRHQSTWAADIYNRARARGHDHPHAVRILARAWIRVIYRCWHDQSPYDPARHGAVQKLHTAA

SEQ ID NO: 12300 - protein, 266 aa, unidentified
  source 1..266: note = protein_4a48278
  REGION 2..75: note = RuvC_domain
  SITE 14: note = RuvC_P3
  SITE 16: note = RuvC_P4
  SITE 19: note = RuvC_P5
  REGION 138..224: note = Tnp_domain
  SITE 146: note = Tnp_P1
  SITE 176: note = Tnp_P2
  SITE 184: note = Tnp_P3
  SITE 185: note = Tnp_P4
  SITE 197: note = Tnp_P5
MPANYVKPYVKRGKTDAADAEAICEAVRRPTMRFVEIKTEDQQALLSIHRTRDLAVRQRTQMANVIRSLLREFGHILPIGVEAVTAFAKRHLDGDHPDMPDIANGMLGMQCYQFIGLNERIAGYSKMIEQHALLNADARRLMRMPGVGPITASAIIATIGDAQQFKTGRDFAAWLGLTPLNKSSGGKERLGKITKKGDRYIRKLLVVGMTSRAVMAKRSPEKVDLWTAKIIADKPFRLATTAMANKSARIIWAMLTKKQEYRQPAF

SEQ ID NO: 12301 - protein, 325 aa, unidentified
  source 1..325: note = protein_187539f
  REGION 8..151: note = RuvC_domain
  SITE 11: note = RuvC_P1
  SITE 55: note = RuvC_P2
  SITE 95: note = RuvC_P3
  SITE 97: note = RuvC_P4
  SITE 100: note = RuvC_P5
  REGION 194..281: note = Tnp_domain
  SITE 202: note = Tnp_P1
  SITE 232: note = Tnp_P2
  SITE 240: note = Tnp_P3
  SITE 241: note = Tnp_P4
  SITE 254: note = Tnp_P5
MQSTKNYVGIDISKLHFDAAIELSGKYVHYKLSNDATGFNTLMELLPDDCMLVMEASGPYYLKLACFFHDRQISVSVINPLVIRRFCQMRLSRTKTDKKDAKMIAEYGKAEHPSEWHPEAIHTQELRQMQATTDLLDKHRTSLLRHLEAASQMPVVNKQVLKTLNKTIKSIEHQIAELELTMDILIKQYHGELYEQIQSIPGLGKKTSLLLIVISGGFTKFADARQLSSYIGLCPRIFESGTSVRGKARITKMGMSRIRGMLYLCAWSARRYNHKCKDLYDRLVAKGKSKKLALIAVANKLLKQAFAIAKQKTCYQQDYAKNICF

SEQ ID NO: 12302 - protein, 407 aa, unidentified
  source 1..407: note = protein_638dcdf
  REGION 5..164: note = RuvC_domain
  SITE 8: note = RuvC_P1
  SITE 61: note = RuvC_P2
  SITE 101: note = RuvC_P3
  SITE 103: note = RuvC_P4
  SITE 106: note = RuvC_P5
  REGION 272..358: note = Tnp_domain
  SITE 280: note = Tnp_P1
  SITE 311: note = Tnp_P2
  SITE 319: note = Tnp_P3
  SITE 320: note = Tnp_P4
MRLFVGDDWAEEHHDVELMDNAGRRLAKARLPEGVAGMARLHTMIGAQFGEDAEDAEVLVGIETDRGPWVAALVAAGYTVMAVNPLQAARFRDRLGVSGAKSDAGDAHVLADMVRTHAHELRPVAGDSDQAEAVKVVARTHKTLIWERTRHTQRLRHALRDYFPAALEAFDDLDAADTLELLAKAPTPEQAARLTVAQINGALKRARRRNIAEKAAAIQATLRSDQLGQPEVVAAAYASSIQALIAVLTVLNTQVKTLQGQVEAHFGQHPAAEIIASQPGLGPVLGARVLAEFGDDPDRYATAKARKNYAGTSPITRASGRKKVALARFVHNDRLIDALMAQAQSALLHSPGARAYYDRQKARGTGHNAALRQLANRLVGILHGCLKTSTPYDETTAWSHHAENIAA

SEQ ID NO: 12303 - protein, 346 aa, unidentified
  source 1..346: note = protein_c7bfe05
  REGION 7..148: note = RuvC_domain
  SITE 10: note = RuvC_P1
  SITE 53: note = RuvC_P2
  SITE 88: note = RuvC_P3
  SITE 90: note = RuvC_P4
  SITE 93: note = RuvC_P5
  REGION 212..301: note = Tnp_domain
  SITE 220: note = Tnp_P1
  SITE 250: note = Tnp_P2
  SITE 258: note = Tnp_P3
  SITE 259: note = Tnp_P4
  SITE 271: note = Tnp_P5
MKQVSTIGLDLAKNVFQIHGADAEGAPIFNRKLRRAELLGFFEKLPPCLVGLEACGGSHYWAREIAALGHDVRLIPPIYVKPFVKRGKTDAADAEAISEAVTRKTMRFVPIKSADQQAAAMVLRTRALLIRQQTQAINALRGHLSELGVIAALGTAKVAALIEIVRDEEDVCLPKAARLALAEIADQIEALTRQIAKLERGIVSEAKREEDMRRLTTIPGVGAITAASVKALVPDPGGFKSGRHFAAWLGLTPKPHSSGGKERLGGISKMGNPTLCSLLVCGATSVLRRVKGNDKALRWLVTLLARRPFKVVAVALANKMARIIWALLTKGGTYRNTGAASGAARA

SEQ ID NO: 12304 - protein, 341 aa, unidentified
  source 1..341: note = protein_f680c06
  REGION 6..147: note = RuvC_domain
  SITE 9: note = RuvC_P1
  SITE 52: note = RuvC_P2
  SITE 87: note = RuvC_P3
  SITE 89: note = RuvC_P4
  SITE 92: note = RuvC_P5
  REGION 211..297: note = Tnp_domain
  SITE 219: note = Tnp_P1
  SITE 249: note = Tnp_P2
  SITE 257: note = Tnp_P3
  SITE 258: note = Tnp_P4
  SITE 270: note = Tnp_P5
MQIATIGLDIAKNVFQVHGIDAAENVMVRKQLRRSQVMAFFKALAPCLVGMEACATSHYWARELTKLGHQVRLMPAKDVKAYVKRNKNDAADAEAICEAVRRPIMRFVQVKSAEQQAQLMQHRARDLLIRQRTQLINALRAHLAELGVAAAQGRAGVKELLTLITGEEDQGLPVDARASLMVLAAQLQAVQTMIGSLEKRIVKQHRANKESKRLQTIPGVGVIGASTITAVVPDPTVFRSGRDFAAWIGLVPREDSTGGKRKLGPISKQGDRYLRRILVVGAHSVLRLAKQNPEKYPWITRLLARRPFKVVAIALANKIARVAWALLARGGTYRAPQIATA

SEQ ID NO: 12305 - protein, 339 aa, unidentified
  source 1..339: note = protein_8f0d857
  REGION 6..147: note = RuvC_domain
  SITE 9: note = RuvC_P1
  SITE 52: note = RuvC_P2
  SITE 87: note = RuvC_P3
  SITE 89: note = RuvC_P4
  SITE 92: note = RuvC_P5
  REGION 210..295: note = Tnp_domain
  SITE 218: note = Tnp_P1
  SITE 248: note = Tnp_P2
  SITE 256: note = Tnp_P3
  SITE 257: note = Tnp_P4
  SITE 269: note = Tnp_P5
MNATPVGLDIAKSVFQVHYIDPETGEIVSRQIKRAQLLEYFANRAPCRIGMEACGSAHHWARQLMQMGHEVKLMPARFVKAFNVGNKNDAMDAQAIWLAVQQPRKAVAIKSEMQQAVLMMHRQREQLVRFRTMQINGLRGMLAEFGEVMGKGRAAMVKVIPDALARVETRLPKVLIDTLREQWARVEKLDEEIATIERRLQAWKKDDKAVQAVIEIPGVGLLTATAVVAMMGDPKAFKSGREFAAWTGLVPKQTGTGGKVNLHGISKRGDTYLRTLLIHGARSVLAHAKEPGPWVEGMKKRRPSNVVVVALANKMARTIWAVLAHDRPYKKDHVSVRPV

SEQ ID NO: 12306 - protein, 408 aa, unidentified
  source 1..408: note = protein_00743d6
  REGION 4..163: note = RuvC_domain
  SITE 7: note = RuvC_P1
  SITE 60: note = RuvC_P2
  SITE 100: note = RuvC_P3
  SITE 102: note = RuvC_P4
  SITE 105: note = RuvC_P5
  REGION 273..359: note = Tnp_domain
  SITE 281: note = Tnp_P1
  SITE 312: note = Tnp_P2
  SITE 320: note = Tnp_P3
  SITE 321: note = Tnp_P4
MLFVGDDWAEDHHDVEVQDEQGRTLKAARVPEGIEGMARLHELIARFLPEDSDPGQVLVCIETDRGPWVRALVAAGYQVYGVNPKQAARHRELLSLSGAKDDKADARTLADMLRTRRHQLRQVAADSEEAEAVKVAARAHQTMIWERTRHMLRLRTALREYFPAALEAFKPLGLSGADTLELLTKAADPGAAARLTIGQITAALKRARRRDVPAKAAAIQAALRAEQLGQADIVAGAYAVSVRTTVAVLRTLNEQIKILEGEVDVCFGRHPDAEIYLSQPGMGVITGARVLAEFGDAENRYADAKSRKNYAGTAPITRQSGKTKTVHARFVHNDRLVDALHMQAHAAMLHDAAARAYYDELRAREIGHNAALRQLGNRLVGILHGCLKTQSPYSQTAGWAHRYQHLAA

SEQ ID NO: 12307 - protein, 416 aa, unidentified
  source 1..416: note = protein_a4dac63
  REGION 4..161: note = RuvC_domain
  SITE 7: note = RuvC_P1
  SITE 57: note = RuvC_P2
  SITE 98: note = RuvC_P3
  SITE 100: note = RuvC_P4
  SITE 103: note = RuvC_P5
  REGION 275..362: note = Tnp_domain
  SITE 283: note = Tnp_P1
  SITE 313: note = Tnp_P2
  SITE 321: note = Tnp_P3
  SITE 322: note = Tnp_P4
  SITE 335: note = Tnp_P5
MFAVGVDVANGRSMVAVLDGMRNIVAKPFEVVHTTQGFATLVEKLRQLDGEVRIVMEHTGRYYESFAMRMHRAGFFVSAVNPLLIKNYQGSISVRKVKTDKADAQKIAQFALDKWTILPHYTPMDTIRYNLKTLHRQFQLASKTKTALSNNLIALLEQSYPGANRYFDSPVRADGRQKWVDFVDTFWHVDCVARSSEHAFVERYRKWCKRHGYIFSEQKAIQLHADARQKIPLVPKSDTCKLLVREAVSQLNAVSRTVETYRAEMDRLASQLPEYETVMGMTGVGKSMGPQLMAEIGDLRCFAHQKSLVGFAGTDPIKEESGDKVSQSAPSSKRGSPYLRKTLFVIMTILLQLQPQEDPVYQFLDKKRSEGKPYYVYMTAGGTKFLRVYYGKVRDCLKAKGLWEVPASASQEVNPG

SEQ ID NO: 12308 - protein, 396 aa, unidentified
  source 1..396: note = protein_cd66c34
  REGION 6..160: note = RuvC_domain
  SITE 9: note = RuvC_P1
  SITE 58: note = RuvC_P2
  SITE 98: note = RuvC_P3
  SITE 100: note = RuvC_P4
  SITE 103: note = RuvC_P5
  REGION 265..352: note = Tnp_domain
  SITE 273: note = Tnp_P1
  SITE 304: note = Tnp_P2
  SITE 312: note = Tnp_P3
  SITE 313: note = Tnp_P4
  SITE 325: note = Tnp_P5
MPRIWAGVDIGKEHHHCVVINDNGERLLSRRVRNDETELLALIADVAAVDTDALWAIDLNSGGAALLIGLLANHDQELVYITGLKVHRAAGTCRGEGKTDAKDAFVIADQARVRRDLGPLRAGDEIAVDLRTLTNRRTDLVCDRTRAINRIRHQLLEYFPALERSLDLSRKGHLLLLTEHQTPDGIRRLGEQRLTRWLRHRKVRKAESVAHAAVEAAAAQHTTLPGQKLAAAMVERLAKGVIALNTEIAEIDAMIEERFRQHRLAEVILTLPGFGPTLAAEFLAATGGETTAFGSADRLAGYAGLAPVPRDSGRIRGNLRRPRRYHRGLLRACYLAASASLPNCPISKAYYQRKRAEGKRHEQALLCLARRRLNVLWAMLRDNARYHDSPPIPVAA

SEQ ID NO: 12309 - protein, 405 aa, unidentified
  source 1..405: note = protein_6717876
  REGION 4..160: note = RuvC_domain
  SITE 7: note = RuvC_P1
  SITE 57: note = RuvC_P2
  SITE 97: note = RuvC_P3
  SITE 99: note = RuvC_P4
  SITE 102: note = RuvC_P5
  REGION 274..361: note = Tnp_domain
  SITE 282: note = Tnp_P1
  SITE 312: note = Tnp_P2
  SITE 320: note = Tnp_P3
  SITE 321: note = Tnp_P4
  SITE 334: note = Tnp_P5
MNAVGIDVSKGKSTVTIRRPGDEILMPPRDIPHTQSAISELIRQIKNLDGETKVCMEHTGRYYEAVASWLSDSGIFVSAVNPILIKDFGDDSLRAPKTDKADSKKIARYALDRWANLRQYGSMDKTRNQLKTMNRQFGFYMDQKTAMKNNLIALLDQTYPGANAFFDSPARSDGSQKWVDFIDTYWHVDCVRAKSLEAFTAHYQNWCKRKGYNFSSDKAAKIYQASRDLIAVFPKDDNTKLLIRQAAAMLNTASATVESLRQKMDAAAATLPEYPIVMAMNGVGPTLGPQLMAEIGDVTRFTHRGALTAFAGVDPGRNDSGQRVQKSVRITKKGSPSLRKTLFQIMDGLIKRSPAEDAVYAFMDKKRAEGKPYYVYMTAGANKFLRIYYGRVNEYLAALPENKES

SEQ ID NO: 12310 - protein, 339 aa, unidentified
  source 1..339: note = protein_7f15561
  REGION 7..149: note = RuvC_domain
  SITE 10: note = RuvC_P1
  SITE 53: note = RuvC_P2
  SITE 88: note = RuvC_P3
  SITE 90: note = RuvC_P4
  SITE 93: note = RuvC_P5
  REGION 211..298: note = Tnp_domain
  SITE 219: note = Tnp_P1
  SITE 249: note = Tnp_P2
  SITE 257: note = Tnp_P3
  SITE 258: note = Tnp_P4
  SITE 270: note = Tnp_P5
MGEVVTIGLDLAKNVFQVHGIAADGKVLACRQLRRGEVLKFFQSVPPCLVGLEACGTAHYWAREIAALGHRVKLMPPAYVKPYVKRGKTDAADAEAICEAVTRPTMRFVAIKTVDQQAALMLHKTRDLLVRQRTMLINGLRGHLAEFGIIAVKGPGGVRAATEALHEARDQLPELARLALHGIVDQLRQLEAEIEGLEKRILAWHRASEVSRRLATIPGIGPITASAIAAAVPDGTLFRSGRQFAAWLGLTPKAHSSGGKERQVGISKQGDGYLRRLLVVGATAVMRLARKDNASRSWATKLLERKPAKLAAVALANKTARIAWAVMTRGVTYAAPSAA

SEQ ID NO: 12311 - protein, 402 aa, unidentified
  source 1..402: note = protein_0a29990
  REGION 4..160: note = RuvC_domain
  SITE 7: note = RuvC_P1
  SITE 57: note = RuvC_P2
  SITE 97: note = RuvC_P3
  SITE 99: note = RuvC_P4
  SITE 102: note = RuvC_P5
  REGION 274..361: note = Tnp_domain
  SITE 282: note = Tnp_P1
  SITE 312: note = Tnp_P2
  SITE 320: note = Tnp_P3
  SITE 321: note = Tnp_P4
  SITE 334: note = Tnp_P5
MNAVGIDISKGKSVVVVMRPFGEVVLSPFEVSHTDKDLNDLAKKLKSLPGETRVVMEYTGYYHSPVAAVLHEADIYVSAVNALLVHDYGNNSLRRAKTDKKDAIKLANYALDHWLSLPRYLPAGDTRLMLKTCYRQYEQFSKMRTMQKNNLISLLDITFPDANKLFSSPPRADGSEKWIDFVAQYWHCECVSEMSVRSFTKSYEKWCRKHGYNFSEDKALEIYTSACGDICIMPKCENTKLMIKQAVAQLQASSSALVALKTQMLDLASTLPEYPVVMQMYGVGPSLGPQLMAEIGDVRRFHSKSALVAFAGIDAPPYQPGQIDVRSRSISKRGSAKLRRTLFLVMSVLLQKSPLDEPIYQYMDKKRAEGKPYKVYMMASANKFLRRYYAIVKAHLDELDGV

SEQ ID NO: 12312 - protein, 264 aa, unidentified
  source 1..264: note = protein_2128407
  REGION 1..84: note = RuvC_domain
  SITE 21: note = RuvC_P3
  SITE 23: note = RuvC_P4
  SITE 26: note = RuvC_P5
  REGION 198..263: note = Tnp_domain
  SITE 206: note = Tnp_P1
  SITE 236: note = Tnp_P2
  SITE 244: note = Tnp_P3
  SITE 245: note = Tnp_P4
MSAVNPKLIKDFGENSLRKVKSDKADALKIARYALDSWNDLKQYSLMDEIRNQLKTMNRQFGFYMKHKTAMKNNFIAILDQTYPGVNTYFNSPARDDGSQKWVDFAAAYWHVDCVRKMSLHAFTDHYQKWCKRNKYNFSQLKAEEIYGAAKELVPVLPKDALTKLIVKQAVDQLNIASKTVEQLRILMNATASKLPEYSIVMAMKGVGASLGPQLMAEIGDVRRFTHKGAITAFAGVDPGVKQSGTYDQKSVRTSKLRLHDCRC

SEQ ID NO: 12313 - protein, 316 aa, unidentified
  source 1..316: note = protein_45367dd
  REGION 5..124: note = RuvC_domain
  SITE 27: note = RuvC_P2
  SITE 63: note = RuvC_P3
  SITE 65: note = RuvC_P4
  SITE 68: note = RuvC_P5
  REGION 187..273: note = Tnp_domain
  SITE 195: note = Tnp_P1
  SITE 225: note = Tnp_P2
  SITE 233: note = Tnp_P3
  SITE 234: note = Tnp_P4
  SITE 246: note = Tnp_P5
MTIRRQLRRAEIVTFFAKLPPCVVGMEACASAHYWARTLTKLGHEVRLIAPARVKPYVKRGRKNDAADAAAIAGAVTRPHMEFVPVKSEEAQAVLMLHRTRRLLVTQRTMLSNAVRSHFAEYGIVEPEGQGGLTRLVVCALDAPDTALPQAAREAMAMLAAHMRETDAKIDALDHEILNWHRSNADSRRVATIPGIGPLIASAIVAAIGDPKRFKTGRDFAAWLGLVPSQNSTGGKTVLGPITKAGDRYLRSLLVVGATSTLWRRRQEQGTWLAAMMARGKTPRQISVALANKMARIAWAILAKGGTYTEPAAMAA

SEQ ID NO: 12314 - protein, 342 aa, unidentified
  source 1..342: note = protein_49645bc
  REGION 6..147: note = RuvC_domain
  SITE 9: note = RuvC_P1
  SITE 52: note = RuvC_P2
  SITE 87: note = RuvC_P3
  SITE 89: note = RuvC_P4
  SITE 92: note = RuvC_P5
  REGION 210..297: note = Tnp_domain
  SITE 218: note = Tnp_P1
  SITE 248: note = Tnp_P2
  SITE 256: note = Tnp_P3
  SITE 257: note = Tnp_P4
  SITE 269: note = Tnp_P5
MKHTIVGVDIAKNVMQVHWVDADSGEIVNKPIKRAVFLEYFVNRPPCLVGMESCGGSQHWARRLIEMGHQVKLMPAKFVKAFVTGNKNDAADARAIWMATQMPSKEVAVKTEAQQAVLALHRMRQQLVKFRTMQINSLRGLLTEYGEVMGTGRAALDRAIAGVLERLSGRLPAILIDTLREQWNGLEALDQQIAQIERRLQAWMKQDDASKAIAAIPGVGLLSATAAVATMGHAKSFRSGREFAAWLGLVPGQTGSGGKVELLGISKRGDRYLRTLLIHGARSVIFHAKDAGAWLEQLKKRRPLNVVVVALANKMARTIWAMLAHQRPYQKDYGSVPPAPAR

SEQ ID NO: 12315 - protein, 353 aa, unidentified
  source 1..353: note = protein_3fcb386
  REGION 14..155: note = RuvC_domain
  SITE 17: note = RuvC_P1
  SITE 60: note = RuvC_P2
  SITE 95: note = RuvC_P3
  SITE 97: note = RuvC_P4
  SITE 100: note = RuvC_P5
  REGION 219..303: note = Tnp_domain
  SITE 227: note = Tnp_P1
  SITE 257: note = Tnp_P2
  SITE 265: note = Tnp_P3
  SITE 266: note = Tnp_P4
  SITE 278: note = Tnp_P5
MQIKSQIKSQIKSIGIDLGKTTFHLVALSTHSRVVVHKKFSRQQLLTYTANLPACLIGMEAGVGSHFLGRALRAQGHQVRLIPAQFVRPFVKSNKNDYRDAEAIAEAVERENMRFVPIKTEDQLDVQALHRVRERLVSRRTSVINQIRSFLLERGISFRKGPASLRRQMPEILENAEEKLSTRMRRLLDFLWQEWKHLQLQIESLNEDVEQIASQDEVCARLQQIPGVGPLVATAVVSAIGNGAAFHKGREFAAWLGLVPRQWSTGGKAKLLGISKRGNPYLRKMFIHGARAAVLRVKRQGSCLGQWMSGLETRAARNVVIVATANKLARISWAVLSSGEDYHPMHRAVSSAS

SEQ ID NO: 12316 - protein, 341 aa, unidentified
  source 1..341: note = protein_5c04ee3
  REGION 6..148: note = RuvC_domain
  SITE 9: note = RuvC_P1
  SITE 52: note = RuvC_P2
  SITE 87: note = RuvC_P3
  SITE 89: note = RuvC_P4
  SITE 92: note = RuvC_P5
  REGION 211..297: note = Tnp_domain
  SITE 219: note = Tnp_P1
  SITE 249: note = Tnp_P2
  SITE 257: note = Tnp_P3
  SITE 258: note = Tnp_P4
  SITE 270: note = Tnp_P5
MQITTIGLDIAKNVFQVHGIDVAEKVVVRKQLRRSKVIAFFEAVPPCLVGMEACASAHYWARELRKLGHEVRLMPAKDVKAYIKRNKNDAIDAEASCEAVRRPTMRFVAVKSAEQQGQLMQHRTRDLLMRQRTQVINALRAHLAELGIVAAQGREGLKDLLAIIADEKDERLPVDARASLIVLAAQLQAVQTLIGSIEKRIIAQHRATEASKRLQSIPGIGIIGASAIVSTVTDPTAFRSGRDLAAWIGLVPRQDSTGGKQKLGPISKQGDRYLRRILVVGAHSVLRRAKHNPEKYPWLTQLLARRPFKVVAIALANKMARIAWALLARGGTYRVPALAAA

SEQ ID NO: 12317 - protein, 349 aa, unidentified
  source 1..349: note = protein_1d223da
  REGION 7..148: note = RuvC_domain
  SITE 10: note = RuvC_P1
  SITE 53: note = RuvC_P2
  SITE 88: note = RuvC_P3
  SITE 90: note = RuvC_P4
  SITE 93: note = RuvC_P5
  REGION 212..298: note = Tnp_domain
  SITE 220: note = Tnp_P1
  SITE 250: note = Tnp_P2
  SITE 258: note = Tnp_P3
  SITE 259: note = Tnp_P4
  SITE 271: note = Tnp_P5
MGEVITIGLDIAKSVFQVHGVDADGTVVIRKRIGRAKVLEFFGDLPPCVVGMEACATAHQWARELKMLGHDTRLMPPSYVKAYVKRGKNDAADAAAICEAVTRPSMRFVPIKSVGQQSALMLHRTRDLLIRQRTQLINALRAHLAELGLVAAKGREGLQQLITTVTKSSDERLPTDARFACQTIVAELHALQIQIGGLDKRITQTHRTNADSKRLDAIPGFGVILSTAVVATMTDPKAFKTGREFAAWIGLVPRQNSTGGKERLGSISKQGDRYLRRLLVVGAISIVRTARMWPDKYPWVIELLGRRPAKVVAVALANKMARIAWAVLAKGENYRAPTRSSNTTIAVAA

SEQ ID NO: 12318 - protein, 358 aa, unidentified
  source 1..358: note = protein_defa24d
  REGION 6..163: note = RuvC_domain
  SITE 9: note = RuvC_P1
  SITE 68: note = RuvC_P2
  SITE 106: note = RuvC_P3
  SITE 108: note = RuvC_P4
  SITE 111: note = RuvC_P5
  REGION 212..299: note = Tnp_domain
  SITE 220: note = Tnp_P1
  SITE 250: note = Tnp_P2
  SITE 258: note = Tnp_P3
  SITE 259: note = Tnp_P4
  SITE 272: note = Tnp_P5
MKKIVIGIDISKEKIDATAIDVRDSHLGVVKLDYQVYENRPMGYRRMLVWARLLIKGVGLKDVLFCCETTGGYDRCLCDYIYAKGLDIWREGALQIKRSMGVRKGKDDKADSLMIAEYAMRHIDKAVIYETPDEKVRELKALFLYRHKLVQERTEKKVRASELKATAAKSDSMRFIVRDAMRNVRALDKSIRDCEKQIQALIDSDENLKLNYDHVVSTPGISIVNATAFIAYSNNFRSINTANKIASYWGCASFRERSGTSVDKKAYVRCYSSSLLKATLTQAAECTIKEHGIYHDYYLRLKAEGKPYGVIVNNVRNKLIHLVFSLVTNDMDYEKDHEFMRKKRKSEQGMSAQLEIIN

SEQ ID NO: 12319 - protein, 388 aa, unidentified
  source 1..388: note = protein_e89c3cb
  REGION 4..160: note = RuvC_domain
  SITE 7: note = RuvC_P1
  SITE 58: note = RuvC_P2
  SITE 99: note = RuvC_P3
  SITE 101: note = RuvC_P4
  SITE 104: note = RuvC_P5
  REGION 262..348: note = Tnp_domain
  SITE 270: note = Tnp_P1
  SITE 300: note = Tnp_P2
  SITE 308: note = Tnp_P3
  SITE 309: note = Tnp_P4
  SITE 321: note = Tnp_P5
MYLIGIDISKYKHDCFIATEAGIQIKAFSFDNNRLGFDLFLEVLKSLDQSKEIRIGLESTGHYGSNLKQFITASGYTYLEFNPYLTHMFSKALSLRKTKTDKVDAKTISSMLGSVDYKTLHTKFYHINELKQLVRYRHVQMVNRSKTLIELTNILDRIFPEFKPFFNERLSSSAMFILKKFKSRARISKLSNNDYESIRSHSKGRLSYVRVQKLKSLAKSSVGYETQSDLLLLKHSIKHYETLTEIIESVEHEIIHLMENINQTLTTIPGLNIISAAIIIAELGDFKNFTNPAQIVSFAGLDTSVNQSGTIETRGHIVKRGSGLLRMTFWQITFAGLRLNPKLYDYYLKKRAEGKHHKVAMVHSVRKLIRTIYYLGVNQLTFDHSHFK

SEQ ID NO: 12320 - protein, 339 aa, unidentified
  source 1..339: note = protein_522ad91
  REGION 6..148: note = RuvC_domain
  SITE 9: note = RuvC_P1
  SITE 52: note = RuvC_P2
  SITE 87: note = RuvC_P3
  SITE 89: note = RuvC_P4
  SITE 92: note = RuvC_P5
  REGION 211..297: note = Tnp_domain
  SITE 219: note = Tnp_P1
  SITE 249: note = Tnp_P2
  SITE 257: note = Tnp_P3
  SITE 258: note = Tnp_P4
  SITE 270: note = Tnp_P5
MTVKTIGLDLAKDVFQVHGISENGRVIFNKAIKRAKLLAFFEALPPCRVGMEACGSSHHWGRMLRQLGHDVRLMPANYVKPYVKRGKTDAADAEAICEAVRRPTMRFVEIKTEDQQAVLSIYRTRDLAVRQRTQMANVIRSLLREFGHILPIGIEAVTAFAKRHLDGDQHDMPDIANGMLGMQCYQFIGLNERIDGYSKMIERHAHLSADARRLMRMPGIGPITASAIIATIGDAKQFRTGRDFAAWLGLTPLNKSSGGKERLGKITNKGDRYIRKLLVVGMTFRAVMAKRSPEKVDLWTAKIIANKPFRLATTAMANKAARIIWAILTKRREYRQPAF

SEQ ID NO: 12321 - protein, 337 aa, unidentified
  source 1..337: note = protein_fb75dc0
  REGION 7..152: note = RuvC_domain
  SITE 10: note = RuvC_P1
  SITE 53: note = RuvC_P2
  SITE 88: note = RuvC_P3
  SITE 90: note = RuvC_P4
  SITE 93: note = RuvC_P5
  REGION 211..297: note = Tnp_domain
  SITE 219: note = Tnp_P1
  SITE 249: note = Tnp_P2
  SITE 257: note = Tnp_P3
  SITE 258: note = Tnp_P4
  SITE 270: note = Tnp_P5
MSTIHILGIDLGKHCFHAIGNNYSGKEVIRRKFNRSQLLRFLSVLEHTTIAFEACGGAHWLARKCQALGHRVHLIPPQYVKPYVKGNKNDFIDAATIAEAASRPTMRFVSVKSEEAQVISAIHRVREGYVKERTACMSRIGAVLLEFGLSFPRGHAKMKALFQWLAEQDVELPQSLIAELLSIHEHYKYLNDRVSEQDQKLKSIAISNESAELLKTIPGVGDLTATLCVANISSASNFDGGREMAAWLGLVPRQFSTGGKSKLLGMSKRGNKHLRTLFIHGARAVLSRIESTGKVFGDWLVNLRATKPFNVVLVALANKLARIAWAVLYHRQAFRAA

SEQ ID NO: 12322 - protein, 333 aa, unidentified
  source 1..333: note = protein_adbbbd6
  REGION 7..159: note = RuvC_domain
  SITE 10: note = RuvC_P1
  SITE 65: note = RuvC_P2
  SITE 103: note = RuvC_P3
  SITE 105: note = RuvC_P4
  SITE 108: note = RuvC_P5
  REGION 204..291: note = Tnp_domain
  SITE 212: note = Tnp_P1
  SITE 242: note = Tnp_P2
  SITE 250: note = Tnp_P3
  SITE 251: note = Tnp_P4
  SITE 264: note = Tnp_P5
MKKKWFIGIDISKKTLDVVIYDPAKKHADETNYKQVSNNKTGYQALFAWMKQKRISPKQTVICLENTGIYSYDLCLFLESCKQDYSSFTPLDLKRSLGLVRGKNDRVDAERIAYYGYLHRDELTYSKLSGSAVLILRDLSSERKRLVKHLTENKGFITDRKDRESTSTSRRAEEMVKILEKQIQSVEDEMHGIVSSDPTMNLNYQLLNSIKGIGSVNAINTIIHTNNFKAFETARQYACYLGIAPFEHSSGTSVKGKTRVCATGARLLKADLSQAARSAVVWDKELKEYYERKRKEGKEHGVVLNAVKFKLVCRMFAVVRRGTPFVDLITYKE

SEQ ID NO: 12323 - protein, 341 aa, unidentified
  source 1..341: note = protein_4c473ef
  REGION 6..148: note = RuvC_domain
  SITE 9: note = RuvC_P1
  SITE 52: note = RuvC_P2
  SITE 88: note = RuvC_P3
  SITE 90: note = RuvC_P4
  SITE 93: note = RuvC_P5
  REGION 211..296: note = Tnp_domain
  SITE 219: note = Tnp_P1
  SITE 249: note = Tnp_P2
  SITE 257: note = Tnp_P3
  SITE 258: note = Tnp_P4
  SITE 270: note = Tnp_P5
MEVCIVGLDLAKSVFQVHGTDAEGRVVIRRQLRRGEVGKFFSELPPCIVGMEACATSHHWARVVAGFGHEVRLLPPAQVKPYVKRGKKNDAADAAAIAEAVTRPHMRLVPIKTIDQQSMLMLHRSRELLVRQRTMLINALRAHLAEFGLIAGPERNKITALVALIDDDEVGLSTAARMALGALAEQIHGTDQRIEALEKQILADHRACEASRNLATIPGIGPITASAIAASVPDPSVFQSGRHFAAWLGLVPRQNSSGGKDRLGRITKMGDAYIRRPLVIGATGQVRHVGKRKPTDWLAGLLLRKPVRVASVALANKMARMAWAILSRGEVYRETWPLQTA

SEQ ID NO: 12324 - protein, 337 aa, unidentified
  source 1..337: note = protein_f3b661e
  REGION 6..145: note = RuvC_domain
  SITE 9: note = RuvC_P1
  SITE 50: note = RuvC_P2
  SITE 85: note = RuvC_P3
  SITE 87: note = RuvC_P4
  SITE 90: note = RuvC_P5
  REGION 209..295: note = Tnp_domain
  SITE 217: note = Tnp_P1
  SITE 247: note = Tnp_P2
  SITE 255: note = Tnp_P3
  SITE 256: note = Tnp_P4
  SITE 268: note = Tnp_P5
MNNSVIGLDIAKNIFHLYTVAEGKAVKKKLKRSELLTFFANYPVSLIGIEACGSAHHWARELIKLGHEVVLLNARYVKSFVIGNKNDFNDAAGIFDAVTRPNKRQVMIKTLEQQDIQLIHKVRQGLVGKRTALVNQIRGLLSERGIIIPKSINKAREQLPLILEDAENDLTHLSREVFAEQYKKLVDLDKDIKEQDQRIGHLCKNNETAKRFLDVPGVGPMTASIVASDVAQGKGYQRSRDYAASLGIVPRQHSSGDKQVYLGISKRGNRYIRTLLIHGARAVLKNCKHKEDKLSLWLQALIERRGFNKAAVALANKNARILWAMASQDKVYDAQQV

SEQ ID NO: 12325 - protein, 389 aa, unidentified
  source 1..389: note = protein_58ac9f6
  REGION 4..161: note = RuvC_domain
  SITE 7: note = RuvC_P1
  SITE 59: note = RuvC_P2
  SITE 100: note = RuvC_P3
  SITE 102: note = RuvC_P4
  SITE 105: note = RuvC_P5
  REGION 263..349: note = Tnp_domain
  SITE 271: note = Tnp_P1
  SITE 301: note = Tnp_P2
  SITE 309: note = Tnp_P3
  SITE 310: note = Tnp_P4
  SITE 322: note = Tnp_P5
MYFVGIDISKYKHDCFIATEAGEIIRQNLTIQNNQEGFTLLLQVLDSLDHSQEIRIGFEATGHYGLNLKLFLEKAHYSFMEINPVLLSKFLKSQSLRKTKTDAIDSRSIAYWLMSVEYKPHPKEFYHMYSLKSLTRLRDSLVKQRSLYLVKMTNVLDHIFPEFKPFFKDRFSLTALYILDKYHSPKAIARMRSSSYDELRRMSRGKFTLNQFFQLKDLAASSVGESNEILESQLISLLKLYFSLDEEIQKLESQITQLVAVLDSPIMSIVGVGPLSAAVILSEFGDISRFGSPAQMLSFAGLEPGYYQSGTSEHSGRMVKRGSSHLRFTLMNVCIPLVRFNIVFAEYYRKKRSEGKPHRVAMSHVAKKLVRIIYTLETRNILFDPAQLR

SEQ ID NO: 12326 - protein, 342 aa, unidentified
  source 1..342: note = protein_7f380a3
  REGION 4..151: note = RuvC_domain
  SITE 7: note = RuvC_P1
  SITE 54: note = RuvC_P2
  SITE 91: note = RuvC_P3
  SITE 93: note = RuvC_P4
  SITE 96: note = RuvC_P5
  REGION 212..298: note = Tnp_domain
  SITE 220: note = Tnp_P1
  SITE 250: note = Tnp_P2
  SITE 258: note = Tnp_P3
  SITE 259: note = Tnp_P4
  SITE 271: note = Tnp_P5
MFYAALDVSLRSVAICIIDEAGKVRLERSVPSDVPDIVRCFNEFGQPIHQVGLEAGTLTQHLTYGLAEAGFDVVCMEARQVNAALSAMRNKTDKNDARGIAQLLRSGWYSRVHVKSVESHYTRALLTSRKVMQRKCLDLENEIRGLLKVFGVKLPIRLRGGAFEEAVRGTIENDPALSHALLPMLEARQMLLETFLELDRRVRRAANQDAITTRFMSVPGVGYVTALSFKAAVDDPTRFKSSRTVGAHFGLTPRRFQSGEKDNPGRISHAGDADVRATLDAAANAMLMRSIAWSSLKAWGVRLMKTKGRRRAIVAVARKIAVLLHRMWIDGTEFRFGSEAAA

SEQ ID NO: 12327 - protein, 387 aa, unidentified
  source 1..387: note = protein_4a9442f
  REGION 1..142: note = RuvC_domain
  SITE 41: note = RuvC_P2
  SITE 79: note = RuvC_P3
  SITE 81: note = RuvC_P4
  SITE 84: note = RuvC_P5
  REGION 247..333: note = Tnp_domain
  SITE 255: note = Tnp_P1
  SITE 286: note = Tnp_P2
  SITE 294: note = Tnp_P3
  SITE 295: note = Tnp_P4
  SITE 306: note = Tnp_P5
MSIVDARGREVRRATIEHNAAGLRELLELLSRAGAREVAIERPDGPVVDTLLEAGITVVVISPNQLKNLRGRYGSAGNKDDRFDAFVLADTLRTDRSRLRPLLPDTPATATLRRTCRPRKDLVAHRVALANQLRAHLRVVFPGVVGLFADLDSPISLAFLTLLPVSTARTARTGCRSSAWPAGWPPLATAAVLHDRLTGAPRGATGDEGAANAHITRAMVAALTSVATQIKTLDAQIAEQLSLHADAHIFTSLPRSGTVRAARLLAEIGDCRARFPTPESLACLAGVAPSTRQSGKVKHVGFRWAADKQLRDAVCDFAGDSRRANLWAADRYNRAIARGHDHPHAVRILARAWLYAIWHCWQDGAAYHPANHRALQALLNQDQDRAA

SEQ ID NO: 12328 - protein, 311 aa, unidentified
  source 1..311: note = protein_e398c2c
  REGION 7..151: note = RuvC_domain
  SITE 10: note = RuvC_P1
  SITE 54: note = RuvC_P2
  SITE 94: note = RuvC_P3
  SITE 96: note = RuvC_P4
  SITE 99: note = RuvC_P5
  REGION 190..274: note = Tnp_domain
  SITE 198: note = Tnp_P1
  SITE 227: note = Tnp_P2
  SITE 235: note = Tnp_P3
  SITE 236: note = Tnp_P4
  SITE 247: note = Tnp_P5
MTQGSTVGVDIARDTFDVFISPENRFLHLENTPDGHQQLIDNLTSLNVTLVVMEATSRYHNLLAATLELAGIPVAVVNPRQVKNFARALGTLFKTDPNDARVICEFGRRMEPEVRPAPDEQTQRLAMMVSRRRQLVDNRTMEQNRHGTCDDVFIRAGIKRHIDWLNGEIKDADDDIDRQIKVMPLWREKVKLLEEVKGIGKTTLAVLLSMLPELGKLSRRKISALVGVCPYARDSGKMKGKRCIWGGRSAVRAAMYMAAMSAVRYNPTIRAFFERLRANGKPYKVAMTACVRKLVTILNAMVRDNTKWATD

SEQ ID NO: 12329 - protein, 317 aa, unidentified
  source 1..317: note = protein_ba1a9e5
  REGION 10..155: note = RuvC_domain
  SITE 13: note = RuvC_P1
  SITE 56: note = RuvC_P2
  SITE 96: note = RuvC_P3
  SITE 98: note = RuvC_P4
  SITE 101: note = RuvC_P5
  REGION 192..276: note = Tnp_domain
  SITE 200: note = Tnp_P1
  SITE 229: note = Tnp_P2
  SITE 237: note = Tnp_P3
  SITE 238: note = Tnp_P4
  SITE 249: note = Tnp_P5
MKDSSSISVVGIDVSKDSLDLFHTINGQQQKIAYQQDSLKLLARQIIKLNATVVMEATGGYEKKLVKYLQSQGIACAVVNPKLIRDFARACGKLEKNDAIDARIIASFGQMMQPRTMGKIDRNREKLKLLATRREQVQSMITQESNRQQQIEDRQIRAFIQRAIQLYQKQLKKLDNEMLKVIEADQTMKQKSEILLSAKGVGPATTANLIAGLPELGQLNRQQIAKLVGLAPLVRDSGKFKGQRRTYAGRSQIRRILYMATLVATRWNSRIKAFYLSLLERGKPKKLAITACMRKFITILNSMMKNNQTWDQNLLAS

SEQ ID NO: 12330 - protein, 348 aa, unidentified
  source 1..348: note = protein_31eda95
  REGION 13..164: note = RuvC_domain
  SITE 16: note = RuvC_P1
  SITE 65: note = RuvC_P2
  SITE 106: note = RuvC_P3
  SITE 108: note = RuvC_P4
  SITE 111: note = RuvC_P5
  REGION 207..294: note = Tnp_domain
  SITE 215: note = Tnp_P1
  SITE 245: note = Tnp_P2
  SITE 253: note = Tnp_P3
  SITE 254: note = Tnp_P4
  SITE 267: note = Tnp_P5
MSKNPATEVQVFVGVDVSARELSVAVRSATTDREGVQTFGNNAAGHQALLDHLLRGKRRARICLEASGNYSLDLALTLHAHPRVEVSVVNPRRARRFAESLGERSKTDPVDAHVLCQYAVRMPWEPWVPPSALALRLRGLTRAIEAVGVTQTQEKNRQHSLQASQALSTFVIRELQRHLEYLQLRITRLRREALRLIARDPELDRRFRLMLTTPGIGETSALQILGELVVLPATLDARQWVAFAGLDPVRFTSGTTVDKKPRISRGGSRHLRRALYMPALVAVRHEPHLRAFFQRLLAHGKAPLQAVVAVMRKLLHAFFAMFRSDRSYDGSKLCLLEADPRPVAMCAA

SEQ ID NO: 12331 - protein, 348 aa, unidentified
  source 1..348: note = protein_ccf4ede
  REGION 6..149: note = RuvC_domain
  SITE 9: note = RuvC_P1
  SITE 54: note = RuvC_P2
  SITE 89: note = RuvC_P3
  SITE 91: note = RuvC_P4
  SITE 94: note = RuvC_P5
  REGION 213..299: note = Tnp_domain
  SITE 221: note = Tnp_P1
  SITE 251: note = Tnp_P2
  SITE 259: note = Tnp_P3
  SITE 260: note = Tnp_P4
  SITE 272: note = Tnp_P5
MNITRVGVDLAKEVFHLHGVDAHDHVVWQKRVRRKSWLAELQRHVPEGTEIGMEACAGAHHWGRELIARGYQVKLMAPQFVKPYVKSNKNDRNDAAAICEAMSRPSMRFVPLKSTEQQDIQAVHRVRSELVKQRTAKANQIRGLVGEYGLVAPQSILALRKVLPRWLEDAENGLSLRFRRLLAGLAEDFRYLDERIKRHDDELALMVKEMPAAQKLMALRGVGPATATALVAALGTGEGFARGRDFAVTLGLTPKHHGTGGKDRILGISKRGDAYLRTLLIHGARSAVSRAEGRSDPLSCWINALLERRHKNVVIVALANKNARMAWAVLRHDREYDAGWPSLAAYGH

SEQ ID NO: 12332 - protein, 342 aa, unidentified
  source 1..342: note = protein_cca3309
  REGION 7..149: note = RuvC_domain
  SITE 10: note = RuvC_P1
  SITE 53: note = RuvC_P2
  SITE 88: note = RuvC_P3
  SITE 90: note = RuvC_P4
  SITE 93: note = RuvC_P5
  REGION 212..300: note = Tnp_domain
  SITE 220: note = Tnp_P1
  SITE 250: note = Tnp_P2
  SITE 258: note = Tnp_P3
  SITE 259: note = Tnp_P4
  SITE 271: note = Tnp_P5
MVQPVTVGLDIAKNFFHAYGVDAQGEKALSRKLRRAQVEAFFAKLEPCLVGIEACATAHHWARTIEKLGHQVRLMPPAYVKPYVKTQKNDEADAEAICEAVTRPNMRFAEVKSVEQQSVLVLHRTRAMLIKHRTRMSNTIRAHLAEFGITETIGREGLSRLIDMIVSGEDDRITGVTRRAMICLVDQYRLLQEQILDLDRQVMAWHRSNEASKRLATIPGIGPLAASALVASVADASNFKNGRSFAAFIGLVPKQSSSGGKERLGKISKRGDHYLRWLLVVGGLAVIRYAQRQGTRRPWLLKLLQRRTPKIAAVAMANKMARVAWVLMARGGTYREPVPQTA

SEQ ID NO: 12333 - protein, 343 aa, unidentified
  source 1..343: note = protein_f5cce67
  REGION 6..147: note = RuvC_domain
  SITE 9: note = RuvC_P1
  SITE 52: note = RuvC_P2
  SITE 87: note = RuvC_P3
  SITE 89: note = RuvC_P4
  SITE 92: note = RuvC_P5
  REGION 211..299: note = Tnp_domain
  SITE 219: note = Tnp_P1
  SITE 249: note = Tnp_P2
  SITE 257: note = Tnp_P3
  SITE 258: note = Tnp_P4
  SITE 270: note = Tnp_P5
MEIVRIGLDLAKNVFEVCGVDAEDGVVLRKTLRRDAVPQFFSELPPCIVGMEACSGAHYWARVLSDLGHEVRLVSPQFVAPYVKSNKSDRNDAEAICEAVGRPSMRFVPPKSSEQLEMQAVHRIRQRLVSDRTRMVNQIRGLLAEHGVVIGRDISRLRRALAQIADGASDGLGVVIRGLACDVREELQDLDQRIATYNRRIRDLFQASEMCRRIGEIEGIGPITAMALVAAIGERTCFRNGRQFAAWLGLVPRQRSSGGKSRLFGISKRGDRYLRTLMIHGARAVLGKAGCKTDARSQWIGRMRERRHPNLVAVALANKNARIVWSVLSSGEGYRPSPPAPAA

SEQ ID NO: 12334 - protein, 393 aa, unidentified
  source 1..393: note = protein_4d2af3e
  REGION 4..163: note = RuvC_domain
  SITE 7: note = RuvC_P1
  SITE 60: note = RuvC_P2
  SITE 101: note = RuvC_P3
  SITE 103: note = RuvC_P4
  SITE 106: note = RuvC_P5
  REGION 266..355: note = Tnp_domain
  SITE 274: note = Tnp_P1
  SITE 304: note = Tnp_P2
  SITE 312: note = Tnp_P3
  SITE 313: note = Tnp_P4
  SITE 328: note = Tnp_P5
MICVGIDVAKDKHDCFILSSEGEVLADVFTVTNNRDGFETLYQRIRSCARPTDNIKVGLEATGHYSYNILGFLLDNGLATYVINPLHTNLYRKSLSLRKTKTDRIDARTIAAMLMSDVDLKSYTDTAYHNEELKSLTRYRFDKVRQRAKLKQSVSRLVNILFPELETLVPTLHMASVYALLSELPGAQQIAAVHLTHLKTLLANASKGRYDRDKAVEIREAAKCSIGSKMPAKSLELRHTIQLIHELDKEIDEIESSIEEIMNALQSPITTIPGIGYRMGAMILAEIGDFSNFDSPDKILAYAGLSPSTYESGKLKASGAYAHMEKRGSRYLRFAIFNATKYVCHWDPTFAAYLAKKRAEGKHYNVAISHAAKKLMRVIYSLQKSGQAYRTAA

SEQ ID NO: 12335 - protein, 417 aa, unidentified
  source 1..417: note = protein_bb1ff81
  REGION 18..170: note = RuvC_domain
  SITE 21: note = RuvC_P1
  SITE 69: note = RuvC_P2
  SITE 107: note = RuvC_P3
  SITE 109: note = RuvC_P4
  SITE 112: note = RuvC_P5
  REGION 277..363: note = Tnp_domain
  SITE 285: note = Tnp_P1
  SITE 316: note = Tnp_P2
  SITE 324: note = Tnp_P3
  SITE 325: note = Tnp_P4
MKSARNTLPEEPAGGVTGGIDWASEDHAVSVVDARGRETGRHTVQHNAAGLRELIDVLARAGVRETAIERPDGPVVDALLEAGIIVVVISPNQVKNLRGRYGSAGSKDDRFDAYVLADTLRTDRARLRPLIPDSPATVALRRACRARKDLVSHRVGLANQLRAHLRNTLPGAVGLFQEIDSPVSLAFLARFGTQDRADWLTPARLGKWLSGIGYSGRTDPTVLHARLTAAPRGATGPDGQASACITRALLAVLTSLTSQIKLLSSQIGDQLTAHTDQHIFTSLPRSGTVRAARLLAEIGDCRARFPTPEALACLAGAAPSTRQSGKMRAVTFRWSCDKQLRDAVTDFAGDSRRASPWAADLYNKARARGHDHPHAVRILARAWLFVIWHCWQDHTAYNPARHNALQRLLDQDQLVAA

SEQ ID NO: 12336 - protein, 345 aa, unidentified
  source 1..345: note = protein_716bacf
  REGION 6..147: note = RuvC_domain
  SITE 9: note = RuvC_P1
  SITE 52: note = RuvC_P2
  SITE 87: note = RuvC_P3
  SITE 89: note = RuvC_P4
  SITE 92: note = RuvC_P5
  REGION 211..296: note = Tnp_domain
  SITE 219: note = Tnp_P1
  SITE 249: note = Tnp_P2
  SITE 257: note = Tnp_P3
  SITE 258: note = Tnp_P4
  SITE 270: note = Tnp_P5
MKITTVGIDLAKNVFQVHAVDERGKVALRKQLRRDQVAAFFANLPPCLIGMEACGSAHHWARTLQGFGHTVRLMSPQFVKPYVKSNKNDVADAEAICEAVARPNMRFVPVKSIEQQAVLSLHRARQGFVIARTAQANQIRGLLGELGLVIPRGICHIAKQVPALLDDESNQLPATFRQMIARLIEHLNELDKLVKGFEDQIKAWHRSSELSQRLEKIPGIGPLGASALVASIADANSFENGRQLSAWLGLVPRQHSSGGKPTLLGISKRGDVYLRTLLIHGARSAIVAAQMKAVNTNVWLAGLLNRRHPNVAAVALANKNARTVWALLAHGREFKPGYVPQRLAA

SEQ ID NO: 12337 - protein, 344 aa, unidentified
  source 1..344: note = protein_dca3204
  REGION 7..149: note = RuvC_domain
  SITE 10: note = RuvC_P1
  SITE 53: note = RuvC_P2
  SITE 88: note = RuvC_P3
  SITE 90: note = RuvC_P4
  SITE 93: note = RuvC_P5
  REGION 213..298: note = Tnp_domain
  SITE 221: note = Tnp_P1
  SITE 251: note = Tnp_P2
  SITE 259: note = Tnp_P3
  SITE 260: note = Tnp_P4
  SITE 272: note = Tnp_P5
MLEVSTVGLDIAKSVFHAHGADERGATVFSRKLTRGKLLEFFAGQPRCVVALEACGGAHHWARELQAMGHEVRLIPPAYVKPFVKRHKNDAIDAEAICEAAQRPGMRFVAVKCEEQQAAGLVFRTRDLVVRQRTQLINAIRGHLTEYGWVAPRGTAHMTLLADMLDDEEMASTLPAAALPMFRLMVDLLAELDKRVATLDREIARRAKEDEAARRLMTIPGIGPIAATAILALAPPVETFRKSRDFAAWLGLAPRQHSTGGKQRLGSISKMGERTIRRLLIIGGSSVVRQACRHGAPAGSWLERMLARKPRMLVSVALANKMARMVWALLTREEDYRAPAVAAA

SEQ ID NO: 12338 - protein, 307 aa, unidentified
  source 1..307: note = protein_7aec33b
  REGION 11..146: note = RuvC_domain
  SITE 51: note = RuvC_P2
  SITE 91: note = RuvC_P3
  SITE 93: note = RuvC_P4
  SITE 96: note = RuvC_P5
  REGION 187..276: note = Tnp_domain
  SITE 195: note = Tnp_P1
  SITE 224: note = Tnp_P2
  SITE 232: note = Tnp_P3
  SITE 233: note = Tnp_P4
  SITE 244: note = Tnp_P5
MPRTVIGCDLSRAVIDLQTLPDAISSQVANDPEAIAAWISSLPPDVLVVFEATSGCDGPLIAALAERGVTFSRTNPRQAREFARATGVLAKTDRVDARVLAQMGSVLDHPITRPSSPARSRLSDFLRRRRQLVDIRKAEKTRRHNAGQDEIAAQIEAMIGLLTRQIAELDRAIAGLIEEEPTFSSQARLLRAVPGIGPTVLATLLGELPELGTLDRRRIASLAGLAPHARESGTWRGARRIWGGRRKVREALYIAALTASRRIPSLVAMRDRMREKGKAPKTILIAVARQLLVIINAMLRNGTPLVA

SEQ ID NO: 12339 - protein, 341 aa, unidentified
  source 1..341: note = protein_fe4b927
  REGION 7..149: note = RuvC_domain
  SITE 10: note = RuvC_P1
  SITE 53: note = RuvC_P2
  SITE 88: note = RuvC_P3
  SITE 90: note = RuvC_P4
  SITE 93: note = RuvC_P5
  REGION 209..294: note = Tnp_domain
  SITE 217: note = Tnp_P1
  SITE 247: note = Tnp_P2
  SITE 255: note = Tnp_P3
  SITE 256: note = Tnp_P4
  SITE 268: note = Tnp_P5
MQDVILIGIDLGKHSFHLHGQDAHGKAVFRKKCSRKQLITFLATFHPCTVVMEACAGAHHMARHLMTFGHQVKLISPQFVRPFVKGNKNDFIDAEAICEAASRPNMRFVTPKTEVQQILSALHRVRESLVRDRVKASNQIHGFLLEFGISLPIGSAAIKRLPSVLAEHPLPARLIAILNRLHAHYKYLDEQIAEVEKELQLQLQEDDLGQRLMAVPGVGPITASLLSAELGDGKQYSCGRDFAASVGLVPRQYSTGGRATLFGISKRGDKNLRRLLVLCARSYMQRLDKQKGMLADWVRAMLSRRHSNVVACALANKLARTVWALAARHTEYRAAQASKAA

SEQ ID NO: 12340 - protein, 351 aa, unidentified
  source 1..351: note = protein_54c678e
  REGION 13..153: note = RuvC_domain
  SITE 16: note = RuvC_P1
  SITE 59: note = RuvC_P2
  SITE 94: note = RuvC_P3
  SITE 96: note = RuvC_P4
  SITE 99: note = RuvC_P5
  REGION 218..304: note = Tnp_domain
  SITE 226: note = Tnp_P1
  SITE 256: note = Tnp_P2
  SITE 264: note = Tnp_P3
  SITE 265: note = Tnp_P4
  SITE 277: note = Tnp_P5
MSRSSSSATIATLGIDRGKNSFHLVGQDERGAIVRRIKLSRSQITQRLANIPQCLIGMEACAGAPHIGRQLQALGHDVRLIPAQSVKPFLKGHKNDYRDAEAIAEAVQRPTMSFVAIKTPDQMDLLALHRVRARLVSQRTGVTNQIRGLLLERGLTVRQGLVPLRRTLPGILGSSCDALSPRMVRLIVDLAEDWRRLDERITEVSAEIEALAAQDEHCQRLMSVPGVGPIISSAVVAAIGTGAGFKQGRDFGAWLGLVPKQESTGDRTILGKISKRGNKYLRPLFVQAAHIVLVRRPHGARLGLWPWIETAGRRLHRNMLVIAPANKLARIAWAVLARGHAYQPRSASHAM

SEQ ID NO: 12341 - protein, 341 aa, unidentified
  source 1..341: note = protein_bc0f4e6
  REGION 7..149: note = RuvC_domain
  SITE 10: note = RuvC_P1
  SITE 53: note = RuvC_P2
  SITE 88: note = RuvC_P3
  SITE 90: note = RuvC_P4
  SITE 93: note = RuvC_P5
  REGION 211..295: note = Tnp_domain
  SITE 219: note = Tnp_P1
  SITE 249: note = Tnp_P2
  SITE 257: note = Tnp_P3
  SITE 258: note = Tnp_P4
  SITE 270: note = Tnp_P5
MGEVSTIGMDLAKSVFQVHGADASGAVLFRKKLRRHQVLTFFAGQPPCTVAMEACGSAHHWAREIGKLGHTVRLIPPAYVKPFVKRQKNDAADAEAICEAAQRPTMRFVVPKSEQAQAAAVVFRARDLLVKQRTQIINALRGHLTEFGIVVAKGPAHVPQLVRAVEDGGEPIPELARPILQGLIEMLQALDDRIAGLDREIAQRAKEDETARRLMTIPGVGPVTATALAALAPPAETFKRGRDFAAWVGLTPLQHSTGGKQKLGATSKMGERTLRRLLILGASGVLRWAARNGAPAGSWIARMVSRKPPMLVRVALANKMARVIWALMAKGGIYRAPAASV

SEQ ID NO: 12342 - protein, 357 aa, unidentified
  source 1..357: note = protein_55de9f6
  REGION 2..113: note = RuvC_domain
  SITE 12: note = RuvC_P2
  SITE 51: note = RuvC_P3
  SITE 53: note = RuvC_P4
  SITE 56: note = RuvC_P5
  REGION 225..314: note = Tnp_domain
  SITE 232: note = Tnp_P1
  SITE 262: note = Tnp_P2
  SITE 270: note = Tnp_P3
  SITE 271: note = Tnp_P4
  SITE 283: note = Tnp_P5
MNDLNHPKIIFESTGIYSRAMVRFCRVNQINYIEMNPLEAKFRTSSLRSWKTDQADAHKLAHLAPTLKQTDSLPTHESIFFELRERARFHLEIESEQNHFKFEIVELLHQTFPGLEKLFSSRYSIIALNIAEIFTHPDLVIDLDRDILITHIFNSTDKGLSIYKAEKYAQQLINIASESYPNVDRHSFLVEKVRLLIQQLKQSIQRLKQLDDAMIQLAKQLDCFEKIYSIPGIGELSAAMIIGEIGDITRFRSHKQLNAFVGIDIKRYQSGGTSSRDTINKRRNKKARRLLFWVVMNIIRGQHHYDNHVVDYYYKLRKQPNEKSHKTAVIACINRLLKTIHYLIMNQKLYDYQMSPH

SEQ ID NO: 12343 - protein, 291 aa, unidentified
  source 1..291: note = protein_b5ff37b
  REGION 6..148: note = RuvC_domain
  SITE 9: note = RuvC_P1
  SITE 52: note = RuvC_P2
  SITE 87: note = RuvC_P3
  SITE 89: note = RuvC_P4
  SITE 92: note = RuvC_P5
  REGION 158..245: note = Tnp_domain
  SITE 165: note = Tnp_P1
  SITE 195: note = Tnp_P2
  SITE 203: note = Tnp_P3
  SITE 204: note = Tnp_P4
  SITE 216: note = Tnp_P5
MHATTIGLDIAEWRFQIHGVDSVGSVVISKALTRGRVVAFFGKIDPCLIGMKACAIAHHWVRELQTLGHDVRLIPPAYVKPYGRWNKNDAADAAAICEAVIRPCMRFVAVKSAEQQAARSLTRVREQLIAQRTATVNALRGHLAEFGIVEAAGPPRSWRLATIPGIGILTAATFAAAVPDPTFFRSGREFAARLGLVPRQNSTGGKLRLGRISKRGDARLRGLLVVCASSVLQGLTRRQSAAARAPWLARLLESKPCMVVTIALANKLARTVWALMVRNQAYHPERGFLGV

SEQ ID NO: 12344 - protein, 342 aa, unidentified
  source 1..342: note = protein_a4a1644
  REGION 7..148: note = RuvC_domain
  SITE 10: note = RuvC_P1
  SITE 53: note = RuvC_P2
  SITE 88: note = RuvC_P3
  SITE 90: note = RuvC_P4
  SITE 93: note = RuvC_P5
  REGION 211..296: note = Tnp_domain
  SITE 219: note = Tnp_P1
  SITE 249: note = Tnp_P2
  SITE 257: note = Tnp_P3
  SITE 258: note = Tnp_P4
  SITE 270: note = Tnp_P5
MKEVSIIGLDLAKNVFQAHGAGADGSVVFRRKLSRAQLLKFLSKLSPCVVAMEACASAHHWGRMIANLGHDVKLIPPAYVKPFVKRQKNDMADAEAIAEAASRPTMRFVAVKSEAQQAAEMTYRTRDLLVRQRTQTINALRAHLAEQGIVAPVGPAHIGRLAAVVEGDGETLPAAVRELAHLLLNQIADLSGKIAGLDAELRRRAGSDDTARRLTTIPGVGPITAAAITTFAPPMETFSKGRDFAAWVGLTPRQHSSGGKERLGRTSKMGQRDIRRLLIVGAVAVVRWAARKGAREGSWLARMLERKPKMLVAIALANRMARTAWALMRKGEDYRDPAMATA

SEQ ID NO: 12345 - protein, 396 aa, unidentified
  source 1..396: note = protein_5313717
  REGION 6..160: note = RuvC_domain
  SITE 9: note = RuvC_P1
  SITE 58: note = RuvC_P2
  SITE 98: note = RuvC_P3
  SITE 100: note = RuvC_P4
  SITE 103: note = RuvC_P5
  REGION 265..352: note = Tnp_domain
  SITE 273: note = Tnp_P1
  SITE 304: note = Tnp_P2
  SITE 312: note = Tnp_P3
  SITE 313: note = Tnp_P4
  SITE 325: note = Tnp_P5
MPQIWAGVDIGKEHHHCVVINTGGERLLSRRVLNDETALLELIGDVLALDADVLWAVDLNHGGAALLIGLLLSHDQLMVYITGLTVHRASASYRGEGKTDAKDAFVIADQARMRRDLGLLRPGDEIAVDLRTLTGRRTDLMCDRTRQINRLRAQLLEIFPALERELELTNKGPVVLLTGYQTPAAIRRSGTKRIETWLRNRKVRSAAALARTAVEAAEAQHTALPGEKLAAAMVVRLAKGVMALDEEIAEVDTLIEARFREHPHAEVILSLPGMGKQLGAVFLAATGGDMDAFGSADRLAGFAGLAPTPRDSGRVSGNLRRPRRFHRALLNAMYLSALSSLKSCPASKAYYQRKRAEGKGHKQALLALARRRVNVLWAMIRDGACYQAAPPVTAAA

SEQ ID NO: 12346 - protein, 340 aa, unidentified
  source 1..340: note = protein_09b4f09
  REGION 7..148: note = RuvC_domain
  SITE 10: note = RuvC_P1
  SITE 53: note = RuvC_P2
  SITE 88: note = RuvC_P3
  SITE 90: note = RuvC_P4
  SITE 93: note = RuvC_P5
  REGION 211..301: note = Tnp_domain
  SITE 219: note = Tnp_P1
  SITE 249: note = Tnp_P2
  SITE 257: note = Tnp_P3
  SITE 258: note = Tnp_P4
  SITE 270: note = Tnp_P5
MGDVTTIGLDLAKSVFQAHGADASGEVVFRKKLRRDDVLAFFAAQPACLVAMEACASAHHWSRELAALGHEVRLIPPAYVKPFVKRQKNDMADAEAICEAAQRPTMRFVATKSAEAQGAAVIFRTRDLLVRQRTQLINALRGHLGEFGYIARQGAGHSARLVEVVRDPGSDLPVEARAVLLVIVEALEALHAKVSALDRAIAARARQNEVARRLMTIPGVGPVVATAMVALAPPASTFRRGRDFAAWLGLTPRQHSSGGKERLGRTSKMGERSLRRLLILGASSAARIAARTGAKDPWLERMLARKPRMLVTIALANKMARIVWALMARGGSYRAPARAV

SEQ ID NO: 12347 - protein, 351 aa, unidentified
  source 1..351: note = protein_3a4e417
  REGION 7..149: note = RuvC_domain
  SITE 10: note = RuvC_P1
  SITE 53: note = RuvC_P2
  SITE 88: note = RuvC_P3
  SITE 90: note = RuvC_P4
  SITE 93: note = RuvC_P5
  REGION 211..306: note = Tnp_domain
  SITE 219: note = Tnp_P1
  SITE 258: note = Tnp_P2
  SITE 266: note = Tnp_P3
  SITE 267: note = Tnp_P4
  SITE 279: note = Tnp_P5
MSEIITVGFDLAKNVFQVHGADGTGHAVLRKKLRRHQVLEFFCQLPACVVAMEACGGAHFWGREIGKLGHDVRLIPPAYVKPFVKRQKNDAADAEAICEAALRPTMRFVPVKSEETQGAAMVFRVRELLIRQQTQAINALRGHLSEFGQIVPQGAANATKLIAIVEGPECALPSDAIPTLKVLVATLAQLEAEIGKLDTEITRRAKENELARRLMTVPGIGPLIATAIATLAPPPENFRKARDFAASCWKHASGVTLGLAPRQHSTGGKQRLGATTKMGERSLRRLLIIGTNSVIIKRHTHAEARPGTWLGDMLSRKPPMLVRVALANKMARIVWALMARGGVYQSPVVAA

SEQ ID NO: 12348 - protein, 383 aa, unidentified
  source 1..383: note = protein_91498ae
  REGION 6..159: note = RuvC_domain
  SITE 9: note = RuvC_P1
  SITE 57: note = RuvC_P2
  SITE 98: note = RuvC_P3
  SITE 100: note = RuvC_P4
  SITE 103: note = RuvC_P5
  REGION 221..306: note = Tnp_domain
  SITE 229: note = Tnp_P1
  SITE 259: note = Tnp_P2
  SITE 267: note = Tnp_P3
  SITE 268: note = Tnp_P4
  SITE 279: note = Tnp_P5
MARVVIGVDPHKRSATIEIINEREQAVGQGRFGTDRDGYKAMLAAGRQHNDRVWAVEGCNGIGRHVAQRLVADGETVLDVPAKLSARARVFATGQSRKTDPVDARSVAVVALRTDGLRQVVVDDTTVALRLLVDRRDQLGRARTETVSRLHHLLLELVPGGAKKFLSAQQARALLNTVRPRDVVGKTRRWLASELIHELTVIDKKIEIANAELTDLVHSTGSTLQELNGIGPSGAARLLGDIGDIGRFTSRAHVASWNGTAPLDASSGDQNRHRLSRAGNRRINRVLHIMAVVQLRRDTEGRAYYRRKLAAGKTPMEAMRCLKRRLSDIVYRQMLADAKRLTTGPGGHVGATLQSSAADQIPMIGTSEKSLPDPPTHSLKQPS

SEQ ID NO: 12349 - protein, 367 aa, unidentified
  source 1..367: note = protein_73ab88e
  REGION 22..165: note = RuvC_domain
  SITE 25: note = RuvC_P1
  SITE 70: note = RuvC_P2
  SITE 105: note = RuvC_P3
  SITE 107: note = RuvC_P4
  SITE 110: note = RuvC_P5
  REGION 229..315: note = Tnp_domain
  SITE 237: note = Tnp_P1
  SITE 267: note = Tnp_P2
  SITE 275: note = Tnp_P3
  SITE 276: note = Tnp_P4
  SITE 288: note = Tnp_P5
MKKHTATNQSQALNDLSACTTVAVDLAKRVFQVAGEDALGQVRYEARIKSREAFYEFLCKLPPSVVVLVETGPGAQAWARQLQGQGNLARILPARLVEGHRSGAKNDRNDALSILRAGRDSKISAVPIKSAASLAMQALHRARQGYVRRRTAMSNQMRGLLLEHGVALAQGDAAISHVIPRVLEDATQPLPEILRELIDELLGEWRQLGERINVLSGRLEAAANADKTAKRLMTVRGVGPIIATALLAKQTEPERFANARLYAAYFGMVPDQHSSGEKIRLGKMSKRGDGYLRSLMIQGAHAVLQQLRPDSQQPDDRRLLGWLSRLGRKEAAVRLANRNLRIAWVLLQNEQTYQRQPVNDRQAEMSH

SEQ ID NO: 12350 - protein, 347 aa, unidentified
  source 1..347: note = protein_9fa0455
  REGION 10..158: note = RuvC_domain
  SITE 13: note = RuvC_P1
  SITE 63: note = RuvC_P2
  SITE 99: note = RuvC_P3
  SITE 101: note = RuvC_P4
  SITE 104: note = RuvC_P5
  REGION 227..312: note = Tnp_domain
  SITE 235: note = Tnp_P1
  SITE 265: note = Tnp_P2
  SITE 273: note = Tnp_P3
  SITE 274: note = Tnp_P4
  SITE 285: note = Tnp_P5
MFAESVDVVIGVDTHRDSHALALVDAGLGALIAEERVEANREGYRRALKLASGCGQRRLWAVEGTGSYGAGLARYLQQRGERVLELERPARSGSRGRAKSDALDALRAARAALTGEPLAELRSGGRREALRVLLVSREASVAVRRKGLNQLRALVLTAPAELRERLQGLPKGELVKRCIALRPRPGQQPQLRGTLLALRSCGRQVKLASREAATLERELAALVQQHSPQLLSHYGVGPITAAQLLVSWSHPGRLRSEAAFARLAGAAPIPCSSGKTIRHRLDRGGDRQLNRALHTIVLARRRGDQRTIAYVQRRISEGKTEREAIRSLKRYNARTLYRLMEHTNRDA

SEQ ID NO: 12351 - protein, 322 aa, unidentified
  source 1..322: note = protein_54bf0e9
  REGION 9..132: note = RuvC_domain
  SITE 36: note = RuvC_P2
  SITE 71: note = RuvC_P3
  SITE 73: note = RuvC_P4
  SITE 76: note = RuvC_P5
  REGION 194..279: note = Tnp_domain
  SITE 202: note = Tnp_P1
  SITE 232: note = Tnp_P2
  SITE 240: note = Tnp_P3
  SITE 241: note = Tnp_P4
  SITE 253: note = Tnp_P5
MHGADRDGAVVVRKKLRREQLLPFFAELPRCTVAMEACGGAHHWAREIGRLGHDVKLIAPAYVKPFVKREKNDMADAEAICEAAQRPTMRFVSVKSEAAQASPLAFRTRDLLVRQRTQPINALRGHMTEFGMVVAQGPMHVARLIAIVGDPDSDLPESARVVLEVLIVELRALDERVLKLDAEIVHRAKNDPVARRLMTIPGIGAITATALVALAPSAATFRRGRDFAAWLGLTPVQRSSGGKERLGRISKMGERTLRRLLIVGASAVAGWASRKGAKPGSWLASMMTRKPPMLVRVALANKITRIVWALLAMAGSTELRPW

SEQ ID NO: 12352 - protein, 339 aa, unidentified
  source 1..339: note = protein_cd2ba41
  REGION 6..147: note = RuvC_domain
  SITE 9: note = RuvC_P1
  SITE 52: note = RuvC_P2
  SITE 87: note = RuvC_P3
  SITE 89: note = RuvC_P4
  SITE 92: note = RuvC_P5
  REGION 210..297: note = Tnp_domain
  SITE 218: note = Tnp_P1
  SITE 248: note = Tnp_P2
  SITE 256: note = Tnp_P3
  SITE 257: note = Tnp_P4
  SITE 269: note = Tnp_P5
MKFTPVGVDIAKHLMQIHFVDEYTGELIDKQLKRNDFLTFFSNREPCLIGMEACGGAHYWARELRKLGHEVRLLKARFVRAFRMGNKNDVQDARAIWLAVQQPGKSVAIKNEEQQAILSLHRMRYQLVKFRTAQINSLQGLLLEFGETVHKGRTSLDKAMPEVLERLKEKLAPFLLNLLEKQYHRLNEIDEQIEQVEKQLTTWAKQNADCQRIMKIPGVGVLIATAAIATMGDPRAFRSGREFSAYLGLVPKQTGTGGRVKLLGISKRGDTYLRTLFIHGARVATLLTKTPLPWVTELKKRRPVCVVIVGMANKLARTVWALVAHQQEYQKDYVSVRPY

SEQ ID NO: 12353 - protein, 375 aa, unidentified
  source 1..375: note = protein_8d0b451
  REGION 18..166: note = RuvC_domain
  SITE 21: note = RuvC_P1
  SITE 70: note = RuvC_P2
  SITE 106: note = RuvC_P3
  SITE 108: note = RuvC_P4
  SITE 111: note = RuvC_P5
  REGION 251..337: note = Tnp_domain
  SITE 259: note = Tnp_P1
  SITE 290: note = Tnp_P2
  SITE 298: note = Tnp_P3
  SITE 299: note = Tnp_P4
  SITE 310: note = Tnp_P5
MTMVTDPAAVQQVLSVTGGVDTHADVHVAAVIDAVGRELGHREFATTPVGYAALLAWLGSLGPLELVGVEGTGMYGAGLTRVLQAAGVTVVEVDRPDRKARRFQGKSDPIDAFADARAALSGRASGTPKTRTGTVEMIRTLRVARSGAVKAKAVAWNQLKALIKTTPDELRERLRGLDGAALLDNCAGLRAARGPAPEHGPHAKRRRPGVLVDPSAACKRSLSVLARRIRALEAEVADLDDDLEPLITATAPTLLAMYGVGLDVAGQLLATAGDNPDRLRSEAAFAHLCGAAPICASSGKTTRHRLNRGGDRHANHALWRIAMTRLRYDPETRAYRDRRAKEQKTNKDIMRCLKRYIAREVHQALLVDLTAPSAA

SEQ ID NO: 12354 - protein, 354 aa, unidentified
  source 1..354: note = protein_3a6b00e
  REGION 14..155: note = RuvC_domain
  SITE 17: note = RuvC_P1
  SITE 60: note = RuvC_P2
  SITE 95: note = RuvC_P3
  SITE 97: note = RuvC_P4
  SITE 100: note = RuvC_P5
  REGION 218..305: note = Tnp_domain
  SITE 226: note = Tnp_P1
  SITE 256: note = Tnp_P2
  SITE 264: note = Tnp_P3
  SITE 265: note = Tnp_P4
  SITE 277: note = Tnp_P5
MPRHRSDLEAVATIGVDIGKNTFHLVGLGRNGAIVLRQKLSRPQVEARLANMPPCLIGMEACVGAHHLSRQLKALGHDARLMPARYVRPYSKGQKNDFRDAEAIAEAVLRPTMKFVAIKTIEQLDLQALHRVRERLVCQRTSVINQIRAFLLERGIAVRQGLRALRTEMPIILAMTDKLSPRMIHVIEALCADWRHLDARIETVSEEIKTLSEQDDGAKRLMTVPGIGPIISTATVAAIGKGDMFSKGRDFGAWLGLVPRQMSTGGRTILGPISKRGNRYLRMLFVQAARAVLLRPQSWGKHGLKSWIEAAARRLNRFKLAIALANKIARIVWGVLHGGRNFEVRTLRPALQAA

SEQ ID NO: 12355 - protein, 387 aa, unidentified
  source 1..387: note = protein_b6820b5
  REGION 4..159: note = RuvC_domain
  SITE 7: note = RuvC_P1
  SITE 58: note = RuvC_P2
  SITE 98: note = RuvC_P3
  SITE 100: note = RuvC_P4
  SITE 103: note = RuvC_P5
  REGION 263..350: note = Tnp_domain
  SITE 271: note = Tnp_P1
  SITE 301: note = Tnp_P2
  SITE 309: note = Tnp_P3
  SITE 310: note = Tnp_P4
  SITE 323: note = Tnp_P5
MIYAGIDIAKNRHVACVADQRLEILVEPFAFENNIEGFRKLDSVLDSFDNETLVIGLESTAHYGETLIEHLLSKGHHLAVINPIQTATLRKTNIRNTKTDSIDSLLVVKSLVVNGWVPFTAHDADILKLRHLCRFRDKKRKSIATAKIRLTSFVDKVFPELQYFFKSGIHTNACHELLSRHPDADDIAALHLTNLYNLLRKASHGHYGKETARQLKSLANSSVGIRDAHMSIQITQTIENLRLLEKQLSQLDDSIKAIVVQLDPIILTIPGVGLINAGMILGEIGNIHRFSNPSKLLAFAGLDPTVRQSGNFTARSTRMSKKGSKLLRYALINASWNVVRNNSTFREYYNLKVSQGKGHYAALGSVAFKLVRIIYKMMKDNVAFNLD

SEQ ID NO: 12356 - protein, 342 aa, unidentified
  source 1..342: note = protein_f5e3855
  REGION 7..148: note = RuvC_domain
  SITE 10: note = RuvC_P1
  SITE 53: note = RuvC_P2
  SITE 88: note = RuvC_P3
  SITE 90: note = RuvC_P4
  SITE 93: note = RuvC_P5
  REGION 211..296: note = Tnp_domain
  SITE 219: note = Tnp_P1
  SITE 249: note = Tnp_P2
  SITE 257: note = Tnp_P3
  SITE 258: note = Tnp_P4
  SITE 270: note = Tnp_P5
MKEITIIGVDLAKNVFQLHGAAADGSVVFRKKLTRVQFHKFMLGHPACIVAMEACGSSHYWAREMAQMGHDPRLIAPRYVKPFVKRHKNDAADAEAIVEAALRPTMRFVEPKTQVQQGGAVLFRTRSLFIRQRTEAVNALRAHLYEFGYIAPVGIQNVKQLVLVVEADSSELPEIVRFACKEAIEQITQLTERLAALDKEIARLSGQGKVAKRLRTMPGVGPITALAVETFAPVMENFRCGRDFAAWLGLVPLQRSTGGKQILGKTSKMGQRDIPRLLIIGAMAVVGSSARRGAPKGSWLEKMLARKPRMLVAIALANKMARGLWAMLTKNEEYRGPVMTGL

SEQ ID NO: 12357 - protein, 388 aa, unidentified
  source 1..388: note = protein_ec4cd4e
  REGION 4..160: note = RuvC_domain
  SITE 7: note = RuvC_P1
  SITE 58: note = RuvC_P2
  SITE 99: note = RuvC_P3
  SITE 101: note = RuvC_P4
  SITE 104: note = RuvC_P5
  REGION 262..348: note = Tnp_domain
  SITE 270: note = Tnp_P1
  SITE 300: note = Tnp_P2
  SITE 308: note = Tnp_P3
  SITE 309: note = Tnp_P4
  SITE 321: note = Tnp_P5
MYLVGIDIAKYNHQCFIATEAGEVINEFSFDNNLLGFNELLKALKSLDQSQEIKIGLEATGHYANTLKQFISAKGYTFVEFNPYLAKQFFKSTTIRKTKTDKVDARLLSSMLATVNYKALHTKYYHINELKALTRARDSLITDRSNYLVQITNALDNVFPEFKSFFNNRLGDTALYILNKYNSLEKISKITRNQYDKIRRVSMGKFTYNKLLLLKRLAKDSVGIKSGTYFSLIKRYISLINSLNNELKIIENDIYEIMNMVDTKLTTIPGLSLMSAAIIIGEISDIKRFSSPSKLTAYAGFDIAIYQSGEQKFYGRLVKRGSPLLRKTIWNLVFGSIRLIPQITEFYYKKRAEGKHHKVAYSAICRKLIRLIYFIESTNTTFDIKQYR

SEQ ID NO: 12358 - protein, 422 aa, unidentified
  source 1..422: note = protein_4255379
  REGION 4..157: note = RuvC_domain
  SITE 7: note = RuvC_P1
  SITE 57: note = RuvC_P2
  SITE 94: note = RuvC_P3
  SITE 96: note = RuvC_P4
  SITE 99: note = RuvC_P5
  REGION 284..371: note = Tnp_domain
  SITE 292: note = Tnp_P1
  SITE 323: note = Tnp_P2
  SITE 331: note = Tnp_P3
  SITE 332: note = Tnp_P4
  SITE 344: note = Tnp_P5
MLGVGIDWAESFHDVAVGRPGAGVIEQFRIEHGPAGVHRLIARCLELEPDPAEVRVVLETRHGLLVEALADAGFTVLPVNPDLVARRRGPAKKKDDAEDARICCLLALDAYLDLRRLIPHGQTGTELRAIARDDERAARDERRIGNRLRADLLAAFPAALDIAAGDLGSAVFLRLLERWPAADLLAAASRDEIEAFARSHRHGWAGRFADQVTAARAEPRLAVRAELARAKAGSIRLAAAQLLAIRAQRREWHKRMAELLLGAPRTGRDKTAKDPDPGKAFPGGEIYLSMPGLGDRLAARVAGEIGEHPEQYATPNALQCYAGRAPVTRRSGRSEYIVARRLAYNRYLGEAVHQWAFCSLSRSTWAREFYDTKIAAGKTHHAALRALGNRWLEVLWHCLHLGVRYNEAIHIANRNRALNKAA

SEQ ID NO: 12359 - protein, 337 aa, unidentified
  source 1..337: note = protein_0ff8f05
  REGION 4..150: note = RuvC_domain
  SITE 7: note = RuvC_P1
  SITE 54: note = RuvC_P2
  SITE 90: note = RuvC_P3
  SITE 92: note = RuvC_P4
  SITE 95: note = RuvC_P5
  REGION 211..296: note = Tnp_domain
  SITE 219: note = Tnp_P1
  SITE 249: note = Tnp_P2
  SITE 257: note = Tnp_P3
  SITE 258: note = Tnp_P4
  SITE 269: note = Tnp_P5
MIHVGVDLHQRFCYMTALEARGKILEAGPVTNEGAALRKYFRRFRGQEVQVAVEACGFWPAFRQVVEPEVKRLVLVHAQRVKAIASAKWKNDRVDSQTLAHLLRCDLLPESWKADRETQARRQQVRLRTTLVRQRTRLKNQVHAVLHQQGLRSPVRDLFGRRGRLWLGEVKLPEQARESVKTCLRMIDHYGEEIQKQNLQLSEKAKQDQRAQWLMTIPGIGECSAMMLLAEIGEIERFPDKQALCSYAGLVPRVRESGKVARGGITRQGSSALRWIMVEAAQVATRCSPAAKRYYERLLRKKHKHVARVAVARKLLIAVYALLHHGAVLDEKKSAAS

SEQ ID NO: 12360 - protein, 333 aa, unidentified
  source 1..333: note = protein_aa7851e
  REGION 4..154: note = RuvC_domain
  SITE 7: note = RuvC_P1
  SITE 55: note = RuvC_P2
  SITE 96: note = RuvC_P3
  SITE 98: note = RuvC_P4
  SITE 101: note = RuvC_P5
  REGION 197..284: note = Tnp_domain
  SITE 205: note = Tnp_P1
  SITE 235: note = Tnp_P2
  SITE 243: note = Tnp_P3
  SITE 244: note = Tnp_P4
  SITE 257: note = Tnp_P5
MNTVGIDVSCKELVVVVMVNGKARKAKSFDNTPLGHQSIIQSLTKLKGETKVCIEATGIYHFDLAVALSRADGIEVMVINPKAAHNFAKALMTRSKTDAIDAENLAIYAERMPFEAWERPADECISLRATARRIAALSKQKTQTKNQLHALESTVETPVLVIEQTEQLIDILDAQIKTLRDSALNLIHQNEDLKQAYTLITGIKGIAQASAVQILSELMILPKDMTARQWVAHAGLDPRIFDSGSSVSKKPRISKVGNKYIRQALYMPALVASRFEPNIQGYYHHLIEDNGLKKVQAVCAVMRKLLHAIHGMLRTNKKFDGARFYTLPITINA

SEQ ID NO: 12361 - protein, 357 aa, unidentified
  source 1..357: note = protein_895d037
  REGION 30..172: note = RuvC_domain
  SITE 33: note = RuvC_P1
  SITE 76: note = RuvC_P2
  SITE 111: note = RuvC_P3
  SITE 113: note = RuvC_P4
  SITE 116: note = RuvC_P5
  REGION 232..322: note = Tnp_domain
  SITE 240: note = Tnp_P1
  SITE 270: note = Tnp_P2
  SITE 278: note = Tnp_P3
  SITE 279: note = Tnp_P4
  SITE 291: note = Tnp_P5
MRWSPPPCERYADRVFFFLKGIIMQNVTLIGIDLGKHSFHVHAQDKSGHALLRKKFSRTQLTAFLSTCSAATVVMESCAGAHFMARHISQLGHQVKLISPQFVRPFVKSNKNDFIDAEAICEAASRPSMRFVTPRTEDQQAMSALHRVRDALVRERVKATNQMHAFLLEFGISMPRGIAVIRRLTAVLEEHQLPPYLTRLLLRLHQHYSYLSEQIEGLEQELKTHMADDDTAQRLLTIPGVGMITASLLATKLGDGKNYASSRDFAASTGLVPRQYSTGGKTTLMGISKRGDKNMRRLLVQCARVFMQRLEHNPGRLAEWVKVQQTRHHSNVVACGLANKLARIAWAVTVHRTAFSQ

SEQ ID NO: 12362 - protein, 408 aa, unidentified
  source 1..408: note = protein_67a7a3a
  REGION 4..163: note = RuvC_domain
  SITE 7: note = RuvC_P1
  SITE 60: note = RuvC_P2
  SITE 100: note = RuvC_P3
  SITE 102: note = RuvC_P4
  SITE 105: note = RuvC_P5
  REGION 273..359: note = Tnp_domain
  SITE 281: note = Tnp_P1
  SITE 312: note = Tnp_P2
  SITE 320: note = Tnp_P3
  SITE 321: note = Tnp_P4
MLFVGDDWAEDHHDVEIQDVHGRAVRAARLPEGVDGMTRFHELVAGFLPDDAKPSDVLVCIETDRGPWVRALVAAGYQVYGVNPKQAARHRELLSLSGAKSDKADAHTLADMVRTRRHQLRQVAADSDIAEAVKVVARAHQTLIWERTRHTLRLRAALRDYFPAALAAYQPLTLTGADALELLAKAPTPAAAAKLTIGQISAVLKKARRRDLVAKAAAIQQVLRTEHLGQADIVAGAYAATVRATVAILQTLNTEIRTLEGQVEAHFGQHPDAEVYLSQPGIGVILGARVLAEFGDADGRYADAKSRKNYAGTAPITRQSGKSKTVHARFIHNDRLVDALHMQAGAAILHDPGVRAYYDELRGREVGHNAALRQVGNRLVGILHGCLKTTTRYDQTTAWSHRTQPAAA

SEQ ID NO: 12363 - protein, 349 aa, unidentified
  source 1..349: note = protein_963a220
  REGION 7..149: note = RuvC_domain
  SITE 10: note = RuvC_P1
  SITE 53: note = RuvC_P2
  SITE 88: note = RuvC_P3
  SITE 90: note = RuvC_P4
  SITE 93: note = RuvC_P5
  REGION 212..300: note = Tnp_domain
  SITE 220: note = Tnp_P1
  SITE 250: note = Tnp_P2
  SITE 258: note = Tnp_P3
  SITE 259: note = Tnp_P4
  SITE 271: note = Tnp_P5
MSEIATIGLDIAKNVFQLHAVDRSGKIVLRKALRRSQVQGFFSRLPPCLIGMEACATAHHWARTLMAFGHDVRLIPPAYVKPYLRRQKNDAADAAAICEAVARPSMRFVPVKSPQQQSTLMLHRARDLLIGQRTALINALRGHFAELGIVVAQGARNTRQLIAFLHEEANPDFPAAARTALQPLATMLLGIETQIAKLDKAILAAHRSDPVSMRLAAIPGIGPIVASCLAASVPDASLFQGSREFAAYLGLVPRQHSTGGKARLGSISKMGNRHLRKLLVVGAHAALYSMKSGKTRTAMADWARSLLAKKPFKVVAVALANKMARIAWAVMARSTTYEPGSKGVAASAA

SEQ ID NO: 12364 - protein, 339 aa, unidentified
  source 1..339: note = protein_f56ac50
  REGION 6..147: note = RuvC_domain
  SITE 9: note = RuvC_P1
  SITE 52: note = RuvC_P2
  SITE 87: note = RuvC_P3
  SITE 89: note = RuvC_P4
  SITE 92: note = RuvC_P5
  REGION 210..299: note = Tnp_domain
  SITE 218: note = Tnp_P1
  SITE 248: note = Tnp_P2
  SITE 256: note = Tnp_P3
  SITE 257: note = Tnp_P4
  SITE 269: note = Tnp_P5
MKYTPVGVDIAKHLMQVHFINEHTGEVIDKQIKSDALLEYFSNREPCLIGMEACGGSQHWARELEKLGHKVRLLQGKFVKAFVMGNKNDVMDARAIWMAVQQPAKAVAVKTEEQQAVLSLHKMRRQLVKFRTAQINALHGLLLEFGETVRKGRASLDKAMPEVLERLKEKLPPFLIYQIEDQHRRLNDLDMQIEGIEKQLTAWAKQNEACRRIMDIPGVGPLVATAAVAIMGDAGTFRSGREFAAYIGLVPKQTGTGGKVRLLGISKRGDAYMRTLFIHGARAATLLAKEPNPWVTELMKRRPTSVAVVGMANKIARTVWALVTHNRTYDKKHVSIRPF

SEQ ID NO: 12365 - protein, 400 aa, unidentified
  source 1..400: note = protein_3e66f2e
  REGION 10..164: note = RuvC_domain
  SITE 13: note = RuvC_P1
  SITE 62: note = RuvC_P2
  SITE 102: note = RuvC_P3
  SITE 104: note = RuvC_P4
  SITE 107: note = RuvC_P5
  REGION 270..356: note = Tnp_domain
  SITE 278: note = Tnp_P1
  SITE 308: note = Tnp_P2
  SITE 316: note = Tnp_P3
  SITE 317: note = Tnp_P4
  SITE 329: note = Tnp_P5
MSTPHTRIWVGVDAGKGHHWAVAVDADGETLFSTKVINDETQILTLIETAGERADEVRWAVDISGRASTLLLALLVAHGQQVVYVPGRTVNRMSGAYRGEAKTDAKDAKVIADQARMRRDFAPLDTPPELVSTLQLLTNHRADLIADRVRLINRLRDLLVGVCPALERAFDYSAAKGPVVMLTEYQIPAALRRIGVKRLTAWLERRKVRGASDVAARAVEAAQSQQTALPGEKRAARLVCDLAHQLLALDERIKDNDREIRETFRTDDRAEIIESMPGMGPTLGAEFVAIVGDLGGYKDAGRLASHAGLAPVARDSGRRTGNYHRPKRYNRRLRHIFYMSAQTAMMRPGPSRDYYLKKRSEGLRHTQALLSLARRRVDVLWAMLRDKRLFTSSPPVTQAA

SEQ ID NO: 12366 - protein, 342 aa, unidentified
  source 1..342: note = protein_f6b2948
  REGION 7..148: note = RuvC_domain
  SITE 10: note = RuvC_P1
  SITE 53: note = RuvC_P2
  SITE 88: note = RuvC_P3
  SITE 90: note = RuvC_P4
  SITE 93: note = RuvC_P5
  REGION 211..301: note = Tnp_domain
  SITE 219: note = Tnp_P1
  SITE 249: note = Tnp_P2
  SITE 257: note = Tnp_P3
  SITE 258: note = Tnp_P4
  SITE 270: note = Tnp_P5
MSEVTIIGVDLAKRVFQLHGAQHDGSVAFRKKLSRGQFLAFLAQQPKCLIAMEACATAHGWGREFEKLGHDVRLIPPVYVKPFVKRQKNDVADAEAIVEAALRPTMRFVAVKSEDQQARAMLFRTRQMFVGQRTQMINALRGHLAEHGLVAARGPAHLKTLADAIADSGTALHPEVRDLSQIYLEQIEGLNARVAELDAKMRCAAKKADSVRRAQTMPGVGPVTALAIETFAPDLATFKRGRDFAAWLGLVPKQHSTGGKARLGKTSKMGQRDIRTLLVSGAMAVLQAVERFDTPNNGWLKRLLTRKPRMVAAIALANKMARGLWAMMTKQEDYRNPVATMA

SEQ ID NO: 12367 - protein, 390 aa, unidentified
  source 1..390: note = protein_86b79e0
  REGION 4..162: note = RuvC_domain
  SITE 7: note = RuvC_P1
  SITE 60: note = RuvC_P2
  SITE 100: note = RuvC_P3
  SITE 102: note = RuvC_P4
  SITE 105: note = RuvC_P5
  REGION 266..353: note = Tnp_domain
  SITE 274: note = Tnp_P1
  SITE 304: note = Tnp_P2
  SITE 312: note = Tnp_P3
  SITE 313: note = Tnp_P4
  SITE 326: note = Tnp_P5
MIYVGIDIAKLNHFASAISSDGEVIIEPFKFTNDDDGFQMLVSKLNSLDAEPDSIIIGLESTAHYGDNLVRYLVAENFQVCVLNPIKTSTMRKNNIRKTKTDKVDTYIIAKTLMMQESYRFITFYDLDLMDLKVMGRFYQKTIKQWTRLKIQFTAYVDEVFPELQYFFKSGLHQKSVYAILKEAPTPEAITSMHMTHLANLLVKTSHGHFTKEKAKELRVLARKSVGASDSALSIQITHTIAQIELLDSQLNMIEEEMTEIMKFNDSVIMTILGIGYINGGMIIGEIGDIHRFSSPGKLLAFAGLDPSVYQSGNFQARKTKMSKRGSKVLRYALINAAHNVVKNNATFKAYYDTKMAEGRTHYNALGHCAGKLVRVIWKMMTDDLEFNLD

SEQ ID NO: 12368 - protein, 341 aa, unidentified
  source 1..341: note = protein_76daa93
  REGION 7..149: note = RuvC_domain
  SITE 10: note = RuvC_P1
  SITE 53: note = RuvC_P2
  SITE 88: note = RuvC_P3
  SITE 90: note = RuvC_P4
  SITE 93: note = RuvC_P5
  REGION 209..295: note = Tnp_domain
  SITE 217: note = Tnp_P1
  SITE 247: note = Tnp_P2
  SITE 255: note = Tnp_P3
  SITE 256: note = Tnp_P4
  SITE 268: note = Tnp_P5
MSESALIGIDLGKHSFHLHGQDTAGREVFHKKLTRAQMMHFFGNLPSCVVVMEACAGAHFVARQLTAMGHTAKLISPQFVRPFVKGNKNDFVDAEAICEAASRPSMRFVTPKTAAQQTLSVLHRLRESLVHERTKTTNQMHGFLLEFGISLPKGLAIMKRLASVLAEHELPIRLRVLLQRLYEHFSYLDEQIKALDKELAGQLADDDLGSRLLSLPCVGPITASLLAVEMGDGKQYKCSRDFAASVGLVPRQYSTGGKANLLGISKRGDKHLRQLLVQCARVYMQRLEHQKGALADWVRSLLGRRHSNVVACALANKLARIAWAIAAHHTQYETGPDALNA

SEQ ID NO: 12369 - protein, 345 aa, unidentified
  source 1..345: note = protein_57fe71d
  REGION 14..160: note = RuvC_domain
  SITE 17: note = RuvC_P1
  SITE 65: note = RuvC_P2
  SITE 105: note = RuvC_P3
  SITE 107: note = RuvC_P4
  SITE 110: note = RuvC_P5
  REGION 206..293: note = Tnp_domain
  SITE 214: note = Tnp_P1
  SITE 244: note = Tnp_P2
  SITE 252: note = Tnp_P3
  SITE 253: note = Tnp_P4
  SITE 266: note = Tnp_P5
MNKLVPTTQATAYCGIDVSARSLAVALIQVDHTVTHREFANSASGHRALLTWLARCDTRVRVSLEATGIYSLDLALALDAAGTVELAVLNPKLVNRFAQTLRRSKTDAADAVVLAEYSQRMPFSRWQRPAASHLGLRTMSRYIESLVVEQAGLKNRLRSAESTATTPRAVLADLRRALAAVERRVERMRGEALNLVETEVELRERYQLLTTVPGIASVSALRILSELVLLAPGMTVRQWVASSGLDPVHQQSGTSLHKPSRISRAGNRHLRAALYMSALSASRYDPHLAAFYRALRARHKTGLQALMAVARKLLHAIYGIFKSGTPYDGRRLFPNIQAEVELIAG

SEQ ID NO: 12370 - protein, 339 aa, unidentified
  source 1..339: note = protein_aa54961
  REGION 8..150: note = RuvC_domain
  SITE 11: note = RuvC_P1
  SITE 54: note = RuvC_P2
  SITE 89: note = RuvC_P3
  SITE 91: note = RuvC_P4
  SITE 94: note = RuvC_P5
  REGION 212..303: note = Tnp_domain
  SITE 220: note = Tnp_P1
  SITE 250: note = Tnp_P2
  SITE 258: note = Tnp_P3
  SITE 259: note = Tnp_P4
  SITE 271: note = Tnp_P5
MEKEVVTVGLDLAKNVFQIHAIGSDGTVLVRRKLRRAEVIRFFTDLPACLVGMEACASAHHWGRELMALGHEVRLMPPAYVKPYVKRGKTDAADAEAICEAVTRPTMRFVAVKTVEQQAVLMLHKSRDLLVRQRTMLINALRGHLAEYGIVTRVGAGGVTASLQALHDEQSKLPDHARSALHGIAAQLRALSSEIDRLETQILAWHRNDETSCRLATIPGIGPITASAIAAAVPDASLFRSGRQFAAWLGLTPRPHSSGGKERLGGITKQGDGYLRRLLVVGATAVMRMARKDASRQPWMAQLLERKPTKIATVALANKTARIAWAVMARKEVYTPVAV

SEQ ID NO: 12371 - protein, 262 aa, unidentified
  source 1..262: note = protein_cce544b
  REGION 7..155: note = RuvC_domain
  SITE 10: note = RuvC_P1
  SITE 54: note = RuvC_P2
  SITE 94: note = RuvC_P3
  SITE 96: note = RuvC_P4
  SITE 99: note = RuvC_P5
  REGION 193..254: note = Tnp_domain
  SITE 201: note = Tnp_P1
  SITE 230: note = Tnp_P2
  SITE 238: note = Tnp_P3
  SITE 239: note = Tnp_P4
  SITE 250: note = Tnp_P5
MSDSVFIGIDVSSQTLEIASSDQGKTWQLANDVAGIEQLVNQASALAPALVVLEATGGYEFEAACALQAAGLAVAVVNPRTARDFARSMGALAKTDALDARMLAAFARVLHQHPERERFVKPLADAELQQLQALVLRRRQLVQMLTSERQRLRLAHAAARPSIERVIEFLKQELGDSEAEVAAHVQRHHARLAQALASVPGIGAASVAVLLAELPELGKLDRRRIAALVGVAPLNRDSGQMRGQRCIWGGAPMCGEPCTWPR

SEQ ID NO: 12372 - protein, 396 aa, unidentified
  source 1..396: note = protein_8436857
  REGION 4..158: note = RuvC_domain
  SITE 7: note = RuvC_P1
  SITE 59: note = RuvC_P2
  SITE 99: note = RuvC_P3
  SITE 101: note = RuvC_P4
  SITE 104: note = RuvC_P5
  REGION 264..354: note = Tnp_domain
  SITE 272: note = Tnp_P1
  SITE 302: note = Tnp_P2
  SITE 310: note = Tnp_P3
  SITE 311: note = Tnp_P4
  SITE 327: note = Tnp_P5
MATIGVDIGGRTHAVARCREGNSKADREIVRVSQSRAGFDALDAWLERQSEPVTLVTMESSGHYWMPLASHLRRRELPIAVVNPLAAKYFAKSRLSRTKSDPADARSLAEMAMRDMPPARDPLAGVELRQAARFAMTLVTEQAQVCQRLVRLVELGFPELGELFDDPTCRTAREVLRIAPTARAAIRRRTSTLANANAGPGHRRLGQAKAVRLQTAAADSIAVPELDAEVTFEVGLLLDQYDLLERQIETADRHVAELLDGELARRLQTIPGVGPSIAATLLAEIGHIERFSDFDQLLAYAGVHPAERSSGRKGASPETAWHMSKAGNAHLRAAAYRLAVIGVQHNPVIAAHYARKRAAGKSKMNALGHCMRKALSLVWGVWRNGQDFDPKWGLES

SEQ ID NO: 12373 - protein, 403 aa, unidentified
  source 1..403: note = protein_83b279d
  REGION 4..160: note = RuvC_domain
  SITE 7: note = RuvC_P1
  SITE 57: note = RuvC_P2
  SITE 97: note = RuvC_P3
  SITE 99: note = RuvC_P4
  SITE 102: note = RuvC_P5
  REGION 275..362: note = Tnp_domain
  SITE 282: note = Tnp_P1
  SITE 312: note = Tnp_P2
  SITE 320: note = Tnp_P3
  SITE 321: note = Tnp_P4
  SITE 334: note = Tnp_P5
MNAVGIDVSKGKSMVAALQPGGKLLARPFEVLHTKSGIKELVSFVRTLDGDTRIVMEHTGRYYEPMLQWLASSDLFVTAVNPKLIKDFGNNTLRSVKTDKADAKKIARYALDNWCDLRQHTGMDTTRTQLKTMNRQFSFCMRQRTACKNNLIALIDQVYPGANIYFESPARADGSQKWVDYVSVFWHVDYVCSMRLSTFTERYRKWCHRHGYNFQSDKPRMLWEKAKDLIAMLPMDKMTKSLVQTAVAQLNVLSKTVETLRTQMIALAEKLPEYPVVIAMNGVGATLASQLIAEIGDITRFPRRGSLTAFAGVDPGAKQSGTMQLRSNKTSKAGSPHLRRALFQVVSGLLMRAPDDPVYNFMDKKRTEAKPYYVYMTAGANKFLRIYYGRVKEYLASLPKEQD

SEQ ID NO: 12374 - protein, 338 aa, unidentified
  source 1..338: note = protein_7841cd6
  REGION 6..147: note = RuvC_domain
  SITE 9: note = RuvC_P1
  SITE 52: note = RuvC_P2
  SITE 87: note = RuvC_P3
  SITE 89: note = RuvC_P4
  SITE 92: note = RuvC_P5
  REGION 209..294: note = Tnp_domain
  SITE 217: note = Tnp_P1
  SITE 246: note = Tnp_P2
  SITE 254: note = Tnp_P3
  SITE 255: note = Tnp_P4
  SITE 267: note = Tnp_P5
MKLKRISIDTSKAVFTLHGIDDQDRPVLRRNLSRPAFEAFFAKLPPTEVALEACGGSHHWGRRLTELGHHVHLIAPQYVKPFVKRGKNDRNDAEAISEAAGRPGMSAVPVKSAERQAGAMVVSVRELLVRQRTQAINALRGHAAEFGVIAAKGTANVAALCERVAQDAQVPEAARRMLAVLAQQVSHLDAEIAALDAQLREAAQADTTARRLMAAPGIGALGAITLALTVDASQFRSGRHFAAWLGLVPKERSTGGRQRLGGISRQGNERLRQLLVVGAMAVIRHARPGSKTASGWLLKLLERRPRKLVAVALANKMARVVWAMMARGQAYRQQPIAP

SEQ ID NO: 12375 - protein, 443 aa, unidentified
  source 1..443: note = protein_fc9eb86
  REGION 17..163: note = RuvC_domain
  SITE 20: note = RuvC_P1
  SITE 67: note = RuvC_P2
  SITE 102: note = RuvC_P3
  SITE 104: note = RuvC_P4
  SITE 107: note = RuvC_P5
  REGION 291..368: note = Tnp_domain
  SITE 297: note = Tnp_P1
  SITE 328: note = Tnp_P2
  SITE 336: note = Tnp_P3
  SITE 337: note = Tnp_P4
  SITE 349: note = Tnp_P5
MARKNQKRFEIVHHDCAGIDVGSREHWVAVNPDRSDPPVRKFLTFTDDLIALADWLESLKIKVVAMEATGVYWIPLFEVLDARGFEVYLVNSRATRQTSGRKSDVLDCQWIWQLMTHGLLSGAFRPADEICSMRSLVRQRANKVADQAKTINRMQKALSQMNIQLANVISDISGVTGMKILQAINQGERDPHALAALRDRRIKADHATIARSLHGNWRMEHLHALRQELACYDFLETQIAECDRAIAQALERLPVRQEEVPAACKALRNTHRSAAQQTALHQALGQVMGVDLTAIPTIGVDTALVLASELGPDLSRFPTSQHFCSWLGVAPPTRISGGKPLPGRAPKVINRAAQALKQSASNARNDKSFIGASHRARLSRMDTGCAIKATAHQLARLIYAMLTKGQPYVEQGLEAYEEKSRSRQLRALERKARKLGMQLVMAG

SEQ ID NO: 12376 - protein, 412 aa, unidentified
  source 1..412: note = protein_1041cb3
  REGION 6..164: note = RuvC_domain
  SITE 9: note = RuvC_P1
  SITE 63: note = RuvC_P2
  SITE 103: note = RuvC_P3
  SITE 105: note = RuvC_P4
  SITE 108: note = RuvC_P5
  REGION 274..374: note = Tnp_domain
  SITE 282: note = Tnp_P1
  SITE 312: note = Tnp_P2
  SITE 320: note = Tnp_P3
  SITE 321: note = Tnp_P4
  SITE 334: note = Tnp_P5
MMNPVIGLDVAKGESQVQAFLDKKQPYKKSFKVAHTLEGLTILLEFIREIEEASGERPPIVLESTGHYHSPVVQFFEDRGYLIIMVNPLVSYRAKSSSLRKVKTDIIDARHLCEMFYKEDLEPYKQRGIQLLNLRHLTRQHENITGMYVQTKLQFQSVLDQVFPEYCGVFGDLYSDVSLLTLQVFPTSEEVMATSEETIAKKIKEFCKSRSQKWANSQSEKLKAAADRNPFQKILYNSLILNMNMYIKMLLEYKKHLSDLEREIDALAKSMEEYKILQSIPGIGEKIAAMIISEIGEIDRFNHPKKLVAFAGIDPSVFESGTFKGTLNRITKRGSSRLRHALYMAVKSAIRDCRKKKTTDELIPRNKRLRDFYDKKREEGKPFKVAVIACANKLLNWIYALLKSKSDFQDLA

SEQ ID NO: 12377 - protein, 325 aa, unidentified
  source 1..325: note = protein_d76bbbb
  REGION 8..153: note = RuvC_domain
  SITE 11: note = RuvC_P1
  SITE 55: note = RuvC_P2
  SITE 95: note = RuvC_P3
  SITE 97: note = RuvC_P4
  SITE 100: note = RuvC_P5
  REGION 194..281: note = Tnp_domain
  SITE 202: note = Tnp_P1
  SITE 232: note = Tnp_P2
  SITE 240: note = Tnp_P3
  SITE 241: note = Tnp_P4
  SITE 254: note = Tnp_P5
MQTQTNYTGIDISKLFFDVAIGNQNKYLYYKFSNDEPGFKALIKLLCPDSHIVMEASGPYYLKLACYLDDQGLAVSVVNPLVIRRFCQMRMSRTKTDKKDAGMIAEYGKTEKPGLWQRPQQHVITLQQMDALPAHLNKEHTALSNQLESFKNSGLLDGQLEKKIVKELAHKQSFLKETIAAMQLLAGQHYAEMLANLESIPGVGKKTAMMLVIISGGFSRFNDYRKLSAYIGICPRIYDSGTSVKGKARICKMGMSKIRASLYICSWSAKRYNKACKELYDRLLAKGKAKKQALMAVAGKLLKQAFAIATQKTKYNENYSNITCF

SEQ ID NO: 12378 - protein, 339 aa, unidentified
  source 1..339: note = protein_99db162
  REGION 8..150: note = RuvC_domain
  SITE 11: note = RuvC_P1
  SITE 54: note = RuvC_P2
  SITE 89: note = RuvC_P3
  SITE 91: note = RuvC_P4
  SITE 94: note = RuvC_P5
  REGION 212..302: note = Tnp_domain
  SITE 220: note = Tnp_P1
  SITE 250: note = Tnp_P2
  SITE 258: note = Tnp_P3
  SITE 259: note = Tnp_P4
  SITE 271: note = Tnp_P5
MQQDIVTVGVDLAKTVFQIHAISAEGKVLVRRQLRRAEVLKFFAALPPCLVGMEACASAHHWGREIRALGHEVRLMPPAYVKPYVKRGKTDAADAEAICEAVTRPTMRFVAIKSVEQQAVLMLHKTRDLLVRQRTALINALRAHLSEYGIVTSKGPGGVTALVKLLHEGQEKLPAHARSALHTIAAQLRSLASEIDRLESQIQAWHRADDTSRRLATIPGIGPITASAIAAAVPDAALFRSGRQFAAWLGLTPRAHSSGGKERLGGISKQGDGYLRKLLVVGATAVIRMARRDATRQPWVAQLLERKPVKIATVGLANKTARIAWAVMTRNEVYAAAAA

SEQ ID NO: 12379 - protein, 312 aa, unidentified
  source 1..312: note = protein_303a25e
  REGION 4..155: note = RuvC_domain
  SITE 7: note = RuvC_P1
  SITE 60: note = RuvC_P2
  SITE 100: note = RuvC_P3
  SITE 102: note = RuvC_P4
  SITE 105: note = RuvC_P5
  REGION 200..286: note = Tnp_domain
  SITE 208: note = Tnp_P1
  SITE 237: note = Tnp_P2
  SITE 245: note = Tnp_P3
  SITE 246: note = Tnp_P4
  SITE 259: note = Tnp_P5
MFYLGMDVAKAKLDCCLLLDEVSGKRKAKVINNTKSGISDLLAWTVKQNVSPKELHVVMEATGVYHEQAAMALSDAGVMVSIINPAQIKDFGRGLAVRTKTDGVDSFVLARYGALLKPKAWMAPSPEARTLQVLLARREAIAQDIQRERNRQEKADATDTPELILKSLEDSIEFLVKQLATLQRNIDDHINKHPDLNRDVDLLQSIPGVGPQVGGNMLSVLSSHHFESAEHLAAYLGVVPVERQSGSSVRGRARLSKTEPARIRAVLYMAAVVAKRCNPHVKGVYDRLIGVVKLKCLHSAPPCENWSIYASA

SEQ ID NO: 12380 - protein, 342 aa, unidentified
  source 1..342: note = protein_480242f
  REGION 6..147: note = RuvC_domain
  SITE 9: note = RuvC_P1
  SITE 52: note = RuvC_P2
  SITE 87: note = RuvC_P3
  SITE 89: note = RuvC_P4
  SITE 92: note = RuvC_P5
  REGION 211..293: note = Tnp_domain
  SITE 219: note = Tnp_P1
  SITE 249: note = Tnp_P2
  SITE 257: note = Tnp_P3
  SITE 258: note = Tnp_P4
  SITE 270: note = Tnp_P5
MAIVVLGIDLGKNSCSLAGLDSAGRVVLRRRLRRGLVEGFVARLPRCVVAMEACCGAHHLGRVFSGQGHEARLMSPEYVRPYVKAQKNDDRDAEAIAEAATRPTMRFVRVKSEGQSDVQALHRARERLVTTRTGLINHLRALLLERGITAPQGRTKLAEMLCCFADEDDDRLGDRIRLLVEDLRREWRGLDERIAAFDREFVTMARQDEAARRLTTIPGIGAINATALAAAVGDGASFERGRDMAAWLGLTPRQRTTGGKPRLLGISKRGNRYLRKNLIHGARAVLPYLVDRDTPLGRWLRMLSSRAHKNVVVVALAAKLARIAWAVLAKGCVYDAGHLEAA

SEQ ID NO: 12381 - protein, 402 aa, unidentified
  source 1..402: note = protein_631183c
  REGION 8..164: note = RuvC_domain
  SITE 11: note = RuvC_P1
  SITE 60: note = RuvC_P2
  SITE 101: note = RuvC_P3
  SITE 103: note = RuvC_P4
  SITE 106: note = RuvC_P5
  REGION 270..356: note = Tnp_domain
  SITE 278: note = Tnp_P1
  SITE 308: note = Tnp_P2
  SITE 316: note = Tnp_P3
  SITE 317: note = Tnp_P4
  SITE 329: note = Tnp_P5
MGTGQLWVGVDVGKEHHWDCVVNSDGVAVLSRKLANDEQTIRELIGEVDALSHDVSWTVDLTTVYASLLLTVLADSGKSVRYLAGRAVWQAASVYRGGEAKTDAKDARVIADQSRMRGADLPVLHPDDDVITELRMHTAHRADLVADRTRTINRLRQQLIAVCPALERAAQLTQDRGWVVLLARYQRPKAIRRTGVSRLTKMLSDAGVRNAATIAAAAVTAAKSQTVRLPGEDVAAGLVADLAGEVIALDDRIKTTDADIEDRFRRHPAAEVITSLPGMGFRLGAEFLAAVGDPALIGSADQLAAWAGLAPVPRDSGKRTGRLHAPKRYSRRLRRVMYMSALTAIRCDPASKAYYQRKRDEGKRPIPATICLARRRTNVLYALIRDNRTWQPDSPPITKSAA

SEQ ID NO: 12382 - protein, 342 aa, unidentified
  source 1..342: note = protein_97b0f9e
  REGION 6..147: note = RuvC_domain
  SITE 9: note = RuvC_P1
  SITE 52: note = RuvC_P2
  SITE 87: note = RuvC_P3
  SITE 89: note = RuvC_P4
  SITE 92: note = RuvC_P5
  REGION 211..295: note = Tnp_domain
  SITE 219: note = Tnp_P1
  SITE 249: note = Tnp_P2
  SITE 257: note = Tnp_P3
  SITE 258: note = Tnp_P4
  SITE 270: note = Tnp_P5
MEIRTIGIDLGKTVFHLVGVNGRGEVVVRKKCSRLQLLRFTSNVSLCLIGMEACAGSHFLGRALREQGHDVRLMPAQYVKPYVKTNKNDYIDAEAIAEAVTRPSMRFVPIKTDEQLDLQSLHRVRERWVGRRTAVINQIRGMLLERGITVRKGRRHIEEALPGILEDPDNKLSGALRVLLGELRREMQYLHGQIQESDKLMERIAGELEQCKRLMAIPGIGPTIATATIAAIGNGASFRKGRGFAAWLGVVPGEHSTGGKHKPTETSRRGNRYLRKLYVQGAHAVLQSRNYQVPGLGAWLDRLSARKRIQVVAVALAKIARMAWAVLCKGEAYRPPLLTMAA

SEQ ID NO: 12383 - protein, 346 aa, unidentified
  source 1..346: note = protein_078f1f0
  REGION 7..149: note = RuvC_domain
  SITE 10: note = RuvC_P1
  SITE 53: note = RuvC_P2
  SITE 88: note = RuvC_P3
  SITE 90: note = RuvC_P4
  SITE 93: note = RuvC_P5
  REGION 212..299: note = Tnp_domain
  SITE 220: note = Tnp_P1
  SITE 250: note = Tnp_P2
  SITE 258: note = Tnp_P3
  SITE 259: note = Tnp_P4
  SITE 271: note = Tnp_P5
MKQITTIGLDLAKQVFQVHGADAEGAPIFNRKLRRAEVLRFFEKSPPCLVGMEACGGSHHWAREIAALGHDVRLIPPIYVKPFVKRGKTDAADAEAISEAVTRKTMRFVPVKSADQQAAAMVLKTRALLVRQETQAINALRAHLSEFGVIAAIGTAKVTALIEIVRDEADVRLPKAARFALAEIANQIEALKRQIEKLEREIVAEAKHDEDMRRLATIPGVGAITAASIKALVPDPDGFKSGRHFAAWLGLTPKPHSSGGKERLGGISKMGNPMLRSLLVLGATSVLRHARGNANAPQWLIALLARRPFKVVAVALANKMARIIWALLTKGGTYRNAGTASGAASA

SEQ ID NO: 12384 - protein, 338 aa, unidentified
  source 1..338: note = protein_eb47fdc
  REGION 7..148: note = RuvC_domain
  SITE 10: note = RuvC_P1
  SITE 53: note = RuvC_P2
  SITE 88: note = RuvC_P3
  SITE 90: note = RuvC_P4
  SITE 93: note = RuvC_P5
  REGION 209..295: note = Tnp_domain
  SITE 217: note = Tnp_P1
  SITE 247: note = Tnp_P2
  SITE 255: note = Tnp_P3
  SITE 256: note = Tnp_P4
  SITE 268: note = Tnp_P5
MSESALIGIDLGKHTFHLHGQDKSGREVFRKKCSRAQMMQFFASSQSCVVAMEACAGSHCVARQLAAIGHTPKLISPQFVKPFVKGNKNDFVDAEAICEAASRPSMRFVTPKTESQQTLSVLHRMRESLVRDRTRTANQMHGFLLEFGVSLPRGLAIMKRLAVVLAEHELPVRLTVLLQRLHNHLIYLDEQIKALDKELACQVADDDLGSRLLSIPCVGPVTASLLAVEMSDGKQYRCSRDFAASVGLVPKQYSAGGKANLLGISKRGDKHLRQLLVQCSRVYMQRLDHQKGALADWVRSLLSRRHSNVVACALANKLARIAWAIAAHHTQYEAGPGA

SEQ ID NO: 12385 - protein, 331 aa, unidentified
  source 1..331: note = protein_7dbce82
  REGION 6..157: note = RuvC_domain
  SITE 9: note = RuvC_P1
  SITE 56: note = RuvC_P2
  SITE 94: note = RuvC_P3
  SITE 96: note = RuvC_P4
  SITE 99: note = RuvC_P5
  REGION 199..286: note = Tnp_domain
  SITE 207: note = Tnp_P1
  SITE 237: note = Tnp_P2
  SITE 245: note = Tnp_P3
  SITE 246: note = Tnp_P4
  SITE 259: note = Tnp_P5
MEKIVIGIDISSKTLDICIKKSGHYSFEIIDNEVKSISNFLKKVGKSSSEIIISMENTGRYNWNLYEVLETLSFKIFVLNPLHLKKSLGLIRGKDDKIDAKRICDFTEKNEKELIQWKPCSETLKKIKLLFTERNSKVKLKASLLKQRILYSQLKGLKLDSKFMKMNKKEVELLEEHIDFLEKEIERLIETDEDLSLKKNNIRSIPGVGKVLSWMIIAKTEGFTKVTDPRKMACYAGVAPFGYQSGTSLRYRPKVSHYADKSLKTILHMAAMRAVRMENDLKEYYQRKIKEGKNKMAILNAVRNKIIHRIFAIVKNGKSYEKNYLNNLILS

SEQ ID NO: 12386 - protein, 320 aa, unidentified
  source 1..320: note = protein_7902765
  REGION 8..86: note = RuvC_domain
  SITE 11: note = RuvC_P1
  SITE 54: note = RuvC_P2
  REGION 192..282: note = Tnp_domain
  SITE 200: note = Tnp_P1
  SITE 230: note = Tnp_P2
  SITE 238: note = Tnp_P3
  SITE 239: note = Tnp_P4
  SITE 251: note = Tnp_P5
MNGSKNVVGIDIAKRVFQLHWIDMESGEIVSLQLKREKFLEHFANRQSCLIGMEACGGAQHWARKLTAMGHQVKLLPGKAVKPLVMGTLAIKTEEQQAILALHRMRSQLVKFRTAQINGLRGLLTEYGEVMPQGKAGVRKGITEALARLSDRLPAMVIDTLREQWARIGKMDEEIATIEQRIKRWLKNDDACRRIAEIPGVGPLTATAAVAIMGDAKTFKSGREFAAFAGLVPRQTGTGGRIKLLGISKRGDTYLRTLLIHGARSVLAHAKDPGPWVTELRQRRPLNVAVVALANKMARTIWAMLAHERTYQKEFVSQPA

SEQ ID NO: 12387 - protein, 428 aa, unidentified
  source 1..428: note = protein_800a9b1
  REGION 26..171: note = RuvC_domain
  SITE 29: note = RuvC_P1
  SITE 75: note = RuvC_P2
  SITE 110: note = RuvC_P3
  SITE 112: note = RuvC_P4
  SITE 115: note = RuvC_P5
  REGION 272..359: note = Tnp_domain
  SITE 280: note = Tnp_P1
  SITE 311: note = Tnp_P2
  SITE 319: note = Tnp_P3
  SITE 320: note = Tnp_P4
  SITE 331: note = Tnp_P5
MITDRVPCRKFYNGGAFIDKIYDNCCGIDVHKKLIVACFRKGSRQEVREFGATTRELLELADWLRDGGCEMTAMESTASYWKPLYNILESSDLKAMVVNARHMKAVPGRKTDVKDAEWIADLLQHGLLQPSYIPDKDQRELRELVRYRKSLVGERTRELNRLQKMLEGANIKLSGTVSDINGKSARGILEYLLTGASIDGAKYDEMYERKIIAHNLKATKEQIIDDLNGVMSPLQRRMMKELLAHLDELNIHIKNLDDEIDNFMKPEEKQASQAIQDVTGIGNTSAQAVISVIGTDMGRFPTDRHISSWAGLCPGDNESAKKRKSGKTRKGNSLLRTTLITCAHAAVKNKKSYFHAQFMRISAHRRSKRAYVAVAHSMLIAIYHILKDGVAFKDLGADYYNQFNKERKINAYLKKLKALGWEVPAAAT

SEQ ID NO: 12388 - protein, 395 aa, unidentified
  source 1..395: note = protein_5f57c5e
  REGION 5..163: note = RuvC_domain
  SITE 8: note = RuvC_P1
  SITE 62: note = RuvC_P2
  SITE 102: note = RuvC_P3
  SITE 104: note = RuvC_P4
  SITE 107: note = RuvC_P5
  REGION 270..359: note = Tnp_domain
  SITE 278: note = Tnp_P1
  SITE 308: note = Tnp_P2
  SITE 316: note = Tnp_P3
  SITE 317: note = Tnp_P4
  SITE 330: note = Tnp_P5
MEPVIGMDISKGNSVIQAFLRRNEPYGKAEQIYHNEQGLERLCTLCTELKARTGTEPVVIMEATGHYHRGLVCYLAREEIRHIILNPLQSKRAKGMGLCKVKTDEADAWNLAEMFYRGDALPHRIWDEAYMELQHATPQHEFVTSLYVQAKLNTRALLDQVMPAYEGVFSDLYSATSLEVLQSCLQGQMDEVEIIEKVLIKHAGRSRSQSWIREKSIRLEEVSSKWKEGWASPSQTAALKGMVALLLTFQAQLKQLEQQMEEISVHLPEVHLLKSIPGIGEKFAAAIVAEIGDIRQFRHAKQLVAYAGLDPSVYSSGKFTASSNRITKRGSKRLRRSLYLAVQCGLRQGSNRRLVSYYERKKKEGKPYKVTVIACANKLLHHIYALLNRGQPYQA

SEQ ID NO: 12389 - protein, 340 aa, unidentified
  source 1..340: note = protein_be32285
  REGION 6..147: note = RuvC_domain
  SITE 9: note = RuvC_P1
  SITE 52: note = RuvC_P2
  SITE 87: note = RuvC_P3
  SITE 89: note = RuvC_P4
  SITE 92: note = RuvC_P5
  REGION 211..297: note = Tnp_domain
  SITE 219: note = Tnp_P1
  SITE 250: note = Tnp_P2
  SITE 258: note = Tnp_P3
  SITE 259: note = Tnp_P4
  SITE 271: note = Tnp_P5
MNSTTYGVDIAKSVMQVYWVDGDTGEIGQRAVKRSQLSAFFARRPAGRVVMEACGSSHHWARTLAPLGHEVRLVHARHVKPYVRGNKNDLSDAQAIWSAAHAPGLRWVPAKSEEQQAVLSLHRARAQWVKVRTQTVNALRGLLYEFGVVLPGGRRAGIKAISRHRADIDEKLPVPMRELIDGQLQMLEKIDQRLKVLEGQLAGLEGQMPNAKRVREIPGVGLLGATALAAKLGEDGSGYRTAREFAACVGLVPQHTGTGGKVRIGRLSKRGDPYLRTLLMHGARSVIFHSKHRSAWLEGLLARRPLNVVVAALANKMARTAWALVAHGRDYQAGGLAHAA

SEQ ID NO: 12390 - protein, 347 aa, unidentified
  source 1..347: note = protein_454f743
  REGION 14..162: note = RuvC_domain
  SITE 17: note = RuvC_P1
  SITE 65: note = RuvC_P2
  SITE 105: note = RuvC_P3
  SITE 107: note = RuvC_P4
  SITE 110: note = RuvC_P5
  REGION 206..293: note = Tnp_domain
  SITE 214: note = Tnp_P1
  SITE 244: note = Tnp_P2
  SITE 252: note = Tnp_P3
  SITE 253: note = Tnp_P4
  SITE 266: note = Tnp_P5
MNKPVTTPTATVFCGIDVSAATLAVAVIEQDQPFQQREFANRASGHKALIGWLAKRKAQVRVSLEATGIYSLDLALALDASDGIEVAVLNPKMVNHFAQTLRRSKTDTADAQVLAEYSRRMPFTAWQPPSLNGLRLRVVGRHIAALVAQHTREQNRLHAVAGSQAASRCVLQDLKRSLVSLQQRIVKMRRAARELIRADAQIEQRFRLLTSMPGIAETSAVQILGELVLLAPQLTVRQWVAHSGLDPVHQDSGTSVHKRSRISRCGNRHLRRALYMPALSAVRWDPHMKAFYEALQLRHKTKLQAIIAVARKLLHAIYGIFKCRTPYDGSKLFPQLILSTELQSASR

SEQ ID NO: 12391 - protein, 345 aa, unidentified
  source 1..345: note = protein_a5075bd
  REGION 6..148: note = RuvC_domain
  SITE 9: note = RuvC_P1
  SITE 52: note = RuvC_P2
  SITE 87: note = RuvC_P3
  SITE 89: note = RuvC_P4
  SITE 92: note = RuvC_P5
  REGION 211..295: note = Tnp_domain
  SITE 219: note = Tnp_P1
  SITE 249: note = Tnp_P2
  SITE 257: note = Tnp_P3
  SITE 258: note = Tnp_P4
  SITE 270: note = Tnp_P5
MKVTTVGIDLAKNVFQLHGVNELGKTVFKKQLRRDQMAEFFVKLPACLIGMEACGGAHYWARKLQGFGHTVKLMAAQFVKPYVKTNKNDAADAEAICEAVTRPNMRFVPIKDVEQQSVLALHTVRQGFVKARTAQANQIRGLLTEYGLIIPQGIWHIAKRVPELIEDASNELPGSFRMLIQRLLDHFKELDTQVDELELQIVKWHRQSSASSKLAQVPGIGPITASALVASLGDAKNFDSGRQVAAWLGLVPRQHSSGGKQNLLGISKRGDSYLRSLLIHGARSVIYNGKDKTNPTCKWINGIVSRRNNNVAAVALANKNARIVWALLTHDREFRPDYTRETVGV

SEQ ID NO: 12392 - protein, 343 aa, unidentified
  source 1..343: note = protein_a61ccb5
  REGION 9..149: note = RuvC_domain
  SITE 12: note = RuvC_P1
  SITE 55: note = RuvC_P2
  SITE 90: note = RuvC_P3
  SITE 92: note = RuvC_P4
  SITE 95: note = RuvC_P5
  REGION 213..304: note = Tnp_domain
  SITE 221: note = Tnp_P1
  SITE 251: note = Tnp_P2
  SITE 259: note = Tnp_P3
  SITE 260: note = Tnp_P4
  SITE 272: note = Tnp_P5
MTKTPIAVLGIDLGKNSCSLAGLDGTGSVILRRRMTREGVVKFVATLPACVVAMEACCGAHFLGRTFVSQGHTVRLMSPEYVAPYVKAQKTDDRDAEAIAEAATRPTMRLVTLKSEAQLDLQVLHRARERLVAGRTRLTNQLRAVLLERGVILPKRRAPLIKRLDELMAGELQISKRVLRLLQELRDEWTELDRRIKAYDDELVALTRQDDDARRLASIPGIGVINATALVAAVGDASAFEKGRDLAAWLGLTPRQHSTGGKTKLLGISKRGNKYLRTQLIHGARAAMAHFVRQATPTGTWVRQLLTRAHPNVAVVALAAKLARIAWAVLRHGSSYGQQAVSV

SEQ ID NO: 12393 - protein, 323 aa, unidentified
  source 1..323: note = protein_030b853
  REGION 7..149: note = RuvC_domain
  SITE 10: note = RuvC_P1
  SITE 53: note = RuvC_P2
  SITE 88: note = RuvC_P3
  SITE 90: note = RuvC_P4
  SITE 93: note = RuvC_P5
  REGION 209..295: note = Tnp_domain
  SITE 217: note = Tnp_P1
  SITE 247: note = Tnp_P2
  SITE 255: note = Tnp_P3
  SITE 256: note = Tnp_P4
  SITE 268: note = Tnp_P5
MNTVALIGIDLGKHSFHLQAQDHNGRPLFRKQLSRPQLLRLLAQQPVCRAAMEACAGAHCLAREIQAQGHQPLLISPQFVRPFVQGNKNDFLDAQAICEAASRPNMRFVTPKTEVQQTLSVLHRLRESLIRDCTKSINQLHGFLLEFGISLPRGMVVMRRLATVLAEHRLPPRLVVLLQRLHAHFGYLDEQIKVLDRELVEHVEADDLGSRLLSIPGVGPITSSVLLTELGDARQYRSSRDFAASVGLVPRQHSTGGRQNLLGTSKRGDKNLRRLLADWVRALLCRRHSNVVACALANKLARIAWALAQGQGRFETGPDGCAA

SEQ ID NO: 12394 - protein, 343 aa, unidentified
  source 1..343: note = protein_183ad02
  REGION 6..147: note = RuvC_domain
  SITE 9: note = RuvC_P1
  SITE 52: note = RuvC_P2
  SITE 87: note = RuvC_P3
  SITE 89: note = RuvC_P4
  SITE 92: note = RuvC_P5
  REGION 211..296: note = Tnp_domain
  SITE 219: note = Tnp_P1
  SITE 249: note = Tnp_P2
  SITE 257: note = Tnp_P3
  SITE 258: note = Tnp_P4
  SITE 270: note = Tnp_P5
MQIRSVGIDLGKTTFHLVGLGDGGKVLLRRTFTQKQLLTFTANLQTSLIGLEACSGAHFLGRALRKQGHDVKLIPAQFVKPFVKSNKNDFLDAEAIAEAVDRQNMRFVPIKTDDQLDLQAIHRVRDRLISRRTAVINQLRAFLLERGMVFAKSPAKLRRELPDVLENADQNLTPRMRDLLALLWGEWKELEQQVEGLNREVEQIACTDAACQRLRQIPGIGPLIATAIVAAIGNGAAFRKGREFAAWMGLVPRQYSTGGKAKLFGISKRGNRYLRKILIHGARAAVIRLKRERAPMGSWMTALEARAPRNVLIVAMANKLARIAWAVLSTGEDYRALSSPTTA

SEQ ID NO: 12395 - protein, 337 aa, unidentified
  source 1..337: note = protein_43aef10
  REGION 6..148: note = RuvC_domain
  SITE 9: note = RuvC_P1
  SITE 52: note = RuvC_P2
  SITE 87: note = RuvC_P3
  SITE 89: note = RuvC_P4
  SITE 92: note = RuvC_P5
  REGION 211..296: note = Tnp_domain
  SITE 219: note = Tnp_P1
  SITE 249: note = Tnp_P2
  SITE 257: note = Tnp_P3
  SITE 258: note = Tnp_P4
  SITE 270: note = Tnp_P5
MSHSIYGIDLAKHSFSIHGEDHQGKVLIHKTITRSKVLETFANIPPAIIGMEACGASHYWARELAKLGHTPKIMASKYVAPFRTGAKNDLNDAFAICTAVIRPSTHFVRIKSADQQAILLLHRARDHWVHERTALLNQIRAMLAEFGIIAPKGRHALQTAIPEALEDGDNPLPDLARAIISDCFGHLLILNQRIADQEQCFDMLVSRSRQAKKIMKVAGIGPITATAVIASIGKGEQFDKGRDFAAWLGLVPSQYSTGGKPRLGRITKKGDRYLRTLLVHGARAVIASLGDKTDRLSLWCKSLVERRGFKRAIVALAAKNARIIWSLLRNDTEYQTI

SEQ ID NO: 12396 - protein, 372 aa, unidentified
  source 1..372: note = protein_eec513a
  REGION 8..155: note = RuvC_domain
  SITE 11: note = RuvC_P1
  SITE 59: note = RuvC_P2
  SITE 95: note = RuvC_P3
  SITE 97: note = RuvC_P4
  SITE 100: note = RuvC_P5
  REGION 224..310: note = Tnp_domain
  SITE 231: note = Tnp_P1
  SITE 262: note = Tnp_P2
  SITE 270: note = Tnp_P3
  SITE 271: note = Tnp_P4
  SITE 283: note = Tnp_P5
MREKLRCLGLDVHAETIAVAVAEPDGEVRSLGTIANREESIRKLIRKLGPADQLRACYEAGPTGFVLYWQLTQLGVECAVIAPTLVPKKAGDRVKTDRRDALKLARSHRSDDLTAVWVPDGDSESLRDLVRAREAAKQDQLRARHRLTKFLLRTGQRPPLGLKAWTEKYVEWIQQVHYTHPAREATLLDCLNEVQHMEQRVKRLEQSILEVVKLAPAPVQAVIQGLQALRGVAHISAVTIAAELGNISSRFENARKLMGYSRVFPSEDSSGQRIRRGSITKSGNAHLRRIVVESAWSYRHRPSIGARLRKRQEGVPAQITEIAWKAQNRLHKRYMKLMAAGKDQRKVMTAVGRELMGFIWAIGVKAEAACMQ

SEQ ID NO: 12397 - protein, 391 aa, unidentified
  source 1..391: note = protein_1414e0c
  REGION 4..163: note = RuvC_domain
  SITE 7: note = RuvC_P1
  SITE 60: note = RuvC_P2
  SITE 101: note = RuvC_P3
  SITE 103: note = RuvC_P4
  SITE 106: note = RuvC_P5
  REGION 266..353: note = Tnp_domain
  SITE 274: note = Tnp_P1
  SITE 304: note = Tnp_P2
  SITE 312: note = Tnp_P3
  SITE 313: note = Tnp_P4
  SITE 326: note = Tnp_P5
MIYAGIDVAKDKHDCFITNSNGEVLFKAFTIPNNRHGFDELYQKIESITDDLTNVKVGLEATGHYSYNILGYLLDKGLSTFVINPLHTNLYRKSLSLRKTKTDKVDAHTIATMLMSDVNLKSYSDTSYHNEELKSLTRYRFDKVKERAKLKSSVSRLVTILFPELEKLVPTLHMASPYMLLSEFPSASAIATSHLTRLTNLLSIASKGHYGKDTAILFREAARTSIGSHMPAKSLELKHTIKLIEELTAEIEEIEHEINTIMDNINSPILSIPGISYRMGAMIIAEIGDFSRFDSPDKILAYAGMSPSTYQSGQLESSYSHMEKRGSRYLRYALYNATKYVCHWDPAFAAYLEKKRTEGKHYNVAISHAAKKLVRVIYQLEKSKQLYIKAT

SEQ ID NO: 12398 - protein, 345 aa, unidentified
  source 1..345: note = protein_986f31d
  REGION 6..146: note = RuvC_domain
  SITE 9: note = RuvC_P1
  SITE 51: note = RuvC_P2
  SITE 86: note = RuvC_P3
  SITE 88: note = RuvC_P4
  SITE 91: note = RuvC_P5
  REGION 211..301: note = Tnp_domain
  SITE 219: note = Tnp_P1
  SITE 251: note = Tnp_P2
  SITE 259: note = Tnp_P3
  SITE 260: note = Tnp_P4
  SITE 272: note = Tnp_P5
MYRTKVGVDLAKKVIQVCIYRDKKVLSNEEMTPDEFLCWLIAAKPATIIFEACGTSNYWLQRAREAGHDARLICAKLVSVVRQNQKTDKNDALAIIQAALLPDITFISGKSAEQQQLQSIQRLRELAIKQRDASRKQIVSLLLLELNFRSPNSGTGMIGKIEDILEDAENGLSLEFRQAINAAKSQFECVVKTIATYDRSLEKSIQTHPDCKKLLKLEGVGPINAVNLYISLGCAELGTFSKGKDASACIGLTPIQHSSGGKVKLGTIGKCKNSMLRAQLITGAMAVVRAIVNREAKTQKEVWLKALAERRGNKCAAVALANKTVRTAYAMLTKGTEYKAELLAA

SEQ ID NO: 12399 - protein, 411 aa, unidentified
  source 1..411: note = protein_ba5d784
  REGION 4..160: note = RuvC_domain
  SITE 7: note = RuvC_P1
  SITE 57: note = RuvC_P2
  SITE 97: note = RuvC_P3
  SITE 99: note = RuvC_P4
  SITE 102: note = RuvC_P5
  REGION 274..360: note = Tnp_domain
  SITE 282: note = Tnp_P1
  SITE 312: note = Tnp_P2
  SITE 320: note = Tnp_P3
  SITE 321: note = Tnp_P4
  SITE 334: note = Tnp_P5
MNAVGIDVSKGKSMISVLRPLGITVAQPFEVPHTVLELNKLADYISRLDGESKVIMEHTGRYYEPIAHVIHNRGVFVSAVNPLLIREYGGNSLRRVETDKADARKIAKYGLDNWAELREYTPMDMIRYELKTLNRQFQLASKNRTACSNNLISLLDQSFPGVRGWFDSPVRKDGSQKWVDFTMTFWHMDCVRCVSQFAFVERYRKWCKRNGYNFDPVKAERIHLETKNMIALVPKSDTTKLLIQESAAQLTGISRMAEVLRAEMNRLAAQLPEYPVVMGMYGVGESLGPQLMAEIGDIRRFAGKQSLVAFAGVDPMPNQSGTKDVRSNRSSKRGSPYLRKTLFVIMTVLLQKAPADVPVYLFLDRKRSQGKPYYVYMTAGANKFLRIYYGKVRDYLASIDAVASSVQGNPQ

SEQ ID NO: 12400 - protein, 350 aa, unidentified
  source 1..350: note = protein_86372f5
  REGION 7..149: note = RuvC_domain
  SITE 10: note = RuvC_P1
  SITE 53: note = RuvC_P2
  SITE 88: note = RuvC_P3
  SITE 90: note = RuvC_P4
  SITE 93: note = RuvC_P5
  REGION 211..299: note = Tnp_domain
  SITE 219: note = Tnp_P1
  SITE 249: note = Tnp_P2
  SITE 257: note = Tnp_P3
  SITE 258: note = Tnp_P4
  SITE 270: note = Tnp_P5
MNKITTIGLDIAKNVFQLHGIDADGQVVLRKSLRRGQVRPFFEKLAPCLIGMEACATAHHWARTLIANGHDVRLIPPSYIKPYLRRQKSDAADAAAICEAVTRPSMRFVPVKSENQQATLMLHSARELLISQRTALINALRGHFAELGIVVPQGAHNARQLIAILEDDKGHTSQAVRIALGPLATALIEIKGQIAKLDKAILAAHRNDDVSLRLSTIPGIGPVIATCLSASVPDAKLFEGGREFAAWLGLVPRQHSTGGKPRLGSISKMGNRRMRKLLVVGAHAALYRMKNGKTQSPLAEWAQTLLAKKPFKLVAVALANKIARVAWAIMARNIQFQLDFVPDHRALTSV

SEQ ID NO: 12401 - protein, 402 aa, unidentified
  source 1..402: note = protein_f2b2148
  REGION 4..157: note = RuvC_domain
  SITE 7: note = RuvC_P1
  SITE 56: note = RuvC_P2
  SITE 94: note = RuvC_P3
  SITE 96: note = RuvC_P4
  SITE 99: note = RuvC_P5
  REGION 265..351: note = Tnp_domain
  SITE 273: note = Tnp_P1
  SITE 304: note = Tnp_P2
  SITE 312: note = Tnp_P3
  SITE 313: note = Tnp_P4
  SITE 324: note = Tnp_P5
MYFVGIDWADLHHDVAVLDEKGQELKYFTVPHKREGMEQLKQKLLSIDPDPESFACMVETKNGLLVQFLLEAGFPVYPLNPKVVDYRRKPSGAKSDPIDARLLANIGRSDLAQLKRLKPDAELIAELKMLTRDQDGLIQESTRLTNKLIACLKEYYPVALGFFSKPTLPVALEFYKCYPTLELVRKATVPEIAAFLKKHRHPRPNQTAISIWQKAHEPQLCARTPTVRAKCRLMLALVGQLEVVRKQIDAYDEEINRLFQLHSDSRIFASLPGAAGRLAPRLLAEWSDDRERYEDAAVVQALAGTSPVLFQSGKYRFARQRKSCVKPFRRAMHLFAFQSISQVPWAREYYDTKRSQGKTHHEALRALANIWVRVIFAMWKNRTCYDEATFIAARARHLNWAA

SEQ ID NO: 12402 - protein, 316 aa, unidentified
  source 1..316: note = protein_b5a2607
  REGION 5..153: note = RuvC_domain
  SITE 8: note = RuvC_P1
  SITE 52: note = RuvC_P2
  SITE 92: note = RuvC_P3
  SITE 94: note = RuvC_P4
  SITE 97: note = RuvC_P5
  REGION 188..274: note = Tnp_domain
  SITE 196: note = Tnp_P1
  SITE 226: note = Tnp_P2
  SITE 234: note = Tnp_P3
  SITE 235: note = Tnp_P4
  SITE 247: note = Tnp_P5
MTYFIGVDIGKHYFDASIDGQTGTKRFDNDEKGFKAFLKWIAPFEERHVAMEATGNYSMPLAIFLYEKDIHVSIINPAQIKYYAQAQLKRVKTDPEDAKVIADFCKTQSPKLWQPSRDLVARLQQWLGFKHLLEQQKLQLQNQMNSHMDEELKQIQAQQLAEFTQQIKQLDKRLKKWVKADEVLNRDVSLLETIDGIGTNSAMNMLASIEDIGRFDKAKQLACYAGLTPRIRRSGTSVNSSSISKTGNHKLRKALYMPAIAALRFNPVIKCFAQRLKQNGVTGKKMVVAVMRKLIHIVFAVLKSGKSFDREYEIRA

SEQ ID NO: 12403 - protein, 343 aa, unidentified
  source 1..343: note = protein_6965045
  REGION 6..150: note = RuvC_domain
  SITE 9: note = RuvC_P1
  SITE 54: note = RuvC_P2
  SITE 89: note = RuvC_P3
  SITE 91: note = RuvC_P4
  SITE 94: note = RuvC_P5
  REGION 213..300: note = Tnp_domain
  SITE 221: note = Tnp_P1
  SITE 251: note = Tnp_P2
  SITE 259: note = Tnp_P3
  SITE 260: note = Tnp_P4
  SITE 272: note = Tnp_P5
MKLNRIGIDLAKNVFQLHGVDRHEKAVFKRRLKRDQWLRVLWENTATDCVIGMEACGGAHHWARELQSRGYTVRMIPPQFVKPYVKSNKNDANDAEAICEAMSRPNMRFVAVKSVEQQDVQAIHRIRAEFMTHRTAKANQIRGLVTEYGIVAPQQMTSLRAAIPCWLEDAENGLTIRFRSLLHGLWEDLRRFDERVAELDAEIEVIAKTDPVAQRLQQLRGVGPLIATALVASVGNGQQYAKGRQMAAALGLTPKQHSSGNKERLGGISKRGDVYLRSILIQGARSVIGHAKHKEDRLSRWVTQLAQRRHTNVAAVALANKTVRMAWAMMRNESDYDPDFVVG

SEQ ID NO: 12404 - protein, 335 aa, unidentified
  source 1..335: note = protein_a04a096
  REGION 6..147: note = RuvC_domain
  SITE 9: note = RuvC_P1
  SITE 52: note = RuvC_P2
  SITE 87: note = RuvC_P3
  SITE 89: note = RuvC_P4
  SITE 92: note = RuvC_P5
  REGION 208..293: note = Tnp_domain
  SITE 216: note = Tnp_P1
  SITE 246: note = Tnp_P2
  SITE 254: note = Tnp_P3
  SITE 255: note = Tnp_P4
  SITE 267: note = Tnp_P5
MEVKTIGLDLAKNIFQVHGVDAAGEVSVTKRLRRSQMLEFFAGLKPCLVGIEACPTAHYWGRELTSLGHDVRLIPPQYVKPYVRRSKNDAADAAAICEAVARPSMRFVPLKDEMQQAALMLHRVRDLLVRQKVQLVSAIRAHAAEFGVIEAKGPQNVARLLAAVEASGVPDLARQLIRVLTEQLDAVEDQIAEVDRRIVSWHKSNETSRRLAGVPGIGTMTATAIAATVPDPSVFRGGREFAAWLGLVPRQNSSGGKARLGKISKQGNEHVRRLLIIGAQAALLCSKEVKANAWVQGMMARRPRMVVVVALANKMARIAWALMARRTQYGVAVAA

SEQ ID NO: 12405 - protein, 356 aa, unidentified
  source 1..356: note = protein_b1c56ad
  REGION 5..164: note = RuvC_domain
  SITE 8: note = RuvC_P1
  SITE 61: note = RuvC_P2
  SITE 102: note = RuvC_P3
  SITE 104: note = RuvC_P4
  SITE 107: note = RuvC_P5
  REGION 267..321: note = Tnp_domain
  SITE 275: note = Tnp_P1
  SITE 305: note = Tnp_P2
MVVSVGIDVSKDKHDCFILSSEGEVLADVFTIPNTMDGFNLLLQKIRECTTPQGKIKVGLEATGHYSYNLLGFLLDNGLATYVLNPLRTNLYRKSLSLRKTKTDRVDARTIAAMLLSDVGLKPYTDTAYHNGELKSLTRYRFDKVKERAKLKSSISRLVCILFPELEKLVPTLHMASVYALLEEFPGAKQIAAAHLTRLKALLETTSKGRYKRDMALEIRDAARISIGSWMPAKSLELQHTIRLIRELNAEITEIEQQIQSIMDELHSPITTIPGLGFRMAAMILAEVGDFTRFDSPDKLLAYAGMSPSTVWATQKLLPSHGKTWLQILTLCPLQCNQVCLSLGSNLCRLPCQKTG

SEQ ID NO: 12406 - protein, 341 aa, unidentified
  source 1..341: note = protein_85dfa92
  REGION 6..148: note = RuvC_domain
  SITE 9: note = RuvC_P1
  SITE 52: note = RuvC_P2
  SITE 87: note = RuvC_P3
  SITE 89: note = RuvC_P4
  SITE 92: note = RuvC_P5
  REGION 211..303: note = Tnp_domain
  SITE 219: note = Tnp_P1
  SITE 249: note = Tnp_P2
  SITE 257: note = Tnp_P3
  SITE 258: note = Tnp_P4
  SITE 270: note = Tnp_P5
MKLTTIGIDLAKNVFQVHGADDTGRAVLKKQLKRAQMLPFFARLTPCRIGLEACGSAHYWARKLQALGHTVQLIAPQYVKPFVKRNKNDAADAAAICEAATRPDMPTVPIKNAEQQAILSVHRARQGFVKARTAQANQIRGLLAEYGIVLPQGIGHIAQRVPAIIEDGENDLPGGFRLLIARLLDHLKELDRQVGELAVEIQLWHRQNAASQKLAAIPGLGPLSASAIAASVGDVRNFKNGRQLAAWLGIVPRQHSTGGKPTLLGISKRGDAYLRTLLIHGARAVIRIAERKPDADPWLKALLARRNKNVAAVALANKNARTIWALLAHDRQYDPHYAIVA

SEQ ID NO: 12407 - protein, 370 aa, unidentified
  source 1..370: note = protein_ae52bcf
  REGION 7..147: note = RuvC_domain
  SITE 10: note = RuvC_P1
  SITE 53: note = RuvC_P2
  SITE 88: note = RuvC_P3
  SITE 90: note = RuvC_P4
  SITE 93: note = RuvC_P5
  REGION 210..294: note = Tnp_domain
  SITE 218: note = Tnp_P1
  SITE 248: note = Tnp_P2
  SITE 256: note = Tnp_P3
  SITE 257: note = Tnp_P4
  SITE 269: note = Tnp_P5
MNDLIRIGIDTSKSVFVLHGVNAAEQPVLRRKLRRRQMPEFFAKLSPVQIGIEACGAAHYWARELVALGHEVRLLPPQYVKPYVQRGKNDAADASAICEAMSRPRMRFVPVKTGEQQAALMLVGVRDQLVARRTQLSNMIRGYAAEFGVTAARGLDKIEPLLARVAHEPGVPAQAKALFAALGEEFVALKPRLRKLEADLRSWHRGNELSRRLAEIPTVGPIGSALLTMKVTDPHAFRCGRDFAAWVGLTPKDHSTAGKQRLGVITRAGDEALRSVLVVGATALIQQARKGRGNPSPWLIGLMRRKPPKLVAVALANKTARIAWKLMVSGERHNERHARGGFVPPAGSLAPDARRQGRVAPPAAVACGQP

SEQ ID NO: 12408 - protein, 391 aa, unidentified
  source 1..391: note = protein_6e9acd6
  REGION 4..164: note = RuvC_domain
  SITE 7: note = RuvC_P1
  SITE 60: note = RuvC_P2
  SITE 101: note = RuvC_P3
  SITE 103: note = RuvC_P4
  SITE 106: note = RuvC_P5
  REGION 263..354: note = Tnp_domain
  SITE 270: note = Tnp_P1
  SITE 300: note = Tnp_P2
  SITE 308: note = Tnp_P3
  SITE 309: note = Tnp_P4
  SITE 322: note = Tnp_P5
MIYIGIDVASLKHDIIIIDDYGEIIKDHFTISNDRVGFKKLHTEIKSCMKSVNDIHIGMEETGIYHENLRDFLISKGFTVYTINPLLTSYSRKASSPRMTKTDKIDATAICRYIMNNIKGLHSYMPSLYHLDELKQISRNYHSKKQLLSRSKTELKRLLHISFPEFKIHFDPFSKWALEILNDYPLPINYSGLHTTTLASRLRTKSDRYNQAILLKQLAKDSIGKSNSSQAFLIRSIISDIIHYDKQIKVLKKTITTKLKLFPKITSVPGIGPINGATILGETGDIHRFNNKHAYFAYYGLDPIVYESGKYKLKKSKISKRGSRFLRTAAFSASRVACVGKSKQSNKFREKYYRMKKSGKHHNTIICAVSKNIIHSIYKILKDNIFYDDSK

SEQ ID NO: 12409 - protein, 331 aa, unidentified
  source 1..331: note = protein_6c3fa0c
  REGION 8..160: note = RuvC_domain
  SITE 11: note = RuvC_P1
  SITE 59: note = RuvC_P2
  SITE 97: note = RuvC_P3
  SITE 99: note = RuvC_P4
  SITE 102: note = RuvC_P5
  REGION 203..289: note = Tnp_domain
  SITE 210: note = Tnp_P1
  SITE 240: note = Tnp_P2
  SITE 248: note = Tnp_P3
  SITE 249: note = Tnp_P4
  SITE 262: note = Tnp_P5
MKNVNESAGIDVSKLTIDVHLFKKNKHHQFVNKSNGFKEMIQWIKKEGLVVEEVLFCFEHTGWYCLELSFFLHEIALKYTCVNPIEIKRSIGLKRAKTDKDDAGYLAHYAWLRREEIKQSVPPSQNIIELQRMMSLREQLVKQSVALKNLRTGMLQIVISREIDPSILILDQTIKELEQQTKNIEKEMELLIKSDTNLKENYLLSKTVKGVGKILAVQMLIHTHNYTRFLSWRQFSSYCGLVPYPYQSGTSIRGRNKIHSISDRKMKSLLSMSAISAIRSDKELKMYYEQRVKEGKPKMVVINIIRNKIVARVFSTVKRGTPYVELNKFTA

SEQ ID NO: 12410 - protein, 424 aa, unidentified
  source 1..424: note = protein_8423a0d
  REGION 16..180: note = RuvC_domain
  SITE 19: note = RuvC_P1
  SITE 73: note = RuvC_P2
  SITE 119: note = RuvC_P3
  SITE 121: note = RuvC_P4
  SITE 124: note = RuvC_P5
  REGION 298..384: note = Tnp_domain
  SITE 305: note = Tnp_P1
  SITE 335: note = Tnp_P2
  SITE 343: note = Tnp_P3
  SITE 344: note = Tnp_P4
  SITE 357: note = Tnp_P5
MIGGDFLNIQLNSIYVGIDVSKLSNQVFITDFNQSLSKSFSAPNNNHGAELIETNLINFLSDTLFTHVIVVLESTGIYSAHIATYLSASDKLLPYHIEVYCINPKISKNYRSSFADMDKTDPKDAFILADLARVGRTKSMNPFKGSQKLALQRLTRHRVHLVNLLTKEKNYVLTNIFLKFSEFGNKDFKFTSDTFSKTAISILEEYSSPEDIINTPFDDLVAFISKTSHNRFNNIIDVAELIKKAARASYRLDKAAYEPINFAISSSLVLVRCFEDEIKKIDKSIELLVKGFSHHEYLSLRSIPGIGPVFASGIISEIGSIHQFDSEESLAKYAGITWRKNQSGKFEADDTKMTKTGNHYLRYYLIQAGNSVKNNIPLYNDYYHKKFNEVTTHQHKRALALTSRKLIRLIYGLMSKGQLYNKNY

SEQ ID NO: 12411 - protein, 372 aa, unidentified
  source 1..372: note = protein_3d10b4b
  REGION 4..144: note = RuvC_domain
  SITE 7: note = RuvC_P1
  SITE 50: note = RuvC_P2
  SITE 85: note = RuvC_P3
  SITE 87: note = RuvC_P4
  SITE 90: note = RuvC_P5
  REGION 209..295: note = Tnp_domain
  SITE 217: note = Tnp_P1
  SITE 247: note = Tnp_P2
  SITE 255: note = Tnp_P3
  SITE 256: note = Tnp_P4
  SITE 268: note = Tnp_P5
MNVIGIDLGKMVFHLVTMDQDGKILSRKKLSRPQLLKHIATSPCSVVGMEASCGAHHLGRSFRAYGHEVRLIPAQFVRPFVKSQKNDYVDAEAIAEAVQRPTMRFVPIKTEDQLDLQAIHRVRDRLVLRRTSLVNQLRAFFLERGIALRTGRPRLRRMLPALLADAEQHLTPRMYRLLCLVAEEWRSVEEEIEKLDLEIATIASQDAACQRLLTVPGIGVLIATAIVAAIGNGAAFSRGREFAAWLGLIPKQCSTGGKPKLLGISKNGNEYLRRLLIHGGRSIQHRVARDHHAFGSWLTDLEARANTNVVAVAMANKLARIAWVVLNRQQEYRRQATAVENAGFGLSTVDTPASATGQGSPINSLRSALTGA

SEQ ID NO: 12412 - protein, 338 aa, unidentified
  source 1..338: note = protein_2932026
  REGION 7..149: note = RuvC_domain
  SITE 10: note = RuvC_P1
  SITE 53: note = RuvC_P2
  SITE 88: note = RuvC_P3
  SITE 90: note = RuvC_P4
  SITE 93: note = RuvC_P5
  REGION 212..298: note = Tnp_domain
  SITE 220: note = Tnp_P1
  SITE 250: note = Tnp_P2
  SITE 258: note = Tnp_P3
  SITE 259: note = Tnp_P4
  SITE 271: note = Tnp_P5
MNTIVIVGLDLAKIVFHAVCCDQHQQIVKKKMLKRGQLLKFINQLPPCLVGMEACAGAHYWGRQLRALGHQVKLIPPHFVTPLVQGNKNDFNDGLAIVEALGRPRIHFVEIKTIEQQDMQALYRMRQRCLKERTALCNQARGLLAEYGIVLPKGISFIRSRLPTILEDAANGLSVLFRRLLAHSYQQLKELDAHIDSYTLELKVLSQQDEACQRLQTIPGFGPIVSSVFRSVVGNGAAFRRGRDVSASLGLVPKQHSSGGKAVLRGISKRGDCYLRGLLIHGARAVMNQSARKQDPLSHWINRLKAERGVNRAVVALANKMARMGWAVLSTGTVYTQA

SEQ ID NO: 12413 - protein, 342 aa, unidentified
  source 1..342: note = protein_ad92078
  REGION 6..148: note = RuvC_domain
  SITE 9: note = RuvC_P1
  SITE 52: note = RuvC_P2
  SITE 87: note = RuvC_P3
  SITE 89: note = RuvC_P4
  SITE 92: note = RuvC_P5
  REGION 211..294: note = Tnp_domain
  SITE 219: note = Tnp_P1
  SITE 248: note = Tnp_P2
  SITE 256: note = Tnp_P3
  SITE 257: note = Tnp_P4
  SITE 269: note = Tnp_P5
MSIVILGVDLGKNACSVVGVDAAGAVIVRRSMRRQSLIDYVAKLPACVIAMEACCGAHHLGRLFKTGGHEIRLMSPEYVRPYVKAQKNDDRDAEGIAEAASRPTMRFVELKSQEQLDIQTLHRVRSRLVAERTNLINQLRAILLERGIIFPVGRRKLELGIDDVIADKGEVLSTRLHQLVGELRDEWKKLDEKIETLNGEFVALARNDPATRRLTSIPGIGVLNATALVAAVGDASSFAKARSGRWLGLVPRQHTTGGKPRLLGISKRGNTYLRTLLIHGARAALPSLSQSDTPLGRWLKAMIERGSHRNVVLVALANKLARIAWATLRKETDFDRGYPLAA

SEQ ID NO: 12414 - protein, 321 aa, unidentified
  source 1..321: note = protein_043c182
  REGION 6..153: note = RuvC_domain
  SITE 9: note = RuvC_P1
  SITE 58: note = RuvC_P2
  SITE 98: note = RuvC_P3
  SITE 100: note = RuvC_P4
  SITE 103: note = RuvC_P5
  REGION 193..283: note = Tnp_domain
  SITE 201: note = Tnp_P1
  SITE 231: note = Tnp_P2
  SITE 239: note = Tnp_P3
  SITE 240: note = Tnp_P4
  SITE 253: note = Tnp_P5
MSHFYLGIDVSKAKLDCSLRLSNGKFRAKVVPNSLEGFTALLTWLNAQKAESVQVCMEATGIYWEDVAQHLATNGLTVSVVNPAQIKAYGASRLTRSKTDTVDAKLIADFCAERKPSAWQPRCEAEVTLRALVLRLDALQTMRTQESNRLQVAREAVREDIQQHLNWLDTAIQQLIDAINDHIDRHPDLKQQRELLDSIPGIGERTSAIILAFYADTSRFANSRQAAAFAGLDPRQYESGSSIKGKPRLSKIGHSFLRKAMYMPAMVTLYKTAWGKQFRNRLACAGKPNKLIIGAMMRKLIHVAFGVLKSAKPFDSAIHLA

SEQ ID NO: 12415 - protein, 392 aa, unidentified
  source 1..392: note = protein_255c9e6
  REGION 5..163: note = RuvC_domain
  SITE 8: note = RuvC_P1
  SITE 62: note = RuvC_P2
  SITE 102: note = RuvC_P3
  SITE 104: note = RuvC_P4
  SITE 107: note = RuvC_P5
  REGION 267..356: note = Tnp_domain
  SITE 275: note = Tnp_P1
  SITE 305: note = Tnp_P2
  SITE 313: note = Tnp_P3
  SITE 314: note = Tnp_P4
  SITE 327: note = Tnp_P5
MEPVVGVDVAKGFSVVQAFLKRNEPCGKAMSISHEEGGFEQLGEILAELQTKTMHPPVVILEATGHYHRGLVAYLERSGWTYFIVNPLQAKRAKGTQLRKVKTDAADAWHLAEMYYRGDVTPHRTWDEGFTELQHVTRQHEFVTGMFVQAKLNMRALLDQVFPTYEKVFRNLFSVTSLHVLACCLEGQIENLHAVIQKCTRSSHSQKWTEAKMEQMKEALSYWKEQSRSRAQTSVLRGMVNLVLAFSDQLSELEKQMDELATCLPEVELVKSIPGIGDKLAAAIVAEIGDARQFKEAKQLVAFAGLDPGIFSSGKFTATSSRITKRGSKRLRRALYLAVQCGIRGRTNPRIRDYYDKKRKEGKPYKVVVIACANKLLHHVYAILRKKQPFQP

SEQ ID NO: 12416 - protein, 392 aa, unidentified
  source 1..392: note = protein_a84eb8b
  REGION 4..163: note = RuvC_domain
  SITE 7: note = RuvC_P1
  SITE 60: note = RuvC_P2
  SITE 101: note = RuvC_P3
  SITE 103: note = RuvC_P4
  SITE 106: note = RuvC_P5
  REGION 268..354: note = Tnp_domain
  SITE 275: note = Tnp_P1
  SITE 305: note = Tnp_P2
  SITE 313: note = Tnp_P3
  SITE 314: note = Tnp_P4
  SITE 327: note = Tnp_P5
MIYVGIDIAKDKHDCFITNSDGEVLFKSFTISNNREGFETLFQRIKSISDDLTKVKVGLEATGHYSYNLLGFLLDKGLTTCVINPLHTNLYRKSLSLRKTKTDKVDSHTIAAMLMSDLNLKSYSDISYHNEELKSLTRYRFDKVKERAKLKSSISRLVNILFPELEKLVPTLHMASIYAMLSEFPGASHVASAHLTKLANLFSQSSKGHYGKDTAILFREAARNSIGSVMPAKSLELKHTIKLIQELTTEIDEIETAIKQIMDEEIKSPILTIPGISYRMGAMILAEIGDFSRFDSADKILAYAGMSPSTYQSGQLDNCYSHMEKRGSRYLRYALYNATKYVCHWDESFGAYLEKKRSEGKHYNVALSHATKKLVRTIFAMEKSGQAYRVTV

SEQ ID NO: 12417 - protein, 402 aa, unidentified
  source 1..402: note = protein_2d9ff80
  REGION 4..160: note = RuvC_domain
  SITE 7: note = RuvC_P1
  SITE 57: note = RuvC_P2
  SITE 97: note = RuvC_P3
  SITE 99: note = RuvC_P4
  SITE 102: note = RuvC_P5
  REGION 274..361: note = Tnp_domain
  SITE 282: note = Tnp_P1
  SITE 312: note = Tnp_P2
  SITE 320: note = Tnp_P3
  SITE 321: note = Tnp_P4
  SITE 334: note = Tnp_P5
MNSVGIDVSKGKSMIAVMRPFGEVVCSPFVVSHSPSELSNLAKMLKSLDGETRVVMEATGNYHLPIAIALHEAGIYVSVVNAMLVHDYGNNTLRHAKTDKKDAIKLANYGLDRWLNLPRFSPEDKIRMQLKTCYRQYQQYSKIQTMQRNNFISLLDTVFPGVNYLFSSPVRGDGSEKWVDFVGTFWHCECVSELSQKVFEKKYQKWCLKHGYYFREAKALEIYTAACGAVGVMPRTETTQLLITRAVLQLRATSAALAELKKEMMRLAKSLPEYPIVQKMYGVGPTLGPQLMAEIGDVRRFHSKKALVAFAGIDAPPNDSGQIAGNHKAMSKIGSPALRRTLFLIMGVFLQKAPVDEPVYQFMDRKRAEGKPYRVYMMASANKFLRIYYATVRAYLNALEAA

SEQ ID NO: 12418 - protein, 344 aa, unidentified
  source 1..344: note = protein_bced576
  REGION 5..152: note = RuvC_domain
  SITE 8: note = RuvC_P1
  SITE 55: note = RuvC_P2
  SITE 92: note = RuvC_P3
  SITE 94: note = RuvC_P4
  SITE 97: note = RuvC_P5
  REGION 212..297: note = Tnp_domain
  SITE 220: note = Tnp_P1
  SITE 250: note = Tnp_P2
  SITE 258: note = Tnp_P3
  SITE 259: note = Tnp_P4
  SITE 271: note = Tnp_P5
MKQYAGIDVSLEYSSVCVIDADGRIVREAKVLSEPNALIVWFGEHGVAMERIGLEAGPLSQWLYTGMAKAGLAVELIETRHVRAAFKTMPVKTDKKDARGIAQLMRLGWFRPVHCKSLPAQEVRALLTARKLIQGKLHDIEMSIRGILRGFGLKVGPTTRRTYAARIRELIAGHPTLEAISASLLKVRDALADEFAGFERRLRAMARLDDNARRLMTTPGVGVLVALTFVAAVDAPERFRSSRAVGPHFGLTPKKYQSGETDYSGRISKTGDVGVRTALYEAANVILTRPVRGSDMKSWALAIARRAGPRKARVALARKLAVVLHRMLRDGTNFISHRAAATTA

SEQ ID NO: 12419 - protein, 343 aa, unidentified
  source 1..343: note = protein_ceace9f
  REGION 6..147: note = RuvC_domain
  SITE 9: note = RuvC_P1
  SITE 51: note = RuvC_P2
  SITE 86: note = RuvC_P3
  SITE 88: note = RuvC_P4
  SITE 91: note = RuvC_P5
  REGION 210..299: note = Tnp_domain
  SITE 218: note = Tnp_P1
  SITE 250: note = Tnp_P2
  SITE 258: note = Tnp_P3
  SITE 259: note = Tnp_P4
  SITE 272: note = Tnp_P5
MDNTIAGVDLAKDVIQVCVFTNKKVRSNSELTPSEFIDFLANSKSITVVFEACGTSNYWKQKAISFGHDARLISAQLVSAVRQNQKTDKNDALAIVQATLLPDVTFISGKSIEQQQLQSIMRLRELCVKQKTATGNQITSLLLEFNIKVSSRNGGLKGAIKSTLEDAENGLSFEFRTALNAAWNQYLLIAKSIDTYDDCLEKSMETHAECKKLLKLEGVGTLNAVNLYIALGCAELGVFEKGKDASACIGLTPIQYSSGGKTKLGSIGKYVKNSILRSQLITGAMSAVNHATKREAITTKDLWIQSMVERRGKKCTAVALANKTVRTAYAMLTQNTEYRAELI

SEQ ID NO: 12420 - protein, 339 aa, unidentified
  source 1..339: note = protein_3bcfd97
  REGION 14..160: note = RuvC_domain
  SITE 17: note = RuvC_P1
  SITE 65: note = RuvC_P2
  SITE 105: note = RuvC_P3
  SITE 107: note = RuvC_P4
  SITE 110: note = RuvC_P5
  REGION 206..293: note = Tnp_domain
  SITE 214: note = Tnp_P1
  SITE 244: note = Tnp_P2
  SITE 252: note = Tnp_P3
  SITE 253: note = Tnp_P4
  SITE 266: note = Tnp_P5
MSKSTNPQQTTVFCGIDVSAATLAVAVIEQDQPLQQREFANRASGHKALIGWLGKGKARARVSLEATGIYSLDLALALDAAPHIELAVLNPKMVNRFAQTLRRSKTDAADAAVLAEYSRRMPFLAWTPPSLNGLRLRALGRHIAALVAQHTREQNRLHAARSSRTVPGCVLQDLKRSLASLTRRIAKMRRAAMELIRADAEIEQRFRLLTGMPGIAQTSAVQILGELALLSPHLTVRQWVAHSGLDPVHQDSGTSVHKRSRISRAGNRHLRRALYMPALSAVRWDPHMKAFYEALQARHKTKLQAIIAVARKLLHAIYGIFRTRTPYDGSKLFPQLGIA

SEQ ID NO: 12421 - protein, 342 aa, unidentified
  source 1..342: note = protein_8867ad8
  REGION 7..149: note = RuvC_domain
  SITE 10: note = RuvC_P1
  SITE 53: note = RuvC_P2
  SITE 88: note = RuvC_P3
  SITE 90: note = RuvC_P4
  SITE 93: note = RuvC_P5
  REGION 212..298: note = Tnp_domain
  SITE 220: note = Tnp_P1
  SITE 250: note = Tnp_P2
  SITE 258: note = Tnp_P3
  SITE 259: note = Tnp_P4
  SITE 271: note = Tnp_P5
MFTIKTIGVDLAKNVFSIHSVDAYGKCVLRKTVKRNKLLDTFAKLPPCLIGMEACSGAHHWARELLKLGHNPKIMASKFVIPYRQNEKNDANDAEAICEAVSRPKTRFVSIKSEEQQAVLCLHRIRQGLIKTRTATINQLRGLLSEFGIVMPQGRYSAQNTIGSVLEDAENGLPILARELLQDLSNKIQNLNLEVLHYDRRVSALVREMASAKTLMDIPGVGEHSASAIVATVNDAKQFGSSRQFAAWIGLVPRQHSTGGHVHLGRISKRGEKHIRTLLIHGARAVIARCKEKTDHNSIWLNQLVERRGYKRAAVALAAKNARIIWALLTTGKEYKINYVNG

SEQ ID NO: 12422 - protein, 400 aa, unidentified
  source 1..400: note = protein_805d93b
  REGION 11..168: note = RuvC_domain
  SITE 14: note = RuvC_P1
  SITE 66: note = RuvC_P2
  SITE 106: note = RuvC_P3
  SITE 108: note = RuvC_P4
  SITE 111: note = RuvC_P5
  REGION 274..361: note = Tnp_domain
  SITE 282: note = Tnp_P1
  SITE 313: note = Tnp_P2
  SITE 321: note = Tnp_P3
  SITE 322: note = Tnp_P4
  SITE 334: note = Tnp_P5
MDETQRFRWFLGIDVSKETFDGCCINMKGERLFSLSTSMDRKGFEELIKQLCGLSVSMESVLVGMESTACYHVNLYSFLISLGYTVMVINPLLISHFVKLQLRKTKTDRKDATVIAQFLLLNRDSLSQTILSSDISDLRDLSRQRESLVDQMSSTKSEIKRLLTMTFPELEHISGIFNKSMLRLLCHYPSAASIKQAKRSKIAKILIPGSYGKQTDVSVDRILKAARVSVGTSSATKEIILRQKTSLLIQMEEHLQELTDILIELCEGKVQGEKDILTSMKGIGEKSAVNFLIEIGGDIKQFESHKKVIAMAGLDPAVYQSGKIDRKGKISKRGNRHLRRVIWIMTTKVIQFNERFKQYYLKRIKDGLPYKMAVLATAHKLIRVIFAMLRNQTLFDPRMN

SEQ ID NO: 12423 - protein, 341 aa, unidentified
  source 1..341: note = protein_75004d6
  REGION 7..149: note = RuvC_domain
  SITE 10: note = RuvC_P1
  SITE 53: note = RuvC_P2
  SITE 88: note = RuvC_P3
  SITE 90: note = RuvC_P4
  SITE 93: note = RuvC_P5
  REGION 209..291: note = Tnp_domain
  SITE 217: note = Tnp_P1
  SITE 247: note = Tnp_P2
  SITE 255: note = Tnp_P3
  SITE 256: note = Tnp_P4
  SITE 268: note = Tnp_P5
MNNVTIVAIDLGKHTFHLHAQDDRGHELYHKKFNRAGLARHLANLEPCTVAMEACGGAHYMAREAAKWGHVPKLIAPHLVRPYVKSNKNDFADAMAICEAASRPTMRFVPPKTEAQQALAMLNSVRDSYIKERTATVNRIHAALLEVGISLSPGFHAIKELPALLDECSFSVLIKQILLGLQAHFNYLDEQVKALDKQVERQAAEDDLASRLMTMPCVGPITSSVLAAELGSGQQFKCGRDYSASIGLVPRQYSTGDKTVLLGISKRGDRNQRRLLIQCARVYLMGLDRQTGVLADWVRQLLARHHSNHVVCALANKLARIAWSIAAHHDEFKAGPSAMNA

SEQ ID NO: 12424 - protein, 322 aa, unidentified
  source 1..322: note = protein_3fb7255
  REGION 9..157: note = RuvC_domain
  SITE 12: note = RuvC_P1
  SITE 56: note = RuvC_P2
  SITE 96: note = RuvC_P3
  SITE 98: note = RuvC_P4
  SITE 101: note = RuvC_P5
  REGION 195..279: note = Tnp_domain
  SITE 203: note = Tnp_P1
  SITE 232: note = Tnp_P2
  SITE 240: note = Tnp_P3
  SITE 241: note = Tnp_P4
  SITE 252: note = Tnp_P5
MSQPNQLCVGIDVSKATLDIAANSTIEQFSVGNDGDGFDTIIAELRKYTVALVLMEATGGLEAAVACALQAEGFEIAVVNPRQARDFARAMGYLAKTDRIDARVLSPMAEVLNRHPERERFIRALPDAERQVLAAMVVRRRQLITMLVAESNRLHPAHPQSRKSINIIIKALEDELARIDEDMRNHICIHFKELSERLSSIKGIGIMTVAALLAEVPELGRLSRREISALVGVAPVNRDSGTMRGRRTIFGGRAGVRTSLYMAALVAARFNPVIKMFYARLIAAGKPKKVALVACTRKLLTILNAMLRKNEEWNESYHHVAL

SEQ ID NO: 12425 - protein, 329 aa, unidentified
  source 1..329: note = protein_2a880d2
  REGION 7..156: note = RuvC_domain
  SITE 10: note = RuvC_P1
  SITE 59: note = RuvC_P2
  SITE 97: note = RuvC_P3
  SITE 99: note = RuvC_P4
  SITE 102: note = RuvC_P5
  REGION 200..287: note = Tnp_domain
  SITE 208: note = Tnp_P1
  SITE 238: note = Tnp_P2
  SITE 246: note = Tnp_P3
  SITE 247: note = Tnp_P4
  SITE 260: note = Tnp_P5
MEINEVIGIDASKLTLDCCIHNSGYQDVFTNNPKGIDKLLDWVSTHVIAKKEQILFVFENTGLYTIELTDVLHERRFFMYVASGLEIRRSLGIARGKDDKADAKRIALYGYRVRENVEPYCMPSIALAKLKRLMSIRRKLVVQHAGYMANLKEQKRVLSDNEILFNVQEKVMEVLYVQIKVVEKEMDRIIKDEPELARLQKLLTSIKGIGQVTARFLIIYTVGFTAFESWRKFASYVGIAPFPNRSGTSIKGRNKVSNLANKEGKALLHMCAVSAIQCSPEIKVYYERRLAKGKHKMSTLNIIRNKLLSRAFAVVVRGTPYVNTMKYAS

SEQ ID NO: 12426 - protein, 424 aa, unidentified
  source 1..424: note = protein_332478f
  REGION 23..183: note = RuvC_domain
  SITE 26: note = RuvC_P1
  SITE 81: note = RuvC_P2
  SITE 122: note = RuvC_P3
  SITE 124: note = RuvC_P4
  SITE 127: note = RuvC_P5
  REGION 290..376: note = Tnp_domain
  SITE 298: note = Tnp_P1
  SITE 328: note = Tnp_P2
  SITE 336: note = Tnp_P3
  SITE 337: note = Tnp_P4
  SITE 349: note = Tnp_P5
MKFKMQDKQNQLIERISDKHLVVGIDIAQQFHFARAVNFRGIVVGDPLTFENNEDGFTILLHWINKLKRTNNLDTALVGMEPTGHYWINLSKWLFEQNIDVVTVNPYHVKRNKENRDNTQSKSDKKDALVIADMVKNGYYSIVRPTSESFEELRVLMSNRDVIVKRLVSSINQLNRWVDVVFPELRQVFKDVKGKGAIATLRLFPTPMELRSIQPHNVVIGWKSLMKRQPGLKKAQLLIHLAKRSIGTRQALDAYKFHLQQLLEEYDLATTQLERVEQQVTEALKQIPYAHQLLTIKGISEISLAGILGEAGDLSGFSHGNSLLRHAGLHLAEASSGKWKGQIVISKRGRSRLRRFLYLATMSLVMNNPEFKSLHATNVKVKKIKKMNSIMKLVGKLARVFVGIAKRNESYRPEKLQPITSLAA

SEQ ID NO: 12427 - protein, 412 aa, unidentified
  source 1..412: note = protein_903fd3d
  REGION 4..170: note = RuvC_domain
  SITE 7: note = RuvC_P1
  SITE 67: note = RuvC_P2
  SITE 107: note = RuvC_P3
  SITE 109: note = RuvC_P4
  SITE 112: note = RuvC_P5
  REGION 278..364: note = Tnp_domain
  SITE 286: note = Tnp_P1
  SITE 317: note = Tnp_P2
  SITE 325: note = Tnp_P3
  SITE 326: note = Tnp_P4
MLFIGDDWAEDHHDVELVDDQGRILARRRLPEGLTGVTRLHALVAEHAPQEWADLEPAEAAAQVVVGIETDRGPWVGALVAAGYTVYGLNPMSVARYRERHSTSGAKSDTADAHLLAEIVRLDRAHHRRVAGDSATGEAVKVTARAHQSLIWDRTRHVLRLRSTLRDFFPAALAAFKDLDDPDTLVLLAQAPDPDTASRLSRAKIVRALTAANRRDVPARAEKIRQMLTAPELRQPGPVQDAYAAIVTSQVALISVLNAQIERLGQVVGEHFGRHRDADIYTSLPGLGVTLASRVLGEFGDDPHRYADAKARKAYAGTAPITRASGTRRVVLARYARNRRLGDALQQWAFCSMRGSAGARAYYKALRGRGVGHQAALRQLANRWVGILHGCLRYRTFYDENNAWQQHLDTAA

SEQ ID NO: 12428 - protein, 345 aa, unidentified
  source 1..345: note = protein_6feebac
  REGION 6..147: note = RuvC_domain
  SITE 9: note = RuvC_P1
  SITE 52: note = RuvC_P2
  SITE 87: note = RuvC_P3
  SITE 89: note = RuvC_P4
  SITE 92: note = RuvC_P5
  REGION 211..295: note = Tnp_domain
  SITE 219: note = Tnp_P1
  SITE 249: note = Tnp_P2
  SITE 257: note = Tnp_P3
  SITE 258: note = Tnp_P4
  SITE 270: note = Tnp_P5
MEIRTIGIDLGKTVFHLIGVNARGEVVVRKKCSRLQLLRFTSNVPACLIGMEACGGSHFLGRALREQGHDARLMPAQYVKPYVKTNKNDFIDAEACAEAVTRPTMRFVPIKTDDQLDLQSLHRVRERWMVRRTAVINQIRGMLLERGITVPKGRRHIEESLPGILEDPDNKLSGALRVLLRELRAEMQYLHGQIGECDKLIVRIAGELEDCNRLLAVPGIGPTIATATIAAIGNGAAFKKGRGFAAWLGVVPGEHSTGGKQKLTGTSRRGNKYLRKLFVQGAHAVLQFKTQQDPGLSAWLERLAARKRPQVTAVALANKMARMAWAVLYKGEAYRPPLAAQRVAA

SEQ ID NO: 12429 - protein, 397 aa, unidentified
  source 1..397: note = protein_09620de
  REGION 5..163: note = RuvC_domain
  SITE 8: note = RuvC_P1
  SITE 62: note = RuvC_P2
  SITE 102: note = RuvC_P3
  SITE 104: note = RuvC_P4
  SITE 107: note = RuvC_P5
  REGION 273..362: note = Tnp_domain
  SITE 281: note = Tnp_P1
  SITE 311: note = Tnp_P2
  SITE 319: note = Tnp_P3
  SITE 320: note = Tnp_P4
  SITE 333: note = Tnp_P5
MDPVIGLDIAKGESQVQAFLQRKHPYKKSFKFEHHLEGLDVFYKFYKEIEAETGKDPVVIFESTGHYHEPIVQFLEREKIVYIMVNPIISHGAKKSSMRKVKTDAIDASHLCELYYKEDLEPYHKKSIQVLNLRNLTRMHDAITSSYVQMKLQFLATLDQVFPEYKKVFSDTYSRVSLRTLYLFPTAEKVLNKDVNDLAEEMKGNCQKRSYKWALKKAEGLKEAALKDPFQKNLYDSNLVSLKMYINLLLEYQAHLSKLKDEIDTLANEIEDYHIIRSIPGVGDKIAATIISEIGEIERFSHPKKLVAFAGIDPRVHESGKFKATYNRITKRGSSRLRQILYSAVLCGLRNSRNSKLIAFYQKKREEGKPHKVAMIACANKLTQWIFYILKRKEDFR

SEQ ID NO: 12430 - protein, 346 aa, unidentified
  source 1..346: note = protein_64aede2
  REGION 7..149: note = RuvC_domain
  SITE 10: note = RuvC_P1
  SITE 53: note = RuvC_P2
  SITE 88: note = RuvC_P3
  SITE 90: note = RuvC_P4
  SITE 93: note = RuvC_P5
  REGION 211..299: note = Tnp_domain
  SITE 219: note = Tnp_P1
  SITE 249: note = Tnp_P2
  SITE 257: note = Tnp_P3
  SITE 258: note = Tnp_P4
  SITE 270: note = Tnp_P5
MKEIKVIGLDLAKNVFQVHGMDATGGKIVSKKLKRGEVLNWFAQQPPVLVGMEACGGAHYWAHEISRFGHTVKMMAPQHVKPYVQGNKTDARDAAAIAEAAQRESVPTVAVRDLAGQQMQALHRVRDLWMKQRVALSNQTRGLLAEFGQVMPLGLARLKTEVALWQARDEPAMVVLKELITQLMTAIGELDTKISQIEVQITQLHRSNAASRLIETIPGVGLLTATAVVASFGECAQFPRARQFASCLGITPREHSSGGKQTLLGISKRGNPYIRRLLVHGARSVLTARMNKPAYADDWAVKLAIRRGHNIAAVALAAKNARRIWAMLHTGEVFRADHAQAKPACA

SEQ ID NO: 12431 - protein, 401 aa, unidentified
  source 1..401: note = protein_f8209ef
  REGION 7..172: note = RuvC_domain
  SITE 10: note = RuvC_P1
  SITE 63: note = RuvC_P2
  SITE 103: note = RuvC_P3
  SITE 105: note = RuvC_P4
  SITE 108: note = RuvC_P5
  REGION 272..357: note = Tnp_domain
  SITE 280: note = Tnp_P1
  SITE 310: note = Tnp_P2
  SITE 318: note = Tnp_P3
  SITE 319: note = Tnp_P4
  SITE 330: note = Tnp_P5
MDPHLCVGVDVGYRTHRVGIAHPDGSLLEEFDISHSNAGFQEFFRRVEARRCKLSLPVAVAMEGYNGYARPLDRLVQEKGYRLYNVNNLKLARFKEVFPGAAKTDPIDTRKILELFRLKDQLPLAKDAIQEVVGAPAVNEKLKRLSRRRRHLVTEKMRVLNRMQADLQAVCPELLAATNDADNLWFLRLLTFRDDLRQLARLRRSTILQIPGVGQKYARLIRQWQAKAQFSGEVEYVGPMVIQDARRTLELRAQIHALDEAMADLAEQSEIARRLSTIPGFGKTSIAELAGEIGTLERFASEASLALYLGMCPLTRQSGQMCTARAPRQVNTRCKAAMMTTVARHIGCVPQSGVYYDRKRAEGKTHNQAIRSLGRHLVRVIWAMLRDGRDYEIREDTHPST

SEQ ID NO: 12432 - protein, 339 aa, unidentified
  source 1..339: note = protein_7f40ceb
  REGION 4..156: note = RuvC_domain
  SITE 7: note = RuvC_P1
  SITE 55: note = RuvC_P2
  SITE 96: note = RuvC_P3
  SITE 98: note = RuvC_P4
  SITE 101: note = RuvC_P5
  REGION 219..304: note = Tnp_domain
  SITE 227: note = Tnp_P1
  SITE 257: note = Tnp_P2
  SITE 265: note = Tnp_P3
  SITE 266: note = Tnp_P4
  SITE 277: note = Tnp_P5
MTMIGIDPHKATHTAVAVDDDENVIGEFTLEASSNQAERLTDWASVFVKREWAVESANGLGYLISQQLVAGGETVFDVPPVLASRVRLMGSGKSQKNDPNDARSIAIAALRSDRLAVVVPDDHVSVLRLLVKRHRDMARLRNRHCSRLHALLGELEAGGIGVKISVTNASELLDRIDVTDEASRYRVLVAREVVDDIARLDTTLKASKNRIADAVTASGTSLTDIVGVGPIGAATIIGYTKDVTRFPTKGHFATYNATAPIEASSGGNKRHRLNLRGNRILNHAIHIAAVTQLRHDTNGRIYYDKKIAEGKTSKEAIRALKRRISDAVYRRLIADTNNQ

SEQ ID NO: 12433 - protein, 375 aa, unidentified
  source 1..375: note = protein_9b3e68e
  REGION 16..164: note = RuvC_domain
  SITE 19: note = RuvC_P1
  SITE 68: note = RuvC_P2
  SITE 104: note = RuvC_P3
  SITE 106: note = RuvC_P4
  SITE 109: note = RuvC_P5
  REGION 250..336: note = Tnp_domain
  SITE 258: note = Tnp_P1
  SITE 289: note = Tnp_P2
  SITE 297: note = Tnp_P3
  SITE 298: note = Tnp_P4
  SITE 309: note = Tnp_P5
MSIVTDQTRSDNPIAGGVDTHAEVHVAAAIDRIGRELGHASFSTTAKGNRQLLDWLDTHGTVTIIGIEGTGAYGAGLTRTAAASGVTVVEVDRPDRKSRRFEGKSDPIDAYAAARAALSGRASGTPKSRDGNVEMIRVLRVARNSAIKASIAAKTQLKAIIKTAPEELRDDLRSLDRAALIDRCARFRPARGSTPAASPHAKRKPHHGRLADPTAATKHALRVLAHRVQALAQEINQIDDDLTMLVTETAPALVALFGVGPDVASQILTTVGDNPDRLHSSAAFAHLCGVAPIPASTGRTNRHRLNRGGDRSANAALYRVAMVRLRYDTRTQRYRDRLAANQKTNKDIIRCLKRAIAREIYQAIKTDFGISHDIS

SEQ ID NO: 12434 - protein, 343 aa, unidentified
  source 1..343: note = protein_fdcfd30
  REGION 4..160: note = RuvC_domain
  SITE 7: note = RuvC_P1
  SITE 57: note = RuvC_P2
  SITE 97: note = RuvC_P3
  SITE 99: note = RuvC_P4
  SITE 102: note = RuvC_P5
  REGION 274..343: note = Tnp_domain
  SITE 282: note = Tnp_P1
  SITE 312: note = Tnp_P2
  SITE 320: note = Tnp_P3
  SITE 321: note = Tnp_P4
  SITE 334: note = Tnp_P5
MNAVGIDVSKGKSMVAVMRPFGVVVLSPFEVSHSSSELSKLARLLKSLDGESRVVLESTGNYHAPVAKMLHDAGLYVSVVNAMLVHDYGNNSLRRAKTDKKDAVKLANYGLDHWLSLPRYVPEEDTRLLLKTCYRQYQQYTKVQTMLKNNLISLLDMIFPAVNRLFGSPARSDGSEKWVDFIDAFWHVQCVTALSMKAFGTKYLKWCRKHGYNFSEEKAAEIHAVAREHVAIMPKNDTTKLLVKQAVAQLRTVSAAKAAIQKEMEVLAASLPEYPVVMKMFGVGPKLGPQLMAEIGDVRRFHSKKALVAYAGIDAPPYQSGQMNVHSRSISKRGSPTLRRTLF

SEQ ID NO: 12435 - protein, 340 aa, unidentified
  source 1..340: note = protein_b1a4c58
  REGION 6..148: note = RuvC_domain
  SITE 9: note = RuvC_P1
  SITE 52: note = RuvC_P2
  SITE 87: note = RuvC_P3
  SITE 89: note = RuvC_P4
  SITE 92: note = RuvC_P5
  REGION 211..300: note = Tnp_domain
  SITE 219: note = Tnp_P1
  SITE 249: note = Tnp_P2
  SITE 257: note = Tnp_P3
  SITE 258: note = Tnp_P4
  SITE 270: note = Tnp_P5
MKHIPVGVDIAKHLMQVHFVDPHTGEVIDKQIKRDAFLEYFSNREFCLIGMEACGGSQYWACELEKLGHAVRLLQGKFVKAFVMGNKNDVTDARAIWMAVQQPGGKAVAVKNEEQQAVLSLHRMRRQLVKFRTAQINALHGMLLEFGEMVRKGRASLDKALPDVLERMKDKLPPFLICQIEDQHQRLSDIDTQIDGIEKQLIAWAKQNEDCQRIMKIPGVGPLIATAAVATMGEARAFRSGREFAAYLGLVPKQTGTGGKVKLLGISKRGDTYLRTLFIHGARAATLLTKEPNPWVTELMKRRPTSVAVVGMANKLARTVWAIVAHDRAYEKNHVSVRPL

SEQ ID NO: 12436 - protein, 277 aa, unidentified
  source 1..277: note = protein_d9d43bb
  REGION 2..84: note = RuvC_domain
  SITE 23: note = RuvC_P3
  SITE 25: note = RuvC_P4
  SITE 28: note = RuvC_P5
  REGION 147..237: note = Tnp_domain
  SITE 155: note = Tnp_P1
  SITE 185: note = Tnp_P2
  SITE 193: note = Tnp_P3
  SITE 194: note = Tnp_P4
  SITE 206: note = Tnp_P5
MELGHEVKLMPPTYVKAYLKRQKNDAADAEAICEAVTRPNMRFVLVKSAEQQGVLMLHRSRELLIRQRTMLINGLRAHLAEFGIVMRQGIAGVSTLMTLVEDYEHDLFPEIAREALLSLVAQLRDAYERISVIDRQILVWHRSNEESRRLETIPGIGPITASAMVATITDPTLFRSGRDLAAWIGLVPRQNSNGGKERLGHISKKGDSYLRRLLITGAIAMLRFAHKGQGGRTTQWAANLLSRKPYKVAAAALAIKMARIVWAVMTRQEEFRPRLAS

SEQ ID NO: 12437 - protein, 402 aa, unidentified
  source 1..402: note = protein_96c4ded
  REGION 4..160: note = RuvC_domain
  SITE 7: note = RuvC_P1
  SITE 57: note = RuvC_P2
  SITE 97: note = RuvC_P3
  SITE 99: note = RuvC_P4
  SITE 102: note = RuvC_P5
  REGION 274..361: note = Tnp_domain
  SITE 282: note = Tnp_P1
  SITE 312: note = Tnp_P2
  SITE 320: note = Tnp_P3
  SITE 321: note = Tnp_P4
  SITE 334: note = Tnp_P5
MNSIGIDISKGRSMVAAMRPFGEVVISPFEVHHTDSELSELAKLLKSLDGETRVVMESTGNYHAPVAQLLHDAGLYVSVVNAKLVHSYGNNDLRRVKTDRKDAVKLANYGLDRWLTLPRYIPEENTRLLLKNCYRQYRQYSKVQTVLKNNLISLLDTVFPNANRLFNSPARADGSEKWVDFVAEFWHCKCVCERSEKAFVNKYQRWCRKHGYNFSEDKAHAIYDEASGHIGVMPKAETTKLLVEQAVSQLRTTSAALAALKQEMHSLASQLPEYPVVMEMFGIGPTLGPQLMAEIGDVRRFYSKKALVAYAGIDAPPNDSGDVIGRHKSMSKVGASSLRRTLFLVMSIYLQTSPPDEPIYQFMDRKRTEGKPYRVYMMASANKFLRIYYATVKAYLESLEQI

SEQ ID NO: 12438 - protein, 288 aa, unidentified
  source 1..288: note = protein_af2a178
  REGION 1..121: note = RuvC_domain
  SITE 26: note = RuvC_P2
  SITE 66: note = RuvC_P3
  SITE 68: note = RuvC_P4
  SITE 71: note = RuvC_P5
  REGION 161..246: note = Tnp_domain
  SITE 169: note = Tnp_P1
  SITE 198: note = Tnp_P2
  SITE 206: note = Tnp_P3
  SITE 207: note = Tnp_P4
  SITE 218: note = Tnp_P5
MQNALNGWQQLAAHLTKADITRVGIEATGGYEHGVVAHLRQHGFTVLVLQPVQVKAYARMHLRRAKNDKIDAGTIAACTAALNQDQRQSDERLNDLAQNLTFVEQIEEDIARIKVRLEHIDQPRLRRVAEADIARLTKRRAAELERIAASLRTHDDFARRLDLVLSVPGIGERTAISLIVRMPELGRVSREEAAALAGLAPFDDDSGKHKGHRHIAGGRGRVRRSLYAAALPAAFRWNPALIALYKRLTAKGKAHNAALTACARKLLIYANAVLARNAPWIKNSASYL

SEQ ID NO: 12439 - protein, 346 aa, unidentified
  source 1..346: note = protein_fd2cae6
  REGION 6..147: note = RuvC_domain
  SITE 9: note = RuvC_P1
  SITE 52: note = RuvC_P2
  SITE 87: note = RuvC_P3
  SITE 89: note = RuvC_P4
  SITE 92: note = RuvC_P5
  REGION 211..299: note = Tnp_domain
  SITE 219: note = Tnp_P1
  SITE 249: note = Tnp_P2
  SITE 257: note = Tnp_P3
  SITE 258: note = Tnp_P4
  SITE 270: note = Tnp_P5
MKVTTVGVDLAKAVFAVHGVDGRGKVVFRKALKRTQVLTFFANLEPCLIGMEACGSAHHWARQLTALGHTVKLMAPQFVKPYVRTNKNDAADAEAICEAVSRPSMRFVPIKATESQAVLALHRARQGFVKARTAQGNQIRGLLAEFGLVIPQGLSHITKYIPRILEDAENDLPDTLRALIARLTAHLGELDRQVHELEAQIQAWHRQNADSQRLAAIPGIGPITATALVASIGDAKTFANGRQLAAWLGLVPRQHSSGGKPTLLGISKRGDVYLRTLLIHGARAVTRVPAGKARTDAWLKRLLDRRHKNVAAVALANKNARTAWALLVHGRDYRPDYTSSSTPVAA

SEQ ID NO: 12440 - protein, 410 aa, unidentified
  source 1..410: note = protein_6eba732
  REGION 5..168: note = RuvC_domain
  SITE 8: note = RuvC_P1
  SITE 65: note = RuvC_P2
  SITE 105: note = RuvC_P3
  SITE 107: note = RuvC_P4
  SITE 110: note = RuvC_P5
  REGION 276..362: note = Tnp_domain
  SITE 284: note = Tnp_P1
  SITE 315: note = Tnp_P2
  SITE 323: note = Tnp_P3
  SITE 324: note = Tnp_P4
MMLFIGDDWAEGHHDIEVQDDQGTRLVKARLPDSVEGLARLHAVVAEYSALADHEDGVVPEVVVGIETERGAWVHQLVASGYRVYAVNPMSAARYRERHSTSRAKSDAGDAHVLAEVVRLDRQHHREIAGDSEQVTALKVATRAHQSLIWDRTRHQLRLRSALMEYFPVLVTVFADLTGSDVLELLTRAGTPQQAASLTRPQVRAILKRAGRRNLDHRTSVVVDALRAPALRQPPAVEAAYGTVAATQAALITTLNAQISELEGVITEGFGRHPDADILSSQPGLGPVLGPRVLAEFGDDPDRFTSAKARKNYAGTSPITRASGKRRTVLARHVRNKHLADATGSWAFSALNASPGARAYYDTLRARDIGHQAAKRQLANRLVGILHGCLKTHTPYDETRAWPTATHPAA

SEQ ID NO: 12441 - protein, 343 aa, unidentified
  source 1..343: note = protein_c6f2d46
  REGION 6..148: note = RuvC_domain
  SITE 9: note = RuvC_P1
  SITE 52: note = RuvC_P2
  SITE 87: note = RuvC_P3
  SITE 89: note = RuvC_P4
  SITE 92: note = RuvC_P5
  REGION 211..303: note = Tnp_domain
  SITE 219: note = Tnp_P1
  SITE 249: note = Tnp_P2
  SITE 257: note = Tnp_P3
  SITE 258: note = Tnp_P4
  SITE 270: note = Tnp_P5
MDVSTIGLDIAKSVFQVHGIDAAGDVVVRRRLRRRQLVGFFEKLGPCLVGIEACATAHYWGREIAALGHEVRLMPAHYVKAYVKRGKNDAADAEAICEAVQRPTMRFVSLKNPEQQSMLMLHRTRELLVRQRTMLVNAIRGHMAEFGIVARVGLPQIKELLAVIADREDHRLPPGARACLESLGRQFLSLHEEICAADKHLHAWHRSNPVSQHLATIPGIGPVTASALAASIADPSVFKSGRELAAWIGLVPRQNSTGGKQRLGKISKQGDPYLRWLLVAGAMTVIRHAKRRGATNQPWLDDLIARRPTKVAAVALANKMARMAWALLRHGGAYRQPLVTASL

SEQ ID NO: 12442 - protein, 344 aa, unidentified
  source 1..344: note = protein_3600832
  REGION 7..149: note = RuvC_domain
  SITE 10: note = RuvC_P1
  SITE 53: note = RuvC_P2
  SITE 88: note = RuvC_P3
  SITE 90: note = RuvC_P4
  SITE 93: note = RuvC_P5
  REGION 212..300: note = Tnp_domain
  SITE 220: note = Tnp_P1
  SITE 250: note = Tnp_P2
  SITE 258: note = Tnp_P3
  SITE 259: note = Tnp_P4
  SITE 272: note = Tnp_P5
MNKYNIIAIDLAKNVFQVCKVSPQGKVLYNREKSRAKLKQLLTKEKLSLVSMEACSSAHYWARYAKEAGHQVKVINARSVKGFQTRQKTDRNDALAITTASSLDHIHSIRIQSVDEQAMQSMERARNLALTNQIAQSNQIRGLLLEFGIILPQGLAVLRKEIPYVLEDAENGLPDKFRAALLRLWEHLLIQIDHVDDLTKQLEKAIKANPLCQKLMKLEGVGPIGALGLALRLGKGENFSNGRNASASIRLTPKQHSSGGKERIGHISKRSADKRLRSTLFQGALSVITQVVNRLPRTNKDQWLLALIERRGKKIAAIALANKTVRTAYAILKNDLVYQPEKLA

SEQ ID NO: 12443 - protein, 320 aa, unidentified
  source 1..320: note = protein_c4e62c9
  REGION 6..146: note = RuvC_domain
  SITE 45: note = RuvC_P2
  SITE 85: note = RuvC_P3
  SITE 87: note = RuvC_P4
  SITE 90: note = RuvC_P5
  REGION 186..273: note = Tnp_domain
  SITE 194: note = Tnp_P1
  SITE 224: note = Tnp_P2
  SITE 232: note = Tnp_P3
  SITE 233: note = Tnp_P4
  SITE 246: note = Tnp_P5
MYEDFSINLYAYKVFRNSESGFVALTNWIKRLLKDQAREVHYVMEATGVYHQKFAYYLDDNQSKVSVVLPNRISNYIRTLELKTITDKTCSEAITRFGLERKLNYWKRPKDVYRELEQLTRERDQIVNERVVVKNQLHAEQTEAKPNLRSLERLESRIKFLNGQEKEIKVDIAEIVKVNSELKTEIERMISIPGIGALTAVIILAETNGFELIRNKKQLVSYVGLDVKEKQSGTSVKVKPKISKRGNKSIRKAMHFPALVAVKHDDNYRDSYARLVSKHGIKMKALVSIQRKLLELTYILYKNKTTYNKEYKNSVQTQMV

SEQ ID NO: 12444 - protein, 319 aa, unidentified
  source 1..319: note = protein_2072438
  REGION 6..125: note = RuvC_domain
  SITE 29: note = RuvC_P2
  SITE 64: note = RuvC_P3
  SITE 66: note = RuvC_P4
  SITE 69: note = RuvC_P5
  REGION 187..277: note = Tnp_domain
  SITE 195: note = Tnp_P1
  SITE 225: note = Tnp_P2
  SITE 233: note = Tnp_P3
  SITE 234: note = Tnp_P4
  SITE 246: note = Tnp_P5
MDRWRTAKLSRARLLGFLAARPRCVVAMDACASAHYWGREITALGHEVKLVPPVYVKPFVKRHKNDAADAEAITEAAQRPTMHLVEVKTEGQQARAMLFRTRDLLVRQRTQLINALRGHLAEFGVVAPQGPARIGQLAGALEDGDSGLPKAVVELGGLLLERIDELDERIDGLSIELRDSAREDEEAARLMTTPGIGPVTALAIQAFAPPMESFRRGRDFSAWLGLVPKQHTTGGKPRLGKISKMGQRDLRRLLVSGAMAVIQSAVRRGGTADPWLASMLERKPRKLVAVALANKTARIAWALSTKKEVYRVHTVAAAA

SEQ ID NO: 12445 - protein, 328 aa, unidentified
  source 1..328: note = protein_3d5c24a
  REGION 1..143: note = RuvC_domain
  SITE 50: note = RuvC_P2
  SITE 89: note = RuvC_P3
  SITE 91: note = RuvC_P4
  SITE 94: note = RuvC_P5
  REGION 192..278: note = Tnp_domain
  SITE 200: note = Tnp_P1
  SITE 230: note = Tnp_P2
  SITE 238: note = Tnp_P3
  SITE 239: note = Tnp_P4
  SITE 251: note = Tnp_P5
MAKEKFDVSFLRQSAKSAVGAPVHKVVSNTESSIRTFLKSVPAGSILVAEHTGVYGERLLKMCTDMNVKIAYVGGHVIHTYKAGPDRGKTDELDCSLLREFGERFTDRLRLATFPTEAIYELQQLSRQRTMLVEERKRVATADKAEECRPYRSETVRRSMRNLMDMLDEEIRDIEKAMLDIIGKDEGLSNSYDIITSVNGVGLVTAVELIVKTKNFTTIKTAKQYAAYAGTAPYEKSSGKMNRGAHISKWGNKRSKTLLYICAESARRYNKEIKLYYERRTIVDKKAHHYVLNAIANKLLKLVFTLIAKNEKYDPCYIQHDPRTFNKK

SEQ ID NO: 12446 - protein, 340 aa, unidentified
  source 1..340: note = protein_b742889
  REGION 7..149: note = RuvC_domain
  SITE 10: note = RuvC_P1
  SITE 53: note = RuvC_P2
  SITE 88: note = RuvC_P3
  SITE 90: note = RuvC_P4
  SITE 93: note = RuvC_P5
  REGION 209..293: note = Tnp_domain
  SITE 217: note = Tnp_P1
  SITE 247: note = Tnp_P2
  SITE 255: note = Tnp_P3
  SITE 256: note = Tnp_P4
  SITE 268: note = Tnp_P5
MEEVSIIGVDLAKQVIQVHGAGADCRALFRKKLSRPQFAKFMASHSPCIVAMEACGTAHYWGRELSRLGHDVRLIPPTYVKPFVKRHKNDAADAEAVAEAAQRPSMRTVPVKSAEQQARSMLFRTRSLLVGQRTQLVNALRGHLAEHGMVVGRGVGNVARLAAMLEEAEVPALVQEMSELYVAQIERIGAEVAALDRRIAATAKTSQDMRRLQTAPGIGPVCAMAITTFAPDMRAFRSGRDFAAWLGLVPRQLSSGGRQKLGRTSKMGQRDIRRLLIAGAMSIVHWRGRDGGRPGSWLSRMLAKKPRMLVAVALANKMARMVWAMLVRNEDYRDPAGAVC

SEQ ID NO: 12447 - protein, 342 aa, unidentified
  source 1..342: note = protein_ad5ef33
  REGION 6..148: note = RuvC_domain
  SITE 9: note = RuvC_P1
  SITE 52: note = RuvC_P2
  SITE 87: note = RuvC_P3
  SITE 89: note = RuvC_P4
  SITE 92: note = RuvC_P5
  REGION 210..295: note = Tnp_domain
  SITE 218: note = Tnp_P1
  SITE 248: note = Tnp_P2
  SITE 256: note = Tnp_P3
  SITE 257: note = Tnp_P4
  SITE 269: note = Tnp_P5
MYDTMIGIDLAKNVFQLHGASMMGEVKFRKKIGRVQFLRFMEAQPPCVAVMESCGSAHFWARELVKLGHAVKLIAPQYVRPFVKRQKNDAADAEAIVTAAQRPEMRFVEPKTEAQQARAILFRARERIVHQRTELVNALRAVLYEYGHVVPLGISHIKRIEAILDEIGNDLPQLVQEECRDLLAQIAEKTARIDDKTKKIGEVAKQTDIAQRLQTMPGVGPMTAMAVEAFAPAMRSFRRGRDFAAWLGLVPKQFSSGGKERLGRVSKAGQADIRRLLIIGAMSRITWMGRKRIADGSWLARMLARKPRMLVAIALANKMARAIWAMLAKGENYRVPASGMAV

SEQ ID NO: 12448 - protein, 437 aa, unidentified
  source 1..437: note = protein_ccf1ad3
  REGION 25..172: note = RuvC_domain
  SITE 28: note = RuvC_P1
  SITE 75: note = RuvC_P2
  SITE 111: note = RuvC_P3
  SITE 113: note = RuvC_P4
  SITE 116: note = RuvC_P5
  REGION 286..370: note = Tnp_domain
  SITE 292: note = Tnp_P1
  SITE 323: note = Tnp_P2
  SITE 331: note = Tnp_P3
  SITE 332: note = Tnp_P4
  SITE 343: note = Tnp_P5
MRRKKSKASKSVNLQSLPVIHPDAAGIDVGAKEHVVAVPCDRDERPVRTFQAFTPELHELAAWLKRRGVRSVALESTGIYWISLYEVLEQHGFEIRVVNARHVKNVPGRTKTDVLDCQWIQKLHSFGLLNGSFRPDQQIRKLRTYLRLRDNLVVSSTQAVHHMQKALFEMNIQLSNVISDIVGESGLRIIEAIIAGERDPEELAALCGTRIKASRQTVAKSLHGNWDEALLFCLQSALETYRFSQLKIQDCDGYIERHLAEFESRAQLPSSPKDLQAHLHRICGVDLTKIPGIKEQSAQIIISEVGLDMTKWNTEKQFSSFLGLCPNNSISGGKVLRRATRKVYNRAADSLRLCAQSLTHSKSALGAKYRRLRARLGAPKAVVAMAHHLARLVYRMLRYGDKYVEKGIEHYEKKLRQQRIKWLKKEASSLNLQLVVL

SEQ ID NO: 12449 - protein, 344 aa, unidentified
  source 1..344: note = protein_e92e3dd
  REGION 6..148: note = RuvC_domain
  SITE 9: note = RuvC_P1
  SITE 52: note = RuvC_P2
  SITE 87: note = RuvC_P3
  SITE 89: note = RuvC_P4
  SITE 92: note = RuvC_P5
  REGION 211..306: note = Tnp_domain
  SITE 219: note = Tnp_P1
  SITE 249: note = Tnp_P2
  SITE 257: note = Tnp_P3
  SITE 258: note = Tnp_P4
  SITE 270: note = Tnp_P5
MKITTVGVDLAKNIFQVHGVNEQGKAVLRKQLRREHLVAFFANLPSCLIGMEACGGAHHWARKLQSCGHTVRLMAPQFVKPYVKGNKTDAADAEAICEAVSRPSMRFVPLKNVEQQATLALHRVRQSFVKARTAQANQIRGLLSEFGFVVPRGIAFVLDRVPGVLEDPENALPDSFRALVARLLEHFKRLAEQVEETEESIKAWHRSSDMSRRLEKVPGIGPLTASALAATIGNARNFDNGRQLAAWLGLVPRQHSSGGKSTLLGMSKRGDAYLRTLLIHGARSVIYRARQSGNRESWLAKLVDRRNANVAAVALANKNARIVWALLARDLEFRPGYAHVRTAA

SEQ ID NO: 12450 - protein, 342 aa, unidentified
  source 1..342: note = protein_dc53461
  REGION 7..148: note = RuvC_domain
  SITE 10: note = RuvC_P1
  SITE 53: note = RuvC_P2
  SITE 88: note = RuvC_P3
  SITE 90: note = RuvC_P4
  SITE 93: note = RuvC_P5
  REGION 211..297: note = Tnp_domain
  SITE 219: note = Tnp_P1
  SITE 249: note = Tnp_P2
  SITE 257: note = Tnp_P3
  SITE 258: note = Tnp_P4
  SITE 270: note = Tnp_P5
MSEVTIIGIDLAKRVFQLHGARHNGSVAFRKKLSRVQLLAFIAQHPKCVIAMEACATAHGWGREFGKLGHEVRLIPPVYVKPFVKRQKNDAADAEAIVEAALRPTMRFVAVKTEVQQARAMLFRTRQMFVGQRTQMINALRGHLAEHGLVAARGPAHLKRLADAIADEDMALPDDVLELGRLYLEQIDGLTARVAELDGKMKRAATEANLARRAQTMPGVGPVTALAIETFAPDLATFKRGRDFAAWLGLVPKQHSTGGKARLGKTSKMGQRDIRTLLVSGAMAVLQAVERFDTPKNGWLKRLLTRKPRMVAAIAFANKMARALWAMLTKQEDYRNPVAELV

SEQ ID NO: 12451 - protein, 342 aa, unidentified
  source 1..342: note = protein_0bc314c
  REGION 6..148: note = RuvC_domain
  SITE 9: note = RuvC_P1
  SITE 52: note = RuvC_P2
  SITE 87: note = RuvC_P3
  SITE 89: note = RuvC_P4
  SITE 92: note = RuvC_P5
  REGION 210..295: note = Tnp_domain
  SITE 218: note = Tnp_P1
  SITE 248: note = Tnp_P2
  SITE 256: note = Tnp_P3
  SITE 257: note = Tnp_P4
  SITE 269: note = Tnp_P5
MSDTIIGVDLAKRVFQVHGATVTGHVIFRKKLAREQFRIFMAAQPACVIVFEACGSASYWAREMEALGHEARLIAPQYVRPFVKRQKNDATDAEAIVTAARQPEMRFVTPKTQEQQAKAVLFRGRERLVHQRTELVNALRAVLYECGHVFPIGLSHLKRIDALVKDPACDLPALIIAECQDLLLQIAAKTERIDVKTKTLKALAAKADTSRHLQTMPGVGPLTALAVEAFAPDMAQFKCGRDFAAWLGLVPRQRSSGGKERLGRISKAGQADIRWLLIIGAMTRIMGPARHKISANSWIGRMLARKPKMLVGIALANKMARQIWAMLSKKEDYRDPALATAA

SEQ ID NO: 12452 - protein, 322 aa, unidentified
  source 1..322: note = protein_8560622
  REGION 7..154: note = RuvC_domain
  SITE 10: note = RuvC_P1
  SITE 54: note = RuvC_P2
  SITE 94: note = RuvC_P3
  SITE 96: note = RuvC_P4
  SITE 99: note = RuvC_P5
  REGION 190..274: note = Tnp_domain
  SITE 198: note = Tnp_P1
  SITE 227: note = Tnp_P2
  SITE 235: note = Tnp_P3
  SITE 236: note = Tnp_P4
  SITE 247: note = Tnp_P5
MAMLSFCGIDVSKDRLDVMVLPEHQSFAVRNDASGWAELIARLRRFAIAAIGLEASGGYERGAMRALLAAGMPARRVNPLKLRQFARASGVLAKSDPLDARVIATFVAIMPTQPAQPRPPAIERLAEMLAVRRQLSAEKVAAENASALLEDAMLQRFSRRRIARLAADIDMLDHHLVEIVETDAALAHRYQLLTSMPGVGPALACTLIALLPELGTMSRKQVAALVGVAPYAFDSGKLKGRRCIWGGRAPVRQVLYMAAMSAGNWNPVLKAFRQRLKAAGKLPKVVIVAVMRKMITMLNAMVRDDVVWADHLHGRHTVPTAW

SEQ ID NO: 12453 - protein, 402 aa, unidentified
  source 1..402: note = protein_4d13e30
  REGION 4..163: note = RuvC_domain
  SITE 7: note = RuvC_P1
  SITE 59: note = RuvC_P2
  SITE 100: note = RuvC_P3
  SITE 102: note = RuvC_P4
  SITE 105: note = RuvC_P5
  REGION 277..364: note = Tnp_domain
  SITE 285: note = Tnp_P1
  SITE 315: note = Tnp_P2
  SITE 323: note = Tnp_P3
  SITE 324: note = Tnp_P4
  SITE 337: note = Tnp_P5
MIGVGIDVSKLKSTICITNEYGEVLKAPYEISHTEMDLKELTKQIKGYGGKNDVRVVMEATGSYSRPVLYYLLDEGIFVSEINPLAMKKYRADINFRGVKNDSIDAMAIAQYTIEKWNKLKEYQRADKEYAAMKALSRQYLSYMKPHVALVQNLDHLIDQVMPGIKKEFDGYDPVTGKDRLADFLEEFRHYDYITSLGPKKFDERFSKWAKKKGYRPRQNKSDKIYSLAKEGIPTLAYDPTSRLLVEQAVAALKGLNQVLYQILTQIRELAEKRPEYEAVRAMSGVGDVLAPLLVAEVGDPRRYHSGDALIACIGIDVPPYDSGQFKASDRKITRKGSKQLRKLGYLLVKNLRKIKPAKDTAVYDYYLKKKSEGKKDKQAIVAAMNKFFRIYYARSMEAYRS

SEQ ID NO: 12454 - protein, 341 aa, unidentified
  source 1..341: note = protein_8edbc3a
  REGION 1..150: note = RuvC_domain
  SITE 56: note = RuvC_P2
  SITE 94: note = RuvC_P3
  SITE 96: note = RuvC_P4
  SITE 99: note = RuvC_P5
  REGION 195..282: note = Tnp_domain
  SITE 203: note = Tnp_P1
  SITE 233: note = Tnp_P2
  SITE 241: note = Tnp_P3
  SITE 242: note = Tnp_P4
  SITE 255: note = Tnp_P5
MSKKTFDAVVYDVKAAGVQDCQHCRFDNNGDGFASFREWAVSSRGVRRGSVVVGMEDTGIYSTDLRVFLEDAGIDYCCFNALKLGMDMGRRRGKDDRTDAYRIGRYLYQNRDTLRPSRLEGGTVLKLRELAAERARLVKQAAMSKALVTDRKGRRPTAQVERAKKLIGYIEGLVKEVEQEMRATMEQDDEVRSNYGLLTSIKGVGPVNAMAVITSTDNFRAFSNARQYACYVGVAPFPYTSGTSVRGRTRTSKFANAGIKAVLSQAAKSAVVHNPELRAYFMRKTGEGKHYACVLNAVKFKLVCRMFAVIKRRLPYVADSNEYRIRIAMDDYTPARHINVS

SEQ ID NO: 12455 - protein, 344 aa, unidentified
  source 1..344: note = protein_43c1159
  REGION 4..157: note = RuvC_domain
  SITE 7: note = RuvC_P1
  SITE 55: note = RuvC_P2
  SITE 96: note = RuvC_P3
  SITE 98: note = RuvC_P4
  SITE 101: note = RuvC_P5
  REGION 219..304: note = Tnp_domain
  SITE 227: note = Tnp_P1
  SITE 257: note = Tnp_P2
  SITE 265: note = Tnp_P3
  SITE 266: note = Tnp_P4
  SITE 277: note = Tnp_P5
MITIGIDPHKASHTAVALDETGRVLAELRVAATKAMLVRLLHWAERWPERIWAIEGATGLGHLLAQQFVAREETVLDVPATLAARVRMLARGHGRKTDGIDAASVARVAQSQSDLRHVGPEDHSTVLRLLSDRRDELAKGRRTVINRLHRLLRDLHPGGAPTELSAEAASGLLGRIRPAGAVDLERKAMARALVADLRRIDRALVENRARCAADVAASGTTVTAIFGISDVLAAKILGHAGDVSRFRSADRFASYTGTAPIEVSSGEVARHRLSRSGNRSLNNALHLAARVQVMHPGPGRDHYERKLAEHKSSREALRSLKRQLAKVVYRHLVADRAHRLAIAS

SEQ ID NO: 12456 - protein, 338 aa, unidentified
  source 1..338: note = protein_b93e54f
  REGION 6..147: note = RuvC_domain
  SITE 9: note = RuvC_P1
  SITE 52: note = RuvC_P2
  SITE 87: note = RuvC_P3
  SITE 89: note = RuvC_P4
  SITE 92: note = RuvC_P5
  REGION 210..296: note = Tnp_domain
  SITE 218: note = Tnp_P1
  SITE 248: note = Tnp_P2
  SITE 256: note = Tnp_P3
  SITE 257: note = Tnp_P4
  SITE 269: note = Tnp_P5
MKTTTFGVDLAKRVFQVHWVDMDTGEINRRQLKREQLVTFFAKQAPALIAMEACGSAHYWARRFASFGHQVRLIAPSFVRPFVKRNKTDVADAQAIWEAAQRPEMRFVAVKSEAQQAVLTLHRVRAQLLKMRRMQINQTHGLLYEFGAAVHRGSHSMSDAARMLGELADALPAMVIDTLREQLQRIEALTRDIRAIEHRLAAWLRQDEGATRLAAIPGVGLLTATAAIATIGEASTFRSGREFAAFLGLVPRQSGTGGRVKLLGISKRGDVYLRTLLIHGARAVLSHPKHLSDALQRLLARRPFNVVVVALANKTARTIWALLAHARTYQSGYVAHAA

SEQ ID NO: 12457 - protein, 354 aa, unidentified
  source 1..354: note = protein_5777705
  REGION 4..160: note = RuvC_domain
  SITE 7: note = RuvC_P1
  SITE 57: note = RuvC_P2
  SITE 97: note = RuvC_P3
  SITE 99: note = RuvC_P4
  SITE 102: note = RuvC_P5
  REGION 274..341: note = Tnp_domain
  SITE 282: note = Tnp_P1
  SITE 312: note = Tnp_P2
  SITE 320: note = Tnp_P3
  SITE 321: note = Tnp_P4
  SITE 334: note = Tnp_P5
MNAVGIDVSKGKSTVTIRRPGDIVLMPPRDIPHTQSSINELIEIIRSLDGETKVCMEHTGRYYEPVATWLSDAGIFVSAVNPVLIKDFGDDSLRAPKTDKADSKKIARYTLDRWAKLKQYGNMDKTRNQLKNMNRQFGFYMSQKTAMKNNLIALLDQTYPGANGFFDSPARSDGSQKWVDFVYTYWHVDCVRSKSPDAFTQHYQNWCKRKGYNFSADKAEKNYQLSSDLNAVFPKDDSTKLLIRQAVAMLNTASEIVESLRLKMDETAATLPEYPVVMAMNGVGSTLGPQLMAEIGDVTRFTHRGALTAFAGVDPGKNDSGQRIQKSVLQPRRGRQACARLSSRSWMGLSGVPC

SEQ ID NO: 12458 - protein, 316 aa, unidentified
  source 1..316: note = protein_09c43cc
  REGION 8..152: note = RuvC_domain
  SITE 11: note = RuvC_P1
  SITE 55: note = RuvC_P2
  SITE 95: note = RuvC_P3
  SITE 97: note = RuvC_P4
  SITE 100: note = RuvC_P5
  REGION 190..274: note = Tnp_domain
  SITE 198: note = Tnp_P1
  SITE 227: note = Tnp_P2
  SITE 235: note = Tnp_P3
  SITE 236: note = Tnp_P4
  SITE 247: note = Tnp_P5
MEDVLTFVGIDVSKARLDVASHPAGATQSVANDETGIKTLVEQLRAIKPASIVLEATGGIERSVVRALVAAELPVTVANPRQVRDFAKATGQLAKTDVLDAQILARFAEAVRPVLRPLPDEMTLELRALIVRRRQITEMLTAEKNRLSRAPRRVQKRIEAHIRWLEGELERYDEDLDQTIRQSPIWREQEDLLKSVPGIGSVISRTMLAELPELGNLNRKQIAALVGVAPLNWDSGLMRGRRVIWGGRAHVRTALYMGALTASRRNPVIRDFYKRLRAAGKKPNVALVACMRKLLVILNAILKHRVPWRPVVAQIS

SEQ ID NO: 12459 - protein, 309 aa, unidentified
  source 1..309: note = protein_15fc173
  REGION 7..148: note = RuvC_domain
  SITE 10: note = RuvC_P1
  SITE 53: note = RuvC_P2
  SITE 93: note = RuvC_P3
  SITE 95: note = RuvC_P4
  SITE 98: note = RuvC_P5
  REGION 188..272: note = Tnp_domain
  SITE 196: note = Tnp_P1
  SITE 225: note = Tnp_P2
  SITE 233: note = Tnp_P3
  SITE 234: note = Tnp_P4
  SITE 245: note = Tnp_P5
MIHPDVIGCDIAKAHLDFYDSGLQRPLRIANTSPAIADWLDNLDRRPVLVVFEATGRYDRHLRLALEARGQPYCRVNPARARDFARATGLLAKTDAIDARLLARMGQSLQLPQQPPEEPARHALARLHTRRDQLVATRKQEKTRLHEADSFERGSIEDHVAWLDAEISRIERACREAMKANTDMQAQAASLRSIPGIGPIAALTLITQMPELGSRSAKAMAALAGLAPFNADSGTSRGKRHIKGGRKRVRDALYMAALTASRMPSAFKPYADRMASQGKAFKVIIIALARKLLTIANAITRDKTVYSKA

SEQ ID NO: 12460 - protein, 404 aa, unidentified
  source 1..404: note = protein_c6f6650
  REGION 4..159: note = RuvC_domain
  SITE 7: note = RuvC_P1
  SITE 59: note = RuvC_P2
  SITE 96: note = RuvC_P3
  SITE 98: note = RuvC_P4
  SITE 101: note = RuvC_P5
  REGION 267..353: note = Tnp_domain
  SITE 275: note = Tnp_P1
  SITE 306: note = Tnp_P2
  SITE 314: note = Tnp_P3
  SITE 315: note = Tnp_P4
MWYTGIDWADEHHDALTIDEKGHQMGSIRVDHSPHGFAKLDTFLGQIIGSESKEHMACMIETTHGLLIMHLLEAGWPVYPVNPRTVDRRRSASGAKTDLIDAYLLAKTGRADFADLHRLIPDSDKVAELKHLTRDQDSLIRTQTRLVNQLTACLKAYYPVALDLFSQLQQKSTLGFLQTYPTVEAARAASLTEIQQQLKQTRHPQPALAAASIVEMLHHPQLQADAVLTRTKSRLMLALVSQLLPLLEQIASYDKEIHTLFLTHEDHAIFESLPRAGQHLAPRRFSEIGDDRTRYQDASSLQALGGTSPVLYQSGMYSKAHRRLGCIKPLRNALHQFAWQTTQSEAWAKDYYQRKRMEGKSHTVAIRALANVWVRIIFAMWTRRECYQTATFELAQQQHARRAA

SEQ ID NO: 12461 - protein, 387 aa, unidentified
  source 1..387: note = protein_d4c0efe
  REGION 10..152: note = RuvC_domain
  SITE 51: note = RuvC_P2
  SITE 91: note = RuvC_P3
  SITE 93: note = RuvC_P4
  SITE 96: note = RuvC_P5
  REGION 262..351: note = Tnp_domain
  SITE 270: note = Tnp_P1
  SITE 300: note = Tnp_P2
  SITE 308: note = Tnp_P3
  SITE 309: note = Tnp_P4
  SITE 322: note = Tnp_P5
MKVRSKPLWTKENLSVEAEKVSHSLKGLDRLGQILIRLKEETGETPAIILEATGHYHRVLVLYLEREGYPVIVVNPLQAQKFRNTQLRKVKTDARDAWYLAEMYYREEWSPSRSQETNLADLQHLTRQHEFITGMYVQAKLNMRSLLDQVFPNYTSVFYHLYCKASLRVLSSCLSENWSSERNMGEIEERIGEGVCNSKSASWIRDKAERLALELDRNPIKETSIGQLVALQSIISLVLHFQEQLELLEERIKDIAESIPAVDLVKSMPGIGDKLAASIIAEIGDAKQFSNAKQLVAFAGLDPSVYSSGKFVATSSRITKRGSKRLRRALYLAVQCGIRGSRNPRIREYFDKKRGEGKPYKVVVIACANKLLHHIYAMLTRGQPYNG

SEQ ID NO: 12462 - protein, 339 aa, unidentified
  source 1..339: note = protein_f9b6f8a
  REGION 6..148: note = RuvC_domain
  SITE 9: note = RuvC_P1
  SITE 52: note = RuvC_P2
  SITE 87: note = RuvC_P3
  SITE 89: note = RuvC_P4
  SITE 92: note = RuvC_P5
  REGION 211..299: note = Tnp_domain
  SITE 219: note = Tnp_P1
  SITE 249: note = Tnp_P2
  SITE 257: note = Tnp_P3
  SITE 258: note = Tnp_P4
  SITE 270: note = Tnp_P5
MNRIVVGVDIAKRVFQLHWVEPETGEIVTLQLKREKFLEHFANRSTCVIGMEACGGAQHWARSLQKLGHEVKLLSARMVKPFVGGNKNDVADARGIWTAMQQPGIKVVAVKSEEQQAVLALHRMRAQLVKFRTAQSNGLRGLLTEYGEVMPQGRAGIKRDIPGALGRLSERLPAIVIDTLREQYARLGELDEQIDQIERRLRQWQRQDAAVQRIAAIPGVGLLSATAAIATMGDAKAFKSGREFAAWLGLVPRQSGTGGRVRLLGISKRGDKYLRTLLIHGARAVLTHSKSPPEWLRELAKRRPKNVAVVAMANKMARTIWALTAHERAYQSGYVSRPA

SEQ ID NO: 12463 - protein, 347 aa, unidentified
  source 1..347: note = protein_f667c3c
  REGION 6..148: note = RuvC_domain
  SITE 9: note = RuvC_P1
  SITE 52: note = RuvC_P2
  SITE 87: note = RuvC_P3
  SITE 89: note = RuvC_P4
  SITE 92: note = RuvC_P5
  REGION 212..312: note = Tnp_domain
  SITE 219: note = Tnp_P1
  SITE 249: note = Tnp_P2
  SITE 257: note = Tnp_P3
  SITE 258: note = Tnp_P4
  SITE 270: note = Tnp_P5
MSIATIGLDLAKQVFQLHCVDAQGKTVLSKQLSRQQLAPFFANLPSCLIGMEACGSAHFWARKLESFGHTVKLMASQFVKPYVKGSKTDMADAEAICEAVTRPNMRFVAIKLPEQQAMLAVHRARASFVKARTAQANQMRGLLAEFGIVMPLGLSTLRRRIPEVLEDAENGLPAMMRDLIQRLLNHLNELDQQVLEYDKVIMQWHRLNESSLRIAALPGVGPITATAIIASVADAKSFEDGRQLAAWLGLVPRQHSSGGKPVLLGISKRGDVYLRTLLIHGARAIIAHFERQRERADPWLQRMLGRCHRNVAVVALANKNARIIWALLAKDRRYEADYHAVSPVARP

SEQ ID NO: 12464 - protein, 346 aa, unidentified
  source 1..346: note = protein_a477f1d
  REGION 6..147: note = RuvC_domain
  SITE 9: note = RuvC_P1
  SITE 52: note = RuvC_P2
  SITE 87: note = RuvC_P3
  SITE 89: note = RuvC_P4
  SITE 92: note = RuvC_P5
  REGION 211..302: note = Tnp_domain
  SITE 219: note = Tnp_P1
  SITE 249: note = Tnp_P2
  SITE 257: note = Tnp_P3
  SITE 258: note = Tnp_P4
  SITE 270: note = Tnp_P5
MNITTIGIDLAKSVFQLHGIDSFGKVLIKKQIKRAQMAEYFVNLKPCLIGMQACGSAHYWARKLESFGHTVKLMPPQYVKPYVKTNKNDAADAEAICEAVTRPNMHFVPIKSTEQQAILSLHRMRQGYVKARTAQANQIRGLLAEFGLEIPQGIGYISKRVPDILEDASNELPGILRIEIQSLLEHLNELNTRADNCKKKILAWHKQSETSKKLEAIPGIGPLTATALIASIGEAKNFKNGRQVAAWIGLVPRQHSSGGKQNLLGISKRGDIYLRTLLIHGARSVIYRSGQKENPTDRQSWLNQLTQRRNKNVAAVALANKNARIVWAILHHNREYQDNHKMLVAA

SEQ ID NO: 12465 - protein, 334 aa, unidentified
  source 1..334: note = protein_fd56fc0
  REGION 7..149: note = RuvC_domain
  SITE 10: note = RuvC_P1
  SITE 53: note = RuvC_P2
  SITE 88: note = RuvC_P3
  SITE 90: note = RuvC_P4
  SITE 93: note = RuvC_P5
  REGION 208..294: note = Tnp_domain
  SITE 216: note = Tnp_P1
  SITE 246: note = Tnp_P2
  SITE 254: note = Tnp_P3
  SITE 255: note = Tnp_P4
  SITE 267: note = Tnp_P5
MEQVTTVGIDLAKRVFAMHGVAGSGRVVLRRVLRREQLMEVMASLPPCVVGMEAGSGAHQWARRFQELGHTPKLMAAKFVSAYRRNGKNDGNDAEAICEAVSRPGMRFVPVKSLEQQALLSLHRVRQGFIAERTATINRLRGLLAEFGVVLPQRSDTVRRQACKAAEDLPVLARRAIEDLLVHLRTLDERIAAYDRELQEQARQCEPAQRLMKIRGIGTLSASAIVATVGNARDFKSGRQFAAWLGLTPRQHSSGGKSRLGHITKHGDAYLRGLLVQGARSVLHTAPRHTDHMSQWVQAIESRRGYHRALVAIASKNARIAWALLSRNEVLRPA

SEQ ID NO: 12466 - protein, 351 aa, unidentified
  source 1..351: note = protein_3e06671
  REGION 6..148: note = RuvC_domain
  SITE 9: note = RuvC_P1
  SITE 52: note = RuvC_P2
  SITE 87: note = RuvC_P3
  SITE 89: note = RuvC_P4
  SITE 92: note = RuvC_P5
  REGION 211..300: note = Tnp_domain
  SITE 219: note = Tnp_P1
  SITE 249: note = Tnp_P2
  SITE 257: note = Tnp_P3
  SITE 258: note = Tnp_P4
  SITE 270: note = Tnp_P5
MKITTIGIDLAKEVFQIHGVDEYGKAVLRKQLRRGQMAEFFANLGPCLIGLEACGSSHHWARKLGGFGHTVKLMSPQFVKPYVKTNKHDMADAEAICEAVTRPNMRFVPIKTVEQQAILSVHRARQGFVKARTSQANQIRGLLSEFGIVIPQGIQSIGKRMPDILEDAENGLPGTMRRLLERLNDHLKELDRQVKELELQIKLWHKESEASQRLEAIPGVGPITASAIVATVGNATEFKSSRQLAAWLGLVPKQHSSGGKQLLLGISKRGDTYLRTLLIHGARAVIRFAEKKAEPESWLRKLITRRNKNVAAVALANKNARIIWALLTPRKRHFTPITLWQQLLRLIDREG

SEQ ID NO: 12467 - protein, 342 aa, unidentified
  source 1..342: note = protein_68ff599
  REGION 6..148: note = RuvC_domain
  SITE 9: note = RuvC_P1
  SITE 52: note = RuvC_P2
  SITE 87: note = RuvC_P3
  SITE 89: note = RuvC_P4
  SITE 92: note = RuvC_P5
  REGION 211..296: note = Tnp_domain
  SITE 219: note = Tnp_P1
  SITE 249: note = Tnp_P2
  SITE 257: note = Tnp_P3
  SITE 258: note = Tnp_P4
  SITE 270: note = Tnp_P5
MKITTIGIDLAKSVFQVHGVDERGKTVLKKQLKRAQMAGFFANLSPCLIGMEACGGAHHWARKLQGFGHTVRLMAPQFVKPYVKTNKNDAADAQAICEAVARPSMRFVAIKSVEQQAVLALHRARQGFVKSRTAQANQIRGLLGEYGLIIPQGIAHIAKRVPELIEDASNELPGAFRVLVDRLMDNLKGLDQQVAELEAQIKAWHRDSDASRRLEQVPGIGPITASALVASIGEAKNFDNGRQLAAWLGLVPRQHSSGGKATLLGISKRGDSYLRTLLIHGARSVILAARRKTAQGGWLQELLKRRNPNVAAVALANKNARIAWALLAHDRRYRADYAGAGA

SEQ ID NO: 12468 - protein, 350 aa, unidentified
  source 1..350: note = protein_e8b35c7
  REGION 6..148: note = RuvC_domain
  SITE 9: note = RuvC_P1
  SITE 52: note = RuvC_P2
  SITE 87: note = RuvC_P3
  SITE 89: note = RuvC_P4
  SITE 92: note = RuvC_P5
  REGION 211..295: note = Tnp_domain
  SITE 219: note = Tnp_P1
  SITE 249: note = Tnp_P2
  SITE 257: note = Tnp_P3
  SITE 258: note = Tnp_P4
  SITE 270: note = Tnp_P5
MKVTTIGIDLAKNVFQVHGVDEHAKTVIKKQLKREQMAAFFVNMPACLIGMEACSGAHHWARKLTAMGHTVRLMAPQYVKPYVKSQKNDAADAEAICEAVGRPNMRFVAIKTVAQQSVLALHTVRAGFVSERTALSNRMRGLLAEFGVVIPQGLSKLSSRLPEELEDASNELTGVVRLLMQDLLEQLKTLDALVKKIEKQIKVWSRQDEQACLIEQVPGIGPITASAMVASLGDVKNFEDGRQVSAWLGLVPRQHSSGGKTVLLGITKRGDSYLRTLLIHGARSAILAAQKRKDGPPPWLASLLGRKHPNVAAVALASRNARTVWALLAHKRDYDPKHGLDKRISAALAA

SEQ ID NO: 12469 - protein, 334 aa, unidentified
  source 1..334: note = protein_6efb8e4
  REGION 11..157: note = RuvC_domain
  SITE 14: note = RuvC_P1
  SITE 62: note = RuvC_P2
  SITE 100: note = RuvC_P3
  SITE 102: note = RuvC_P4
  SITE 105: note = RuvC_P5
  REGION 206..292: note = Tnp_domain
  SITE 213: note = Tnp_P1
  SITE 243: note = Tnp_P2
  SITE 251: note = Tnp_P3
  SITE 252: note = Tnp_P4
  SITE 265: note = Tnp_P5
MKKEKEIKESVGIDVSKLTLDVFIHTKRLHKQFLNNKKGFEGLLKWVKQETKNTEGVIWCFEHTGWYCVLLSHFMHENKQHYCCVNPIEIKRSMGLKRGKTDKQDAEEIARFAWLRKEELETSIPMPVKLIELQRLMSLREQLVKQSTALKSLSKGMQVTLEKKTGDLGIGIIKQSLKHMEVQIKKVEKAMQTLIKTEDQMQKNYKMSKSVKGVGNVLATQMLLHTHNYTRFETWREFSSYFGLVPFPYQSGTSIHRKPRNHSISDKKMKSLLSMSAISAIQSDKELKIYFKKRVEEGKPKMLVLNIIRNKIVSRIFATVKRGTPFVEMNKFAA

SEQ ID NO: 12470 - protein, 333 aa, unidentified
  source 1..333: note = protein_92e4647
  REGION 12..171: note = RuvC_domain
  SITE 15: note = RuvC_P1
  SITE 69: note = RuvC_P2
  SITE 109: note = RuvC_P3
  SITE 111: note = RuvC_P4
  SITE 114: note = RuvC_P5
  REGION 209..295: note = Tnp_domain
  SITE 217: note = Tnp_P1
  SITE 246: note = Tnp_P2
  SITE 254: note = Tnp_P3
  SITE 255: note = Tnp_P4
  SITE 268: note = Tnp_P5
MYKVSEEIMIVIGIDVSKDKLDVAWLRSLEPLKVKSKIIKNTPEGYTALINWVEYNTQQSINELHFVMEATGVYHEALAYHLFEARANVSVINPAKISDYGKSLGSRTKTDKKDSVVIVRYGVTQSPPLWQPEATEIRQLKALIARYDAIEKDIQREKNRLEKASVSQVSNEVIDSITTVLTELKKEQARLKKLIDDHIEQHPQLKQDRKFLESIPGVGPVISSYMIAMIRSRDFNAARQCSAYVGLNPIHRESGTSVRGRSHLSKAGSAKIRAKLYMAAVVATKYNPDIKAQYERLLNRGKSKMLAIGAAMRKLVQICFGVLKHQSPYQPQI

SEQ ID NO: 12471 - protein, 346 aa, unidentified
  source 1..346: note = protein_73bac5a
  REGION 6..148: note = RuvC_domain
  SITE 9: note = RuvC_P1
  SITE 52: note = RuvC_P2
  SITE 87: note = RuvC_P3
  SITE 89: note = RuvC_P4
  SITE 92: note = RuvC_P5
  REGION 211..295: note = Tnp_domain
  SITE 219: note = Tnp_P1
  SITE 249: note = Tnp_P2
  SITE 257: note = Tnp_P3
  SITE 258: note = Tnp_P4
  SITE 270: note = Tnp_P5
MKITTIGIDLAKEVFQIHGVDEHGKAVLRKQLRRSEMAKYFVNLEPCLIGMEACGSSHYWARKLAEFGHTVKLMSPQFVKPYVKTNKHDRADAEAICEAVTRPNMRFVPIKNVEQQAMLSVHRARQGFVKARTAQANQIRGLLSEFGIVIPQGIQSISKRIPGILEDAENGLPEIMRRLLERLNDHLRELDRQVNELEWQIKLWHKESEASRRLEAIPGVGPITASAMVATVGNATEFKDSRQLAAWLGLVPKQHASGGKQLLLGISKRGDTYLRTLLIHGARAVIRIAEKKAEPGSWLCKLIARRNKNIAAVALANKNARVIWALLTQKATFHPDHTMATTEAAH

SEQ ID NO: 12472 - protein, 402 aa, unidentified
  source 1..402: note = protein_15df0ae
  REGION 4..162: note = RuvC_domain
  SITE 7: note = RuvC_P1
  SITE 60: note = RuvC_P2
  SITE 101: note = RuvC_P3
  SITE 103: note = RuvC_P4
  SITE 106: note = RuvC_P5
  REGION 267..354: note = Tnp_domain
  SITE 275: note = Tnp_P1
  SITE 305: note = Tnp_P2
  SITE 313: note = Tnp_P3
  SITE 314: note = Tnp_P4
  SITE 327: note = Tnp_P5
MIYAGIDIAKSSHVIGAVDERGKNAAKPMRFANSAEGFGKCAAYLEGLGAPAEEMLVGMEATGHYWLPLFSFLHAQGYDVVVINPIRTDAMRRFKGSSRVKTDLVDCILIADTLRLGEFRPSKLGDESMVELRQLTRLHQGLKESVADLKRQVIVALDQVFPEYDSIFSDTFGESSKAFLRKCPTPEECRGVRVDALGNTLSRASRGKLGREKAEEIKGIAKESCGIDRGTRTLSFQIKLLVEQIDFIEGQIEEVEARIEEGIETTEPLILTIPGIGHVLGAQIASEIGDIHRFRNASAVVSYAGINPSVSQSGKFSSSENHITKQGSPYLRRALYLAATAQLRLSTPFRDYYDKERADGKSHREALIAVARKLVHVIYAVLSKQEPYRPDAVNANPVSRSE

SEQ ID NO: 12473 - protein, 337 aa, unidentified
  source 1..337: note = protein_5e354bc
  REGION 6..148: note = RuvC_domain
  SITE 9: note = RuvC_P1
  SITE 52: note = RuvC_P2
  SITE 87: note = RuvC_P3
  SITE 89: note = RuvC_P4
  SITE 92: note = RuvC_P5
  REGION 211..295: note = Tnp_domain
  SITE 219: note = Tnp_P1
  SITE 249: note = Tnp_P2
  SITE 257: note = Tnp_P3
  SITE 258: note = Tnp_P4
  SITE 270: note = Tnp_P5
MKPTLIGMDIAKQVFQLHALDPQSGQIERLKLKRAQVLEFFARRAPSIVVMEACGSAHDWARRLQQLGHDARLISARSVRPFVLRNKTDAADARAICTAAQQPDARFVAIKSEAQQAILAIHRMRAQLMKFRIMQTNALRGLLYEFGEALPESYRAFTKAFPATLAGVAERLPAILIDSLREQWNRVQATDKEIAVLERRLATAFRNNGDCQKVADIPGVGLLTATATVASIGDARTFKSGREFAAWLGLVPRQTGTGGRVRQMGLSKRGDTYLRTLLMHGARSVIIQGTRSAWIDGLLKRRPFNVAVAAVANKLARTIWAVLARTQGYQASPPAAA

SEQ ID NO: 12474 - protein, 317 aa, unidentified
  source 1..317: note = protein_39d8ef4
  REGION 10..163: note = RuvC_domain
  SITE 13: note = RuvC_P1
  SITE 55: note = RuvC_P2
  SITE 95: note = RuvC_P3
  SITE 97: note = RuvC_P4
  SITE 100: note = RuvC_P5
  REGION 190..277: note = Tnp_domain
  SITE 198: note = Tnp_P1
  SITE 227: note = Tnp_P2
  SITE 235: note = Tnp_P3
  SITE 236: note = Tnp_P4
  SITE 248: note = Tnp_P5
MTTITSQTVAGVDVAKTELVVYRADLQETLIVINELGPIKKWLRSLPKGSLIALEATSSYHIQTVELAHAMGHTLYVIDGYRLSNYRKGTGGRSKTDFSDARLLARYLTNELEDLRPWSPPPKGFSKLQGLMRKRSQLVQIKVALNQSWADEPMLKRQLKELLAVIAKVDTQIQKMLHTLIEEAGLTSQVRRCEGIEGVGPLTAAALATSFSRGDFKSSDAFIAFLGLDLRVSDSGQKTGRRRLSKRGDSEPRRLLHNASMAASRSDIWKPVYERYLARGLKATQVYVIMARKIARVAFALMKNQSEYQPAGMEGVA

SEQ ID NO: 12475 - protein, 400 aa, unidentified
  source 1..400: note = protein_2078869
  REGION 4..160: note = RuvC_domain
  SITE 7: note = RuvC_P1
  SITE 57: note = RuvC_P2
  SITE 97: note = RuvC_P3
  SITE 99: note = RuvC_P4
  SITE 102: note = RuvC_P5
  REGION 275..362: note = Tnp_domain
  SITE 283: note = Tnp_P1
  SITE 313: note = Tnp_P2
  SITE 321: note = Tnp_P3
  SITE 322: note = Tnp_P4
  SITE 335: note = Tnp_P5
MNAVGIDVSKGKSTVAVIQPFGVVIAEPFDVFHTDSGLKELVNFIKSLPGETKVVMEYTGTYYEPVANALHNAGIFVSVVNPLLIDDYDTNRVRKVKTDRIDALKIASYVLDKWMNLRKYEPAETVRKTLQIMNRQCIKLNKILVMQKNSLIALLDCSFPNANTLFTSPHRESDGHEKWVDFVVKFPHVDSVAKLSLSAFKTKYQSWCKKEHYNYSESKAEQIHAYARTIVNTLPMTDAVKKMVSDAAKHLNSTLEALGTLHSEMDALASQLPEYETVMNLFAVGKVTGSQLIAEIGDVTKLKSGKSLVALAGIDPPPNQSGKDDPKSRRISKRGSSALRKTLFLIMTIYLQQQPAEEPVYQFLDKKRTEGKPYKVYMIAAARKFLRIYYARVKEVMPKE

SEQ ID NO: 12476 - protein, 344 aa, unidentified
  source 1..344: note = protein_ab93afe
  REGION 7..149: note = RuvC_domain
  SITE 10: note = RuvC_P1
  SITE 53: note = RuvC_P2
  SITE 88: note = RuvC_P3
  SITE 90: note = RuvC_P4
  SITE 93: note = RuvC_P5
  REGION 212..301: note = Tnp_domain
  SITE 220: note = Tnp_P1
  SITE 250: note = Tnp_P2
  SITE 258: note = Tnp_P3
  SITE 259: note = Tnp_P4
  SITE 271: note = Tnp_P5
MTEVITIGVDLAKNVFQVHGVDVEGAVVVSRQLRRSQVLPFFKKQPLCLIGMEACATAHHWARQLIELGHEVKLMPPHYVKPYVKRNKNDAADAAAICEAVTRPTMRFVSVKSMEQQSVLMLHRTRNLLIRQRTMLINAIRAHMAEFGIVAPTGVPQLKKLLNIIADTDDGRLPTVARTCLESLAKQFLSLHEEIYRAEQHILAWHRSNEVSRRLETIPGIGPIIASALAASITDPEVFKNGRELAAWIGLVPRQNSTGGKQRLGKISKQGDQYLRWLLVAGAMSVILHAKRRGATNLPWLANIVARKPAKVAAVALANKNARIVWALLRQGGTYQKPATVSAT

SEQ ID NO: 12477 - protein, 347 aa, unidentified
  source 1..347: note = protein_bc70432
  REGION 9..151: note = RuvC_domain
  SITE 12: note = RuvC_P1
  SITE 55: note = RuvC_P2
  SITE 90: note = RuvC_P3
  SITE 92: note = RuvC_P4
  SITE 95: note = RuvC_P5
  REGION 214..303: note = Tnp_domain
  SITE 222: note = Tnp_P1
  SITE 252: note = Tnp_P2
  SITE 260: note = Tnp_P3
  SITE 261: note = Tnp_P4
  SITE 273: note = Tnp_P5
MNVTTKAVVGVDTAKSVFQVYTVEQETGEVINKPVKRAQFLQWFANRTPCLVGMEACGGSQHWARELRKLGHEVKLMSGKMVKAFVCGNKNDAADARAIYMAAKQPEVRSVAVKSEGQQAVLAMHRIRQQLVKIRTAQINQLRGVLAEYSEVFGLGRKAFDTGLKAALERLAERLPVLLIDLLRDQWNELARLDERIARIEAALLAWLRQDHAARAISAIPGVGLLTATAAVAAMGDAKAFRSGREFAAWVGLVPGQTGSGGKVRLLGISKRGDTYLRTLLIHGARAVLHARETGPWLKQLSQRRPPNVVIVALANKIARTIWAVLAHERAYAKDHVSLRPHAVAAT

SEQ ID NO: 12478 - protein, 345 aa, unidentified
  source 1..345: note = protein_7252828
  REGION 7..147: note = RuvC_domain
  SITE 10: note = RuvC_P1
  SITE 53: note = RuvC_P2
  SITE 88: note = RuvC_P3
  SITE 90: note = RuvC_P4
  SITE 93: note = RuvC_P5
  REGION 210..297: note = Tnp_domain
  SITE 218: note = Tnp_P1
  SITE 248: note = Tnp_P2
  SITE 256: note = Tnp_P3
  SITE 257: note = Tnp_P4
  SITE 269: note = Tnp_P5
MEQVSRIGMDTSKHVFQFHGVDASEEAVLRRKLRRKEMVAFFEKLAPTVVAIEACGASHHWARLLRSFGHEVKLIAPQLVKPYVKRGKNDAADAEALCEAMSRPTMRFVPVKTAEQQAALMLMGLREQLVASRTQLSNAIRGYAMEFGLTAAQGKAHLEPLLERIQADDSLPVLARELFAIQAEGYRRLQAQIDEVDAKLAAWQKSDECSQRLIKIPGVGPIGAALLKMKTPAPELFKSGRQYAAWIGLTPKDHSTAGKVRLGVITRAGDETLRSVLVVGATAAIQQAQRHGKASPWLAALLKRKPPKLVAVALANKMARIAWKLMVTGQSYAARSAPAALAAAA

SEQ ID NO: 12479 - protein, 407 aa, unidentified
  source 1..407: note = protein_50a0179
  REGION 4..161: note = RuvC_domain
  SITE 7: note = RuvC_P1
  SITE 57: note = RuvC_P2
  SITE 98: note = RuvC_P3
  SITE 100: note = RuvC_P4
  SITE 103: note = RuvC_P5
  REGION 276..363: note = Tnp_domain
  SITE 284: note = Tnp_P1
  SITE 314: note = Tnp_P2
  SITE 322: note = Tnp_P3
  SITE 323: note = Tnp_P4
  SITE 336: note = Tnp_P5
MISIGIDIAKEKFTACALEQGSKIIWKPFDVNLNKPEVEGFLNKLKDLNQEIKIVMEATGKYHLPILYELKKQGYFVAVINPLKMKQFCRVLNFRKAKNDNIDATQIAEYGLMYWKELQEHKVDTENFRTLKELNRSYQHYMDLRINQMNFIDQTISQTFPGIKKLISHGSKDFSKDKLLDFLETWWHKDLVLEKTEEKFIEDFKNWAKEKRYHPNADKAKSIYKLAEESISTQPSNSSYIKMNLQEGIELIKHINQILYNILSQMIEIAEPLEEYQEAKKFSGISDKLAVQITAEFGDLSKFKNKKCLISFVGIDSPPYESGNFKADQRKITKRGNAILRKIGYQSMKCMMSVKNPENEIYLYMLKKEKDGKAKKVCKFAGLNKFLRIYYAKVMASKQEKEALKVA

SEQ ID NO: 12480 - protein, 393 aa, unidentified
  source 1..393: note = protein_d6e2861
  REGION 33..175: note = RuvC_domain
  SITE 36: note = RuvC_P1
  SITE 86: note = RuvC_P2
  SITE 119: note = RuvC_P3
  SITE 121: note = RuvC_P4
  SITE 124: note = RuvC_P5
  REGION 243..326: note = Tnp_domain
  SITE 249: note = Tnp_P1
  SITE 279: note = Tnp_P2
  SITE 287: note = Tnp_P3
  SITE 288: note = Tnp_P4
  SITE 300: note = Tnp_P5
MKKFNAQQTIETQVSTATLRGCLGSEERHGFYVGLDVHKETIAVAVAEPGRAAVHYWGEIKHAPKAVCKLVPQLSEQYGGVLMLWCYEAGPCGYGLYRQLLSLGQDCEVVAAPRSDRIKTDRCDACKLRAGELTRVRVPGEEQEAMRDLSRCRLDFKSQERKARQQLNAFVLRHGHHWPRGKTRWTRGHWNWLESLTFPHPWQQVVLQEYCEAVRAATRRVNDLTAELMSALVQWSLAPVVDSMVALRGVDKIAAITLLAELGDLTQFSSPKQLMGYLGLVPSEHSTGTRRRQGGITLMGNAHARRMLVEAAWSYRFPARQTMHLKRKAQQASSSEAKVIAWQAQAQRRLCGRYRTLVHAGKCTKVTCVAIARELVGFIWAIVCLEMPKLRLQ

SEQ ID NO: 12481 - protein, 402 aa, unidentified
  source 1..402: note = protein_a42049c
  REGION 16..174: note = RuvC_domain
  SITE 19: note = RuvC_P1
  SITE 72: note = RuvC_P2
  SITE 112: note = RuvC_P3
  SITE 114: note = RuvC_P4
  SITE 117: note = RuvC_P5
  REGION 278..365: note = Tnp_domain
  SITE 286: note = Tnp_P1
  SITE 316: note = Tnp_P2
  SITE 324: note = Tnp_P3
  SITE 325: note = Tnp_P4
  SITE 338: note = Tnp_P5
MVSDFMKGRYNLMIYVGIDIAKLNHFASAISSDGEILMEPFKFTNDGDGFSLLESNLASICDDKDNIIIGLESTAHYGDNLVRYLVASFYKVCVLNPIKTSTMRKNNIRKTKTDKVDTYIIAKTLMLQESLRFVTFYDLDLMDLKQLGRFRQKTIKQRTRLKIQLTSYIDQVFPELQYFFKSGLHQKSVYALLKEAPTPKAIASMHMTHLANLLKVNSHGHFTKEQAKELRVLAQKSVGASDSALSIQITHTISQIELLDSQLEQVEAEMTDIMKFNDSVIMTIPGIGYINGGMILGEIDHVHRFSNPNKLLAFAGLDPSVYQSGNFQARRTKMSKRGSRVLRYALINAAHNVVKNNATFKTYYDKKMAEGRSHYNALGHCAGKLVRIIWKMMTDNVEFNLD

SEQ ID NO: 12482 - protein, 404 aa, unidentified
  source 1..404: note = protein_d6ed952
  REGION 4..160: note = RuvC_domain
  SITE 7: note = RuvC_P1
  SITE 57: note = RuvC_P2
  SITE 97: note = RuvC_P3
  SITE 99: note = RuvC_P4
  SITE 102: note = RuvC_P5
  REGION 270..356: note = Tnp_domain
  SITE 278: note = Tnp_P1
  SITE 309: note = Tnp_P2
  SITE 317: note = Tnp_P3
  SITE 318: note = Tnp_P4
MIFVGVDWAEAHHDVCVLDRDGEVLARTKIPDTLEGVRALHELVAPLAEEPHEVVVGIEKDRGLIVTAMLGAGYRVYALNPMSVARYRERHVTSGSKSDPGDAKVVADVVRTDRHNHREAKGDSDGVDALKVIARAHQSAIWSRQREKNALRNALQDYYPGALRAFGTELDSGDALEVLRVAPTPALGAQLSLAKITSALRRGGRERNLERTAKKIQAALREEQLRERPRVEAAFGTITAAHVAMIRAYGDTIAELEAALREDFEQHPDAAVVLSLPGLGTVLGARVLGEFGDAPNRYADAKSRRNYAGTSPVTKASGKSKVVLARHSRNARLSAALDQWAFCSLKNSTGARTYYDELRARGKTHRQAIRQLANRLVGILHVCLEHHVVYDENLAWKHRVDIAA

SEQ ID NO: 12483 - protein, 416 aa, unidentified
  source 1..416: note = protein_b4786de
  REGION 4..160: note = RuvC_domain
  SITE 7: note = RuvC_P1
  SITE 57: note = RuvC_P2
  SITE 97: note = RuvC_P3
  SITE 99: note = RuvC_P4
  SITE 102: note = RuvC_P5
  REGION 274..361: note = Tnp_domain
  SITE 282: note = Tnp_P1
  SITE 312: note = Tnp_P2
  SITE 320: note = Tnp_P3
  SITE 321: note = Tnp_P4
  SITE 334: note = Tnp_P5
MNAAGIDVSSRKSTVTVLRPFGEVVKLPFDVRHNAEDLAALAAQLKSIEGETRVVMEHTGRYYESVAKVLHEAGLYVSAVNPLLIKEYGNNSLRKVKTDKADAMKIAKYALDNWAELRDYTPMDTIRYDLKTLNRQFQLASRQKTATANNLIALQEQSFPGIRKLFDSPVRSDGTQKWVDFTHDFWHVDCVRGGSQNAFTERYRKWCKRNRYQFSTEKATEVYALAKSAVVLVQKTSVTKTLVQEAANQLTAISRSVETYRSEMNKLASQLPEYPVVMEMYGVGESLGPQLMAEIGDVRRFERKQSLVAFAGVDPAPSESGDYCSRSNKTTKRGSPYLRKTLFNIMTVHLQLAPADEPVFQFLNKKRAEGKPYYVYMTAAGNKFLRRYYGKVMAYFSTLEGLPPVDMDSTGLHHAE

SEQ ID NO: 12484 - protein, 397 aa, unidentified
  source 1..397: note = protein_12638d1
  REGION 9..163: note = RuvC_domain
  SITE 12: note = RuvC_P1
  SITE 60: note = RuvC_P2
  SITE 100: note = RuvC_P3
  SITE 102: note = RuvC_P4
  SITE 105: note = RuvC_P5
  REGION 270..355: note = Tnp_domain
  SITE 278: note = Tnp_P1
  SITE 308: note = Tnp_P2
  SITE 316: note = Tnp_P3
  SITE 317: note = Tnp_P4
  SITE 329: note = Tnp_P5
MDPTYAVFCGIDVGKGEHHAVGLDPAGTRLFDKALPNDETKLRAVFDRLAEHGSVLVIVDQPNTIGALPVTVARACGHAVAYLPGLTMRRVADLYPGQAKTDARDAFIIADTARTMPHTLRRVDVGDEALAELEVLVGFDDDLAGEATRISNRIRGLLTGIHPALERVLGPRITHPAVLEILSRCGGPVGIRQAGKRRLTALATKHAPRMGARLAEEVLVALDAQTVTVPGSNAAEIVLPKLADSLKEVLQQRKSIAEDVERMLEGHPLSQVLMSMPGVGIRTAARILLEVGDGSAFASAAHLAAYAGIAPVTHRSGSSIRGEHPARSGNRKLKRALFLSAFASLHDPTSRAYYDRKRAEGKKHNAALICLARRRCDVLYAMLKNKTFYRTPAAAAA

SEQ ID NO: 12485 - protein, 362 aa, unidentified
  source 1..362: note = protein_0f2f54d
  REGION 32..167: note = RuvC_domain
  SITE 35: note = RuvC_P1
  SITE 70: note = RuvC_P2
  SITE 106: note = RuvC_P3
  SITE 108: note = RuvC_P4
  SITE 111: note = RuvC_P5
  REGION 230..315: note = Tnp_domain
  SITE 238: note = Tnp_P1
  SITE 268: note = Tnp_P2
  SITE 276: note = Tnp_P3
  SITE 277: note = Tnp_P4
  SITE 289: note = Tnp_P5
MVRPVLPQHHLAVTPKEVAISLRNAPRPAAVYGVDIGKNIFHVVGADSGGEPVQRARFRRDTLLQFFARAAPAAGSQWIARRLQALGHKVRLIPAQFVKPYVKSNKSDIIDAEAIAEAATRPTMRFAAIKSEEQADLQALHRVRDQMIGTRTRLINQMRAFCLEYGIALRQGAGLFKLDLPLVLDDASNDLSPAMRKLLTDLFADLRRLEQRIGDVTREIAAIADREDVARRLMTIPGIGALGATALLAAVGNGRQFQKARDLAAWLGLVPREHSTGGKQKLLGISKRGNRYVRKLLVHGARSCFRHLDRTRDRLGSWLDGLQSRMHPNKAVVALAAKMARIVWVVLTKPGALYERRNPAFA

SEQ ID NO: 12486 - protein, 326 aa, unidentified
  source 1..326: note = protein_ff9e636
  REGION 4..158: note = RuvC_domain
  SITE 7: note = RuvC_P1
  SITE 61: note = RuvC_P2
  SITE 101: note = RuvC_P3
  SITE 103: note = RuvC_P4
  SITE 106: note = RuvC_P5
  REGION 201..287: note = Tnp_domain
  SITE 209: note = Tnp_P1
  SITE 238: note = Tnp_P2
  SITE 246: note = Tnp_P3
  SITE 247: note = Tnp_P4
  SITE 260: note = Tnp_P5
MNVIGIDVSKAKLDCLWIRDLSTLKVKSKVHPNTPKGYQALLDWAMRETGEAPAGLHFVMEATGVYHEALAYALHDAGAQVSVVNPARVRDFARSLGVQSKTDKKDSVVIARFGLMQSPPPWVPEAAEIRQLKALIARCDAVKADIQREVNRLEKATASDAPTAVRASIETVRSQLEQERRRLESLIDDHIDKHPGLKKDRALLESIPGVGPVIAQQMVAVIRSRPFTRASQCAAFLGVVPVAHQSGTSVYSPPRLSKRGDGRVRRKLYMAAIVATLHNPDIRCQYARLLRAGKSKKSAIGAAMRKLVQICFGVLKHQAPYSPQLA

SEQ ID NO: 12487 - protein, 350 aa, unidentified
  source 1..350: note = protein_d508af7
  REGION 7..147: note = RuvC_domain
  SITE 10: note = RuvC_P1
  SITE 53: note = RuvC_P2
  SITE 88: note = RuvC_P3
  SITE 90: note = RuvC_P4
  SITE 93: note = RuvC_P5
  REGION 210..296: note = Tnp_domain
  SITE 218: note = Tnp_P1
  SITE 248: note = Tnp_P2
  SITE 256: note = Tnp_P3
  SITE 257: note = Tnp_P4
  SITE 269: note = Tnp_P5
MEQITRIGMDTSKNVFQLHGVNASELPVLRKKLSRREMVKFFEKMPPTTVALEACGGSHHWARLLSSFGHEVKLIAPQLAKPYVKRGKNDASDAEALCEAMSRPTMRFVPVKTADQQAALMLVGVRERLIRNRTQLANAIRGFAMEFGVIAAKGICRIEPLLERIATDQSLPELARELFAMQGEEYRELLAEIKTVDGQLMALHRADECSKRLAEIPGVGPIGASLLMMKTPDPAMFESGRDFAAWIGLTPRDHSTAGKVRLGVITRAGDEMLRSVLVAGATAVLQPVRTGRSKNASPWLLELLQRKKPKLVAVALANKIARIAWKLMVSGEAYRRQPQDIPQEAAALAA

SEQ ID NO: 12488 - protein, 411 aa, unidentified
  source 1..411: note = protein_824a0a4
  REGION 4..166: note = RuvC_domain
  SITE 7: note = RuvC_P1
  SITE 63: note = RuvC_P2
  SITE 103: note = RuvC_P3
  SITE 105: note = RuvC_P4
  SITE 108: note = RuvC_P5
  REGION 276..362: note = Tnp_domain
  SITE 284: note = Tnp_P1
  SITE 315: note = Tnp_P2
  SITE 323: note = Tnp_P3
  SITE 324: note = Tnp_P4
MLLIGDDWAEDHHDVEVQDGDGRKLAVAKLPEGVEGIAKLHELVAKHGGKDEGLLDAAEVVVGIETDRGSWVQALIASGYQVYAINPRQVARFKERYASSGAKSDKGDAHALADMVRIDRDQLRPIAGDSEQAQAVKVVARAHQTLIWERTRTFQRLRSTLREYFPAALNAYADLTLTSTDALELLIKAPTPAAGAKLTRTQITTVLARARRHHRDAKAATIQAALRERQLGLAEPVTAAYAATATAHARLLIALNEQIAGLEGQVKAHFLKHPDAEIYLSMPGIAEITGARVLAEFGDDPTRYANAKARKNYAGTSPITRASGKSHTVQARYVRNNRLADALQTQAFSALRASPGARRYYDKQRAREAGYNPALRQVGNRLVGILHGCLKTRTRYDEATAWSHHAHPHAA

SEQ ID NO: 12489 - protein, 366 aa, unidentified
  source 1..366: note = protein_ab58fc2
  REGION 21..165: note = RuvC_domain
  SITE 24: note = RuvC_P1
  SITE 69: note = RuvC_P2
  SITE 104: note = RuvC_P3
  SITE 106: note = RuvC_P4
  SITE 109: note = RuvC_P5
  REGION 228..313: note = Tnp_domain
  SITE 236: note = Tnp_P1
  SITE 266: note = Tnp_P2
  SITE 274: note = Tnp_P3
  SITE 275: note = Tnp_P4
  SITE 287: note = Tnp_P5
MKKHTTKTDLSPTDVSACSTVAVDLAKNIFQIAGENPLGQVIYEQRIKTRDSFQAFLLTLPAGVTVLMETGPGAQAWARLLQARGNPVRILPAQRVAEHRSGAKNDRNDVLAILRAGRDLKILAVPIKSTAQLAMQALHRARQGYVRRRTAMGNQMRGLLLEHGIALAQGEVSLSRNVPGILEDATHPLPELLRELIAELLGEWSQLGERITVLTGRLEAAAREDETAKRLMTIRGIGPIIATALLAKQTEPERFANARQFAAYFGTVPDQHSSGQKVRLGKMCKRGDAYLRSLAIQGAHAVLRQLRPDSEHPDDCRLRRWLSRHGQKGAAVRLANRNLRIVWVLLQNDQNYRRQPGNGQEAAMSH

SEQ ID NO: 12490 - protein, 343 aa, unidentified
  source 1..343: note = protein_b2487f8
  REGION 5..152: note = RuvC_domain
  SITE 8: note = RuvC_P1
  SITE 55: note = RuvC_P2
  SITE 92: note = RuvC_P3
  SITE 94: note = RuvC_P4
  SITE 97: note = RuvC_P5
  REGION 212..297: note = Tnp_domain
  SITE 220: note = Tnp_P1
  SITE 250: note = Tnp_P2
  SITE 258: note = Tnp_P3
  SITE 259: note = Tnp_P4
  SITE 271: note = Tnp_P5
MNHSAGIDVSLERSSVCVVNASGKVVWEAKIESEPKALIAWFRSLGVTLERIGLEAGPLSQWLYAEMKEAGLAVELLETRHLRNAFKTMPVKTDRKDARGIAQLVRVGWFRPVHCKSMEAQETRAMLTSRKLVQSKLRDVENHLRGILRGFGLKVGKVSDRIFAARVRELVDRHPTLQTIAEALLAVRGALQREFNKFEKQVRSMARADANARLLMSAPGVGPQVSLTYISGIDDPMRFKSSKAVGPHFGMTPKRYQSGETDVTGRISKIGDASVRTALYQAAHIILTRPIKGGALKSWAARIAKRAGMQKAKVALARKLAVILHRMLVDGKPFDFAAAAARQ

SEQ ID NO: 12491 - protein, 315 aa, unidentified
  source 1..315: note = protein_3e30e71
  REGION 12..161: note = RuvC_domain
  SITE 15: note = RuvC_P1
  SITE 57: note = RuvC_P2
  SITE 97: note = RuvC_P3
  SITE 99: note = RuvC_P4
  SITE 102: note = RuvC_P5
  REGION 192..276: note = Tnp_domain
  SITE 200: note = Tnp_P1
  SITE 229: note = Tnp_P2
  SITE 237: note = Tnp_P3
  SITE 238: note = Tnp_P4
  SITE 250: note = Tnp_P5
MAMVVADSKRLIGVDVAKTELVIWDDESAELIAIPNTKAAIKKWLKGLSGAMSVAIEATNIYHVLFTDLAFEFGHTIYVVDGYALSHYRKGVNVRAKTDAIDAQLLARYLKNEGQDLTPWAPPPAIYRQLLSLFRRRAGLVQARTSLTQGWANEPLLKAAFKTHLRAMQRLELLVEKMIKGLLEKAGLMPQVKRCMKVEGVGFLTAARLTATFQRGNFSGGDAFIAFLGMDLRIAQSGQKKGQSKLTKRGDPEARRLLHNAAMSASRTAAWKSYYEERLARGFSTTASLVMLARKLARVVFALLKSGDEYRSKAA

SEQ ID NO: 12492 - protein, 340 aa, unidentified
  source 1..340: note = protein_25bb604
  REGION 6..147: note = RuvC_domain
  SITE 9: note = RuvC_P1
  SITE 52: note = RuvC_P2
  SITE 87: note = RuvC_P3
  SITE 89: note = RuvC_P4
  SITE 92: note = RuvC_P5
  REGION 211..297: note = Tnp_domain
  SITE 219: note = Tnp_P1
  SITE 249: note = Tnp_P2
  SITE 257: note = Tnp_P3
  SITE 258: note = Tnp_P4
  SITE 270: note = Tnp_P5
MKITTIGIDLAKDAFQVHGIDERGEVRIKRSLKRREMMEFFTRIEPCLIGMESCGGAHYWARRLRDVGHTVRLMAPQFVKPYVKGNKHDAADAEAICEAVRRPTMRFVPIKTVDQQSILAVHRVRQGMIKARTAQANQIRGLLAEFGLIVPIGISHLYLKVPTLLDEAKDTVPGVFRELIQRLLAHMKELTRQVDELEIQIHQWHRASETSRNLEQIPGVGPITATALVASIGDAGNFKNGRQLAAWIGLVPKQHSSGGKTKLQGISKRGDNYLRTLLIHGARAVVKSAERKPERYVWLSKLMGRTHINIATVALANKNARVVWALMAHDQKFRSDYVAT

SEQ ID NO: 12493 - protein, 341 aa, unidentified
  source 1..341: note = protein_9529ec6
  REGION 7..149: note = RuvC_domain
  SITE 10: note = RuvC_P1
  SITE 53: note = RuvC_P2
  SITE 88: note = RuvC_P3
  SITE 90: note = RuvC_P4
  SITE 93: note = RuvC_P5
  REGION 211..294: note = Tnp_domain
  SITE 219: note = Tnp_P1
  SITE 249: note = Tnp_P2
  SITE 257: note = Tnp_P3
  SITE 258: note = Tnp_P4
  SITE 270: note = Tnp_P5
MTEVSTIGLDLAKNVFQAHGASAAGEVLFRRKLRRDQVLGFFAAQPPCLVAMEACPGAHYWGREIGKLGHTVRLIAPAYVKPFVKRQKNDAADAEAICEAAQRPTMRFVAVKSEAKQASAVIFRTRDILVGQRTQLINAIRGHLSEYGLIAPRGPFHVGRLIAHIEDPASSVPEAARSCLALLVEGVRHLQEQIGKLDAEISARAKADEMTQRLMTVPGIGPLIATAIEALAPPAETFRSGRDFAAWVGLTPVQRSTGGKERLGRTSRMGERTLRRLLIIAASAVIRWAKRKGVPKGSWLGRMLERKPPMLVIVALANKNARIAWALLTKGESYRAPAVPA

SEQ ID NO: 12494 - protein, 343 aa, unidentified
  source 1..343: note = protein_68f73e0
  REGION 5..158: note = RuvC_domain
  SITE 8: note = RuvC_P1
  SITE 56: note = RuvC_P2
  SITE 97: note = RuvC_P3
  SITE 99: note = RuvC_P4
  SITE 102: note = RuvC_P5
  REGION 221..306: note = Tnp_domain
  SITE 229: note = Tnp_P1
  SITE 259: note = Tnp_P2
  SITE 267: note = Tnp_P3
  SITE 268: note = Tnp_P4
  SITE 279: note = Tnp_P5
MTIMIGIDPHKASHTAVAIDGNEVVLDEVRVRSCVTQTARLRDWAERFEERTWAVESAHGLGYLLAQQLVAAGEQVIDVPPVRASRVRVLGSGRSQKNDPNDARSVAIAALRADDLVAVHADDHSRVLRLLSKRHRDLGRLKNKASCRLHALLLEMIPGGAGFRITAVTRINALIDDFEPVDAMGRQRQEIARELATDIDRYNQLLAASKQRIETAVTASATSLTTICGVGPITAAMIIGQSGDIDRFSSKHHYASYNATAPIEASSGSKIRHRLNPRGNRQLNWAIHVIAISQLRHDSLGRAFYDRKMAEGKSSKEAIRALKRRLSDVIYRHLVADARPQHS

SEQ ID NO: 12495 - protein, 320 aa, unidentified
  source 1..320: note = protein_f2b7bf2
  REGION 4..150: note = RuvC_domain
  SITE 7: note = RuvC_P1
  SITE 51: note = RuvC_P2
  SITE 91: note = RuvC_P3
  SITE 93: note = RuvC_P4
  SITE 96: note = RuvC_P5
  REGION 190..277: note = Tnp_domain
  SITE 198: note = Tnp_P1
  SITE 228: note = Tnp_P2
  SITE 236: note = Tnp_P3
  SITE 237: note = Tnp_P4
  SITE 250: note = Tnp_P5
MTYIGIDVSKDSFVAAYPAKSGYATKTFKNTSSGVHQFIQSLPAECHCVMEATGNYSMLLLYLLQQANIIVSMENPQKIKHFARAMLSTTKTDDIDAKLIAMYGEKMEPAPYKIPSESIMLLKQKRTVLRQLKKQLTMLLNLQHSLAVLPKQDPTAKVATEKTIKFLRKQISKLEDEITHLSNKEFKRQMDLLTSIIGIGKTLASALIVATGGFAFFSNAKQISRFLGLCPTYQQSGTSVHFKGHINRNGDTYLRSQLYIAAVSSIKFNAACKETFKRLKDKGKSGKVAVIAVANKLIRQAFAVVTNNRPYVDGYVSALP

SEQ ID NO: 12496 - protein, 277 aa, unidentified
  source 1..277: note = protein_6676e31
  REGION 9..151: note = RuvC_domain
  SITE 12: note = RuvC_P1
  SITE 56: note = RuvC_P2
  SITE 96: note = RuvC_P3
  SITE 98: note = RuvC_P4
  SITE 101: note = RuvC_P5
  REGION 191..260: note = Tnp_domain
  SITE 199: note = Tnp_P1
  SITE 228: note = Tnp_P2
  SITE 236: note = Tnp_P3
  SITE 237: note = Tnp_P4
  SITE 249: note = Tnp_P5
MKETTDSYVGIDVSKKVLDTAVDQEGDFWQSANDKQGIAVTVAKLQELHPTLIVVESTGGLEIRLLTALYEAKLPFCRVHPGRVREFARSVGLLAKTDHLDARLLARFAAAVKPPVTSLPGEDEQRLSALLTRRRQVVEMLTAEKNRLGTAPATTQDRISQHILWLEEERDKLNEEIDQFIDQTPIFRQKQDILQSTPGIGSVTSAILIADLPELGHLSRQKIAALVGLAPFNNDSGPRRGKRRVKGAGRLFGLLCIWQLYPAYNLTLLFKRFTRAW

SEQ ID NO: 12497 - protein, 313 aa, unidentified
  source 1..313: note = protein_4b1e62f
  REGION 8..148: note = RuvC_domain
  SITE 11: note = RuvC_P1
  SITE 53: note = RuvC_P2
  SITE 93: note = RuvC_P3
  SITE 95: note = RuvC_P4
  SITE 98: note = RuvC_P5
  REGION 189..273: note = Tnp_domain
  SITE 197: note = Tnp_P1
  SITE 226: note = Tnp_P2
  SITE 234: note = Tnp_P3
  SITE 235: note = Tnp_P4
  SITE 246: note = Tnp_P5
MIIPLRCVGIDVSKQYLDIFDEGLGVPERIANATQAITQIAARWRCDVLVVFEATGVYDLELREALSEAGIRFARINPARARDFARASGQLAKTDPIDARMLAAFARAMQPATEPTANPARNALAGLAKRRDQLVRMRAQEKNRRSETDDRAMAERIGRLIEVLDGEIAEIEADIRGLIKAEREIADDARLMRSLPGVGPVACMQLIAKMPELGHVGAKQIAALAGLAPFNVDSGAFRGKRKIAGGRKRVRDALYMAALNAVRRADPFKAFYARLRRAGKPAKLALIAVARKLLTVLNAMMRDRKPYLKANPT

SEQ ID NO: 12498 - protein, 304 aa, unidentified
  source 1..304: note = protein_24520ad
  REGION 2..112: note = RuvC_domain
  SITE 14: note = RuvC_P2
  SITE 52: note = RuvC_P3
  SITE 54: note = RuvC_P4
  SITE 57: note = RuvC_P5
  REGION 172..259: note = Tnp_domain
  SITE 180: note = Tnp_P1
  SITE 210: note = Tnp_P2
  SITE 218: note = Tnp_P3
  SITE 219: note = Tnp_P4
  SITE 231: note = Tnp_P5
MIRKRAPHAKRVVFETGPLSTWFFHALTSEGVPAICIEARHAQKILNETLNKTDANDADGLAQLAEAGFYKAVRVKSFDAMLARTLVAARNQLLSISTQLSNQIRGLMKTFGLIVPKGTGRVFDNNVRELLDENDGLARIISPLLEAWRDIRKRAADLGRQLLVAARKSQATRLLMTIPGVGAVTAVSYVAAIEDPDNFRTSRAVGAWLGLTTRRYQSGEIDYGGHISRKGDNRLRGLLYETATVILTRTSARNESSLRSWGLKLRERVGFKRAAVAVARKVAVIMHSMLKTGEVFNTSAGATV

SEQ ID NO: 12499 - protein, 392 aa, unidentified
  source 1..392: note = protein_2b5f7d9
  REGION 10..163: note = RuvC_domain
  SITE 13: note = RuvC_P1
  SITE 61: note = RuvC_P2
  SITE 102: note = RuvC_P3
  SITE 104: note = RuvC_P4
  SITE 107: note = RuvC_P5
  REGION 226..310: note = Tnp_domain
  SITE 233: note = Tnp_P1
  SITE 263: note = Tnp_P2
  SITE 271: note = Tnp_P3
  SITE 272: note = Tnp_P4
  SITE 283: note = Tnp_P5
MDEQGTRVVIGMDPHKRTVTIEVMTSHEQVVGGGRFTTDADGYAQLLGYARQWPQRLWAVEGCAGIGKHVASRLVADGEDVVDVPAKMSARVRVFATGQGRKTDATDAHSIALVGVRMSGLRPVVDDEQLEVLRMCVDRRASLGAEHTRKVCQLHKLLLELIPGGAKRSLSAAQAKELLKKVRPTTPAGKVRKAHAAELVEDLTKIYARTKAADKELKSLVKATGTGLIDLHGIGPSGAARLLVEVVDITRFPDRNHFASWTGTAPVDASSGDHTHHRLSRKGNRQINRVLHIMAVVQLRHATEGRAYYDRKVAAGKTPMEAMRCLKRRLSDLVYKAMLDDLARRATTGPGGQLGNDSDSSATGSQPDAGSSDKPLPGPATTKPRTTLPAAS

SEQ ID NO: 12500 - protein, 350 aa, unidentified
  source 1..350: note = protein_f1aecba
  REGION 6..148: note = RuvC_domain
  SITE 9: note = RuvC_P1
  SITE 52: note = RuvC_P2
  SITE 87: note = RuvC_P3
  SITE 89: note = RuvC_P4
  SITE 92: note = RuvC_P5
  REGION 211..297: note = Tnp_domain
  SITE 219: note = Tnp_P1
  SITE 249: note = Tnp_P2
  SITE 257: note = Tnp_P3
  SITE 258: note = Tnp_P4
  SITE 270: note = Tnp_P5
MEITTVGLDLAKRVFQVHAIGGSGEVVVRKTLRRAQMIPYFAGLERCLVGIEACGTSHYWAREIGKLGHEVRLMPPAYVKPYVKRGKTEASDAEAICEAVRRPTMRYVAIKSPEQQAALGMHRTRDLFVKQRTQLVNMIRSLLAEFGIEIRQGIGQALMVAKRAAADDMPDIPPLAAKVIAGLAGQVLDLQARLREIEREMLVWHRSNDVARRLATIPGVGVVCATALAASVTDPHQFRSGRQFAAWLGLTPLQHSSGGKERLGRISKMGDKYLRRLLIVGMTSLVRRAKYKPTTVDPRLADLLLRKPVRMVTLALANKTARVVWAIMTRGGTYRTPQPAGASVSQAAVA

SEQ ID NO: 12501 - protein, 343 aa, unidentified
  source 1..343: note = protein_ef1d9b1
  REGION 6..147: note = RuvC_domain
  SITE 9: note = RuvC_P1
  SITE 52: note = RuvC_P2
  SITE 87: note = RuvC_P3
  SITE 89: note = RuvC_P4
  SITE 92: note = RuvC_P5
  REGION 211..300: note = Tnp_domain
  SITE 219: note = Tnp_P1
  SITE 249: note = Tnp_P2
  SITE 257: note = Tnp_P3
  SITE 258: note = Tnp_P4
  SITE 270: note = Tnp_P5
MKIVRIGLDLAKNVFEVHGVDAEDSAVLQKTLRRDVVPQFFSELPPCLVGMEACSGAHYWARVLTDLGHDVRLISPQFVTPYVKSNKNDRNDAEAICEAVGRPSMRFVPQKTSEQLEIQAVHRIRQRLVSDRTRLVNQIRGLLAEHGVVIGRDISRLRRGLQQIVDGAADGLGELIRDLVRDVHQELEELDQRIATYNRRIRHLFRTNEDCQRIGKIEGIGPITATALVAAVGDRSCFKNGRQFAAWLGLVPRQRSSGGKSRMFGISKRGDRYLRTMMIHGARAVLGKAGGKEDPRSQWIGRMRERRHPNIVAVALANKNARIVWSILSRGESYRSVETVSQN

SEQ ID NO: 12502 - protein, 356 aa, unidentified
  source 1..356: note = protein_74b305d
  REGION 15..163: note = RuvC_domain
  SITE 18: note = RuvC_P1
  SITE 67: note = RuvC_P2
  SITE 103: note = RuvC_P3
  SITE 105: note = RuvC_P4
  SITE 108: note = RuvC_P5
  REGION 235..319: note = Tnp_domain
  SITE 241: note = Tnp_P1
  SITE 272: note = Tnp_P2
  SITE 280: note = Tnp_P3
  SITE 281: note = Tnp_P4
  SITE 292: note = Tnp_P5
MPSITPEEAAIEVVGGVDTHQDTHTAAVIDLVGRVLGTQQLPATAAGYAALLAWMRGFGRLLRVGVEGTGAYGAGLARLLRDEDVDVIEVDRPDRKTRRFQGKSDPIDAIQAAKAALAGERTGIPKQRDGRVEALRNLRVARRSAVDQRADTQRQIKSLIVTAPDELRARLCGLTVKQLIATCANLRPDRADAATPATAVKLALRALARRHQQLTTEIADLDELLQPLVAAINPGLLAANGVGADTAGQLLVSAGENHARLNSETAFAMLCGVAPIPASSGKTTRYRLNRGGDRQANAALYRVVLCRLRWDPRTRAYAERRTKEGLSKKEIIRCLKRYVARELYQIITANDLELAA

SEQ ID NO: 12503 - protein, 327 aa, unidentified
  source 1..327: note = protein_3da1f90
  REGION 4..154: note = RuvC_domain
  SITE 7: note = RuvC_P1
  SITE 59: note = RuvC_P2
  SITE 99: note = RuvC_P3
  SITE 101: note = RuvC_P4
  SITE 104: note = RuvC_P5
  REGION 199..285: note = Tnp_domain
  SITE 207: note = Tnp_P1
  SITE 236: note = Tnp_P2
  SITE 244: note = Tnp_P3
  SITE 245: note = Tnp_P4
  SITE 258: note = Tnp_P5
MFFIGIDVSKSKLDCCLLVDSNHKRKTKVVINSKKGIADLLVWTAKQHISNEQLHAILEGTGVYHEQIAQALYDSGARISIVNPAQIRHFAFGLAIRNKTDDMDSFVLARYGALIQPKLWTPPSQEAQILKALLKRREAIVRDLLRENNRLEKADATHTPEVIRQSITDGITFLKSQLTKINNDIDEHINKYPHFKEDLKLLTSIPSVGPQVGNQLLAIIHNHHFDSAEKLAAYLGLVPVQRQSGTSVFGRSCISKNGPSSIRAILYMAAMTAIRFNPHIKTMYLRIISQGKSKRSALCAAMRKLVHLCFGVIKTRKPYQSDYPISA

SEQ ID NO: 12504 - protein, 340 aa, unidentified
  source 1..340: note = protein_6c2d736
  REGION 7..147: note = RuvC_domain
  SITE 10: note = RuvC_P1
  SITE 53: note = RuvC_P2
  SITE 88: note = RuvC_P3
  SITE 90: note = RuvC_P4
  SITE 93: note = RuvC_P5
  REGION 212..299: note = Tnp_domain
  SITE 220: note = Tnp_P1
  SITE 250: note = Tnp_P2
  SITE 258: note = Tnp_P3
  SITE 259: note = Tnp_P4
  SITE 271: note = Tnp_P5
MGNRIVIGLDLAKQSTAAAALDGQGREQWRRTFRRQKLLPFLARQAPCIVAMEACAGAHYLARQVDRLGHHVRLYPPKHVKAYQRGQKNDYNDALAIAEAAQHGRLRSVPVKTVEQQDEGLLVQQRRQLKQEQVRQGNHIRALLAERGLVLPKGVAALRRRLPEVLEEGDNGLTPLVRRVLNGAYQRLLAILEELTWYDRELERQTQQDDVRQRLCEMPGVGAVVASVLKAWMGDGRQFRRGRDASAALGLVPCQHSTGGRQVLGGISKRGDRYTRSQVINGAQAVLLYAHRKDDALHRWVVRLQATRGHNKAVTALANKLVRIAWVILARGERYSPRPA

SEQ ID NO: 12505 - protein, 344 aa, unidentified
  source 1..344: note = protein_a53b19b
  REGION 6..147: note = RuvC_domain
  SITE 9: note = RuvC_P1
  SITE 52: note = RuvC_P2
  SITE 87: note = RuvC_P3
  SITE 89: note = RuvC_P4
  SITE 92: note = RuvC_P5
  REGION 211..296: note = Tnp_domain
  SITE 219: note = Tnp_P1
  SITE 249: note = Tnp_P2
  SITE 257: note = Tnp_P3
  SITE 258: note = Tnp_P4
  SITE 270: note = Tnp_P5
MKITTVGIDLAKNVFQVHGVNEFGKTVVKKQLRRDQVSEYFVNLPACLIGMEACGSAHYWARKLQGFGHTVKLMAPQFVKPYVKTNKNDAADAEAICEAVARPNMRFVPIKNIEQQAVLSLHRVRQGFVKARTAQANQIRGLLGEFGLIVPQGIGYIATRVPELIEDASNELPGSFRLLVQRLLDHLKELDRQVDELESQIVKWHRQSDASSKLAQVPGIGPITASALVASLGDAKNFDGGRQVAAWLGLVPKQHSSGGKQNLLSISKRGDTYLRTLLIHGARSVIYRAQQKPESCSWINGVVDRRNKNVAAVALANKNARIVWALLAHEREFRSDYTTANAAM

SEQ ID NO: 12506 - protein, 345 aa, unidentified
  source 1..345: note = protein_8239ade
  REGION 6..147: note = RuvC_domain
  SITE 9: note = RuvC_P1
  SITE 52: note = RuvC_P2
  SITE 87: note = RuvC_P3
  SITE 89: note = RuvC_P4
  SITE 92: note = RuvC_P5
  REGION 211..298: note = Tnp_domain
  SITE 219: note = Tnp_P1
  SITE 249: note = Tnp_P2
  SITE 257: note = Tnp_P3
  SITE 258: note = Tnp_P4
  SITE 270: note = Tnp_P5
MELHTIGIDLGKTAFHLVGVNLHGEIVVRKKFSRKQLLHFTANLQVELIGMEACGGAHFLGRALREQGHEVRLMPAQYVKPYVKTNKNDFIDAEAIAEAVTRPRMRFVPIKTDDQLDMQSLHRVRERWVMRRTAIVNQVRGLLLERGITLPKGRSHLDTALPRILEDADLKLSGALRALLAQLKLELDQMTMRIGEADAVLNKTARDNADCQRLMTIPGLGPVTATALVAAIGNGGAFRNGRGFSAWIGIVPGEYSTGGKQKLLGISKRGNPYLRRLFIQGARAVLQQRTKQSSGLRAWLEQLAARTHPNVAAVALANKLARMAWAVLTKAEPYRPPLQASPIAA

SEQ ID NO: 12507 - protein, 338 aa, unidentified
  source 1..338: note = protein_61599a1
  REGION 7..148: note = RuvC_domain
  SITE 9: note = RuvC_P1
  SITE 52: note = RuvC_P2
  SITE 87: note = RuvC_P3
  SITE 89: note = RuvC_P4
  SITE 92: note = RuvC_P5
  REGION 211..296: note = Tnp_domain
  SITE 219: note = Tnp_P1
  SITE 249: note = Tnp_P2
  SITE 257: note = Tnp_P3
  SITE 258: note = Tnp_P4
  SITE 270: note = Tnp_P5
MSLSIYSIDLAKHSFSIHGEDTNGNTLIHKTISRAKVLTFFANLPPAIVGMEACGSSHYWARELTKLGHTAKIMASKYVAPFRTGAKNDLNDAVAICVAVTRPSTRFVKIKSAEQQSILMLHRARDNWVHERTALLNQIRAVMAEFGIIAPKGRHALQANIGHVLEDAENQLPDLARAILADCYDHLLSINQRIADQERCFDMLVNHSNNAQKIMKVAGVGPITATVVIASIGKGEQFDKGRDFAAWLELVPTQYSTGGKPRLGRITKKGDKYLRTLLVHGARAAITNIGNKTDRLSLWCKGLVERRGLKRAIVALAAKNARIIWSLLRNDTEYQVAV

SEQ ID NO: 12508 - protein, 346 aa, unidentified
  source 1..346: note = protein_503a7a5
  REGION 6..147: note = RuvC_domain
  SITE 9: note = RuvC_P1
  SITE 52: note = RuvC_P2
  SITE 87: note = RuvC_P3
  SITE 89: note = RuvC_P4
  SITE 92: note = RuvC_P5
  REGION 211..299: note = Tnp_domain
  SITE 219: note = Tnp_P1
  SITE 249: note = Tnp_P2
  SITE 257: note = Tnp_P3
  SITE 258: note = Tnp_P4
  SITE 270: note = Tnp_P5
MNITQVGIDLAKLVFQVHGVDSRGKVAVRKQLKRSQVAEFFAQLAPCLIGMEACGGAHFWARKLMEFGHTVKLIAPQFVKPYVKTNKNDAADAEAICEAVGRPNMRFVPIKNTEQQALLGLHRVRQGFVAARTAQANQIRGLLTEFGLVIPVGIRSIERKVPEFLEDAANGLSGASRALFARLLEHFRALDLQVAELEREINAWHREDARSRRLQAIPGIGPLTASALVASVGDAKLFHNGRQFAAWLGLVPRQNSSGGKTTLLGISKRGDTYLRTLLIHGARSVLFSLKRDPDRAEQWLARVANRRNPNIAAVALANKNARTVWALLAHGRDFQTGYRSATPAAA

SEQ ID NO: 12509 - protein, 343 aa, unidentified
  source 1..343: note = protein_3e25e56
  REGION 6..147: note = RuvC_domain
  SITE 9: note = RuvC_P1
  SITE 52: note = RuvC_P2
  SITE 87: note = RuvC_P3
  SITE 89: note = RuvC_P4
  SITE 92: note = RuvC_P5
  REGION 211..296: note = Tnp_domain
  SITE 219: note = Tnp_P1
  SITE 249: note = Tnp_P2
  SITE 257: note = Tnp_P3
  SITE 258: note = Tnp_P4
  SITE 270: note = Tnp_P5
MQVRTVGIDLGKNTFHVIGLNDSGTVVVKKCFTRKQLLVFTANLSASLIGMEACCGSHMLGTILRAQGHRVRLIPAQFVKPFVKGNKNDYLDAEAIAEAVQRPRMRFVAVKTGDQLDLQALHRVRDRLISRRTSVINQMRAFLLERGITYRKGRAYLKRQRAAILEDAEANLTPRMRHLLNRLWQEWKSVEIEIEELSGQIEAIAQEDAACQRLLTIPGVGSLVSTAMIAAVGNGSAFKKGREFAAWLGLVPKQYSTGGKSKLLGISKRGNPYLRRLFIHGARSAFLHLNRKNHRIGAWMDQLESRAHRNVAIVALANKLARIAWAVLAKGDVYCPMSALLQS

SEQ ID NO: 12510 - protein, 327 aa, unidentified
  source 1..327: note = protein_3490d5e
  REGION 1..80: note = RuvC_domain
  SITE 17: note = RuvC_P3
  SITE 19: note = RuvC_P4
  SITE 22: note = RuvC_P5
  REGION 189..275: note = Tnp_domain
  SITE 197: note = Tnp_P1
  SITE 228: note = Tnp_P2
  SITE 236: note = Tnp_P3
  SITE 237: note = Tnp_P4
MVSTSRYRDRHSTSGAKSDPGDAKVLADMVRTDRHNHRPVAGDSELAGAIKVLARAHQTMIWSRTRQTNFLRSTLREFYPAVLVAFDDLTSGDALEVLKVAPTPTLGAGLSRSKIAAALRRGGRQRRIDQRAEEIQVALRAPQLQGPALVATAMGSSVSATAAVIATMNAQIVELAKELDAHFEQHPDAEVVRSLPGLGTILSARVLGEFGDEPNRYATAKSRKNYAGTSPITRASGTKRIVLARFVRNMRLADAIYLWAFASLSASPGARAFYDYRRAAGDTHHAALRHVGNRLVGILHGGLIRHTNYDENTAWGHRAELELARAA

SEQ ID NO: 12511 - protein, 341 aa, unidentified
  source 1..341: note = protein_474417a
  REGION 7..148: note = RuvC_domain
  SITE 10: note = RuvC_P1
  SITE 53: note = RuvC_P2
  SITE 88: note = RuvC_P3
  SITE 90: note = RuvC_P4
  SITE 93: note = RuvC_P5
  REGION 209..295: note = Tnp_domain
  SITE 217: note = Tnp_P1
  SITE 247: note = Tnp_P2
  SITE 255: note = Tnp_P3
  SITE 256: note = Tnp_P4
  SITE 268: note = Tnp_P5
MDTISLIGIDLGKHCFHLHAQSASGRMVFRKKLTRSQMFTLLANVPSCTVVMEACAGAHWVARRIQELGHHAKLISPQFVKPFVQGNKNDFADAQAICEAASRPSMRFVSPRNEVQQTISALHRVREALVRDRTGTVNQIHAFLLEFGVSLPKGMAVIRRLPAVLATHALPPRLVELLERLQAHFKYLDEQITQIESELIRQLREDERSQRLLEIPGIGPITASVLATELGDAHQFACARQFAASIGLVPRQYSTGGKTTLLGISKRGDKHLRRLLVQCARVLMLHIERRTDRLGAWVRDLLARRHSNVVACALANKLARIAWAILASGTHYQGGQVVAAA

SEQ ID NO: 12512 - protein, 339 aa, unidentified
  source 1..339: note = protein_2e554e2
  REGION 14..160: note = RuvC_domain
  SITE 17: note = RuvC_P1
  SITE 65: note = RuvC_P2
  SITE 105: note = RuvC_P3
  SITE 107: note = RuvC_P4
  SITE 110: note = RuvC_P5
  REGION 206..293: note = Tnp_domain
  SITE 214: note = Tnp_P1
  SITE 244: note = Tnp_P2
  SITE 252: note = Tnp_P3
  SITE 253: note = Tnp_P4
  SITE 266: note = Tnp_P5
MSKQPSFAQGLVFCGIDVSAKTLAVSVLQQDQPLRQRELANTAGGHKALITWLRKAKATVRVSLEATGVYSLDLALALDAAEGIELSVLNPRRVHQFAQTLRRSKTDAADALVLAEYSKRMPFVAWRRPSQRALELRAVSRHLATLTEERARLHNRLHAAESSLATPRCVREDLKRSLAGIDKRILRLRKAAVALIERDGEMQRKFRHLTGITGIAETSAVHLLGELATLAPEMTARQWVAHSGLDPAHRHSGTSVNLPSRMSRHGNSQLRRALFMPALAGARFDPHMRAFYTLLQQRRKSKMQALMAVARKLLHAIYGIFKTNTPYEGSKLFPQLKVA

SEQ ID NO: 12513 - protein, 339 aa, unidentified
  source 1..339: note = protein_10c47f3
  REGION 6..148: note = RuvC_domain
  SITE 9: note = RuvC_P1
  SITE 52: note = RuvC_P2
  SITE 87: note = RuvC_P3
  SITE 89: note = RuvC_P4
  SITE 92: note = RuvC_P5
  REGION 211..299: note = Tnp_domain
  SITE 219: note = Tnp_P1
  SITE 249: note = Tnp_P2
  SITE 257: note = Tnp_P3
  SITE 258: note = Tnp_P4
  SITE 270: note = Tnp_P5
MQVSTLGIDLAKSVFQLHGVDHNGNTVLRKRLSRARFVQFVINLPPCLIGMEACSSSHHFGRLFREHGHQVKLIPPQYVKPYVKTNKTDAADAEAICEAVTRPNMRFVEIKTVEQQAVLTLHIERSLLIRERTAVINSLRAMLAEFGFVIPGGRRQVHQCASDILGDDENGLSPLVRSSAARQLAHIRELDNQLSQVEKELTAWFRSRPDCQRVAQVPGVGLLTATYVVASVGNAQQFGSAKQFAAWVGLTPREHSSGGHQKLGHISKRGDSYFRFLLVHGARAVAAWIQRTGQGTPWLLALMQRKPHNVAVTAQANKTTRILWAMLRRGTEYHPATPA

SEQ ID NO: 12514 - protein, 320 aa, unidentified
  source 1..320: note = protein_7106135
  REGION 10..157: note = RuvC_domain
  SITE 13: note = RuvC_P1
  SITE 57: note = RuvC_P2
  SITE 97: note = RuvC_P3
  SITE 99: note = RuvC_P4
  SITE 102: note = RuvC_P5
  REGION 193..278: note = Tnp_domain
  SITE 201: note = Tnp_P1
  SITE 230: note = Tnp_P2
  SITE 238: note = Tnp_P3
  SITE 239: note = Tnp_P4
  SITE 250: note = Tnp_P5
MMAQNSRVVVGIDVAKDKVDGCIRSLSQRQTFPSSAEGRRKLIAWLRKHKVDRAVMEASGGYEQDWAKALREACFEVRIVDPKRVRNFARSAGRLAKNDVIDAEMIAWFAETFEDAPSQTHDVAREELAALVKARKAVIDLKTRLQSQNEHAVPGAVQKAHARVLKGLDAEIAKLEDAIVVTVKATPAFAARAEIIESVPGLAETVSAVLIAGLPELGTVREEIAVALLGAAPYDDDSGKRRGERHIKGGRRWVRNALYMPCLGAATQHNPVLKAFYQRLIAKGKEPKVALIACMRKLIVILNTMIARGEKWDRSRYALR

SEQ ID NO: 12515 - protein, 342 aa, unidentified
  source 1..342: note = protein_6f9cf35
  REGION 6..147: note = RuvC_domain
  SITE 9: note = RuvC_P1
  SITE 52: note = RuvC_P2
  SITE 87: note = RuvC_P3
  SITE 89: note = RuvC_P4
  SITE 92: note = RuvC_P5
  REGION 211..296: note = Tnp_domain
  SITE 219: note = Tnp_P1
  SITE 249: note = Tnp_P2
  SITE 257: note = Tnp_P3
  SITE 258: note = Tnp_P4
  SITE 270: note = Tnp_P5
MNATRIGIDLAKNSFQLHGVGSNGKVALRKKLTRTKLLPFIANLPACEIGMEACGSAHYWAREFAKFGHSVKLIAPQFVKPYVKSNKNDSADAEAICEAMSRPNMRFVPIKTQEQQASLSMHRVREGLVQERTAVANRIRGLLFEFGLVIPAGIRHLRFGLQDVIEANEHALPNTFRLLVQRLLDHFAYLDQQLKELEQDIHREYRASEACRRLGAIPGIGPITATALVATIGDARSFQSGRQLAAWLGLVPRQHSTGGKPTLLGISKRGDGYLRRNLIHGARAVMRFATDKDEPVPWLVHLLQRRHKNVVITALANKNVRVAWALLTHECDYQIGYRGSAA

SEQ ID NO: 12516 - protein, 339 aa, unidentified
  source 1..339: note = protein_acfc724
  REGION 6..147: note = RuvC_domain
  SITE 9: note = RuvC_P1
  SITE 52: note = RuvC_P2
  SITE 87: note = RuvC_P3
  SITE 89: note = RuvC_P4
  SITE 92: note = RuvC_P5
  REGION 210..294: note = Tnp_domain
  SITE 218: note = Tnp_P1
  SITE 248: note = Tnp_P2
  SITE 256: note = Tnp_P3
  SITE 257: note = Tnp_P4
  SITE 269: note = Tnp_P5
MNHTTVGVDIAKNVMQLHYIDAETGEIVNKPVKRGVFLEHFANQAPCLIGMEACGGSQHWARKLMAMGHQVKLMPGKFVKAFVMGNKNDSADAKAIWLAVQHTGKSIAVKTETQQAVLGLHRMREQLVKFRTMQINSLRGLLTEYGEVMGKGRTALDKAIPDVLERLVDRLPSILIDTLREQWNGLTELDKQIAGIERRLQTWMKEDKACKAIAAIPGVGLLTATAAVATMGDAKTFRSGREFAAWIGLVPRQTGTGGKVQLQGISKRGDMYLRKLLVHGARAVLCLKKEPGPWIEGIKKRRPLNVSIVALANKMARTIWAILAHDRQYEKGYVSVKPG

SEQ ID NO: 12517 - protein, 342 aa, unidentified
  source 1..342: note = protein_de448ad
  REGION 6..149: note = RuvC_domain
  SITE 9: note = RuvC_P1
  SITE 52: note = RuvC_P2
  SITE 88: note = RuvC_P3
  SITE 90: note = RuvC_P4
  SITE 93: note = RuvC_P5
  REGION 211..295: note = Tnp_domain
  SITE 219: note = Tnp_P1
  SITE 249: note = Tnp_P2
  SITE 257: note = Tnp_P3
  SITE 258: note = Tnp_P4
  SITE 270: note = Tnp_P5
MIASTIGLDLAKHNFHVHAVDAAGLVIKTAALRRSEMIKFFQSAKPCLVGMEACATAHYWARELTKLGHEVKLIPPSYVKPFVRRGAKNDAADAAAICEAVRRPDMRFVAIKSEANQGFLMLHRARGLLVRQRTMAVCAIRAHLAEFGIIFGQGRQRIETIIPSIEEVAASLPEHARFALNSLMRTVGELNTQIEGIETKLAEVGRSDPVSNLLSSIPGVGPITSTAIAATVPNARMFRSGREFAAWLGLTPRQNSSGGTTRLGGITKQGDAYLRHLLVIGARNIVRYPKARAKVGGAWIDALLQRRRPMIVAVAVANKLARIIWAMMTNGEMFREAHVKAA

SEQ ID NO: 12518 - protein, 350 aa, unidentified
  source 1..350: note = protein_f4ce3c9
  REGION 10..170: note = RuvC_domain
  SITE 13: note = RuvC_P1
  SITE 69: note = RuvC_P2
  SITE 109: note = RuvC_P3
  SITE 111: note = RuvC_P4
  SITE 114: note = RuvC_P5
  REGION 210..296: note = Tnp_domain
  SITE 218: note = Tnp_P1
  SITE 248: note = Tnp_P2
  SITE 256: note = Tnp_P3
  SITE 257: note = Tnp_P4
  SITE 270: note = Tnp_P5
MTTNILKQVAGIDIAQKELVVTLGKMDEQTDIELFAYKTFPNNVKGFKSLTEWVSKVGVTHVQCRFVMEATGVYHESLAYFLFDSGYEVSILLPNKISNYVKTLDIKTITDKTASQAIARFGLERKLDLWKKPLKVFKDMRQLTRERGQLIVERTILKNQLHAEQAEAMPNYSSINRVNERIALLDKQEKAILVELATIIKQEKKLADQVKNITSIPGVGKITAVIVLAETNGFELIRNKKQLVSYAGLDIKEKLSGTSVKGKPKISKKGNKHLRHAMHLPALSAIQHNERFKAIFVRLVSKHGIKMKAAVAIHRKLLELIYIIWKTNKPFDKNYMQTTIPFDQQPGETN

SEQ ID NO: 12519 - protein, 409 aa, unidentified
  source 1..409: note = protein_b245048
  REGION 11..166: note = RuvC_domain
  SITE 14: note = RuvC_P1
  SITE 63: note = RuvC_P2
  SITE 103: note = RuvC_P3
  SITE 105: note = RuvC_P4
  SITE 108: note = RuvC_P5
  REGION 274..360: note = Tnp_domain
  SITE 282: note = Tnp_P1
  SITE 313: note = Tnp_P2
  SITE 321: note = Tnp_P3
  SITE 322: note = Tnp_P4
MSEDTAEIVYVGLDWATASHAVCVLSAVGKILAQFMFDHTAEGIATLIRKLAKFGEPADVQIGIERPNGRLVDLLLEAGHPVIPVSPNAIKTWREGEVVSGAKSDTGDALVIAEYLRLRHRRLRPVAPYSAHTKALRMVVRTRDDIVKMRVSATNQLSALLDDHWPGAKAIFADVESPISLAFLRQYPTALSATRLGEKRLAAFLAKHAYSGRRPVKELLGRLRSAPAGTTDPALTTAIADTVTAMVNILETLNSTSKTLDKSAIARLGEHPDAEIFTSLPRSGQINAAQVLAEWGDSRAAYDGPDAIAALAGVTPVTKASGKQHAVHFRWACNKRFRRALTTFADNSRHESPWAANIYTTARARGHDHPHAIRILARAWIRVIYRCWHNHQPYDPNLHGAAQNLQNAA

SEQ ID NO: 12520 - protein, 403 aa, unidentified
  source 1..403: note = protein_02b26ab
  REGION 9..163: note = RuvC_domain
  SITE 12: note = RuvC_P1
  SITE 61: note = RuvC_P2
  SITE 101: note = RuvC_P3
  SITE 103: note = RuvC_P4
  SITE 106: note = RuvC_P5
  REGION 270..357: note = Tnp_domain
  SITE 278: note = Tnp_P1
  SITE 309: note = Tnp_P2
  SITE 317: note = Tnp_P3
  SITE 318: note = Tnp_P4
  SITE 330: note = Tnp_P5
MAIRLEVWVGIDVGKSMHHACAIDTDGKVLFSQKLGNDQRAIEQLIARASAAAQRAQWAIDLTSPMALLLITALLAADQSVTYVPGRVVNTMTHGFRGEGKTDAKDARVIAETARLRRDLTEVTMPDELAVSLTQLTSYRADLMSDWVAGINRLRALLGSIFPALEAAFDYSNRTPLILVAGMCTPAEIRTAGIGGVTTHLTDNKAWGPAIGKTAATAVAAADAQDLVLPGEADAAMLVKRIARKLLDLDREIKDTDKLITARFRRHPWARIIESLPGMGPGLGAEFLASTGGDLATFATAGRLASYAGLVPVPRDSGRVSGNLRRPKRYNRRLRRVFYMAALSSLRTQGPSRRFYDKKRAERLIHTQALLALARRLVDVLWALLRDGREFTLDTPNPVTVAA

SEQ ID NO: 12521 - protein, 312 aa, unidentified
  source 1..312: note = protein_4f51f44
  REGION 2..119: note = RuvC_domain
  SITE 25: note = RuvC_P2
  SITE 60: note = RuvC_P3
  SITE 62: note = RuvC_P4
  SITE 65: note = RuvC_P5
  REGION 184..269: note = Tnp_domain
  SITE 192: note = Tnp_P1
  SITE 222: note = Tnp_P2
  SITE 230: note = Tnp_P3
  SITE 231: note = Tnp_P4
  SITE 243: note = Tnp_P5
MRKKFTQKQLLAYTANMQTSLIGLEACSGAPFLGRALHKQGHDVRLIPAQFVKPFVKSNKNDFIDAEAIAEAVERKNMRFVPIKTDDQLDLQAIDRVRDRLIARRTAVINQLRAFLLERGLVFAQTPAKLKAAMADILENAESDLTPRMRNLIDGLWSEWRLVEQQIEELNDELERISAADAGCTRIRKIPGIGPVVATAIVAAIGNGAAFNKGREFAAWLGIVPRQYSTGGKAKLFGISKRGNAYLRKILIHGARAAVLHIKRDRAPIGAWLDALDARAHKNVVVVAMANKLARIAWAVLSSGNEYRPVAT

SEQ ID NO: 12522 - protein, 374 aa, unidentified
  source 1..374: note = protein_4e22371
  REGION 8..156: note = RuvC_domain
  SITE 11: note = RuvC_P1
  SITE 60: note = RuvC_P2
  SITE 96: note = RuvC_P3
  SITE 98: note = RuvC_P4
  SITE 101: note = RuvC_P5
  REGION 221..307: note = Tnp_domain
  SITE 229: note = Tnp_P1
  SITE 259: note = Tnp_P2
  SITE 267: note = Tnp_P3
  SITE 268: note = Tnp_P4
  SITE 280: note = Tnp_P5
MRNFSTFIGMDVHKETIAVAIAGEEGGPRYYGDIMNTPEALAKLIKKVAGKKEQTAFCYEAGPCGYGVYRQITGLGYRCDVVAPSLIPKKAGDRVKTDRRDAVMLTRLYRAGELTSVWVPGLEQEAIRDLTRAREDIKGMERHARQRLNGFLLRHGKRYHGKSKWTPGYFRWLATVSFESSVQQIVFQEYVDMVKQLQKRVASIEEEMRKALTGWSLRVVVEALMALRGVNLVTAMTVVAEIGDMSRFESPRQLMAHLGLVPSEHSSGSRQKRGGITKTGNGHVRRVLTEASWSYRLPARKTAHLQRKAEKTTEAVQAIAWKAQKRLCKRYWYLIHKGKLTVQTCTAIARELVGFIWAIACEVMGKNIVCGVAA

SEQ ID NO: 12523 - protein, 397 aa, unidentified
  source 1..397: note = protein_c8a23f8
  REGION 4..160: note = RuvC_domain
  SITE 7: note = RuvC_P1
  SITE 57: note = RuvC_P2
  SITE 97: note = RuvC_P3
  SITE 99: note = RuvC_P4
  SITE 102: note = RuvC_P5
  REGION 274..361: note = Tnp_domain
  SITE 282: note = Tnp_P1
  SITE 312: note = Tnp_P2
  SITE 320: note = Tnp_P3
  SITE 321: note = Tnp_P4
  SITE 334: note = Tnp_P5
MIAVGIDVSKGKSTVAIISSYGEIVMKPTDFHHNNPSMQQLTSTLSNFDDEVRVVMEATGHYHQPILKALLEANLFVSVVNPYVIKKYADHDIRKGKTDKKDAMRIAWYALEKQYTLTGYSITEERYDTLKFLSRQYKQCISMRVKGRVQLHNLLDEIMPGIQNIVTSQTEDPDNNFFYKFVMKYGSYDKIKAMSEERFINSYVKLAYKSKARCPEAKALKVYEAAKRSITTRPFDTSAQIVLTEYINLLKQTEISCNTLMKQMQSIACTMPEYKTLLSMDGVGYRLAPIIIAEIGDVRRFKNAKALNAYAGNDAPPYQSGQYESHNRHISKRGSSELRKACYEVMQSLKLHQKVDNPIYQYMLKKEAEGKPKDVAKMAGVNKFLRVYYARVMELYK

SEQ ID NO: 12524 - protein, 343 aa, unidentified
  source 1..343: note = protein_5b47b76
  REGION 6..146: note = RuvC_domain
  SITE 9: note = RuvC_P1
  SITE 52: note = RuvC_P2
  SITE 87: note = RuvC_P3
  SITE 89: note = RuvC_P4
  SITE 92: note = RuvC_P5
  REGION 211..295: note = Tnp_domain
  SITE 219: note = Tnp_P1
  SITE 249: note = Tnp_P2
  SITE 257: note = Tnp_P3
  SITE 258: note = Tnp_P4
  SITE 270: note = Tnp_P5
MKLHVVGIDLGKTVFHLVGLDSTGNVVVRKRCSRRQLLAFTANLQVDLIGMESCSGSHFLGRALREQGHQVRLMPAQYVKPYVQTNKSDYIDAEAIAEAVQRPRMRFVPIKSKEQLDLQALHRVRERWVMRRTAVVNQIRSLLLERGLILPKGRSHLEEALPRILEDAELPLSGSFRLLLAQLKLELEQLSTRIDQLDTVILQRAKEDDACQRLTAIPGVGPVTATALIAAVGNGNAFRKGRDLAAWIGMVPTEHSSGGKQTLLGISKRGNCYLRRLFVQGARSVLQQRHRQSPGLSCWLAQLLARKHQNVVVVALANKVVRMAWVVLCRGERYRAPVLATST

SEQ ID NO: 12525 - protein, 354 aa, unidentified
  source 1..354: note = protein_9de003b
  REGION 12..152: note = RuvC_domain
  SITE 15: note = RuvC_P1
  SITE 58: note = RuvC_P2
  SITE 93: note = RuvC_P3
  SITE 95: note = RuvC_P4
  SITE 98: note = RuvC_P5
  REGION 217..302: note = Tnp_domain
  SITE 225: note = Tnp_P1
  SITE 255: note = Tnp_P2
  SITE 263: note = Tnp_P3
  SITE 264: note = Tnp_P4
  SITE 276: note = Tnp_P5
MAEALKNSIAFVGIDIGKNSFHVVGLDECGAIVLRQKWSRGQVEARFANMPPCLIGMEACVGAHHLSRGLQKLGHDARLMPARYVRPYSKGQKNDFRDAEAIAEAVQRPTMKFVASKTADQLDLQAMHRVRERLVSQRTGIINQIRAFLLERGVAVRQGLRFLRSELPGILARPSDILSPRMVRIIEDLAGDWHRLDERIEGLSSEIEAIARRDSSCERLMSVPGIGPIISSAMIAAIGAGDVFSKGRDFAAWLGLVPKQISTGDRTVLGKISKRGNRYLRVLFVQAAWVVLIRPKSWERHGLKSWIEAAKKRLHRNVLAIALANKLARIAWSVLAHGRSFEASKLAEVAAKSA

SEQ ID NO: 12526 - protein, 344 aa, unidentified
  source 1..344: note = protein_ea2823f
  REGION 7..149: note = RuvC_domain
  SITE 10: note = RuvC_P1
  SITE 53: note = RuvC_P2
  SITE 88: note = RuvC_P3
  SITE 90: note = RuvC_P4
  SITE 93: note = RuvC_P5
  REGION 211..297: note = Tnp_domain
  SITE 219: note = Tnp_P1
  SITE 249: note = Tnp_P2
  SITE 257: note = Tnp_P3
  SITE 258: note = Tnp_P4
  SITE 270: note = Tnp_P5
MSTIKVLGIDLGKSSFHVIGRDYSDNQIIRKKFSRSALIHFLHQLTPCTIAFEACGGAHWLGRQCESIGHTVRLIPPQYVKPFVKSNKNDFIDAEAICEASTRPNMRFVSVKSEEAQVISAIHKARHGYIKDRTACMSRIGALLLEFGVALPTGHSVMKQLFNWLAQQKQKIPGLLMQELMELHEYYLFLNENIDRQDKKLKQLVETNPIGQLLKTIPGIGDMTASLCIANISSATDFKSGRNMAAWLGLVPAQHSTGGKPKLLGISKRGNKELRTLFIHAARAVMSRPDKTGKIYGEWLINLRATKPFNVVTVALANKLARIAWAVMKTKQAFNNNALAPSLQ

SEQ ID NO: 12527 - protein, 341 aa, unidentified
  source 1..341: note = protein_1621dab
  REGION 7..149: note = RuvC_domain
  SITE 10: note = RuvC_P1
  SITE 53: note = RuvC_P2
  SITE 88: note = RuvC_P3
  SITE 90: note = RuvC_P4
  SITE 93: note = RuvC_P5
  REGION 209..294: note = Tnp_domain
  SITE 217: note = Tnp_P1
  SITE 247: note = Tnp_P2
  SITE 255: note = Tnp_P3
  SITE 256: note = Tnp_P4
  SITE 268: note = Tnp_P5
MSELALVGIDLGKHSFHLHGQDKPGRELFRKKLSRQQMMRFFSNLPACTVVMEACAGAHFVARQLMGMGHQAKLISPQFVRPFVKGNKNDFVDAEAICEAASRPSMRFVSPKTEAQQTLSVLHRLRESLVRDRTKSVNQLHGFLLEFGISLPKGLAIMKRLSSVLAEHELPVRLAVLLQRLHEHFVYLDEQIKALDKELAGQLAEDDLGRRLLGVPCVGPITASLLAVEMGDGKQYGCSRDFAASVGLVPRQYSTGGKANLLGISKRGDKNLRRLLVQCARVYMQRLEQQTGPLADWVRSLLMRRHSNVVACALANKLARIAWAMSVRHTEFAAGPGTLNA

SEQ ID NO: 12528 - protein, 343 aa, unidentified
  source 1..343: note = protein_27caded
  REGION 1..104: note = RuvC_domain
  SITE 4: note = RuvC_P2
  SITE 44: note = RuvC_P3
  SITE 46: note = RuvC_P4
  SITE 49: note = RuvC_P5
  REGION 210..300: note = Tnp_domain
  SITE 218: note = Tnp_P1
  SITE 248: note = Tnp_P2
  SITE 256: note = Tnp_P3
  SITE 257: note = Tnp_P4
  SITE 273: note = Tnp_P5
MVVESSGHYWWPLASHLGRAGLPLAVVNPLEAKYFAKSRLQRSKSDPADARTLAAALGMREQPPVREPLLGAEVREAARFSMRLVRDQANVCQRLLRLVEIGFPELKEAFEDPTCDTALAVLRQAPTARAATRRRLGTLAQAVRPGGRRALGQGRASRIQELARETIAPPELDQQMAFEVGLLIEQYDLLGRQIEAAEKRVAELLDSELARRLQTIPGVGPTIAASLIAEIGDIWRFDDFDQLAAYAGTHPKEQSSGRHGERPETSWRMAKTGNAHLRSALYRLAVVGTQHNPIIKEHYRRKREQGKAPMNALGHCMGKALAIVWGVWRSGQDFDPSKGGPRT

SEQ ID NO: 12529 - protein, 323 aa, unidentified
  source 1..323: note = protein_88aa52f
  REGION 9..156: note = RuvC_domain
  SITE 12: note = RuvC_P1
  SITE 57: note = RuvC_P2
  SITE 97: note = RuvC_P3
  SITE 99: note = RuvC_P4
  SITE 102: note = RuvC_P5
  REGION 196..280: note = Tnp_domain
  SITE 204: note = Tnp_P1
  SITE 233: note = Tnp_P2
  SITE 241: note = Tnp_P3
  SITE 242: note = Tnp_P4
  SITE 253: note = Tnp_P5
MSLPNPICVGIDVSKASLDVAANKEDIEQFTTSNDVDGFDAIFARLKEHSVALVLMEATGGLEAAIACSLQDKGLDVVVINPRQARDFARAMGYLAKTDRIDAKALAQMAEVIHRHPDRKRFIRAIPDADRQELIAMVVRRRQLITMLVAERNRLPLSHPQSRESINIIVRALKDELARIDKDMDRHIREHFKELADKLCTIKGVGLMTVAALLAEVPELGKLSRRKISALVGVTPVNRDSGTLRGRRTIFGGRAGVRTALYMAALVATRFNPVIKTFYSRLLAIGKPRKVALVACMRKLLTILNAMVRKGEKWEESYHRITS

SEQ ID NO: 12530 - protein, 346 aa, unidentified
  source 1..346: note = protein_b1d86df
  REGION 14..156: note = RuvC_domain
  SITE 17: note = RuvC_P1
  SITE 60: note = RuvC_P2
  SITE 95: note = RuvC_P3
  SITE 97: note = RuvC_P4
  SITE 100: note = RuvC_P5
  REGION 218..303: note = Tnp_domain
  SITE 226: note = Tnp_P1
  SITE 256: note = Tnp_P2
  SITE 264: note = Tnp_P3
  SITE 265: note = Tnp_P4
  SITE 277: note = Tnp_P5
MGKSITNLSSVTTVGLDLAKHVFQVHSVDASGRVVVAKAIRRNKLLEFFASLPPCLVGLEACGSAHHWARELIKLGHDARMMPPAYVKPYIRRQKNDASDASAICEAVTRPSMRFVGVRSLENQAALMRHKTREMLVSQRTRLLNALRGHLTEVGVIAAQGPRHGRELAELIEACDEIIPFEVCEALAPLVVQLRNLDEAIARLDRIIAELAQKDETARRLMSIPGFGPITASAMAATIQDTSSFAGPREFAAFLGLTPKQNSSGGKQKLGRISKMGNRNLRKLLVVGAHAVLFHRKPHTDPLRMWAKRLLEKKPFKLVAVALANKMARIAFAILRGKTVYREIPT

SEQ ID NO: 12531 - protein, 402 aa, unidentified
  source 1..402: note = protein_07e1b80
  REGION 8..164: note = RuvC_domain
  SITE 11: note = RuvC_P1
  SITE 60: note = RuvC_P2
  SITE 101: note = RuvC_P3
  SITE 103: note = RuvC_P4
  SITE 106: note = RuvC_P5
  REGION 270..356: note = Tnp_domain
  SITE 278: note = Tnp_P1
  SITE 308: note = Tnp_P2
  SITE 316: note = Tnp_P3
  SITE 317: note = Tnp_P4
  SITE 329: note = Tnp_P5
MAASQVWAGVDVGKEHHWVCVVDDNGAVMLSRRLVNDEQPIRELVAEIEQLADEVSWTVDLTTVYAALLLTVLADAGKPVRYLAGRAVWQASAVYRGGEGKTDAKDARVIADQSRMRGTDLPVLHPDDVLITELQMLTAHRADLVADRTRTINRLRQQLIAVCPALERAAQLTQDRGWVVLLTRYQRPKAIRQSGVSRLTKMLGDAGVRNAATIAAAAVAAAKSQTVRLPGEDVAAGLVAELAGEVVALDDRIKSTDADIEDRFRRHPAAAVITSMPGMGFRLGAELLAAVGDPALIGSADQLAAWAGLAPVSKDSGKRTGRLHTPKRYSRRLRRVMYMSALTAIRCDPGSKAYYQRKRDEGKRPIPATICLARRRTNVLYALIRDNRTWQPDSPPITKSAA

SEQ ID NO: 12532 - protein, 343 aa, unidentified
  source 1..343: note = protein_e2c9d17
  REGION 7..148: note = RuvC_domain
  SITE 10: note = RuvC_P1
  SITE 53: note = RuvC_P2
  SITE 88: note = RuvC_P3
  SITE 90: note = RuvC_P4
  SITE 93: note = RuvC_P5
  REGION 211..298: note = Tnp_domain
  SITE 219: note = Tnp_P1
  SITE 249: note = Tnp_P2
  SITE 257: note = Tnp_P3
  SITE 258: note = Tnp_P4
  SITE 270: note = Tnp_P5
MDVRMMIGVDLAKNVFQAHGAKMNGEIVFRKKLTRAKFREFMAGHEPAVVVLEACGSAHYWARELRLMEHEVKLIAPQYVRPFVKRMKNDAADAEAIVVAAQRPEMRFVEPKTEEQQAKAFLFRSRERLVHQRTEIANAARSGLYEFGHVVPQGIHQIVKVQGIIDDPDCDLPEMVIEEVKAMLEQIAWLTDRINGKTARIKDLATRTDQSRQLQTMPGIGPMTALAIDAFAPPMEQFKCGRHFAAWLGLVPRQFSSGGKERLGRVSKAGQADIRRLLIIGAMSRLNWLRRKRQAETTWLTRMTARKPRMLVAVALANKMARGIWAMLTRGEDFRDPALAVAA

SEQ ID NO: 12533 - protein, 319 aa, unidentified
  source 1..319: note = protein_ff4612d
  REGION 9..152: note = RuvC_domain
  SITE 12: note = RuvC_P1
  SITE 56: note = RuvC_P2
  SITE 96: note = RuvC_P3
  SITE 98: note = RuvC_P4
  SITE 101: note = RuvC_P5
  REGION 192..277: note = Tnp_domain
  SITE 200: note = Tnp_P1
  SITE 229: note = Tnp_P2
  SITE 237: note = Tnp_P3
  SITE 238: note = Tnp_P4
  SITE 249: note = Tnp_P5
MAQNDLVVVGIDVAKEKVDVCVRAFASRQTFPSTAPGRRKLVGWLRKHNVNKAVMEASGGYERDWNKALRQAGIEVRIVDPKRVRSFALSAGRLAKNDAIDAEMIAWFAETFSEAPSQTHDPAHEELLALVKARIALVELKTRLQNQNEHAASGPVQKAHARILKSLAAEIAKLEAAISAKVKATQDFTERAEIIESVPGFAETTSATLLAGMPELGQVSDEIAAALIGVAPFDDDSGKRHGERHIKGGRRWVRNAIYMPCLGAATQNNPVLKAFYQRLIAKGKEPKVALTACMRKLIVILNTMIARRQKWNPTRYAVA

SEQ ID NO: 12534 - protein, 320 aa, unidentified
  source 1..320: note = protein_a82365c
  REGION 7..147: note = RuvC_domain
  SITE 10: note = RuvC_P1
  SITE 52: note = RuvC_P2
  SITE 92: note = RuvC_P3
  SITE 94: note = RuvC_P4
  SITE 97: note = RuvC_P5
  REGION 187..272: note = Tnp_domain
  SITE 195: note = Tnp_P1
  SITE 224: note = Tnp_P2
  SITE 232: note = Tnp_P3
  SITE 233: note = Tnp_P4
  SITE 245: note = Tnp_P5
MSDSLDIGVDVDSKEFVPAVADRKAGDRVANTRAGIAKWLKTLPQRCRIGMEATGRYYELLARMAGQAGHVVYVIDPRLIKNYARATGSRGKTDAMDAQAIARYVKKESDRLREYVPRTDEQQQMHDLLRKRRALVETRARLEQSFGVSKSDPGELSDLFCALAGTLSELESELQRLGRDGEHGALYKRLLTIPGIGPAVASHLIYYMTRWPLANANAWIACTGLDPRPNESGGRTGRRRLSKQGAPMLHQMLYMAAMGLKRCRRGQPLYDELSKRGHPSTAVFNILARKLARIAWGVFKSGRDFDPAMLKVGQACFQQA

SEQ ID NO: 12535 - protein, 334 aa, unidentified
  source 1..334: note = protein_5ce342b
  REGION 6..147: note = RuvC_domain
  SITE 9: note = RuvC_P1
  SITE 51: note = RuvC_P2
  SITE 86: note = RuvC_P3
  SITE 88: note = RuvC_P4
  SITE 91: note = RuvC_P5
  REGION 208..299: note = Tnp_domain
  SITE 216: note = Tnp_P1
  SITE 246: note = Tnp_P2
  SITE 254: note = Tnp_P3
  SITE 255: note = Tnp_P4
  SITE 267: note = Tnp_P5
MALELLAIDLGKRSFHLYGIDTDGVVLSRKVSRAKLAEVVNEIAPATIAMEACASAHHWARCWLAAGREVRLINPRFVKAFVKGSKNDAVDAEAIFEAAARPTMRFVPVKSTDQQDVQSLHRARDRLICHRTALINHTRGLLAEYGIVLPQGPWRFMAQAPTVITDAELSDLARSIFSELLDQLDDLDRRIKKLDAMIVKLCRANETCRRLAQLPGVGPIIATAIVAAVNDGRQFRSGREMAAWIGLVPRQYTTGGKPRLGGIGHRANHYLRRQLIHGARAVVSRLSKHDDQRSTWLRALVARRGFNRAIVALANKTARIAWVLLTKKAAYAAP

SEQ ID NO: 12536 - protein, 388 aa, unidentified
  source 1..388: note = protein_b76223c
  REGION 4..160: note = RuvC_domain
  SITE 7: note = RuvC_P1
  SITE 58: note = RuvC_P2
  SITE 98: note = RuvC_P3
  SITE 100: note = RuvC_P4
  SITE 103: note = RuvC_P5
  REGION 264..351: note = Tnp_domain
  SITE 272: note = Tnp_P1
  SITE 302: note = Tnp_P2
  SITE 310: note = Tnp_P3
  SITE 311: note = Tnp_P4
  SITE 324: note = Tnp_P5
MIYVGIDIAKLNHFASAISSDGEILIEPFKFTNDADGFQLLVSKLNSLESDDIIIGLESTAHYGDNLVRYLVASSFHVCVLNPIKTSSMRKNNIRKTKTDKVDTYIIAKTLMMQDSFRFVSYYDLDLMDLKTLGRFRQKTIKQRTRLKIQLTSYVDQVFPELQYLFKSGLHQKSVYALLKEAPTPKDIASMHMTHLAHLLLVSSHGHFSKEKAKELRVLAQKSVGANDSALSIQITHSIAQIELLDRQLDRVESEMADIMKFHDSVIMTIPGIGYINGGMILGETGDIHRFSSPCKLLAFAGLDPSVYQSGNFSAKHTRMSKRGSRVLRYALINAAHNVVKNNATFEAYYNTKMAEGRTHYNALGHCAGKLVRIIWKMLTDEVEFNLN

SEQ ID NO: 12537 - protein, 388 aa, unidentified
  source 1..388: note = protein_0cd1dec
  REGION 5..163: note = RuvC_domain
  SITE 8: note = RuvC_P1
  SITE 62: note = RuvC_P2
  SITE 102: note = RuvC_P3
  SITE 104: note = RuvC_P4
  SITE 107: note = RuvC_P5
  REGION 263..352: note = Tnp_domain
  SITE 271: note = Tnp_P1
  SITE 301: note = Tnp_P2
  SITE 309: note = Tnp_P3
  SITE 310: note = Tnp_P4
  SITE 323: note = Tnp_P5
MEPVVGLDVSKGTSITQAFTARNETVGKSRCITHTEEGFEEFGVWLGDLRQKTGREPVVVLEATGHYHRGLVAYMERSGFRYMVINPLQSKRAKGIQLRKGKTDAADAWHLAEMYYRGDVKPHRKGDEQLLELQHLTRQHEFVTAMYVQAKLNMRALLDQVFPAYEGVFYDLYSQTAMRFLQEYLSGVVITEEIIRETVQRSHGQIWIREKLAQLQSIAPSKGRSPAQTIALQSMLGLLLAFQEQLEHLEQQIEVTVAVIPEVALLKTIPGVGDKLAAALVAEIGDATQFGHAKHLVAYAGLDPSVFSSGKFTASSSKITKRGSKRLRRALYIAVQCGLRKGKNERIKAYYDKKKKEGKPYKVAGIACANKLLHHVYAILTRGEPYRT

SEQ ID NO: 12538 - protein, 341 aa, unidentified
  source 1..341: note = protein_e1c0676
  REGION 6..146: note = RuvC_domain
  SITE 9: note = RuvC_P1
  SITE 52: note = RuvC_P2
  SITE 87: note = RuvC_P3
  SITE 89: note = RuvC_P4
  SITE 92: note = RuvC_P5
  REGION 211..298: note = Tnp_domain
  SITE 219: note = Tnp_P1
  SITE 249: note = Tnp_P2
  SITE 257: note = Tnp_P3
  SITE 258: note = Tnp_P4
  SITE 270: note = Tnp_P5
MEIDVLGIDLAKHVFQLHGADRRGRAVHRAKVSRSALFETVRTLGPRLVVMEACSTAHHWARRFQSLGIQVQLISPQYVAPFVKTNKNDRNDAEAIVEAASRPAMRFVTVKSIEQQDIQAAHRMRAILLRQRTALINQMRGLLGERGFAIARSPEAFKRAMPQLLSTSAVELTSFCQALLTELLQHLKTLEERVRLIEASIQSFMKQSSLCKKIAAVPGIGPITATAIVAAVGDAQQFRNGRHLAAWLGLVPRQYSSGGKPRLQGISRRGDTYLRTLLIHGARAVLRYVKAKTDPQSLWLQELIARRGYNCTAVALANKNARIVQALLSSDEHYRQPNAAA

SEQ ID NO: 12539 - protein, 325 aa, unidentified
  source 1..325: note = protein_d9630b3
  REGION 19..163: note = RuvC_domain
  SITE 22: note = RuvC_P1
  SITE 66: note = RuvC_P2
  SITE 106: note = RuvC_P3
  SITE 108: note = RuvC_P4
  SITE 111: note = RuvC_P5
  REGION 202..286: note = Tnp_domain
  SITE 210: note = Tnp_P1
  SITE 239: note = Tnp_P2
  SITE 247: note = Tnp_P3
  SITE 248: note = Tnp_P4
  SITE 259: note = Tnp_P5
MKPITSTAKPLIVEAPITIGIDVSKDHLDAARYPTGDTTRVANTRKGHMVLLRWISKNQVTRVVFEATGTYHRGLEQRLDAAGLTIAKVNPRQARRFAEATGKLAKTDRVDALMLARFGALLEPIARLVRSETQNQLAELVAARRSLMRDRTATLNRAQILTIDLLRRHARHRLRQIEAQITSLDATLDTIMANDPVLVRRREILLSIPGLGYVTAQALLADMPELGTMDEAQAASLAGLAPITRQSGKWQGKSFIRGGRACFRQALYMPALVAMRFNPDLKRVYSRLVDSGKHAKLAITAVMRKLIILANALLRDNRIWTPKGA

SEQ ID NO: 12540 - protein, 329 aa, unidentified
  source 1..329: note = protein_f64a3d9
  REGION 6..161: note = RuvC_domain
  SITE 9: note = RuvC_P1
  SITE 60: note = RuvC_P2
  SITE 98: note = RuvC_P3
  SITE 100: note = RuvC_P4
  SITE 103: note = RuvC_P5
  REGION 203..290: note = Tnp_domain
  SITE 211: note = Tnp_P1
  SITE 241: note = Tnp_P2
  SITE 249: note = Tnp_P3
  SITE 250: note = Tnp_P4
  SITE 263: note = Tnp_P5
MENLFIGVDISKDTFDVCIINQDHQIIRKDLVFDNSSKGIKVFFSEIGLLKVEGHWVCMEDTGHYGALLISKLLAAGVPTSVVNPLEIKRSSGITRGKSDPIDAFRIASYAATFKHKLEEYILPSQELQKLKAMMSQRELMIKMSVQAKNNLKSQLVLQQSVNIRELLKISKKTIVDLESNIKKLDKAMQELLNSQENLKESYDKITKVIGVGPITAIKCIVETRNFTKFTSPRKFSCHCGVAPFSYQSGTSVKGRSKTSKLRDKALKSVLFNAAATAINHDPQLKIYYKRKVDEGKHKLSVINAVANKIILRIFAVAMRDEPFVKFMQ

SEQ ID NO: 12541 - protein, 393 aa, unidentified
  source 1..393: note = protein_d779e9e
  REGION 44..189: note = RuvC_domain
  SITE 83: note = RuvC_P2
  SITE 122: note = RuvC_P3
  SITE 124: note = RuvC_P4
  SITE 127: note = RuvC_P5
  REGION 261..347: note = Tnp_domain
  SITE 269: note = Tnp_P1
  SITE 298: note = Tnp_P2
  SITE 306: note = Tnp_P3
  SITE 307: note = Tnp_P4
  SITE 319: note = Tnp_P5
MELLMSQAFDASKSLIALDQDSTIIVVIEMSQSKWLVAAVVPGVERQPLKKLDADKDALLELLHRWRNEASRAGRAIKRIAVAYEAGRDGFWLARWLRRHDVEAYVIHPTSIAVSREHRRAKTDRLDTELLMRAFLGWLRGERRHCSMAAIPTAEEEDARRPNRERENLVTEQTRIVNQMKAILARFGIRTFRPTLRTAAEKLDSLCTAEGTPLSENARAELRRHLVRLCVIRDQIRAIEQDRLRKLTTARAGERGPHAMVCLLARVTGVGIETADMLVNEVLSRPLRDRKAVARYAGLTGTPDESGRRRREKGLARAGNARVRRGMIEFAWRFLRFQSDSALAQWFNARTADGRRNTRKTMIVALARKLLIALWRLVTIGEVPEGVILRPAS

SEQ ID NO: 12542 - protein, 342 aa, unidentified
  source 1..342: note = protein_b405d33
  REGION 7..149: note = RuvC_domain
  SITE 10: note = RuvC_P1
  SITE 53: note = RuvC_P2
  SITE 88: note = RuvC_P3
  SITE 90: note = RuvC_P4
  SITE 93: note = RuvC_P5
  REGION 213..299: note = Tnp_domain
  SITE 220: note = Tnp_P1
  SITE 250: note = Tnp_P2
  SITE 258: note = Tnp_P3
  SITE 259: note = Tnp_P4
  SITE 271: note = Tnp_P5
MESAVTMGLDLGKSVFQVHGVDAAGAVVVQRRLTRSKLLAFFEKQPACLVGMEACAAAHHWGRELRKLGHRVRLIPPRYVKPYVKRQKNDAADAEAICEAVTRPNMRFVEIKSCEQQGTLVLHRVRLMLTRQRVQLSNAIRGHMAEYGLVAPVGRNGLQRLIAILGNPDDERVPAVARASLAPLVCQFDLINGQVLENDRRVRASARSTELGCRLMEVPGVGPVLASAMVAAVPNPTMFKSGRDLAAWIGLVPRQNSSGGKEKLGGITKQGDRYLRQLLVAGALAVIRYAQRHGTKRPWLVQLLARRTPKIAAVALANKMARMIWAMMVTGERYREPKVAAA

SEQ ID NO: 12543 - protein, 343 aa, unidentified
  source 1..343: note = protein_041d2e9
  REGION 6..149: note = RuvC_domain
  SITE 9: note = RuvC_P1
  SITE 54: note = RuvC_P2
  SITE 89: note = RuvC_P3
  SITE 91: note = RuvC_P4
  SITE 94: note = RuvC_P5
  REGION 213..308: note = Tnp_domain
  SITE 221: note = Tnp_P1
  SITE 251: note = Tnp_P2
  SITE 259: note = Tnp_P3
  SITE 260: note = Tnp_P4
  SITE 272: note = Tnp_P5
MKLMRVGVDLAKNVIQVHGVDRNEEPVWRRRLSRKKWLKVLLETAEPACEIGMEACSGAHHWARQLQAQGFTVKLIAPQFVKPYVKSNKNDANDAEAVCEAMSRPSMRFVAVKTVEQQDIQAVHRIRSELVGQRTAKANQIRGLVGEYGLIAAQELRQLRRAIPDWLEDPDNGLSERFRRLLHGLWDDVKRLDERVAELGQEIATIAEEAPAAQRLQQLRGVGPITATALVAAVGDGAQFANGRQMSAALGLTPRQHSSGGKDRLLGISKRGDSYLRTLLIHGARAVIRTAKHKEDRLSQWAMALAERGHPNVAAAALANKTARIAWAMLRNGTDYQPDRVTC

SEQ ID NO: 12544 - protein, 384 aa, unidentified
  source 1..384: note = protein_db46a02
  REGION 6..161: note = RuvC_domain
  SITE 9: note = RuvC_P1
  SITE 59: note = RuvC_P2
  SITE 99: note = RuvC_P3
  SITE 101: note = RuvC_P4
  SITE 104: note = RuvC_P5
  REGION 276..360: note = Tnp_domain
  SITE 284: note = Tnp_P1
  SITE 314: note = Tnp_P2
  SITE 322: note = Tnp_P3
  SITE 323: note = Tnp_P4
  SITE 336: note = Tnp_P5
MNTNAAGVDVSSRKSTVAVLRPFSEVVKLPFDVRHSAEDLTALAAQLKSIDGETRVVMEHIGRYYESVAKVLREAGLYVSAVNPLLIKECGNNSLRKVKTDKADAMKISKYALDNWTELRVHTPMDTIRYDLKALNRQFQLAAKQKTTTASNLIALQEQPFLGIRKLFDSPVRSDSTQKWVDFTHDFWHVGCVRSGSQNAFAERYRKWCKRNRYQFSMEKAAEVYALAKSAVVLVQKTSDTKMLIQEAANQLTAISRSVEIYHSEMNKLASQLPEYPVVMEMYGVGESLGPQLMAEIGDVRRFERKQSLVAFAGIDPAPSESGDYCSRSNKTTKRGSPYLRKTLFNIMIVHLKRGSGRRDGVPVLGQEACRGQAVLCLHDGCGK

SEQ ID NO: 12545 - protein, 414 aa, unidentified
  source 1..414: note = protein_a2a3602
  REGION 4..165: note = RuvC_domain
  SITE 7: note = RuvC_P1
  SITE 62: note = RuvC_P2
  SITE 102: note = RuvC_P3
  SITE 104: note = RuvC_P4
  SITE 107: note = RuvC_P5
  REGION 274..360: note = Tnp_domain
  SITE 282: note = Tnp_P1
  SITE 313: note = Tnp_P2
  SITE 321: note = Tnp_P3
  SITE 322: note = Tnp_P4
MLFVGDDWAEDHHDIELMDASGRRLARARLPEGVAGMARLHALIGEQLGEDADETAEQVVIGIETDKGPWVQALIAAGYRVCAVNPLQASRYRERYGMSGAKSDGADAHMLADMVRTDSHQLRPVAGDSAEAAAIKVVSRAHKSMIWERTRHMQRLRHALRDYFPAALEAFEELTTPDALELLAKAPDPASAAKLTLTQIRTALKRARRRGDIDTKAGKIQAALRAEHLGQPAVVAQAYATTIRAATAVLATLNEQIKTLQGQVEQHFGQHPDAEIVLSQPGLGPILGARVLAEFGDDQHRYTSAKARKNYAGTSPITRASGKKKVVAARYVHNDRLIDALLSQVVPAMTASPGARALYDELRARGTDHFAACRHVANRLVGILHGCLKTRTRYNEETAWAHRSAKPEESAVAA

SEQ ID NO: 12546 - protein, 353 aa, unidentified
  source 1..353: note = protein_f18f713
  REGION 28..177: note = RuvC_domain
  SITE 31: note = RuvC_P1
  SITE 79: note = RuvC_P2
  SITE 119: note = RuvC_P3
  SITE 121: note = RuvC_P4
  SITE 124: note = RuvC_P5
  REGION 220..307: note = Tnp_domain
  SITE 228: note = Tnp_P1
  SITE 258: note = Tnp_P2
  SITE 266: note = Tnp_P3
  SITE 267: note = Tnp_P4
  SITE 280: note = Tnp_P5
MSKQIIALCKSTDSSQKYPAAQGKKLFCGIDVGAEILAIAIMELDRPCVQREFANTVAGHKALLNWLKKFKSQVRVSLEATGIYSMDLAMALDATEWVEVAVLNPKRVHDFARTLRRSKTDSADAQVLAEFSLRMPFAVWQKPSQSALALRAVSRHLEALVVQQRREANRLHAAERSIATPRCVIADLKRSLAGVSRRIVKLRREAMTLIAADVQLNERFKLLTGVPGIAAVSALQILGELVLLAPDMKVRQWVARSGLDPVHQDSGTSVHKPSRISRAGSRHLRRALYMPALAAVRWDPHLKAFYEALLARHKRKLQALIAVARKLLHAIYGIFRTRTPYDGSKLFPHLETA

SEQ ID NO: 12547 - protein, 410 aa, unidentified
  source 1..410: note = protein_8d22cb0
  REGION 4..167: note = RuvC_domain
  SITE 7: note = RuvC_P1
  SITE 64: note = RuvC_P2
  SITE 104: note = RuvC_P3
  SITE 106: note = RuvC_P4
  SITE 109: note = RuvC_P5
  REGION 275..361: note = Tnp_domain
  SITE 283: note = Tnp_P1
  SITE 314: note = Tnp_P2
  SITE 322: note = Tnp_P3
  SITE 323: note = Tnp_P4
MLFVGDDWAEDHHDVEVMDASGRRLAKARLPEGVAGMTRLHVMIAQALGDDVDADDDTVRVKIGIETDRGPWVRALVAAGYTVFPVNPLQAARYRERLALSGAKSDAADAHMLADMVRTDSHQLRPIAGDSPEAEAVKVVTRMHKTLIWERTRAGQRLRHALRDYFPAALAAFEDLDAADTLELLAKAPDPAAAARLSISQISAALKRARRRDIPAKAAAIQAALRVEQLGQPAVIVAAYAATVRALVALLGTLNEQVKALQGQVEAHFGRHPDAEIIGSQPGLGVILGARVLGEFGDDHHRYVTAKARKNYAATSPITRASGKKRTVAARFVHNDRLVDALMTQAFAALKASPGARAHYDQQRARGVSHNAALRQLANRLVGILHGCLKTSTRYDEATAWSYHLNEAAA

SEQ ID NO: 12548 - protein, 309 aa, unidentified
  source 1..309: note = protein_a6335a2
  REGION 5..152: note = RuvC_domain
  SITE 8: note = RuvC_P1
  SITE 52: note = RuvC_P2
  SITE 92: note = RuvC_P3
  SITE 94: note = RuvC_P4
  SITE 97: note = RuvC_P5
  REGION 184..269: note = Tnp_domain
  SITE 192: note = Tnp_P1
  SITE 221: note = Tnp_P2
  SITE 229: note = Tnp_P3
  SITE 230: note = Tnp_P4
  SITE 241: note = Tnp_P5
MSIHVGIDTGKSMLDVGFFPGERCERFANTAEGHRALLLALAPLEVPHIAIEATGGYERGIIDALAQAGYCVTRLASHRASAYSRAMGRFAKSDTLDAQILARMAANITPQPYEMPSPERGELAELVRCRLQMVSQRDDNGRRLKQTQLAAAQHALRGMIEAASTQIRELDRRIAKATKAVDPASRLREVPGVGPVVEATLIAYLPELGRLTRQQIAALVGVAPYVDQSGCRDGARRVRAGRWIVRRALYMAAWAAVRAKGTALGERYRALRARGKVAKVAIVACMRCLITAINAMVRDQAGWRHGAAV

SEQ ID NO: 12549 - protein, 268 aa, unidentified
  source 1..268: note = protein_0658f5c
  REGION 2..74: note = RuvC_domain
  SITE 14: note = RuvC_P3
  SITE 16: note = RuvC_P4
  SITE 19: note = RuvC_P5
  REGION 137..224: note = Tnp_domain
  SITE 145: note = Tnp_P1
  SITE 175: note = Tnp_P2
  SITE 183: note = Tnp_P3
  SITE 184: note = Tnp_P4
  SITE 196: note = Tnp_P5
MPPAYVKPYVKRQKNDMADAEAICEAVTRPTMRFVETKTCEQQSILMLHRVRLMQMRQRTMLTNAIRAHLAESGVVAKIGREGVDELLLMVRDGDERVPELARACILALAEQLVLFKRQILEMDRRITACHRASEVSRRLAEIPGVGPLLASALVAHVPNPKAFSSGRNLAAWIGLVPKQNSSGGKERLGGVTKQGNRYLRSMLTVGALAVIRFAQRHGTKRPWIVQLLARRATKVAAVALANKMARMVWAIMAKGERYREPVVGQAA

SEQ ID NO: 12550 - protein, 343 aa, unidentified
  source 1..343: note = protein_4df9ac7
  REGION 7..149: note = RuvC_domain
  SITE 10: note = RuvC_P1
  SITE 53: note = RuvC_P2
  SITE 88: note = RuvC_P3
  SITE 90: note = RuvC_P4
  SITE 93: note = RuvC_P5
  REGION 212..297: note = Tnp_domain
  SITE 220: note = Tnp_P1
  SITE 250: note = Tnp_P2
  SITE 258: note = Tnp_P3
  SITE 259: note = Tnp_P4
  SITE 271: note = Tnp_P5
MSQVKITGIDLAKTNFYLFSINAYGKPVGKMKLSRSNLLNWLVQQPPMTVAMEACGASHHWAREIQKLGHTAILLPAQHVRAYQRRQKNDYNDAQAIAEACQHGTIRPVPIKTLDQQDIQTFLKMRQLISMERTQLINHVRGLLAEYGIVLNKGATELRRTLPVLLEDAENELTDAMRALLHRQYTRLITLDDELEWYNAEQKKYVHQDPVCQRLLAIPGFGPLVSQVIKSWMGDGKQFKRGRDASAALGLVPRQCTTGGKQVLLGITKCGNQYVRSMLIHGARAVLFRSAEKTDLLSVWVNRIREKRGFNRAVVALVNKLLRISRVIIARNELYLPAALKNQ

SEQ ID NO: 12551 - protein, 342 aa, unidentified
  source 1..342: note = protein_7814589
  REGION 1..148: note = RuvC_domain
  SITE 2: note = RuvC_P1
  SITE 53: note = RuvC_P2
  SITE 89: note = RuvC_P3
  SITE 91: note = RuvC_P4
  SITE 94: note = RuvC_P5
  REGION 220..303: note = Tnp_domain
  SITE 226: note = Tnp_P1
  SITE 256: note = Tnp_P2
  SITE 264: note = Tnp_P3
  SITE 265: note = Tnp_P4
  SITE 276: note = Tnp_P5
MDTHLDTHTAALCDARGRAVARLQVPATAAGYAQLLAWARSAAGGSRAVWAVEGTRHYGLGLARYLASQGQQVTEIDNTRHVGKRRAGKSDPIDAVRAARELLARPHAAQMRADGDREALRLLMVDRDNAVQSCKTARTVLAAVLVTAPAELRERLRQLPRTRRAQQCAALACPAQADRQTRVLHQTLIRLGQRITALASEAAELETQIAAIVEDMAPGLVAAEPGTGALSAAQILLSWSHAGRIRSEAAFAMLSGTAPVPVSSGRTDRHRLNRLGDRQLNRALHIVAVNRMRCHPPTQAYVRRRLAEGKTERDIRRCIKRYLARHLYRALNKQLNQAAQQT

SEQ ID NO: 12552 - protein, 345 aa, unidentified
  source 1..345: note = protein_4f35dba
  REGION 6..148: note = RuvC_domain
  SITE 9: note = RuvC_P1
  SITE 52: note = RuvC_P2
  SITE 87: note = RuvC_P3
  SITE 89: note = RuvC_P4
  SITE 92: note = RuvC_P5
  REGION 212..297: note = Tnp_domain
  SITE 219: note = Tnp_P1
  SITE 249: note = Tnp_P2
  SITE 257: note = Tnp_P3
  SITE 258: note = Tnp_P4
  SITE 270: note = Tnp_P5
MKLTTVGIDLAKNVFQVHGVDERGKPVLKKQLKRDQLAPFFAVLAPCLIGMEACGSAHHWARKLQAFGHTVKLMAPQFVKPYVKTNKNDVADAEAICEAVARPNMRFVPIKTTEQQGILAMHRARQGFVKARTAQANAIRGLLGEFGIVIAQGIGHIAERLPGILEDGENGLPGSFRQLMQRLGDHLKELDRQVGQLEREIQQWHRGNEASCKLAEIPGIGPITASALVASVGDAKSFANGRQMAAWLGLVPRQHSSGGKSTLLGISKRGDSYLRTLLVHGARAVVRYAEGKTDPSSDWLKGLLARRNTNVAVIAQANKNARIAWALLAHDRRFRSGYTPAVAGA

SEQ ID NO: 12553 - protein, 392 aa, unidentified
  source 1..392: note = protein_8beb0c8
  REGION 4..158: note = RuvC_domain
  SITE 7: note = RuvC_P1
  SITE 57: note = RuvC_P2
  SITE 97: note = RuvC_P3
  SITE 99: note = RuvC_P4
  SITE 102: note = RuvC_P5
  REGION 263..351: note = Tnp_domain
  SITE 271: note = Tnp_P1
  SITE 302: note = Tnp_P2
  SITE 310: note = Tnp_P3
  SITE 311: note = Tnp_P4
  SITE 324: note = Tnp_P5
MLFVGIDIAKRNHEASVIAQDGRVVRKAMRFANSQAGYNKFMDMVGGLSEPVVFGMEATGHYWLTLYAHLRNDGFTVHVINPIQSDALRGMYIRKTKTDSVDSVIIADVIRFGRYCETSVEPGDLHAMRELCRQRFYVIDMASDLKRKVIALLDQVFPEYEKLFSDTFGVSSMELLSQYTTPEEMLSVSSQQLAEVLEKASRGRLGAEKAAEIQDAARNSFGIVLASSSFSLIIRQYIEQIRSLEASVDVFDAEIARLLSGFDTQLTTITGIGPTLAAVILSEIGGDIRRFSSPAKLAAYAGVDPTVKQSGDFSGTRMKMSKRGSPYLRRAIWLASTVAAFKDPAIHALYERKRAEGKDHMTVIGHICRKMISIIFAVLRDNTPYLPAVIPD

SEQ ID NO: 12554 - protein, 345 aa, unidentified
  source 1..345: note = protein_a2ebacc
  REGION 6..147: note = RuvC_domain
  SITE 9: note = RuvC_P1
  SITE 52: note = RuvC_P2
  SITE 87: note = RuvC_P3
  SITE 89: note = RuvC_P4
  SITE 92: note = RuvC_P5
  REGION 211..299: note = Tnp_domain
  SITE 219: note = Tnp_P1
  SITE 249: note = Tnp_P2
  SITE 257: note = Tnp_P3
  SITE 258: note = Tnp_P4
  SITE 270: note = Tnp_P5
MNIASIGIDLGKTTFHLVALGERNKILLRKKFSRSQLLAYTANLPASLIGLEACAGAHFVGTALREQGHQVRLIPAQFVKPYRKSNKNDFLDAEAIAEAVTKQNMRFAQLKTQEQLDWQAMHRVRDRLVQRRTALINEIRGFLLERGITFAAQPIHLRKNLPTVIEDAEQNLSPRLRWLLDRVWQEWKQIETDIEAITEEIERISNEDARCRQLRQIPGFGPLVSTATVAAIGNGAAFRRGRDFAAWVGVVPRQYSTGGKQKLYGISKRGNVYLRRMLIHGARSVLFRVKYDTGGFGQWVHRLAQRAPSNKVVVAIANKLARIAWAVLSSGKDYRHQPLLQPAAA

SEQ ID NO: 12555 - protein, 414 aa, unidentified
  source 1..414: note = protein_1e7695a
  REGION 13..172: note = RuvC_domain
  SITE 16: note = RuvC_P1
  SITE 69: note = RuvC_P2
  SITE 109: note = RuvC_P3
  SITE 111: note = RuvC_P4
  SITE 114: note = RuvC_P5
  REGION 280..366: note = Tnp_domain
  SITE 288: note = Tnp_P1
  SITE 319: note = Tnp_P2
  SITE 327: note = Tnp_P3
  SITE 328: note = Tnp_P4
MSRTGGEALRLFVGDDWAEQHHDVELMNASGRRLAKARLPEGMAGMTKLHAMIAEQLGEAAGEAEVVIGIETDRGPWVQALVAVGYTVLAVNPLQAARYRERLSVSGAKSDAADAHMLADMVRTDSHQLRTVAGDSAEAEAIKGVTRAHKTLIWERTRHAQRLRHALRDYFPAALQAFEDLAAADTLELLAKAPDPASAAKPTIGQITAALKRARRRGVADKAAAIQAALRTEHLGQSAAVTAAYAATAGSAVAVLAVLGEQIKALHGQVEDHFSHHSAAKIVLSQPGLGPVLGARVLAEFGDAEGRYVSAKARKNYAGTSPITRTSGKKKVVLARYVHNDRLTDALDSQAFTALQASPGARAYYDRLRAREVCHHAALRQVANRLVGIPHGCLKTDTLYDGATAWPHPLLLDT

SEQ ID NO: 12556 - protein, 401 aa, unidentified; identical to SEQ ID NO: 10302
  source 1..401: note = protein_ecc5efb
  REGION 9..163: note = RuvC_domain
  SITE 12: note = RuvC_P1
  SITE 61: note = RuvC_P2
  SITE 101: note = RuvC_P3
  SITE 103: note = RuvC_P4
  SITE 106: note = RuvC_P5
  REGION 270..357: note = Tnp_domain
  SITE 278: note = Tnp_P1
  SITE 309: note = Tnp_P2
  SITE 317: note = Tnp_P3
  SITE 318: note = Tnp_P4
  SITE 330: note = Tnp_P5

SEQ ID NO: 12557 - protein, 329 aa, unidentified
  source 1..329: note = protein_03703b4
  REGION 4..156: note = RuvC_domain
  SITE 7: note = RuvC_P1
  SITE 61: note = RuvC_P2
  SITE 101: note = RuvC_P3
  SITE 103: note = RuvC_P4
  SITE 106: note = RuvC_P5
  REGION 200..286: note = Tnp_domain
  SITE 208: note = Tnp_P1
  SITE 237: note = Tnp_P2
  SITE 245: note = Tnp_P3
  SITE 246: note = Tnp_P4
  SITE 259: note = Tnp_P5
MAHIGIDIGKKKLDCLWLRDMEKGKVKTKVFTNRHQDYPALLDWLTRQTGESPEALHVYMEATGIYHEPLAYWLHEAGVNVYVLNPAHAHHYAKSAGRLHKTDKADSRVLAEFGASRSHRRWTPEPEETRELKRLVARLEAVYQDIQREKNRLEKAQFSRDTGAETSIGHVLAALEREAKRLQEEIETHLDRHDHLKRDRQLLMSIPGIGPGLSTRLVAVLRSRPFESARQAAAFLGLVPTYYTSGTSVKKTPTLSKTGSAVMRRKLYMGAVVAMTHNPDIQAQYARLKARGKHSMSALGAAMRKLVHIAYGVLKTQTEYRPQPIPAGG

SEQ ID NO: 12558 - protein, 408 aa, unidentified
  source 1..408: note = protein_12655c8
  REGION 8..161: note = RuvC_domain
  SITE 11: note = RuvC_P1
  SITE 59: note = RuvC_P2
  SITE 100: note = RuvC_P3
  SITE 102: note = RuvC_P4
  SITE 105: note = RuvC_P5
  REGION 223..309: note = Tnp_domain
  SITE 231: note = Tnp_P1
  SITE 261: note = Tnp_P2
  SITE 269: note = Tnp_P3
  SITE 270: note = Tnp_P4
  SITE 281: note = Tnp_P5
MLVTAVMIGVDPHKGSHTAVAIGAAEEPLGRLRVPASAGQAQRLVTWAAKWPQRAWAVEGAGGLGHLLAQQLVAAGELVLDVQPKLAARVRLLEAGDSNKNDPNDAFSVAVAALRSKARRQVSADDHAAVLRVWSRRHRDLGRAKNQAACRLHAVLCELVPGGVPEEITAAQAARILGTPTPYGAAGQARIDLAAELLADMRRLDEQRRESKKKLAAAVRASGTSLTGIFGVGPVVAATVIGDAADVARFASRGHFAAYNGTAPIEVSSGNRKIYRLSLRGNRRINHAIHMAAITQIRYSHSQGRAYYDKKLAEGKTHKEALRSLKRRISDAIYARLRADARQAATSLNQGPGGQPGNDPDSSAAGSHPAHRLFGQATPGPDSTLRPATPAGPALPPGAVSKKTRRSP

SEQ ID NO: 12559 - protein, 352 aa, unidentified
  source 1..352: note = protein_8e08b5a
  REGION 4..159: note = RuvC_domain
  SITE 7: note = RuvC_P1
  SITE 59: note = RuvC_P2
  SITE 100: note = RuvC_P3
  SITE 102: note = RuvC_P4
  SITE 105: note = RuvC_P5
  REGION 222..307: note = Tnp_domain
  SITE 230: note = Tnp_P1
  SITE 260: note = Tnp_P2
  SITE 268: note = Tnp_P3
  SITE 269: note = Tnp_P4
  SITE 280: note = Tnp_P5
MVTVGIDPHKHVHVAVAVDAVGRQVGRPLTVKNGPHLITGLLTWIRSISGGTPVTWAIEDGHGFARRLADGLLLAGQEVVWVPTRLMVAHRKLHAATSAKSDPVDAAAAAYAAIATPGLDRHRIDEQVRELRVLVDHRADLVKRRTMVINQLKAQLHLWLDHTPGDLLRAKTVASVTALVADASLRPHVRQTLHDMLTEVAALNHRVRADDITIKELVNPLAPTLLQITGISHTSAAVLIAEIGDITRFSSSAKLARYTGCAPIPVYSSDNERHRLHRGGNRRLNSVFYTAAIVQKRWDPAAQKLLARHAPAKGTRGARRILQRHLVDVVHRAMHADQETWTHQIARCQQAA

SEQ ID NO: 12560 - protein, 343 aa, unidentified
  source 1..343: note = protein_eb84ca2
  REGION 5..152: note = RuvC_domain
  SITE 8: note = RuvC_P1
  SITE 55: note = RuvC_P2
  SITE 92: note = RuvC_P3
  SITE 94: note = RuvC_P4
  SITE 97: note = RuvC_P5
  REGION 212..300: note = Tnp_domain
  SITE 220: note = Tnp_P1
  SITE 250: note = Tnp_P2
  SITE 258: note = Tnp_P3
  SITE 259: note = Tnp_P4
  SITE 271: note = Tnp_P5
MKHYAGLDVSVKETTVCIVDEGGRICREMKVASHPDDLVEALKNPAWNLVRIGLEAGPLSQWLFSGLAGAGLPAICIETRHAKAFLKAQVNKTDRNDARGIAQMMRVNLFRPVHVKTLMSQKRRALLTARKLLQEKAIAIENDIRGLLRNFGLKVGIVGAAKFADRIQDLSGDIPELRDIMEVLLAARQKLREQFTVLHERLLSIVKGDTVCRRLMTVPGVGPVVALAFNATVDIPARFKNSKDVGPALGLTPRLHQSGEDNRVGRVSLCGDAMMRTLLYEAAQVLLTVVKKWSWLKAWAMNVAKRRGRQRATVALARRLAVIMHRIWSDGSEFRWAREEATA

SEQ ID NO: 12561 - protein, 310 aa, unidentified
  source 1..310: note = protein_4783c0d
  REGION 5..153: note = RuvC_domain
  SITE 8: note = RuvC_P1
  SITE 52: note = RuvC_P2
  SITE 91: note = RuvC_P3
  SITE 93: note = RuvC_P4
  SITE 96: note = RuvC_P5
  REGION 187..271: note = Tnp_domain
  SITE 195: note = Tnp_P1
  SITE 224: note = Tnp_P2
  SITE 232: note = Tnp_P3
  SITE 233: note = Tnp_P4
  SITE 244: note = Tnp_P5
MKDTVGIDISKATLDAYRLSSGEAAQFPNSAVGLRALRRWVGEQIPDLVVFEATGAYHAALERHFAGVLPLVKVNPVQARRFAQARGTRAKTDAVDARILAIMGAALDLVPDAPQDKGQPDLKELQIARMALIKERTRLLNRSKTQTLVLLKRQSKARLEQVKRQLVELEQALLDLLLQCPKRARAFEVLCSIPGLGQVTAVAILVECPEIGTMTRKQVASLAGLAPMTRQSGQWRGNAFIQGGRKFLRDAFYMPALVAARHNPDLRQRYQTMINAGKPAKVALTALMRKLIELANALVQQDRRWTPKTA

SEQ ID NO: 12562 - protein, 407 aa, unidentified
  source 1..407: note = protein_31b762f
  REGION 4..163: note = RuvC_domain
  SITE 7: note = RuvC_P1
  SITE 60: note = RuvC_P2
  SITE 100: note = RuvC_P3
  SITE 102: note = RuvC_P4
  SITE 105: note = RuvC_P5
  REGION 273..359: note = Tnp_domain
  SITE 281: note = Tnp_P1
  SITE 312: note = Tnp_P2
  SITE 320: note = Tnp_P3
  SITE 321: note = Tnp_P4
MIFVGVDWAEVHHDVCVMDAEGVVLARKRIPDSLVGLGELHTMVAEHLGDDDEPSEVIVGIEKDRGLIVTALIAADYQVFAINPLAASRYRERHHVSGAKSDPGDAKVLADLVRTDRHNHREVAGDSALSDAIKLLARTHQNTIWTRQRQVNSLRSALKDYYPGALEAFGTDLSGPDAVAILAIAPTPGVARTLSRARMTTALKRVGRSRHLEERVERIYEVLHREQLRQPATLENAYGVTTEAAMANIVQLNASLAKLEASLSEHFKKHPSAKVILSLPGMGTVLGARVLGEFGDDPNRYYDANSRRNYAGTSPITRASGKSRVVLARHSRNKRLAGALDQWAFSSLLPSPGARHYYDELRARDKHHRKAVRQLANKWVGILHACLENDCPYDEEIAWSPRKERAA

SEQ ID NO: 12563 - protein, 342 aa, unidentified
  source 1..342: note = protein_7d30224
  REGION 6..148: note = RuvC_domain
  SITE 9: note = RuvC_P1
  SITE 52: note = RuvC_P2
  SITE 87: note = RuvC_P3
  SITE 89: note = RuvC_P4
  SITE 92: note = RuvC_P5
  REGION 210..293: note = Tnp_domain
  SITE 218: note = Tnp_P1
  SITE 248: note = Tnp_P2
  SITE 256: note = Tnp_P3
  SITE 257: note = Tnp_P4
  SITE 269: note = Tnp_P5
MKDTIIGVDLAKRVFQLHGATMTGHVTFRKKLTRDQFRRFMAEHPSCLVVFEACGSASYWARQMAKLGHDAKLIAPQYVRPFVKRQKNDAADAEAIVIAARQPEMRFVVPKTEDQQARAMLFRGRERLVHQRTELVNALRAVLYEYGHVFPAGIGHLKRIEAVIEDPNCDLPALITAECRDLLAQIAEKTGRITERTTKLKALAAQSDRARRLQTMPGVGPLTAVAVEAFGPDMAQFKTGRDFAAWLGLVPRQHSSGGKDRLGRVTKAGQADIRRLLIIGAMSRLGWLGRRTIVEGSWLSRMLARKPKMLVAIALANKMARQIWAMLTKNEDYKDPALAGAA

SEQ ID NO: 12564 - protein, 316 aa, unidentified
  source 1..316: note = protein_f2f902c
  REGION 9..152: note = RuvC_domain
  SITE 12: note = RuvC_P1
  SITE 56: note = RuvC_P2
  SITE 96: note = RuvC_P3
  SITE 98: note = RuvC_P4
  SITE 101: note = RuvC_P5
  REGION 191..276: note = Tnp_domain
  SITE 199: note = Tnp_P1
  SITE 228: note = Tnp_P2
  SITE 236: note = Tnp_P3
  SITE 237: note = Tnp_P4
  SITE 248: note = Tnp_P5
MSKRSTDHAGIDTGKRRLDAALNKRGEELQVENGPEGHRRLSAWLRKHGVKRVGIEASGGYEMDVVAHLRRDGFTVVVFQPAQVRAYAKFHLQLAKNDKIDARLIAACTAAKESIHAAPDPRLAPLAAHLTFIDQIVEDIACCKTRLETCRDPRAQVYWKQEIARLGKLQKAEIALLEEAIRQHRDLAARLDLIASVDGIGLKTAIVILVRIPEIGRLSREQVAALVGLAPYDDDSGSRHGHRHIRGGRKRVRWGVYAAALPASLLHNPQLMAMYQRLRAAGKEHKVALVACARKLVIFANTVVARGTPWLPLGAF

SEQ ID NO: 12565 - protein, 343 aa, unidentified
  source 1..343: note = protein_3eff622
  REGION 5..152: note = RuvC_domain
  SITE 8: note = RuvC_P1
  SITE 55: note = RuvC_P2
  SITE 92: note = RuvC_P3
  SITE 94: note = RuvC_P4
  SITE 97: note = RuvC_P5
  REGION 212..317: note = Tnp_domain
  SITE 220: note = Tnp_P1
  SITE 250: note = Tnp_P2
  SITE 258: note = Tnp_P3
  SITE 259: note = Tnp_P4
  SITE 271: note = Tnp_P5
MEQYAGIDVSLESASICVVDANGRIVREVKVASEPEALIAWFRMLQVTPTRIGLEAGPLSQWLYAGMREAGLPVELLETRHVRDAFKAMPVKTDRTDARGIAQLMRLGWFRSVHCKSLPAQELRAILTARKLMQSKRHDLEMSLRGILRGFGLKVGQTTPRSFEARVRELTDGHVTLLAVADALLSARAVLAEQLGRLQKRLVSLARQDTRARLLMSTPGVGVLVALTYVAAIDDPARFKSSKAAGAHFGLTPRKYQSGETDVTGRISKIGDASVRTVLYEAANVILTRPVKGSSLKSWAMRVAKRAGMRKAKVALARKLAVVLHRMLVDGTEFVAARAAARV

SEQ ID NO: 12566 - protein, 345 aa, unidentified
  source 1..345: note = protein_7789ed0
  REGION 5..152: note = RuvC_domain
  SITE 8: note = RuvC_P1
  SITE 55: note = RuvC_P2
  SITE 92: note = RuvC_P3
  SITE 94: note = RuvC_P4
  SITE 97: note = RuvC_P5
  REGION 212..300: note = Tnp_domain
  SITE 220: note = Tnp_P1
  SITE 250: note = Tnp_P2
  SITE 258: note = Tnp_P3
  SITE 259: note = Tnp_P4
  SITE 271: note = Tnp_P5
MKYYAGLDVSVKETAICIIDETGKICRELKVTSHPDDLVSTLNNRAYNLVRIGLEAGPLSQWLFSGLAEAGLPAVCIETRHTKAFLKAQVNKTDRNDARGIAQMMRVNLFRPVHVKTLTSQKRRALLTARKLLQEKAIAIENDIRGLLRNFGLKVGIIGTIGFEARICELIDGTPDLGEIISPLLAAREKLRAEFAKLHRKVLDLVREDNTRRRLMTIPGVGPVTSLAFVSSIDVPARFKNSRAVGPALGLTPVLNQSGESHRVGRVSLCGDDMMRALLYEAAQVMLSRVKKWSWLKAWAMNIARRRGRSKAIVALARRLAVIMHRMWSDGSEFQWTRDNETIPA

SEQ ID NO: 12567 - protein, 359 aa, unidentified
  source 1..359: note = protein_cf48e45
  REGION 15..169: note = RuvC_domain
  SITE 18: note = RuvC_P1
  SITE 71: note = RuvC_P2
  SITE 107: note = RuvC_P3
  SITE 109: note = RuvC_P4
  SITE 112: note = RuvC_P5
  REGION 236..321: note = Tnp_domain
  SITE 244: note = Tnp_P1
  SITE 274: note = Tnp_P2
  SITE 282: note = Tnp_P3
  SITE 283: note = Tnp_P4
  SITE 294: note = Tnp_P5
MTAISIVAHSYPFVVGVDTHARNHVYAILAARTGELIDTRDFPTTSAGINRAIAWVARRTDADADTLWVIEGAASYGAVLAGAVAAEGYPVAEAPRMDAKKRHGVGKSDALDAHHIAAAALPLPQAKLCRPRLNEGVRQALRILVTARDAMSAERTRSVNSLTALLRTNDLGLDARRALSAAQIAEASRWRAREEELSLTIARTEATRLAKRVLELDDQLKANDKQVTELVQISEAAPLLHEKGFGSVTAATCLTAWSHQGRVRNEAAYASLAGVNPIPASSGNTVRHRLNRGGDRNLNRALHMVALTKMTHDEETRRYVEKRRTEGRTDREIRRCIKRYLARRVHRTLNAASPCLKSA

SEQ ID NO: 12568 - protein, 340 aa, unidentified
  source 1..340: note = protein_81fc683
  REGION 7..149: note = RuvC_domain
  SITE 10: note = RuvC_P1
  SITE 53: note = RuvC_P2
  SITE 88: note = RuvC_P3
  SITE 90: note = RuvC_P4
  SITE 93: note = RuvC_P5
  REGION 211..301: note = Tnp_domain
  SITE 219: note = Tnp_P1
  SITE 249: note = Tnp_P2
  SITE 257: note = Tnp_P3
  SITE 258: note = Tnp_P4
  SITE 270: note = Tnp_P5
MEKASMIGLDIAKNVFEVHGRSAAGEVVLRRSLRRGQVEKLFAKLAPAVIGLEACGSAHHWARVLGKHGHQVRLMPPAYVKPYVKRNKSDAIDAAACWEAVGRPDMRFVPVKTVEQQAALSLHRSRDLLVSQRTQLGNALRALLSEFGIVAGKGKAGLARLVDELRAGTLDLPADAVVAAMALADQRAALDAAADALERRITAQAKADEKARLLKTAPGVGPLSAHATLATLPDPSLFKSGRDFAAWLGLTPRLNGTGGKTRTGRITKQGNQPLRRLLVLGATAWLRQVKAHPEKGSPWLRGMLARRPSKVVAVAQAARTARILWAMLTHNQPYRAPAIG

SEQ ID NO: 12569 - protein, 250 aa, unidentified
  source 1..250: note = protein_b770457
  REGION 5..152: note = RuvC_domain
  SITE 8: note = RuvC_P1
  SITE 55: note = RuvC_P2
  SITE 92: note = RuvC_P3
  SITE 94: note = RuvC_P4
  SITE 97: note = RuvC_P5
  REGION 212..248: note = Tnp_domain
  SITE 220: note = Tnp_P1
MKHYAGLDVSVKETSICIVDETGAICREMKVPSHPEDLVQALRNPAWRLVRIGLEAGPLSQWLFSGLAETGLPAICIETRHAKAFLKAQVNKTDRNDARGIAQMMRVNLFRPVHVKTLTSQKRRALLTARKLLQEKAIAIENDIHGLLRNFGLKVGIVGTIGFDDRIRELSDGMPDVGEIMKPLLAARQKMRETIMELRRKLLSIVRDDEPCRRLMTIPGVGPVTSLAFTSTIDVPARFSNSRPSARRWG

SEQ ID NO: 12570 - protein, 342 aa, unidentified
  source 1..342: note = protein_96c76b3
  REGION 7..149: note = RuvC_domain
  SITE 10: note = RuvC_P1
  SITE 53: note = RuvC_P2
  SITE 88: note = RuvC_P3
  SITE 90: note = RuvC_P4
  SITE 93: note = RuvC_P5
  REGION 211..296: note = Tnp_domain
  SITE 219: note = Tnp_P1
  SITE 249: note = Tnp_P2
  SITE 257: note = Tnp_P3
  SITE 258: note = Tnp_P4
  SITE 270: note = Tnp_P5
MSETITVGLDLAKNVFQAHGADGSGRAVLRKKLRRDQVLEFFGRLPCCVGAMEACGGAHFWGREIGKLGHGVRLIPPAYVKPFVKRQKNDAADAEAICEEALRPTMRFVPVKSEETQGAAMVLRVRELLIRQRTQAINSLRGHLSEFGQIVPQGAANATKLIAIIEDPECDLPADAIPTLKVLVAALTQLEAEIGKLDTEIARRAKENELARRLMTVPGISPLIATAIATLAPPPETFRKARDFAAWLGLTPRQHSTGGKLRLGATTKMGERSLRRLLIIGANSVIIKRHTHAAAQPGTWLGGMLSRKPPMLVRVALANKMARIVWALMARGGVSQSPASAA

SEQ ID NO: 12571 - protein, 345 aa, unidentified
  source 1..345: note = protein_1a80d1d
  REGION 7..147: note = RuvC_domain
  SITE 10: note = RuvC_P1
  SITE 53: note = RuvC_P2
  SITE 88: note = RuvC_P3
  SITE 90: note = RuvC_P4
  SITE 93: note = RuvC_P5
  REGION 210..298: note = Tnp_domain
  SITE 218: note = Tnp_P1
  SITE 248: note = Tnp_P2
  SITE 256: note = Tnp_P3
  SITE 257: note = Tnp_P4
  SITE 269: note = Tnp_P5
MEKPIRIGIDTSKHVFQLHGVDAAEKPVLRKQLRRADMMMFFEKLPRTSVALEACGAAHHLARLLVSYGHEVKLIAPQLVKPYVKRGKNDAADAEAICEAMSRPSMRFVPIKTAEQQAGLMLVGVRERLIQMRTQVANSIRGYAAEFGLIAAKGICRIEQLLDRLAVDRSVPSLARALFATQGKIYRQLQEEIAETEAQLAQWHRADERARRLAEIPGVGMIGSSLLTMKAPAPELFASGRQFAAWMGLTPKDHSTGGKTRTGKITRAGDEILRSVLVAGATALLRHVRAGRGQNASPWLVDLLKRKPPKLVTVAVANKIARIAWKLMVSGQRYEPRGARQAAVV

SEQ ID NO: 12572 - protein, 422 aa, unidentified
  source 1..422: note = protein_7ec2151
  REGION 4..157: note = RuvC_domain
  SITE 7: note = RuvC_P1
  SITE 57: note = RuvC_P2
  SITE 94: note = RuvC_P3
  SITE 96: note = RuvC_P4
  SITE 99: note = RuvC_P5
  REGION 284..371: note = Tnp_domain
  SITE 292: note = Tnp_P1
  SITE 323: note = Tnp_P2
  SITE 331: note = Tnp_P3
  SITE 332: note = Tnp_P4
MLSVGIDWAEDFHRLALGRPGEGLLEEFNLPHQPGAVERLVARIAQLESDPAEVRVLIETRHGLLVEALLDAGFTVVPVNPDLVARRRGPARKKDDGEDARILCRMGLDQFLDLRKLVPHGELASELRAIARDDARSAQDQRRLLNRLRMDLLNTFPAALQIAGEDLAAPTQLRLLERWPTHQALAAATPEELVAFARAHHHGWPERFAEGVAQALTGNHFTARLGLVRAKADSIRLAAQQLLLIGQQRRAWERRMGALLLGAPRVGRARQPKADELGEKFPDGEIYLSFPGLGDRLAARVAAEIGDHFQQFESPNSLQCYAGKAPVTRRSGKSEFVVAHRLACNRHLANAVQQWAFCSLKESGWAREFYDAKVARGLGHHAALRSLGNRWLEVLWHCLKKRVAYDEATHVANRNRALGKAA

SEQ ID NO: 12573 - protein, 254 aa, unidentified
  source 1..254: note = protein_74bf55e
  REGION 5..152: note = RuvC_domain
  SITE 8: note = RuvC_P1
  SITE 55: note = RuvC_P2
  SITE 92: note = RuvC_P3
  SITE 94: note = RuvC_P4
  SITE 97: note = RuvC_P5
  REGION 212..254: note = Tnp_domain
  SITE 220: note = Tnp_P1
  SITE 250: note = Tnp_P2
MDYYAGIDVSLECSSVCVVDGQGKIVREAKVASEPEALIDWFAALEVPLARIGLEAGPLSQWLFAGLQASGLAVELLETRHVRDAFKAMPVKTDRKDARGIAQLMRLGWFRPVHCKSLPAQEVRALLTTRKLLQSKRHDVEMSIRGVLRGFGLKVGPTAPKTFERRVRELVAHHDTLEQIAEALLKTRAVLLCEFKTIEKRLVGLARRDAQVRNLMGVPGVGALVALTFSAAIDDPSRFRSSRMVGAHFGLTPR

SEQ ID NO: 12574 - protein, 339 aa, unidentified
  source 1..339: note = protein_1924743
  REGION 14..162: note = RuvC_domain
  SITE 17: note = RuvC_P1
  SITE 65: note = RuvC_P2
  SITE 105: note = RuvC_P3
  SITE 107: note = RuvC_P4
  SITE 110: note = RuvC_P5
  REGION 206..293: note = Tnp_domain
  SITE 214: note = Tnp_P1
  SITE 244: note = Tnp_P2
  SITE 252: note = Tnp_P3
  SITE 253: note = Tnp_P4
  SITE 266: note = Tnp_P5
MSKPIQSIQAMVFCGIDVSAASLAVAIQLQDRRFEERVFDNSASGHKALIRWLHKQKARARVSLEATGVYSLDLALALDGADGIEVAVLNPKLIHRFAQTLRRSKTDSADAQVLAEYSARMPFAPWRAPGLSGLELRSISRHIQGLTVEHARANNRLHAADKSTSTPRCVVTDLKRSMASLKLRIARLRGEALELVRSDEAMQERFELLIGMPGIAEISALQLLGELSALSPEMSVRQWVAHSGLDPAHRESGTSVHKPSRISRAGNRHLRRALYMPALVAVRWDLHLKAFYETLLSRHKAKLQALIAVARKLLHAIYGIFKSQMPYDGRKLFPQLQIA

SEQ ID NO: 12575 - protein, 354 aa, unidentified
  source 1..354: note = protein_5d85f0c
  REGION 14..167: note = RuvC_domain
  SITE 17: note = RuvC_P1
  SITE 65: note = RuvC_P2
  SITE 106: note = RuvC_P3
  SITE 108: note = RuvC_P4
  SITE 111: note = RuvC_P5
  REGION 229..314: note = Tnp_domain
  SITE 237: note = Tnp_P1
  SITE 267: note = Tnp_P2
  SITE 275: note = Tnp_P3
  SITE 276: note = Tnp_P4
  SITE 287: note = Tnp_P5
MPSALPAIPAPVVIAIDPHKASWTAVAVDERLQPLAAIRVGVSRDGYRKLRCFARRWSPALWAVEGATGLGASLTARLADDGIAVVDVPAKLARRVRMLSTGHGRKTDQADALSVGIAAHTATRLNTAVVDEAVAALRALTEHRDDLVRSRTQTINRLHALLTQLIPAGLPRGLTADTAAAALRSIRPRTVLARTLRQVAVELLSEVRRLDRRIAGATTALSAAVAASGTTLTELHGIGDVIAAKILARAGAVSRFRSESAFASYCGVAPIEVSSGDVQRHRLSRAGDRQLNYALHVMAMAQIKRATPGRDYYLRKRAAGKTHKEAMRCLKRRLADVVYRTMIHDTETSLLTAP

SEQ ID NO: 12576 - protein, 347 aa, unidentified
  source 1..347: note = protein_f118c2b
  REGION 7..149: note = RuvC_domain
  SITE 10: note = RuvC_P1
  SITE 53: note = RuvC_P2
  SITE 88: note = RuvC_P3
  SITE 90: note = RuvC_P4
  SITE 93: note = RuvC_P5
  REGION 212..297: note = Tnp_domain
  SITE 220: note = Tnp_P1
  SITE 250: note = Tnp_P2
  SITE 258: note = Tnp_P3
  SITE 259: note = Tnp_P4
  SITE 271: note = Tnp_P5
MQEVATVGLDLAKQVFQAHGADAQGAPLFNRKLRRAELVRFFEKLPPCLVGMEACSGAHYWARELSKLGHDVRLIPPAYVAPFVKRGKTDAGDAEAISEAVVRKTMRFVPVKTAEQQAAAMLLKTRALLVRQRTQVINALRGHLTELGIIAGAGVAKVESLIAIVRDDADARLPQTARFALTAIADEIEFLKRAASKLEDAIVREAKLDEDMRRLVTIPSIGAITAATIKALVPDPGGFKSARHFAAWIGLTPKPRSSGGKERLGRISKMGNPDLRSLLVVGATSVLRYTEKNATTMPWLAGIAARRPYKVAAVALANKMARIVWAVLNRGGVYNRPNNLAAGMVMA

SEQ ID NO: 12577 - protein, 350 aa, unidentified
  source 1..350: note = protein_98a801c
  REGION 6..149: note = RuvC_domain
  SITE 9: note = RuvC_P1
  SITE 54: note = RuvC_P2
  SITE 89: note = RuvC_P3
  SITE 91: note = RuvC_P4
  SITE 94: note = RuvC_P5
  REGION 213..303: note = Tnp_domain
  SITE 221: note = Tnp_P1
  SITE 251: note = Tnp_P2
  SITE 259: note = Tnp_P3
  SITE 260: note = Tnp_P4
  SITE 272: note = Tnp_P5
MKLTRVGVDLAKNVFELHGVDRAERPVWCKRLKRNRWIEEIEQNVEPGVEIGMEACGGAHHWARLLQSKGYRVRLIAPQFVKPYVKSNKTDANDAQAVCEAMSRPSMRYVAVKTIEQQDIQAVHRVRASLISERGAKANQLRGLAYEYGLVAPREIAALRLAVPAWLEDASNGLTVRLRALLSGLYADLRALDERVRELDKEIRAIGRENEAVGRLQQLRGIGPLIASALVAMIGDARQFKNGRHVAVALGLTPRQHSSGSKERILGISKRGDSYVRTLLIHGARSALRTAPGKNDRMSRWALALAQRSHVNVAVTALANKMARVAWAMLKHGSAYEPNGLAAYSARASG

SEQ ID NO: 12578 - protein, 320 aa, unidentified
  source 1..320: note = protein_aa8c3f7
  REGION 8..163: note = RuvC_domain
  SITE 11: note = RuvC_P1
  SITE 56: note = RuvC_P2
  SITE 96: note = RuvC_P3
  SITE 98: note = RuvC_P4
  SITE 101: note = RuvC_P5
  REGION 195..279: note = Tnp_domain
  SITE 203: note = Tnp_P1
  SITE 232: note = Tnp_P2
  SITE 240: note = Tnp_P3
  SITE 241: note = Tnp_P4
  SITE 252: note = Tnp_P5
MSVTSVVVGIDVAKAHVDVAVMGAKFDAQQFDNDAEGHSALAAALQPQGVALVVMEATGGYEATLACALQAAGLAVAVVNPRQARHFAKSMGRLAKTDAIDARILAEFAAVLVRREDLASLIRPLADAQQQALAAVVTRRRQLLTMLLSERQRLQLAIPVVRPSIEAMIEAIRKQLDEVEAQMVGHVREHYAALDKLLRSASGIGPVASATLIAELPELGRLNRRQIAALVGVAPMANDSGTSRGRRRVQGGRFEIRRVLYMATLTAATHNPTIKAFYQRLIAAGKLPKVALVACMRKLLTTLNAMVKTNTPWAADFHSA

SEQ ID NO: 12579 - protein, 393 aa, unidentified
  source 1..393: note = protein_8450974
  REGION 11..164: note = RuvC_domain
  SITE 14: note = RuvC_P1
  SITE 62: note = RuvC_P2
  SITE 103: note = RuvC_P3
  SITE 105: note = RuvC_P4
  SITE 108: note = RuvC_P5
  REGION 226..311: note = Tnp_domain
  SITE 234: note = Tnp_P1
  SITE 264: note = Tnp_P2
  SITE 272: note = Tnp_P3
  SITE 273: note = Tnp_P4
  SITE 284: note = Tnp_P5
MDGATTAGVVIGMDPHKRSVTIEVMTADESIVHRGRYATDEAGFTALLEHAEQWPQRVWAVEGCNGIGRHVATRLVAAGEQVVDVPPKLSARVRTFATGQGRKTDATDAHSVALVGTRMSGLRPVVADADRDVLRILVDRRRSIGEEHTYKINQLHALLLELVPGGAKRDLSAAQARKILTGVRPRDVVGKTRKRVATELVADLERLYARKKAANKELTVLLRATGTTLTDLHGIGPSGAARLLVEVGDITRFPDKGHFASWTGTAPIDASSGDNVRHRLSRGGNRKINRVLHIMAVVQLRNATEGRAYYDRKVAAGKTPNEAMRCLKRRLSDLVYRALLDDLSRGAATGPGGHTGNGSDSSATGSQPDTGSSDKSLPGPATTKPTTGIPKAS

SEQ ID NO: 12580 - protein, 400 aa, unidentified
  source 1..400: note = protein_e0f826f
  REGION 10..164: note = RuvC_domain
  SITE 13: note = RuvC_P1
  SITE 62: note = RuvC_P2
  SITE 102: note = RuvC_P3
  SITE 104: note = RuvC_P4
  SITE 107: note = RuvC_P5
  REGION 270..356: note = Tnp_domain
  SITE 278: note = Tnp_P1
  SITE 308: note = Tnp_P2
  SITE 316: note = Tnp_P3
  SITE 317: note = Tnp_P4
  SITE 329: note = Tnp_P5
MTERRARIWVGIDAGKGHHWAAAVDESGFQVWSKKIDNDEAAILEAVAEALAMAGAVDWAIDLSGTASALLLALLASHGQKPVYVPGRTVNRMSGAYRGEAKTDARDAFVIAETSRLRRDFAAVDVPAQLVADLALLVAHRTDLVADRVRMVNRLRDVLTGIFPALERAFDWSGSKGALTLLTYRQTPAGIRRVGRARLESWLRKRGVRSADKVAATALEAAGAQHTVLPGESIAASIVADLASQLLALDERIGGLDKQIKETFHAHPQAHIIESMPGIGPILGAEFVVAAGDLSAYADAGRLASAAGLVPVPRDSGRRTGNLHRPKRYSRRLRRVFYMSAQTSMIKDGPNRDFYLKKRAEGCGHVQALIALARRRVNVLWALLRDGREFTPAQPVAQAA

SEQ ID NO: 12581 - protein, 344 aa, unidentified
  source 1..344: note = protein_55e6024
  REGION 7..148: note = RuvC_domain
  SITE 10: note = RuvC_P1
  SITE 53: note = RuvC_P2
  SITE 88: note = RuvC_P3
  SITE 90: note = RuvC_P4
  SITE 93: note = RuvC_P5
  REGION 213..298: note = Tnp_domain
  SITE 221: note = Tnp_P1
  SITE 251: note = Tnp_P2
  SITE 259: note = Tnp_P3
  SITE 260: note = Tnp_P4
  SITE 272: note = Tnp_P5
MSRVITIGLDIAKNVFHAHGVDERGAMVFSRKLTRGKLLDFFARQPRCTVALEACGGAHHWARELQAMGHEVRLIPPAYVKPFVKRHKNDAIDAEAICEAAQRPGMRFVAVKSEEQQAAGLVFRTRDLAVRQRTQLINAIRGHLAEYGWVAPRGTAHMTMLADLLEDEEMISTLPEATRPMFKLMTDMLAELGKRIAVLDHEIAKRAKEDEAARRLMTIPGIGPIAATAIIALAPPIEAFRKGRDFAAWLGLAPRQHSTGGKQRLGSISKMGERTIRRLLIIGGSSMVRSACRHGAPAGSWLERILARKPRMLVSVALANKIARVVWALLTKKEDYKAPAAVVA

SEQ ID NO: 12582 - protein, 343 aa, unidentified
  source 1..343: note = protein_35929f7
  REGION 6..147: note = RuvC_domain
  SITE 9: note = RuvC_P1
  SITE 52: note = RuvC_P2
  SITE 87: note = RuvC_P3
  SITE 89: note = RuvC_P4
  SITE 92: note = RuvC_P5
  REGION 211..297: note = Tnp_domain
  SITE 219: note = Tnp_P1
  SITE 249: note = Tnp_P2
  SITE 257: note = Tnp_P3
  SITE 258: note = Tnp_P4
  SITE 270: note = Tnp_P5
MQIRSVGIDLGKTTFHLVALGDNGKVLVRKKFNQKQLITFTANLQTSLIGMEACSGAHFLGRALRRQGHDVKLIPAQFVKPFVKSNKNDFLDAEAIAEAVERKNMRFVPIKTDDQLDLQALHRVRDRLIARRTSVINQLRAFLLERGMTFAKMPTKLKFAMPEILENVDSNLTPRMRNLVGLLWSEWKELDQQIIAMNTEVEQIASSDPACQRLRQIPGIGPLIATAVVASIGNGAAFRKGRDFASWLGLVPRQYSTGGKAKLLGISKRGNSYLRKILIHGARAAVVRVKRERSPFGSWLDALQTRAPLNVVVTATANKLARIVWAVLSTGEEFRPGGRLLAS

SEQ ID NO: 12583 - protein, 370 aa, unidentified
  source 1..370: note = protein_5bb0863
  REGION 8..154: note = RuvC_domain
  SITE 11: note = RuvC_P1
  SITE 57: note = RuvC_P2
  SITE 94: note = RuvC_P3
  SITE 96: note = RuvC_P4
  SITE 99: note = RuvC_P5
  REGION 227..312: note = Tnp_domain
  SITE 234: note = Tnp_P1
  SITE 264: note = Tnp_P2
  SITE 272: note = Tnp_P3
  SITE 273: note = Tnp_P4
  SITE 285: note = Tnp_P5
MLNATTFIGLDVHARSIKAFGFNVITGEEFSSSFGYDHVAVSDWISSLPQPAKCVYESGVTGFDLQKKLTQDGIDCVIGAVSKMIKPAADKKKKNDRNDAKFLARMLSVGNITEVWIPDDECEAARDLVRALEDATEEVKCSKQLLSKFLLRHGLIFNEYSPTGQRKKNWTLAYWRWIKEIHFKEKTDQKTFEYYIDRVKASLEEKKRLEDLVKELACLPRWKKRIDSIRCIKGIDIISAANLVFEADEFSRFKNARAFASWLGLTPSEYSSGESVIRGGITKAGNKHLRRILVESSWHYLYASPSAKDLTKGQSPDPLARKHANKGTRRLTERRRYLLERGVQKNKANIATARELAGWVWAVGKIVEDN

SEQ ID NO: 12584 - protein, 345 aa, unidentified
  source 1..345: note = protein_d665eb2
  REGION 10..170: note = RuvC_domain
  SITE 13: note = RuvC_P1
  SITE 69: note = RuvC_P2
  SITE 109: note = RuvC_P3
  SITE 111: note = RuvC_P4
  SITE 114: note = RuvC_P5
  REGION 210..297: note = Tnp_domain
  SITE 218: note = Tnp_P1
  SITE 248: note = Tnp_P2
  SITE 256: note = Tnp_P3
  SITE 257: note = Tnp_P4
  SITE 270: note = Tnp_P5
MTNIIIKQVAGIDVAQNELEVSLGRIDQSLEKEVYASKTFANKASGFAALEVWIKKHTNPGAEVRFVMEATGVYHEKLAYYLSDQGRQVSIVLPNKINNYFKTLDVKTSTDKTASQAICQFGLERKLEVWQKPKKIFRDLKQLTRERDQLIADRTALKNQLHAENAEAFPNESSIKRITKRMQLINKQELEIRGELAEIVKTDSELVKKINKITTIPGVGKLTAVIALAETNGFELIRNQKQLVSYSGLDVKLKDSGTSVKGKPKISKRGNRHLRKAMHMPALTAMRCNEHHKAVFVRLVSKHGIKMKAAVAVQRKILELIYTIYKTDKAFDPNYEDAKNKVAQI

SEQ ID NO: 12585 - protein, 402 aa, unidentified
  source 1..402: note = protein_8357c1d
  REGION 4..160: note = RuvC_domain
  SITE 7: note = RuvC_P1
  SITE 57: note = RuvC_P2
  SITE 97: note = RuvC_P3
  SITE 99: note = RuvC_P4
  SITE 102: note = RuvC_P5
  REGION 274..361: note = Tnp_domain
  SITE 282: note = Tnp_P1
  SITE 312: note = Tnp_P2
  SITE 320: note = Tnp_P3
  SITE 321: note = Tnp_P4
  SITE 334: note = Tnp_P5
MNSVGIDVSKGKSMIAVMRPFGEVAVSPFEVRHTDSELCELAKLLRSLPGETRVVMEATGNYHLPVAWLLNDSGFYVSVVNAMLVHGYGNNSLRRAKTDKKDAIKLANYGLDHWLALPRYVPEEDTRLMLKNCYRQYQQYSKVQTMLKNNLISLLDTAFPDANRLFSSPPRADGSEKWVDFVATFWHCECVCGSSEKVFVAKYQKWCKKLGYNFSEDKALDIYASACGHFGVMPKTDTTKLLVEQAVSLLRVTSTALASLKQEMQSLAASLPEYPVVMKIFGVGPALGPQLMAEIGDVRRFHSKKALVAFAGIDAPPYQSGQMDVYSRSISKRGSSSLRRTLFLVMGIYLQNAPPDEPIYQFMDRKRSEGKPYKVYMMASANKFFRIYYATVKAYLDALDEA

SEQ ID NO: 12586 - protein, 319 aa, unidentified
  source 1..319: note = protein_e9c31f6
  REGION 3..148: note = RuvC_domain
  SITE 6: note = RuvC_P1
  SITE 50: note = RuvC_P2
  SITE 90: note = RuvC_P3
  SITE 92: note = RuvC_P4
  SITE 95: note = RuvC_P5
  REGION 189..273: note = Tnp_domain
  SITE 197: note = Tnp_P1
  SITE 226: note = Tnp_P2
  SITE 234: note = Tnp_P3
  SITE 235: note = Tnp_P4
  SITE 246: note = Tnp_P5
MLIGIDVAKAELVVAARPSGERWTVANDEHGVRALVERLRVEAPELIVLEATGGYELLSVAALVAAALPVVVVNPRQVRDFAKATGQLAKTDRIDADILALFAERVRPVVREIPDADAQELEALLSRRRQLLEMLGAERNRLGQVFGRGKQKVRKSLKGHIAFLERELRIADTDLGDMVRRSSAWREKDDLLQSVPGVGRVVSFTLLADLPELGRLSRREIAKLVGVAPLSRDSGTFRGRRFVQGGRASVRAVLYMGALVATKRNAVIRAFYQRLLTAGKPKKLALVACMRKLLTILNTMIRTGQRWSIDQSAPVPIST

SEQ ID NO: 12587 - protein, 347 aa, unidentified
  source 1..347: note = protein_ab17b32
  REGION 7..147: note = RuvC_domain
  SITE 10: note = RuvC_P1
  SITE 53: note = RuvC_P2
  SITE 88: note = RuvC_P3
  SITE 90: note = RuvC_P4
  SITE 93: note = RuvC_P5
  REGION 210..296: note = Tnp_domain
  SITE 218: note = Tnp_P1
  SITE 248: note = Tnp_P2
  SITE 256: note = Tnp_P3
  SITE 257: note = Tnp_P4
  SITE 269: note = Tnp_P5
MDEIIRIGIDTSKHVFQLHGVNAAEQPVLRRKMRRTEMIEFLEKLPPTVIAIEACGSSHHWARLLGSFGHEVKLIAPQLAKPYVKRGKNDAADAEALCEAMSRPTMRFVPAKTADQQAALMLVGMRSRLVRNKTQLANAIRGYAAEFGLTAAKGMCKIAPLLDRIAANATIPALARELFAAHAGEYARLEKELREVEAKVLVWHRANEASRRLAQIPGVGPIGASLLMMKTPAPELFASGRQFAAWMGLTPKDHSTAGKARQGIITRAGDEALRSTLVAGATALLRYVRAGSGKNASPWLLGMLKRKPPKLVAVALANKIARIAWKMMVTGESYRKNAELPELACAA

SEQ ID NO: 12588 - protein, 400 aa, unidentified
  source 1..400: note = protein_bef6ff4
  REGION 7..160: note = RuvC_domain
  SITE 10: note = RuvC_P1
  SITE 58: note = RuvC_P2
  SITE 99: note = RuvC_P3
  SITE 101: note = RuvC_P4
  SITE 104: note = RuvC_P5
  REGION 222..307: note = Tnp_domain
  SITE 230: note = Tnp_P1
  SITE 260: note = Tnp_P2
  SITE 268: note = Tnp_P3
  SITE 269: note = Tnp_P4
  SITE 280: note = Tnp_P5
MVEQVIIGVDPHKLSATIEVVDHNERMLGSGRFSTDQAGYSAMRALVKSWPERVWAVEGANGAGRPLAQRLLEAGEQVVDVPAKLAARVRLFDTGHNRKTDALDAHSVAVVAVRTSNLRALKVDGELEAMRILTDRREALTRRRVQTVCRLQALLAELLPGQAKRDITTGQAKAMLATVRPRDIAGKTRRRIAAEELAELIAVEAKIKKSTAELKDMVLARDSRLMDIHGIGAVVAARILADVGDVTRFADRNRFASWTGTAPLDASSGEQDRHRLSRAGNRRVNHMIHIAAVTQLRLDTEGRAYYRRKRAAGKKPQEALRCLKRRISDVIYRQLIADTKPAGKAVPGEHRGATPESSATDLPPHIGTSEKPLPGPQSRRYAQPTTARKNQPAKPLQDAS

SEQ ID NO: 12589 - protein, 391 aa, unidentified
  source 1..391: note = protein_6fa7fc1
  REGION 7..171: note = RuvC_domain
  SITE 10: note = RuvC_P1
  SITE 66: note = RuvC_P2
  SITE 106: note = RuvC_P3
  SITE 108: note = RuvC_P4
  SITE 111: note = RuvC_P5
  REGION 207..294: note = Tnp_domain
  SITE 215: note = Tnp_P1
  SITE 245: note = Tnp_P2
  SITE 253: note = Tnp_P3
  SITE 254: note = Tnp_P4
  SITE 266: note = Tnp_P5
MNLKYSVGLDVSSKKINACISIIDQKQKVVCKSSTVIANTLKGFATLEDWILKQKKEVLPVVVCMEATGIYHENCAYYLYGKGFDVSIILPNKAKKYLEAIGLKSKNDSIDAKGLSQMGAEQCLELWQPMGPFFYELRLLTRQHQNVTELKTVLKNQLDALSFAMHHLDAVTNQLEQTITLFETQLKELDKEIKAHLKSNKEVHCKAENILKMKGLGVLTLSTVLAETNGFTLFNNYKQLVSYAGYDVVEAQSGARVGKTKISKRGNSRLRRALHMPSLVVIQCQVKPFKDLFDRTYEKHGIKMKSYVAVQKKLLTMIYHLWKKNEAYDVNYQSNIQEEEQKLSSRAIGFEEDTIEKNSPNIEIEATQGKHPVSYRKKFPLGHTNIEKLAK

SEQ ID NO: 12590 - protein, 329 aa, unidentified
  source 1..329: note = protein_393e36d
  REGION 4..161: note = RuvC_domain
  SITE 7: note = RuvC_P1
  SITE 60: note = RuvC_P2
  SITE 100: note = RuvC_P3
  SITE 102: note = RuvC_P4
  SITE 105: note = RuvC_P5
  REGION 200..286: note = Tnp_domain
  SITE 208: note = Tnp_P1
  SITE 237: note = Tnp_P2
  SITE 245: note = Tnp_P3
  SITE 246: note = Tnp_P4
  SITE 259: note = Tnp_P5
MYYVGIDISKRFIDVCLLVDGIKGKRKTKVLPNDPNSALALAQWLILQKCDPSQAHIIMEATGVYHEHLADGLHQSDILVSVINPHRVREFAKGMGILTKTDKVDAYVLACYGCLKQPENWLPPSQEIRKLKALLQHRDSLLNDKQRIENRLSTLKSTTAPEEILTSLESIEQNLKDELARIERLIAEHIDKHPRLKNDLKLLKSIDGVGEQIGWNMLAIIRGNNFRSAEQVAAYLGVIPIERRSGTSVCGRARLSKIGPPGIRAKLYMGAIAAISWNSHVRALYERLRLKGKAKMVAIGAAMRKLVHLCYGVLHTQQPYDKNHGVVAG

SEQ ID NO: 12591 - protein, 264 aa, unidentified
  source 1..264: note = protein_d3a114f
  REGION 6..159: note = RuvC_domain
  SITE 9: note = RuvC_P1
  SITE 57: note = RuvC_P2
  SITE 98: note = RuvC_P3
  SITE 100: note = RuvC_P4
  SITE 103: note = RuvC_P5
  REGION 221..264: note = Tnp_domain
  SITE 229: note = Tnp_P1
  SITE 259: note = Tnp_P2
MGRVVIGMDPHKSSATIEIINDREKILDTGRYSTDTAGYRAMLAAGRKHRDRVWAVEGCNGIGRHLAQRLVADGEPVVDVPAKLSARARVFSTGQGRKTDPVDAHSVALVGLRTQGLRTIQADDATVALRLLIDRREQLGVTRVQVINRLHRLLLELLPGGAKKHVSVAQAKALLGKVRPRDIAGKTRRRLAAELIVDLASLDAKIKAADKELHQLITATGSTLRDLHGIGPANAARLLGDVADITRFADKARFASWNGTAPHH

SEQ ID NO: 12592 - protein, 299 aa, unidentified
  source 1..299: note = protein_25bc9ba
  REGION 1..71: note = RuvC_domain
  SITE 10: note = RuvC_P3
  SITE 12: note = RuvC_P4
  SITE 15: note = RuvC_P5
  REGION 175..262: note = Tnp_domain
  SITE 183: note = Tnp_P1
  SITE 213: note = Tnp_P2
  SITE 221: note = Tnp_P3
  SITE 222: note = Tnp_P4
  SITE 235: note = Tnp_P5
MRKSNIRKTKNDKVDTFIIIKALTLGNYSLITSRDINNLKLKGLCRSRRNLVTMRSKAKIQLVSYLDQIFPELAQFFKGNPHLNVSYQLLKEYSSPKQISSLHLTKLTNILHDNSRGRYGKQDAIRLRELAKSSVGIDNPSLSLQIKHAILQIELYTEQITEVEILYKSILDEINSPILTIPGMSYNQSAVIVGCIGDINRFEHSCQLLAYAGLDPSVVQSGNFQARSTRMSKRGSGMLRYSLIYAAHNVVLNNKTFKEYYELKRSQGKSHYCALGHVAHKLVRVIFKMLKDNVAFNLD

SEQ ID NO: 12593 - protein, 392 aa, unidentified
  source 1..392: note = protein_a2a19f4
  REGION 4..163: note = RuvC_domain
  SITE 7: note = RuvC_P1
  SITE 60: note = RuvC_P2
  SITE 101: note = RuvC_P3
  SITE 103: note = RuvC_P4
  SITE 106: note = RuvC_P5
  REGION 267..354: note = Tnp_domain
  SITE 275: note = Tnp_P1
  SITE 305: note = Tnp_P2
  SITE 313: note = Tnp_P3
  SITE 314: note = Tnp_P4
  SITE 327: note = Tnp_P5
MIYVGIDVAKDKHDCFVTNSDGEVLFKPFTISNNREGFDTLFQRISSVSEDLTKVKVGLEATGHYSYNLLGFLLDKGLPTYVINPLHTNLYRKSLSLRKTKTDKVDSRTIATMMMSDVNLKSYSDTSYHNEELKSLTRYRFDKVKERAKLKSSVSRLVCILFPELEKLVPTLHMASIYALLSEFPGADAVANAHLTRLSNLLSESSKGRYGKDTAVMFRDAARGSIGSHMPAKSLELKHTIKLIQELTVEIDEIEAAIKRIMDEEIHSPILTIPGISYRMGAMIIAEIGDFSRFDSADKILAYAGMSPSTYQSGQLDNCYSHMEKRGSRYLRYALYNATKYVCHWDDSFGAYLAKKRSEGKHYNVALSHATKKLVRLIFAMEKSGRAYLTTT

SEQ ID NO: 12594 - protein, 357 aa, unidentified
  source 1..357: note = protein_02593ed
  REGION 15..163: note = RuvC_domain
  SITE 18: note = RuvC_P1
  SITE 67: note = RuvC_P2
  SITE 103: note = RuvC_P3
  SITE 105: note = RuvC_P4
  SITE 108: note = RuvC_P5
  REGION 232..318: note = Tnp_domain
  SITE 240: note = Tnp_P1
  SITE 271: note = Tnp_P2
  SITE 279: note = Tnp_P3
  SITE 280: note = Tnp_P4
  SITE 291: note = Tnp_P5
MQSTIAASTQPQVTVGVDTHKQFHVAHAADQLGRPLGSHRMAASTAGYRQFVSWAHGLGQLVIVGIEGPGHYGAGLARYLRAEGIPVTEVGRPKRQRRARYGKSDDADAAGAAAIVLAGEALGDPKSADGAAEMVRVLRVARTSAVRARAKAYTALQDLLVTAPAALREQLAGLYKKRLIQACKQLSESETPSSPTDAITMAIKSLAARCEQLDVEAARLKHHIDTITATAAPQLRAVYGVGPDTAATLLAAIGDNHDRINGDGAFAKLCGVSPLQASSGKTVRHRLNRGGNRDANRALHVILVVRLRRHQPTRDYMARRLAEGKTKNEVMRCLKRYLAREIFHAIQPSRKATKIVA

SEQ ID NO: 12595 - protein, 309 aa, unidentified
  source 1..309: note = protein_13d4cbe
  REGION 8..149: note = RuvC_domain
  SITE 11: note = RuvC_P1
  SITE 54: note = RuvC_P2
  SITE 94: note = RuvC_P3
  SITE 96: note = RuvC_P4
  SITE 99: note = RuvC_P5
  REGION 190..274: note = Tnp_domain
  SITE 198: note = Tnp_P1
  SITE 227: note = Tnp_P2
  SITE 235: note = Tnp_P3
  SITE 236: note = Tnp_P4
  SITE 247: note = Tnp_P5
MKEEVVYLGVDVAKAYLDAAMGSEKRRLANDGTGHRQLINWIKQMETNVQVICEPSGGYERMLIQALVGAQVKVSLVQANRVRQFARAAGILAKTDSIDAEVLCAFGQAMRPQTLSASKLQQEHLRELESQRRHLSRLLVMEQNRGARLGDSSVRTLNRSLTKQIQKQIERIDLLITEHIAGSQELSAKAHKLTAISGVGPHTAALLLAQMPELGQLNRREVAALVGVAPFNRDSGKWRGKRTIFGGRRHVRHGLYMAALVAARHNPILRAFYQRLRAAGKPAKLALTATMRKLLIVLNSVLKPDPIYA

SEQ ID NO: 12596 - protein, 437 aa, unidentified
  source 1..437: note = protein_24af800
  REGION 11..170: note = RuvC_domain
  SITE 14: note = RuvC_P1
  SITE 69: note = RuvC_P2
  SITE 109: note = RuvC_P3
  SITE 111: note = RuvC_P4
  SITE 114: note = RuvC_P5
  REGION 286..379: note = Tnp_domain
  SITE 293: note = Tnp_P1
  SITE 323: note = Tnp_P2
  SITE 331: note = Tnp_P3
  SITE 332: note = Tnp_P4
  SITE 345: note = Tnp_P5
MMLESIPYLSVGLDVGADFTWMSIMLPNGILSGKPFKIIHSDPQSREQAVAKIKEAQEMYSLESRCFLESTGIYHIPLLYFLRDKGFDCSVINPIITKNSTNMNVRKLHNDKFDSKKAAKVGLDASLKTSIIPDDEVIDLRNLVRDYYYFKDLQSAVVLKLTAELKVSFPAYRKVFSKVTTQTSLKLLEAYPLAADMLAAPKDILVETIRKTARFGEKYAVSKYDAIRAAAKDAAVFGRALQSSALRIRLYIKTYREYQEHLDNILEDLHKAVDKLEGTPVYDRIFLLQSLRGVGFLSAAVLIAEMGSFDLFSSPKKLYAYFGLDPAVKQSGKFNGDKVHMSKRGSSLARRILHMVAINNLKVDKGTKTPVNPVIHGYYTDKCKSKKKNVAVGAVMHKICNIIFAMLRDNKPFEIITPQEHCERYLAAQPDKVRNAA

SEQ ID NO: 12597 - protein, 369 aa, unidentified
  source 1..369: note = protein_a70dee1
  REGION 22..170: note = RuvC_domain
  SITE 25: note = RuvC_P1
  SITE 74: note = RuvC_P2
  SITE 110: note = RuvC_P3
  SITE 112: note = RuvC_P4
  SITE 115: note = RuvC_P5
  REGION 242..327: note = Tnp_domain
  SITE 249: note = Tnp_P1
  SITE 280: note = Tnp_P2
  SITE 288: note = Tnp_P3
  SITE 289: note = Tnp_P4
  SITE 300: note = Tnp_P5
MTSMPQAVATDQSDTCAEEVVLGVDTHKDTHVAAVVTVLGGVIECKAFPTTTAGYRSLLAWARGLGLVHRAGVECTGSYGAGLTRYLLGEGVEVVEVNQPDKATRRRRGKTDTIDAQAAAQAVISGRATATAKTCDGPAEMTRMLKLAKDSAVKSRTQAINQLKAVLVSADAGLRDSLAGLSTPILIRRCAELAPADRDHCADTAGVARYTLALLAERIHRLAEEIRELNHRLTTVINAHRPQLLQRVGIGPDNAAALLITAGDNPDRLGSEASFAALCGASPVEASSGNTQRMRLNYGGDRQANAALYRIVLTRLRWHAPTRTYLERRLTEGRTRREIIRCLKRYVAREVYPLLRPAPAVEHAAQAAP

SEQ ID NO: 12598 - protein, 311 aa, unidentified
  source 1..311: note = protein_a99ab58
  REGION 8..148: note = RuvC_domain
  SITE 11: note = RuvC_P1
  SITE 53: note = RuvC_P2
  SITE 93: note = RuvC_P3
  SITE 95: note = RuvC_P4
  SITE 98: note = RuvC_P5
  REGION 191..275: note = Tnp_domain
  SITE 199: note = Tnp_P1
  SITE 228: note = Tnp_P2
  SITE 236: note = Tnp_P3
  SITE 237: note = Tnp_P4
  SITE 248: note = Tnp_P5
MSLHLDYIGIDIAKAHLDVFDPKAGHLRLANTAAAIAGWTATLAGRSVFVVLEATGHYDSALRHGLHAADLAHARINPMQARRFAEATGRLAKTDRIDAAMLAELGRCLKPTTRPVRSQARDTLAGLHKRRDQLVQQRAAETVRLGETAGLPEAVRANLIAHLDWLKAAIKALQDEIDALIQNETELAGQARLMTSTPGIGPVTATTLLALMPELGQRSSGTIAALAGLAPFNCDSGLHKGVRRIRGGRPRVRRALYMAALAAARANTRYRAVFNRLVNAGKPKKLALIAVARKLLVTLNAMLRDQKPYAP

SEQ ID NO: 12599 - protein, 344 aa, unidentified
  source 1..344: note = protein_312155d
  REGION 8..150: note = RuvC_domain
  SITE 11: note = RuvC_P1
  SITE 54: note = RuvC_P2
  SITE 89: note = RuvC_P3
  SITE 91: note = RuvC_P4
  SITE 94: note = RuvC_P5
  REGION 213..298: note = Tnp_domain
  SITE 221: note = Tnp_P1
  SITE 251: note = Tnp_P2
  SITE 259: note = Tnp_P3
  SITE 260: note = Tnp_P4
  SITE 272: note = Tnp_P5
MTTDPTIIGIDLGKNWFHLIGLDGRGATVLRRKLNRVQLAEYAATASPCIVVTESCPGSQYWGRVFTNAGHEVRILPAQFVKPYLKANKNDFNDAEAIAEAGGRASMRCVPLKTNEQLELQALHRVRRRFIIERTAVVNQMRALLLEHGIVIPLGRALFARRLPAIFEDAENGLSPRLVVLLHRLRQRWLALDVEIDEATRDLTEWAEQSDLCRRVTTVPGIGPMISTAVVAAVGNGRMFARGRDMAAWLGLVPSQYSTGGKPTLGRISKRGNTYLRQLFIQGAHALYVHMRRDRSYLGEWLRQIQARSHRNVAVVALANKMVRICWKVLTSEQVYEPYPARIV

SEQ ID NO: 12600 - protein, 341 aa, unidentified
  source 1..341: note = protein_5f725cc
  REGION 6..147: note = RuvC_domain
  SITE 9: note = RuvC_P1
  SITE 52: note = RuvC_P2
  SITE 87: note = RuvC_P3
  SITE 89: note = RuvC_P4
  SITE 92: note = RuvC_P5
  REGION 211..298: note = Tnp_domain
  SITE 219: note = Tnp_P1
  SITE 249: note = Tnp_P2
  SITE 257: note = Tnp_P3
  SITE 258: note = Tnp_P4
  SITE 270: note = Tnp_P5
MDLHTIGIDLGKTIFHLVGLNQRGEVMVRKKFSRAQLLRFTANRQVHLIGMEACGGSHFLAKALQQQGHEVRLIPPQYVKPFVKTNKNDFIDAEAIAEAVGRPSMRFVPIKSDDQLDMQSLHRVRERWVMRRTAVVNQIRSLLLERGITVPQGWCHLEALLPAILTGTEMKLSGVVRLLVAQLKLELDQLAARLEEADALIEQTAQENEACRRLDAIPGIGPVTATALLAAIGNGAAFRKGREFAAWVGLVPREHSTGGKQKLLGISRRGNSYLRKLFVQGARAVLQFKEKQSSGLKAWLTNVSWRTHYNVVGVALANKLARTAWAVLAKGEVYRPPVLAC

SEQ ID NO: 12601 - protein, 340 aa, unidentified
  source 1..340: note = protein_f36fabc
  REGION 5..103: note = RuvC_domain
  SITE 8: note = RuvC_P1
  SITE 58: note = RuvC_P2
  SITE 98: note = RuvC_P3
  SITE 100: note = RuvC_P4
  REGION 211..298: note = Tnp_domain
  SITE 219: note = Tnp_P1
  SITE 249: note = Tnp_P2
  SITE 257: note = Tnp_P3
  SITE 258: note = Tnp_P4
  SITE 271: note = Tnp_P5
MYNAVGIDVSKGKSTVTVLQPGGTVIHKPFVVSHSPQSLHDLAEYLTSLDGDTRIVMECTGRYHEPILKFLSDAGLFVSAVNPHLIKNFGNNSLRKVKSDPQTPERSLAIPLTTGRNYAYSFWHVDCVRGIGLKAFTERYRAFCKRHHYNFQADKPEKLFHAPKELVAVFPKEKTYKLLIQQSIQQLNLISEHVEQLRRKMNELASTLPEYNTVMGIYGVGKTYGPQLIAEIGDVSRFTHREALTDFAGVDPSMDESSQRRSKSNRASKVGSARLRKTLFQIMTTLLQNAPEDDPVYRFLDKKPSQGKPYYVYMTAGANKFFRIYYGKVKECLRNLERES

SEQ ID NO: 12602 - protein, 312 aa, unidentified
  source 1..312: note = protein_5fbc5b9
  REGION 8..149: note = RuvC_domain
  SITE 11: note = RuvC_P1
  SITE 54: note = RuvC_P2
  SITE 94: note = RuvC_P3
  SITE 96: note = RuvC_P4
  SITE 99: note = RuvC_P5
  REGION 192..276: note = Tnp_domain
  SITE 200: note = Tnp_P1
  SITE 229: note = Tnp_P2
  SITE 237: note = Tnp_P3
  SITE 238: note = Tnp_P4
  SITE 249: note = Tnp_P5
MTIHPDVVGIDVSKHHLDVFDASLGRGERLTNTADAIAVLAGRWAGSGRTVVFEATGHYDRALREGLEAADVAYARVNPTKARDFARAAGFLAKTDAVDARMLAAMGAALRPDRAAPGDPARERLARLHKRRDQLVAMRQQERTRWAEVEAEDDTLGQALDAHLVWLDAAVARLDRDIANFVAEQPALDRASRLVRSIPGVGVVTAVTLLALVPELGARSPKALAALAGLAPFNHDSGKLRGTRAIRGGRKRVRDALYMAAVSASRSNSRFKDNYKRLRDAGKPPKLAFIAIARKLLITANAVLRDQQPFRA

SEQ ID NO: 12603 - protein, 340 aa, unidentified
  source 1..340: note = protein_feb7ee3
  REGION 6..148: note = RuvC_domain
  SITE 9: note = RuvC_P1
  SITE 52: note = RuvC_P2
  SITE 87: note = RuvC_P3
  SITE 89: note = RuvC_P4
  SITE 92: note = RuvC_P5
  REGION 210..296: note = Tnp_domain
  SITE 218: note = Tnp_P1
  SITE 248: note = Tnp_P2
  SITE 256: note = Tnp_P3
  SITE 257: note = Tnp_P4
  SITE 269: note = Tnp_P5
MEITTIGLDIAKNVFQVHGVDCEGKVVLRRKVKRDQLLTLLGELQPCLIGIEACATAHHWARQLQALGHEVRLMPPAYVKAYVKRNKNDAADAEAICEAVRRPTMRFVPIKSADAQSVLMLHRARHLLVRQRTAQVSAMRAHLAEYGVIAPKGRAHVRELVEALASGTALVPELARQTLLLIADMIEGLSGQIRAIEIELMRWHRATIASRRLETIPGIGFITATALAATVGDARVFRSGRQFAAWLGLVPKQHSSGGKERMGGISKMGDRYLRHLLVVGATAVLRYTRRKTTAVSIWADRLLERKPARLVSVAVANKTARIAWAVMTREEDYRAAPAIT

SEQ ID NO: 12604 - protein, 320 aa, unidentified
  source 1..320: note = protein_9d486ee
  REGION 8..147: note = RuvC_domain
  SITE 11: note = RuvC_P1
  SITE 55: note = RuvC_P2
  SITE 95: note = RuvC_P3
  SITE 97: note = RuvC_P4
  SITE 100: note = RuvC_P5
  REGION 191..276: note = Tnp_domain
  SITE 199: note = Tnp_P1
  SITE 228: note = Tnp_P2
  SITE 236: note = Tnp_P3
  SITE 237: note = Tnp_P4
  SITE 248: note = Tnp_P5
MAQQGRIVGIDVAKLKADACIRSLQLRLSQPSTAQGQQDMITWLRRNEVGLAVMEASGGYERVWAEALRAAAIAVRIVDPKRVRYFAKSAGRLAKNDPIDAEMIAWFAETFAVAAEPAHDADRDALNRLVTARSLLVRLATPIRQLGEHGQPRVVENAQRAILKTIKAQLAKLEAAIEAKIAANAQFLARRAIIASVPGFGDHFVAGALAWLPELGRIGNKAAAGLVGVAPYDDDSGQHRGERHIKGGRRDIRTLLYMAALGAATRHNPVVMAYYKRLRAKGKKTKVALVACMRKLVVILNTMLARGEMWNPTPRTTAVA

SEQ ID NO: 12605 - protein, 406 aa, unidentified
  source 1..406: note = protein_7a34fce
  REGION 4..163: note = RuvC_domain
  SITE 7: note = RuvC_P1
  SITE 60: note = RuvC_P2
  SITE 100: note = RuvC_P3
  SITE 102: note = RuvC_P4
  SITE 105: note = RuvC_P5
  REGION 271..357: note = Tnp_domain
  SITE 279: note = Tnp_P1
  SITE 310: note = Tnp_P2
  SITE 318: note = Tnp_P3
  SITE 319: note = Tnp_P4
MLFVGDDWAEDHHDVEVQDEQGRVLKRVRLPEGMAGMSRFHELVGRFVPEDGEPAQVLVCIEVDRGPWVRALRAAGYRVFGVDPKQAARHREILGSSGAKSDKGDAHALADMIRTRRNQLREVAGDSEVAEAVKVVTRAHQTLLWERTRHMLRLRVALRDYFPAALEAYKPLGLTSDAALKLLVKAPTPATAAKLTAVQIAAALKGRRDIPAKAETIKQVLRSEQLGQADLVTAAYASTVRALAAVIATLNTEIKTLEDEVEAHFGRHPDAEVILSQPGIGVVLGARVLAEFGDAPGRYASAKARKNYAGTSPVTRQSGKTRTVHARFVHNDRLVDALHLQASCALLHDVDARAYYDQIRARDVSHNAALRQVGNRLVGILHGCLKNHTLYDRATAWSHRNHDLAA

SEQ ID NO: 12606 - protein, 323 aa, unidentified
  source 1..323: note = protein_1311286
  REGION 4..152: note = RuvC_domain
  SITE 7: note = RuvC_P1
  SITE 57: note = RuvC_P2
  SITE 97: note = RuvC_P3
  SITE 99: note = RuvC_P4
  SITE 102: note = RuvC_P5
  REGION 197..283: note = Tnp_domain
  SITE 205: note = Tnp_P1
  SITE 234: note = Tnp_P2
  SITE 242: note = Tnp_P3
  SITE 243: note = Tnp_P4
  SITE 256: note = Tnp_P5
MFYLGVDVSKAKLDCLLLDSTTGKVKSKSIQNTNAGFKQLIEWLAEKKAPNAHVIMEPTGVYHEPAALALTDAGLMLSLVNPAQLRQFAQGLGVKNKTDKADSSVLARYGETLKPEAWQPPSRSARHLKALLARRDAIADDLQREQNRQEAIEFAISPDEVKESINQSISFLKAELKRLDETIKEHIDSDPDLRGKKELLETIPGVGERVSSNLTALFSAKTFDSAEQLAAYLGLVPVQWESGTSVRGRPRLSKAGPSHLRKLLYMPAVVARQWNPHIKLFSDRLIAKGKSKMAVIGACMRKLAHLCFGVVHTGKPYDPNYAM

SEQ ID NO: 12607 - protein, 310 aa, unidentified
  source 1..310: note = protein_06be574
  REGION 7..149: note = RuvC_domain
  SITE 10: note = RuvC_P1
  SITE 53: note = RuvC_P2
  SITE 88: note = RuvC_P3
  SITE 90: note = RuvC_P4
  SITE 93: note = RuvC_P5
  REGION 178..264: note = Tnp_domain
  SITE 186: note = Tnp_P1
  SITE 216: note = Tnp_P2
  SITE 224: note = Tnp_P3
  SITE 225: note = Tnp_P4
  SITE 237: note = Tnp_P5
MDTVSLVGIDLGKHCFHLHAQDASGRMVFRKKLTRSQMFALLGNFPSCTVVMEACAGAHWIARRLQALGHEAKLISPHFVKPFRQGNKNDFADAQAICEAASRPSMRFVSPRNEAQQVVSALHRVREALVRERTGTINQIHAFLLEFGISLPRGMAVIRRLPAVLETQALPPRLVAVLERLLEIPGIGPITASVLMSELGDAHQYDSARQFAASIGLVPRQYSTGGKPTLLGISKRGDKELRRLLVQCARVIMLRIERRTDSLGTWVRSLLARRHSNVVACALANKLARIAWAILAKGTHYRSAPAALAA

SEQ ID NO: 12608 - protein, 341 aa, unidentified
  source 1..341: note = protein_3a4900c
  REGION 7..149: note = RuvC_domain
  SITE 10: note = RuvC_P1
  SITE 53: note = RuvC_P2
  SITE 88: note = RuvC_P3
  SITE 90: note = RuvC_P4
  SITE 93: note = RuvC_P5
  REGION 212..297: note = Tnp_domain
  SITE 220: note = Tnp_P1
  SITE 250: note = Tnp_P2
  SITE 258: note = Tnp_P3
  SITE 259: note = Tnp_P4
  SITE 271: note = Tnp_P5
MEKIITIGLDIAKHVFQVHSIDAAGTVVVRRKLRRDGVIDFFEAVPPCLIGIEACASGHHWARMLIALGHKVRLMPASYVKPYVKRQKNDATDAEAICEAVTRPTMRFVAVKSEEQQSVLMLHRVRELLIRQRTMLVNALRGHLAEFGIVSRQGIAGVGMLIALVEEDSQNVIPFLARGALLPMIDQLRKVQEKVDELDLQIHAWHRSSELSRRLETIPGVGPITASAIAATVPDASLFKSGRQLAAWLGLVPRQNSSGGKERLGRISKQGDPYIRRLLVVGAHAVLRFSRKGKAPPTRWAAKLLEKKPYNVVAVALANKMARIAWALMITGKRFEASAST

SEQ ID NO: 12609 - protein, 341 aa, unidentified
  source 1..341: note = protein_55fd8c4
  REGION 7..148: note = RuvC_domain
  SITE 10: note = RuvC_P1
  SITE 53: note = RuvC_P2
  SITE 88: note = RuvC_P3
  SITE 90: note = RuvC_P4
  SITE 93: note = RuvC_P5
  REGION 211..296: note = Tnp_domain
  SITE 219: note = Tnp_P1
  SITE 249: note = Tnp_P2
  SITE 257: note = Tnp_P3
  SITE 258: note = Tnp_P4
  SITE 270: note = Tnp_P5
MDEVTTIGLDIAKQVFHAHGADASGRRVFSRRITRTKLIEFFAAQPRCTVALEACAGAHHWGRELQRLGPEVRLIPPVYVKPFVKRQKNDAADAEAICEAAQRPTMRFVPVKSEEQQASAAVFRARDLLVRQRTQLLNALRGLLAEHGWVAPKGLFHAGAMMAKIEDPGCALPPSARDVFLVMIGSAKALDERIGLLDREITKRAREDETARRLMTIPGIGPITATALVALAPPPESFRKGRDFAAWVGLTPLQRSTGGKARLGSISRMGERTLRRLLILGSAAVVLHASRRGAPKGSWLEQMMARKPRMLVTVALANKTARIVWAVLANGGVYRAPAVAA

SEQ ID NO: 12610 - protein, 425 aa, unidentified
  source 1..425: note = protein_a8b8fad
  REGION 7..164: note = RuvC_domain
  SITE 10: note = RuvC_P1
  SITE 63: note = RuvC_P2
  SITE 103: note = RuvC_P3
  SITE 105: note = RuvC_P4
  SITE 108: note = RuvC_P5
  REGION 279..372: note = Tnp_domain
  SITE 286: note = Tnp_P1
  SITE 316: note = Tnp_P2
  SITE 324: note = Tnp_P3
  SITE 325: note = Tnp_P4
  SITE 338: note = Tnp_P5
MSEKIVVGIDVSKAFSDICILSPNNDIIKRLKISNDINGMKSLIYVLEKVEDEYEDRAVIIMEATAHYHQILANFFRKHNYEVIVINPIQSGALKNINIRKIKSDKTDAYNIALLYRIKNYNETITHSDTVNSIKKLCRQHKELTDEIVEHINRLIAFLDISFPDFKKVFTDLQGKTPLSLLEKYPTIQEVLSPENKQDIIQLIKENSHKSNSYAEAKYEKLVKAAEKSIEVCIVNLSSAVLIQTTVRVIFSLQEALKAIDDEIKRLSLLDEKFHKEIVLLQSIPGVGEYTACVVLSELGDISNFSKPKELVAFFGLDPGVSQSGTYNRKNNKISKRGSPHVRSILHMLAKSNVYPNRNREYLNPVMRAYFEKKIAEKPYKVVMCAIMRKMVQIIFAVLRNQKSFELRTPEEHQKLIREKSKLVA

SEQ ID NO: 12611 - protein, 339 aa, unidentified
  source 1..339: note = protein_390c23b
  REGION 6..147: note = RuvC_domain
  SITE 9: note = RuvC_P1
  SITE 52: note = RuvC_P2
  SITE 87: note = RuvC_P3
  SITE 89: note = RuvC_P4
  SITE 92: note = RuvC_P5
  REGION 210..295: note = Tnp_domain
  SITE 218: note = Tnp_P1
  SITE 248: note = Tnp_P2
  SITE 256: note = Tnp_P3
  SITE 257: note = Tnp_P4
  SITE 269: note = Tnp_P5
MHIAVLGVDLGKNSCSVFGLDEAGKVVVRRRMQRATVIAFAAKLDGCIVAMEACCGAHHMGRALAAQGHTVRLMSLEYVRPYVKAQKNDDRDAEAIAEAATRPTMRFVELKREEQLDMLTLHRVRDQLVGERTSLMNQIRSLLLERGHIVPQGRAKLAVRLGELLADPEALSQRIRDLVGDMRDRWLALDARIGAFDAEFTEHARRDDHARRLLTIPGIGALNATALVAAVGDARTFARGRDLAAWLGLVPRQATTGGKPRLLGITKRGSRYLRKTLIQSARAAMPTLRKSDTRLGAWRALLSRSHPNTAVVALAAKLARIVWALLRHQRTYEAAAVAA

SEQ ID NO: 12612 - protein, 397 aa, unidentified
  source 1..397: note = protein_8533aee
  REGION 4..170: note = RuvC_domain
  SITE 7: note = RuvC_P1
  SITE 67: note = RuvC_P2
  SITE 107: note = RuvC_P3
  SITE 109: note = RuvC_P4
  SITE 112: note = RuvC_P5
  REGION 278..361: note = Tnp_domain
  SITE 286: note = Tnp_P1
  SITE 317: note = Tnp_P2
  SITE 325: note = Tnp_P3
  SITE 326: note = Tnp_P4
  SITE 338: note = Tnp_P5
MLFVGDDWAEDHHDVEIVDEHGKVLARRRLPEGLAGVTRLHTLLGEHAPPEWADLDPASAAAQVVVGIETDRGPWVGALVAAGYTVYGLNPMSVARYRERYSTSGAKSDTADAHLLAEIVRLDRAHHRPVAGDSATGEAVKVSARAHQSLIWDRTRHVLRLRSALREFFPAAMRAFEGLDAPEALQLLALAPDPDTAARLSRAKIVRALTAANRRDVTTRAETIREVLTAPELRRPAPVQDAYAAVVASEVALITVLNTQIERLGQVVDEHFGRHRDADIYTSLPGLGVILSARILGEFGDDPDRYADATCRKAYAGTAPITRASGTRSGPGQVRPQPAPRRRRPAVGLLLHARIARCPRLLPVIACPRHRSPNRAPPARQPLGRHPPRLPPAPHLL

SEQ ID NO: 12613 - protein, 357 aa, unidentified
  source 1..357: note = protein_e595d04
  REGION 6..163: note = RuvC_domain
  SITE 9: note = RuvC_P1
  SITE 68: note = RuvC_P2
  SITE 106: note = RuvC_P3
  SITE 108: note = RuvC_P4
  SITE 111: note = RuvC_P5
  REGION 212..298: note = Tnp_domain
  SITE 220: note = Tnp_P1
  SITE 250: note = Tnp_P2
  SITE 258: note = Tnp_P3
  SITE 259: note = Tnp_P4
  SITE 272: note = Tnp_P5
MKKIVVGIDISKEKIDASAIDVRGSQLGVVKLDYQVFENRPMGFRRLLVWARHLVKGVGLEDVLFCCETTGGYDRALCDYIYAKGQDIWREGALQIKRSMGVRKGKDDKADSLMIAEYAMRHMDKAVIYETPSQTVRELKALFLYRHKLVQEKTEKTVRMKQMEATAARSKSMSFILRDARKSIRAIEKSIKECERQIMQLYQDNGDLKKNYEHITSVSGISIVNATAFIAYTNNFKGISTANKIASYWGCASYRERSGTSVDKKAYVKCYSSSQLKAYLTQAAECTVKEHGIYRGYFLRLKAAGKPYRVIINNVRNKLIHLVFSLVTNDLDYEKNHEVLREKRKSRQEVLLPIRDY

SEQ ID NO: 12614 - protein, 346 aa, unidentified
  source 1..346: note = protein_01ad162
  REGION 7..149: note = RuvC_domain
  SITE 10: note = RuvC_P1
  SITE 53: note = RuvC_P2
  SITE 88: note = RuvC_P3
  SITE 90: note = RuvC_P4
  SITE 93: note = RuvC_P5
  REGION 211..298: note = Tnp_domain
  SITE 219: note = Tnp_P1
  SITE 249: note = Tnp_P2
  SITE 257: note = Tnp_P3
  SITE 258: note = Tnp_P4
  SITE 270: note = Tnp_P5
MEKITVIGLDLAKSIFQVHGANARGKKLLSKKLKRSEVMGFFASQPPCLVGMEACGGAHEWARQIQSLGHDVKLMAPQYVKGFVQGNKTDARDAAGIAEAAVRESIQRVTIRSREEQQIQALHRVREAWVKHRTATANQIRGLLAEFGQILTPGLRHLRREVALWQEQSRGMLGILNGLVDELLQYLSELEERIGQVEKQIKQVLQSNPACKLIETIPGVGVLTATAIIGSFGRAENFTEGRKFANALGLIPREHSSGGKQVLLGLSKRGNGYVRKLLVHGARSVLQARINKPAYAEDWVVKLAKRRGHNIAVCALAAKNARRIWAMLQSGEVFRADHAQTNDVCT

SEQ ID NO: 12615 - protein, 412 aa, unidentified
  source 1..412: note = protein_9f2ac06
  REGION 5..165: note = RuvC_domain
  SITE 8: note = RuvC_P1
  SITE 62: note = RuvC_P2
  SITE 102: note = RuvC_P3
  SITE 104: note = RuvC_P4
  SITE 107: note = RuvC_P5
  REGION 273..359: note = Tnp_domain
  SITE 281: note = Tnp_P1
  SITE 312: note = Tnp_P2
  SITE 320: note = Tnp_P3
  SITE 321: note = Tnp_P4
MRLFAGDDWAEDHHDVEVMNEAGKVLARKRLPEGAAGMAQFHGLVGQFLPDDDPDGAEVVIGIETDRGPWVAALIAAGYTVFPVNPLQASRYRERHHVSGAKSDAGDAHMLADMVRTDSHQLRAAAGDSPEAAGIKVLARTHKTMIWDRTRQVQRLRHQLREYFPAALEAYDDLDAPDTLELLGKAPDPARAAKLTRAQVSAALKRARRRNIPDKATAILAALRSEQLGQPEPLTAAYAATVRSLIALIAVLNEQVKALQGQVEEHFGRHPDAEVYLSQPGMGKILGARVLGEFGDDPARYRDGKARRNYAATSPITRASGKKKVVAARFVHNDRLVDALNAQAFAALNASPGARAFYDELRAREIEHSDALRRLANRLVGILHGCLKTRTLYDEAAAWGHRQSTPQSSAAA

SEQ ID NO: 12616 - protein, 286 aa, unidentified
  source 1..286: note = protein_7c40524
  REGION 1..48: note = RuvC_domain
  REGION 156..242: note = Tnp_domain
  SITE 164: note = Tnp_P1
  SITE 194: note = Tnp_P2
  SITE 202: note = Tnp_P3
  SITE 203: note = Tnp_P4
  SITE 215: note = Tnp_P5
MPHTLRAVDRNDEVLSALKMLSGFDDDIARDCTRTVNRLRSVLTQIYPSLERVFAGSTLTRTPILELLIHYKGPQGLKRAGYQRVLNWMIKRTRKDPTPLVDDIFTALKAQTVTVPGSDAAELVIPQLAANIQALKEQRNTIAEQVEEMLADFPLCEVLMSMPGVGIKTAAQILLAIGDGSDFASAGHLAAYAGIAPVTRQSGSSIRGEFPARSGNKRLKNALFYSAFAVIRSHEPSRRYYERKRAEGKRHNAAVICLARRRCNVIYAMLKNKEFFREIPPRPVAA

SEQ ID NO: 12617 - protein, 405 aa, unidentified
  source 1..405: note = protein_e5f5ecb
  REGION 15..169: note = RuvC_domain
  SITE 18: note = RuvC_P1
  SITE 66: note = RuvC_P2
  SITE 106: note = RuvC_P3
  SITE 108: note = RuvC_P4
  SITE 111: note = RuvC_P5
  REGION 276..360: note = Tnp_domain
  SITE 284: note = Tnp_P1
  SITE 313: note = Tnp_P2
  SITE 321: note = Tnp_P3
  SITE 322: note = Tnp_P4
  SITE 334: note = Tnp_P5
MATGIARYEEAGVFIGLDVGKGEHHAVAVDRSGNRLFDKPLPNDEGKLREMLVSLAEHGPVLLVVDQPATIGALPVAVAQAVGALVGYLPGLAMRRIADLHPGEAKTDARDALIIAETARTLPHTLRSIQVADAQVAELTMLCGFDDELAGQITQVSNRLRGLLTQIHPALERTLGPRLDHPAILDLLRRYRSPEALRQAGPKRLAARLLQRAPRKGGDWAVEITQALTEQTVIVAGTSAAAHVIPRLAEQLKALHRQRDEIADEVEAIVETHPLHPVLTSMPGVGVKTAARLLTEVASKHFPTAGHLAAYAGLAPVTRRSGSSIRGEHASRRGNKILKRAMFLSAFAALRDPANRAYYDRKIAQGKRHNQALIALARRRSDVLFAMLRDGTLYDPPREITPLTA

SEQ ID NO: 12618 - protein, 327 aa, unidentified
  source 1..327: note = protein_a76dcd0
  REGION 4..158: note = RuvC_domain
  SITE 7: note = RuvC_P1
  SITE 58: note = RuvC_P2
  SITE 99: note = RuvC_P3
  SITE 101: note = RuvC_P4
  SITE 104: note = RuvC_P5
  REGION 199..285: note = Tnp_domain
  SITE 207: note = Tnp_P1
  SITE 236: note = Tnp_P2
  SITE 244: note = Tnp_P3
  SITE 245: note = Tnp_P4
  SITE 258: note = Tnp_P5
MFCLGIDVSKNKLDLCLFPGNGKKKTKSIKNQVGVERDICDWLQKQKCPPEQVMVVMEATSVYHENVAYGLHGNTPVTVCIGNPQRVREFARGMGILTKNDAVDAWVLARYGELKQPDAWVPPPPEVRKLKDLLRLRDAIVADVQRAMNMLAKAKSTLTAGEVTESPECTKKSREKDLKRINALIDDHMDKNDGLKDDLKLLESIKGIGGVVGTTMLSVLRTCQFRNAGQVAAWLGVVPVEKTSGSSVRGLARMSKTGPADVRAKLYMAAIVAARWNRPVRALYERLMAKGKPAKVALGAVMRKLVHLCFGVLKTREPWNENYVATA

SEQ ID NO: 12619 - protein, 408 aa, unidentified
  source 1..408: note = protein_2d12cb6
  REGION 4..165: note = RuvC_domain
  SITE 7: note = RuvC_P1
  SITE 62: note = RuvC_P2
  SITE 102: note = RuvC_P3
  SITE 104: note = RuvC_P4
  SITE 107: note = RuvC_P5
  REGION 274..360: note = Tnp_domain
  SITE 282: note = Tnp_P1
  SITE 313: note = Tnp_P2
  SITE 321: note = Tnp_P3
  SITE 322: note = Tnp_P4
MLFVGVDWAEDHHDVCVMDADGRVRAKGRVSNDLAGIARIHDLVAGAAPDEVDDSDVEVIVGIETDRGLMVRALVAAGYRVIAVNPLGVDRYRDRARVSGAKSDPGDARVLADMVRTDAHQHRVVAADSDLAEAIKLVARSHQSAIWSRRRLANQVRSALREFYPAALDAFDDLTHSDALAVLAIAATPELGRRLSRSKIAAALRRGGRQLNIESRAAKIQAALRSEHLTQPGTVADAYGAIVSSLVAVIAAHNQQITELEAVLAEDFDQHPDARILRSLPGLGVVTGARVLGEFGDDPGRYDSAKARRNYAGTSPLTVASGTRRIVRARHIRNKRLADALHWWSFNAITRSEGARALYDHRRAVGDTHSGALRVVANRLVAIAHGCLRTRTLYDETTAWAHRHDIAA

SEQ ID NO: 12620 - protein, 339 aa, unidentified
  source 1..339: note = protein_fd9649a
  REGION 6..147: note = RuvC_domain
  SITE 9: note = RuvC_P1
  SITE 52: note = RuvC_P2
  SITE 87: note = RuvC_P3
  SITE 89: note = RuvC_P4
  SITE 92: note = RuvC_P5
  REGION 210..296: note = Tnp_domain
  SITE 218: note = Tnp_P1
  SITE 248: note = Tnp_P2
  SITE 256: note = Tnp_P3
  SITE 257: note = Tnp_P4
  SITE 269: note = Tnp_P5
MNRTAVGVDIAKNVFQVHYVDQETGELVNKPIKREKFLEHFANRAPCVIGMEACGGAHHWARQLMKMGHEVKLMPAEFVKAFNIRNKNDAADAKAIWLAVQQPSKAVAIKTEMQQAMLGLHRMRQQLIKFRTMQINNLRGLLMEYGEVMSKGRAKLDKEIPLVLERISERLPAVVIDTLREQWNGLAKLDEQVAQIERRMREWKKEDMSVKAIGEIPGVGLLTATAAVAMMGDPKAFSSGREFAAWVGIVPKQTGSGGKVNLHGISKRGDTYLRTLLIHGARSVIENAKEPGEWVEQMKKRRPKNVVIVALANKIARTIWAVLAHDRPYQKCYVSVKPA

SEQ ID NO: 12621 - protein, 340 aa, unidentified
  source 1..340: note = protein_535701d
  REGION 6..148: note = RuvC_domain
  SITE 9: note = RuvC_P1
  SITE 52: note = RuvC_P2
  SITE 87: note = RuvC_P3
  SITE 89: note = RuvC_P4
  SITE 92: note = RuvC_P5
  REGION 211..296: note = Tnp_domain
  SITE 219: note = Tnp_P1
  SITE 249: note = Tnp_P2
  SITE 257: note = Tnp_P3
  SITE 258: note = Tnp_P4
  SITE 270: note = Tnp_P5
MKHSVVGIDIAKRVFQLHWVDIETGEMVSLQLKREKFLAHFANRQPCLIGMEACGGAQHWARELIKLGHQVKLLSGKLVKSLRMGNKGDVADARAIWTAVQQPGIKPIAIKTEQQQAILALHRMRQGLVKIRTMQTNALRGLLTEYGEVMPQGKIGLRKGISAALEQVELRLPGIVVEVLREQWQRITELDKQIVEIERKLQAWLKSNKAAKAIAAIPGVGLLTATAAVATMGDAKAFRSGREFAAWVGLVPKQTGTGGKTRLLGISKRGDTYLRTLLIHGARSVLTHAKRPGAWVDELGKRRPSNVVVVALANKMARTIWAMLAHDRAYQGDWVSINPA

SEQ ID NO: 12622 - protein, 344 aa, unidentified
  source 1..344: note = protein_165c4cb
  REGION 5..152: note = RuvC_domain
  SITE 8: note = RuvC_P1
  SITE 55: note = RuvC_P2
  SITE 92: note = RuvC_P3
  SITE 94: note = RuvC_P4
  SITE 97: note = RuvC_P5
  REGION 212..314: note = Tnp_domain
  SITE 220: note = Tnp_P1
  SITE 250: note = Tnp_P2
  SITE 258: note = Tnp_P3
  SITE 259: note = Tnp_P4
  SITE 271: note = Tnp_P5
MEHYAGLDVSLELSSVCIVDAQGAIVCEAKVPSEPQALVRYFTTLKLSITRIALEAGPLSQWLHAGLVAAGFDTVLLETRHVKAALSAMTVKTDRRDARGIAQLLRLGWYRPVHAKSDRAQEVRALLTARKLMQCKLLDIECGIRGALRGFGLKVGAISRGRFEMRVCELVAGHLMLETVIGAMLAARAALETEFKHLHRALLRIVRADPVCRQLMSVPGVGAIVAITFKSGVDDPARFRRSRDVGPHFGLSPRKYQSGEIDVTGSISKVGDRMVRTALYEAASVMLTRTIRFSALKAWAMAVAKRRGTKKAKVALARKLGVILHRMWVDGTSFRWSNEVAAMA

SEQ ID NO: 12623 - protein, 319 aa, unidentified
  source 1..319: note = protein_7039632
  REGION 17..171: note = RuvC_domain
  SITE 20: note = RuvC_P1
  SITE 68: note = RuvC_P2
  SITE 108: note = RuvC_P3
  SITE 110: note = RuvC_P4
  SITE 113: note = RuvC_P5
  REGION 278..310: note = Tnp_domain
  SITE 286: note = Tnp_P1
MRCVEAGAVNDGYGVYLGLDVGKEGHHAVGLAPDGKRLHDAALPNAEARLRQLFDKLARHGRVLVVVDQPASIGALPVAVARACGHQVAYLPGLAMRRIADLHPGTAKTDARDAYVIADAARTLPHTLRRVDVGDEALAELEVLVGFDDDLAGEATRVSNRIRGLLTQIHPALERVLGPRVHHKAVLELLSRCGGPVGLRKAGRRKLLSIAAVHAPRMGERLVEQIMTALDEQTVTVPGTQAAETILPRLADSLRDILRQRDQVAGEVERILDAHPLAPVLTSMPGIGVRTAARILLEVGDGTAFPTPDTSPPTQASHR

SEQ ID NO: 12624 - protein, 258 aa, unidentified
  source 1..258: note = protein_1de70c2
  REGION 1..78: note = RuvC_domain
  SITE 20: note = RuvC_P3
  SITE 22: note = RuvC_P4
  SITE 25: note = RuvC_P5
  REGION 121..208: note = Tnp_domain
  SITE 129: note = Tnp_P1
  SITE 159: note = Tnp_P2
  SITE 167: note = Tnp_P3
  SITE 168: note = Tnp_P4
  SITE 181: note = Tnp_P5
MVINPKASHHFAKVLMKRSKTDAVDAELLAIYSERMPFEAWQRPADEQIALRAISRRIAALSKQKTQTKNQLHALTATEETPALVIEHIKALIALLEKQIAAHRSSALELIRQHQPLAEALTWVTSIKGIAQASGIQLLAELMILPQDMTARQWVAYAGLDPRVFESGSSVSKKPRISKAGNKFIRQALYMPALVATRFEPNIKGYYVHLIQDNGLKKVQAICAVMRKLLHAIHGMLNAKQAFDGTCFYKLPAEANSQ

SEQ ID NO: 12625 - protein, 317 aa, unidentified
  source 1..317: note = protein_fc8650c
  REGION 44..100: note = RuvC_domain
  REGION 163..229: note = Tnp_domain
  SITE 171: note = Tnp_P1
  SITE 201: note = Tnp_P2
  SITE 209: note = Tnp_P3
  SITE 210: note = Tnp_P4
  SITE 222: note = Tnp_P5
MTKTSISKTPVAVLEIDLGKNSCSLAGLDTTGAVVLRRRMTREGLIAFVAKLPTRPTMRLATLKSEAQLDLQILHRARQRLVTARTRLTNQLRAVLLERGIILLKRRTALRQRLDDLMSEEMPISARAVRLLEDLRDEWANVDRRIRAYDDELAALTRDDDKARTLATIPGIGVINATALLAAVGDASSFARGRDLAAWLGLTPRQHSAGGRTRLLGISKRGNRYLRATDPWRSRCHGALRQAGYDDGRVAAPTACESASQRRDRGARRQAGAHRMGRVEARTYLRASGRPGGLTGNSGRHSADAAHDVCGGEGQMA

SEQ ID NO: 12626 - protein, 344 aa, unidentified
  source 1..344: note = protein_6e87fc5
  REGION 6..148: note = RuvC_domain
  SITE 9: note = RuvC_P1
  SITE 52: note = RuvC_P2
  SITE 87: note = RuvC_P3
  SITE 89: note = RuvC_P4
  SITE 92: note = RuvC_P5
  REGION 211..297: note = Tnp_domain
  SITE 219: note = Tnp_P1
  SITE 249: note = Tnp_P2
  SITE 257: note = Tnp_P3
  SITE 258: note = Tnp_P4
  SITE 270: note = Tnp_P5
MKITTVGIDLAKSVFQVHGIDQQGKVMLKKQLKRAQMAPFFVNLPPCLIGMEACGSAHHWARKLQSMGHTVRLMAPQFVKPYVKTNKNDAADAEAIAEAVARPNMRFVPIKDVEQQAVLALHRVRQGFVKARTAQGNQIRGLLAEFGIIIPQGISNIAARVPELVEDASNELPGAFRVLVQRLLDHLKELDRQVDELEVQIQAWHRNSVLSTKIAQVPGIGPISASALIASIGDARNFDNGRQLAAWLGLVPKQHSTGGRSNLLSISKRGDTYLRTLLIHGARSVIYHAAKKPESCSWVSAVVSRRNKNVAAVALANKNARIVWALLAHDRRYEVGYPRTVEAT

SEQ ID NO: 12627 - protein, 306 aa, unidentified
  source 1..306: note = protein_9bad4d8
  REGION 5..150: note = RuvC_domain
  SITE 8: note = RuvC_P1
  SITE 52: note = RuvC_P2
  SITE 92: note = RuvC_P3
  SITE 94: note = RuvC_P4
  SITE 97: note = RuvC_P5
  REGION 184..268: note = Tnp_domain
  SITE 192: note = Tnp_P1
  SITE 221: note = Tnp_P2
  SITE 229: note = Tnp_P3
  SITE 230: note = Tnp_P4
  SITE 241: note = Tnp_P5
MGYGVGLDVCKAWIDAHVYGMDRRARFPNTATGLEALRHWLADVPVRQCVLEATGGYEQQALDHLHAAGVPMVRVNPRQGRDFAKATGQLAKTDALDAQVLAHMAAVLELTPYRPSPAWQRRLAQYHQRRLDLQQSVQQERQRLEQLTDPWLRRQTLLALRRSQAMLKTLDARIAQQVAEQPGLAVLGQIKGVGPVLRSALATQLPELGRLSGKAIAKLVGVAPLACDSGTLRGTRRIWGGRAGLRATLYMGTLTAVRYEPTLRSFYQSLRDRGKPAKVALVASMRKLLVILNARMRDHLNASHCA

SEQ ID NO: 12628 - protein, 343 aa, unidentified
  source 1..343: note = protein_409919e
  REGION 7..149: note = RuvC_domain
  SITE 10: note = RuvC_P1
  SITE 53: note = RuvC_P2
  SITE 88: note = RuvC_P3
  SITE 90: note = RuvC_P4
  SITE 93: note = RuvC_P5
  REGION 212..303: note = Tnp_domain
  SITE 220: note = Tnp_P1
  SITE 250: note = Tnp_P2
  SITE 258: note = Tnp_P3
  SITE 259: note = Tnp_P4
  SITE 271: note = Tnp_P5
MQTVTTIGLDIAKSVFQVHGIDAEGKVLIRRQLKRRYVLAFFQKQPPCLVGIEACASSHHWSRELRALGHTVRLMPPAYVKPYVKRQKNDAADAEAICEAVTRANMRFVETKTSEQQSCLMLHRTRHLFIRQQTSVINAIRAHLAEFGIVAPVGRNGVEELLDVVANPADKRVPEIARACLAALGAQLRRFKEQILQFDRLIMTWHRSNETSKRLDDIPGVGPALATALVASVADAKAFRSGRNFSAWIGLVPKQHSSGGKDKLGSISKQGDRYLRSLLMIGALAVIRYAKIHGTKHRPWLTALLARRPTKVAAIALANKIARMAWAMMAKGERYKEPVALAA

SEQ ID NO: 12629 - protein, 317 aa, unidentified
  source 1..317: note = protein_f95b527
  REGION 9..150: note = RuvC_domain
  SITE 12: note = RuvC_P1
  SITE 56: note = RuvC_P2
  SITE 96: note = RuvC_P3
  SITE 98: note = RuvC_P4
  SITE 101: note = RuvC_P5
  REGION 191..276: note = Tnp_domain
  SITE 199: note = Tnp_P1
  SITE 228: note = Tnp_P2
  SITE 236: note = Tnp_P3
  SITE 237: note = Tnp_P4
  SITE 248: note = Tnp_P5
MTQISTITAGIDTSKAKLDIAIDGQTTRWQVANDLPGWRRLAADLMKAGVARVGIEATGGYERGVVVHLRAAGFTVLVLQPIQVRAFARVHLRRAKNDALDAALIAACAATIEAPRIEPDARLAELAGHLTFVEQIEEDIARCKVRLEHVDDPRLRRLVIADIARLKARRAAELLRIEKELRKHRDLAHRLDLVLSVPGIGERTALAIIIRMPELGRVSREEAAALAGLAPFDADSGTHKAQRHIAGGRGRLRRSLFAAALPAAFRWNKALIALYSRLMARGKAHNAALVACARKLLIYANTVVERGTPWVERPAAT

SEQ ID NO: 12630 - protein, 310 aa, unidentified
  source 1..310: note = protein_9d01ac2
  REGION 1..72: note = RuvC_domain
  SITE 10: note = RuvC_P3
  SITE 12: note = RuvC_P4
  SITE 15: note = RuvC_P5
  REGION 178..264: note = Tnp_domain
  SITE 186: note = Tnp_P1
  SITE 216: note = Tnp_P2
  SITE 224: note = Tnp_P3
  SITE 225: note = Tnp_P4
  SITE 237: note = Tnp_P5
MAGAYRGEAKTDARDAYVISETVRHRRDLSVVDAPVTVVAELSLLVGHRTDLVADRVRLVNRLRDTLTGYFPGMERAFDISNHKGALVLLTGYQTPAVLRRIGSSRLTSWLSKRKVRSAADVAATAIAAADGQHTTVPGEKITATIVAELAQALLDLDERITRIDAQVTETFRTHPQAQIIESMPGIGPILGAELIAAAGDLGSYADAGRLASAAGLVPVPKDSGRRTGNMHRPQRYSRRLRRVFYLSAQSSIIRPDPNRDFYFKKRSEGCKHVQALLALARRRVDVLWALLRDGRVFSIDSPTKPAIAA

SEQ ID NO: 12631 - protein, 331 aa, unidentified
  source 1..331: note = protein_49d2e83
  REGION 7..158: note = RuvC_domain
  SITE 10: note = RuvC_P1
  SITE 59: note = RuvC_P2
  SITE 97: note = RuvC_P3
  SITE 99: note = RuvC_P4
  SITE 102: note = RuvC_P5
  REGION 202..289: note = Tnp_domain
  SITE 210: note = Tnp_P1
  SITE 240: note = Tnp_P2
  SITE 248: note = Tnp_P3
  SITE 249: note = Tnp_P4
  SITE 262: note = Tnp_P5
MKFLETAGIDVSKDTIDATLHVKQCNKQFDNNTTGFRSFIRWAQKQSGLSINQIQVCFEHTGLYSLKLATFLSNNEIKFSMVPALEIKKSLGIARGKNDKLDARRIAEYAYLRREKLAFYNVPSIHIIKLQALTTLRAQMVKNRAGYQSSLIGLKTFFKQKDNEKIYKTIQSEISGLNKKVKEIESEMLQVIRSEESLYRLFNLITSVKGVGLILAANFLVITNCFTKFETSRQFACYSGIAPFEKQSGTSLKSKSKVSHFANKRMKALLNLAASSAIQCDPELKAYYNHRIETGKSRMSTLNIVRNKIVYRVFAVVKRGTPYVPLHLHAA

SEQ ID NO: 12632 - protein, 340 aa, unidentified
  source 1..340: note = protein_ed3c105
  REGION 6..148: note = RuvC_domain
  SITE 9: note = RuvC_P1
  SITE 52: note = RuvC_P2
  SITE 87: note = RuvC_P3
  SITE 89: note = RuvC_P4
  SITE 92: note = RuvC_P5
  REGION 211..296: note = Tnp_domain
  SITE 219: note = Tnp_P1
  SITE 249: note = Tnp_P2
  SITE 257: note = Tnp_P3
  SITE 258: note = Tnp_P4
  SITE 270: note = Tnp_P5
MNSTVIGIDIAKRVFQLYWVDIETGEIVSLQLKREKFLAYFVNRQPCLIGMEACGGAQHWARELIKLGHEVKLLAGKFVKSFVMGNKSDAADAKAIWIAVQQPGVKPIAIKTEQQQAILALHRMRQGLIKVRTMQVNALRGLLTEYGEVMPQGKAGLRKGIAVALERTAERLPGIVIEALREQWQRIIELDTQMVEIERKLQSWLKSNLAAKAIANIPGVGLLTATAAVATMGDAKAFRSGREFAAWVGLVPKQTGTGGKTRLLGISKRGDTYLRTLLIHGARSVLMHAKQPGAWVDELGKRRPSNVVVVALANKMARTIWAILAHELAYQGDWVSIKPA

SEQ ID NO: 12633 - protein, 341 aa, unidentified
  source 1..341: note = protein_5d929e2
  REGION 7..149: note = RuvC_domain
  SITE 10: note = RuvC_P1
  SITE 53: note = RuvC_P2
  SITE 88: note = RuvC_P3
  SITE 90: note = RuvC_P4
  SITE 93: note = RuvC_P5
  REGION 209..295: note = Tnp_domain
  SITE 217: note = Tnp_P1
  SITE 247: note = Tnp_P2
  SITE 255: note = Tnp_P3
  SITE 256: note = Tnp_P4
  SITE 268: note = Tnp_P5
MSAVALVGIDLGKHSFHLHGQDKSGREVLRKKTTRLQMMRFLGNLPSCTVVMEACAGSHFIARQLKSFGHEVKLISPQFVRPFVKGNKNDFIDAEAICEAASRPTMRFVTPKTEAQQTLSVLHRMRDSLVRDRTKTANQAHGFLLEFGISLPKGLSLVRRLPVTLDEYPLPPRLVSLLSRLHRHFCYLDEQIKELDREMAEQLAEDDLGSRLLTIPCVGPITASLLSAEMGDGKQFGCSRDFAAAVGLVPRQYSTGGRANLLGISKRGDKNLRRLLVQCARVYLQRLEFQKGALADWVRSLRERRHSNVVVCALANKFARIAWAMAANHSEFETGPSASAA

SEQ ID NO: 12634 - protein, 345 aa, unidentified
  source 1..345: note = protein_53296ac
  REGION 6..148: note = RuvC_domain
  SITE 9: note = RuvC_P1
  SITE 52: note = RuvC_P2
  SITE 87: note = RuvC_P3
  SITE 89: note = RuvC_P4
  SITE 92: note = RuvC_P5
  REGION 211..299: note = Tnp_domain
  SITE 219: note = Tnp_P1
  SITE 249: note = Tnp_P2
  SITE 257: note = Tnp_P3
  SITE 258: note = Tnp_P4
  SITE 270: note = Tnp_P5
MTITTVGLDLAKNVIQVHGIDERNEAVLRKQLKRHQLLAVFVKLAPCLIGMEACGSAHYWARKLTGLGHTVKLMAPQFVKPYVKTNKNDAADAEAICEAVRRPNMRFVPMKNCEQQAILSLHRARQGFVKARTAQANQIRGLLLEFGIVIPKGIGHIATRLPEILEDGANDLPGRFRQLLRRLGEHLKEMDRQVIELEHEITLWHRENEASRKLAQMPGIGPITASALCASVGDAKCFKNGRQMAAWLGLVPKHQSTGGKTMLLGISKRGDPYVRSLLVHGARSMIRHAEGKTDQTTAWFARLLARRNKNITAVAIANKNARIAWALLAHDREFRIDYAPAGATA

SEQ ID NO: 12635 - protein, 264 aa, unidentified
  source 1..264: note = protein_3c9e871
  REGION 2..70: note = RuvC_domain
  SITE 9: note = RuvC_P3
  SITE 11: note = RuvC_P4
  SITE 14: note = RuvC_P5
  REGION 133..217: note = Tnp_domain
  SITE 141: note = Tnp_P1
  SITE 171: note = Tnp_P2
  SITE 179: note = Tnp_P3
  SITE 180: note = Tnp_P4
  SITE 192: note = Tnp_P5
MKPFVKRHKNDAVDAEAICEAAQRPTMRFVAVKSEEQQASALVFRTRDLLVRQRTQLINAIRGHLTEYGWVAPKGVSYVSMLGDMLEEEMAASLPPAAVAMFKVMLDLMADLDERIAYLDREVERRAREDETARRLTTIPGIGPITATALTALAPAAETFAKGRDFAAWLGLTPLQHSTGGKQKLGATSKMGERTLRRLLIIGASAVMKQVARRGPVKGSWLEQMLARKPRMLVTVALANKMARIVWALLAKGGTYRAPMAIAA

SEQ ID NO: 12636 - protein, 256 aa, unidentified
  source 1..256: note = protein_81190bd
  REGION 14..156: note = RuvC_domain
  SITE 17: note = RuvC_P1
  SITE 60: note = RuvC_P2
  SITE 95: note = RuvC_P3
  SITE 97: note = RuvC_P4
  SITE 100: note = RuvC_P5
  REGION 218..248: note = Tnp_domain
  SITE 226: note = Tnp_P1
MEKTNTDLNTVATSGLDLAKHVFQVHAVDAAGRVVTNRALRRKDVLAFFERLPSCLIGMEACGSAHHWAREVAKFGHDVRLMPPAYVKAYVRRQKNDAADAAAICEAVTRPSMRFVPVRSVENQAALMHHKVRELLVAQRTQLLDALRSHLAEIGIIAAQGPNNARALAVLMMEGNDMIPAIVRSALLPVVRRLNELDNEIRQSDQAIMALAKADETARSLMTIPGIGPVTASALVASIQDISAFSGRVSSRPSSG

SEQ ID NO: 12637 - protein, 246 aa, unidentified
  source 1..246: note = protein_78d1df5
  REGION 1..82: note = RuvC_domain
  SITE 21: note = RuvC_P3
  SITE 23: note = RuvC_P4
  SITE 26: note = RuvC_P5
  REGION 121..207: note = Tnp_domain
  SITE 129: note = Tnp_P1
  SITE 158: note = Tnp_P2
  SITE 166: note = Tnp_P3
  SITE 167: note = Tnp_P4
  SITE 180: note = Tnp_P5
MSIANPAHVNYYAQSLGGRTKNDKKDSIVLARYGIKEHPMLWHPAPQEMRALKALLTRLDAVEKDLQREKNRHEKIIVSDTPTAVLASIKQMIEHLETEQKTLEKLIDDHIKAHKNLKENKALLETIPGIGKVMSQRMLMVLGTHHFKDAHQCAAYLGLVPVQKESGSSIRGRSQLAKNGNKTVRAKLYMATVTATRYNPDIKAQYERLTKKGKSKMSALGAAMRKLVQICFGVFKHQLPYQPQSA

SEQ ID NO: 12638 - protein, 349 aa, unidentified
  source 1..349: note = protein_04c03bc
  REGION 7..148: note = RuvC_domain
  SITE 10: note = RuvC_P1
  SITE 53: note = RuvC_P2
  SITE 88: note = RuvC_P3
  SITE 90: note = RuvC_P4
  SITE 93: note = RuvC_P5
  REGION 211..296: note = Tnp_domain
  SITE 219: note = Tnp_P1
  SITE 249: note = Tnp_P2
  SITE 257: note = Tnp_P3
  SITE 258: note = Tnp_P4
  SITE 270: note = Tnp_P5
MKEVTIIGVDLAKSVFQLHGAASDGAVVFRKKLTRVQFHKFMSERPACTVAMEACASAHYWARELTGFGHRVKLIAPVYVKPFVKRQKNDMADAEAIVEAAQRPTMRFVEQKTASQQARAVAFRTREQLVGQRTETINALRAHLYEFGYVAQKGLGNLSRLAEVIGDENTRLPDLVRDVCRDLLEQIDQLTARLKKLKARIDALAREGKTSQRLQTMPGVGPITALAIETFAPPMGVFRRGRDFAAWLGLVPKQYSSGGKQRLGKTSRMGQRDIRRLLIIGAMSVVIAASRKGAPEGSWLKRMLATKPRLVVAIALANKMARGIWAMLSKQEDYKDPIRAGVAGDITCT

SEQ ID NO: 12639 - protein, 342 aa, unidentified
  source 1..342: note = protein_32d57f3
  REGION 24..171: note = RuvC_domain
  SITE 27: note = RuvC_P1
  SITE 76: note = RuvC_P2
  SITE 116: note = RuvC_P3
  SITE 118: note = RuvC_P4
  SITE 121: note = RuvC_P5
  REGION 211..298: note = Tnp_domain
  SITE 219: note = Tnp_P1
  SITE 249: note = Tnp_P2
  SITE 257: note = Tnp_P3
  SITE 258: note = Tnp_P4
  SITE 271: note = Tnp_P5
MDRLSPVTRIRKVGFTMENELYFIGIDVAKTKLDVDILRPDGRHRGKKFENTASGHEELVRWLRSHDVNQAHVCMESTSTYMEEAAAYLSDAGYTVSIINPALSAAFARSEGLRSKTDKVDARMLAHFCREKRPSAWEAPHPTERALKALVLRHQALTEMQTQEKNRQETAPEVQLASIDVLLECLSAELKRIEKQIKDLTDNDPDMKQRRKLLNSIPGIGEKTAAVLLAYTGLKLKFDTARQFAAYAGLTPKQHESGSSVMQTSRMSKAGPVQLRRALYMPAISALYHTAWGKAFGKRLEGNGKRPKVIIGAMMRKLAQVAYGVLKSGEPFDASQHVIAAA

SEQ ID NO: 12640 - protein, 293 aa, unidentified
  source 1..293: note = protein_ce282dc
  REGION 2..93: note = RuvC_domain
  SITE 34: note = RuvC_P3
  SITE 36: note = RuvC_P4
  SITE 39: note = RuvC_P5
  REGION 156..242: note = Tnp_domain
  SITE 164: note = Tnp_P1
  SITE 194: note = Tnp_P2
  SITE 202: note = Tnp_P3
  SITE 203: note = Tnp_P4
  SITE 215: note = Tnp_P5
MRGAHHWARLLGSLGHEVKLLPPQYVKPYVKRGKNDAADAEAVCEAMSRPTMRFVPIKGAESQATLMLFGMRDRLIRNRTQLANAIRGYAAEFGLTAAKGMYKVESLLERIAADENLPELARALFALHAKEYAQLQAELETIEAKLMAWHRENECSRRLAQIPAVGPIVASLLTMKTPAPELFRSGRDFAAWIGLTPRDHSTAGKTRLAVITRAGDETLRSAMVVGATSLLRQVRAGRGKNALPWLVNLLKRKPPKLAAVALANKIARIAWKMMVTGENYRKPAVQPDLACAA

SEQ ID NO: 12641 - protein, 408 aa, unidentified
  source 1..408: note = protein_e5565ec
  REGION 4..160: note = RuvC_domain
  SITE 7: note = RuvC_P1
  SITE 57: note = RuvC_P2
  SITE 97: note = RuvC_P3
  SITE 99: note = RuvC_P4
  SITE 102: note = RuvC_P5
  REGION 274..361: note = Tnp_domain
  SITE 282: note = Tnp_P1
  SITE 312: note = Tnp_P2
  SITE 320: note = Tnp_P3
  SITE 321: note = Tnp_P4
  SITE 334: note = Tnp_P5
MYAVGVDVSNGWSTVAVLRSKTDIVIRPFNVTHNSQGFANLLEKLGALDGEVRVVMEHTGNYYESIANVLYESGLWVSAVNPLLLRNYGDNSLHGVKTDKADAKKIARYTLDNWEELRQYSPMDTIRYQLKTLNRQFQLASKNRTACSNNLIALMEQSYPGVRSLFSSPVRSDGSQKWVDFAQTFWHVDCVAKLSLNAFTVKYQKWCKRHGYNFSEAKAAAIHENARTLFPLVPKSETTKLLVREAITQLNTISHTAEVFRAEMNRLAAQLPEYDTVMAMTGVGPSVGPQLMAEIGDVRRFAQKSSLVAFAGIDPGRDDSGSKVSNKGKIGKRGSPHLRKTLFVIMSILLQLKPVDDPVYQFLDKKRSEGKPFYVYMTAGGTKFLRIYYGRVRDCLKEKGLWDGSLMD

SEQ ID NO: 12642 - protein, 345 aa, unidentified
  source 1..345: note = protein_028a2d6
  REGION 14..160: note = RuvC_domain
  SITE 17: note = RuvC_P1
  SITE 65: note = RuvC_P2
  SITE 105: note = RuvC_P3
  SITE 107: note = RuvC_P4
  SITE 110: note = RuvC_P5
  REGION 206..293: note = Tnp_domain
  SITE 214: note = Tnp_P1
  SITE 244: note = Tnp_P2
  SITE 252: note = Tnp_P3
  SITE 253: note = Tnp_P4
  SITE 266: note = Tnp_P5
MNKLIAATPSKIFCGIDVSARSLAVALIEPEHAVSQREFANSASGHKALLGWLGKHNVLVRVTLEATGIYSLDLALALDAAAQIEVAVLNPKLANRFAQTLCRSKTDKADAMVLAEYGQRMPFTAWQRPGVNQLRLRTLGRHIASLVVEQASLKNRLHNAESTATMPRVVLLDLKQAQAALLRRLAKMRREAMKLVQAEELLRQRFALLVSIPGIAEISALHILSELVLLAPGMTVRQWVAYSGLDPVHHVSGTSVHKPSHISRAGNRYLRRALYMPTLSAVRHDPHIRGFYLALRQRHKTGLQALMAVERKLLHAIYGIFKSGHPYDGKLLLPNIRLEVESIAG

SEQ ID NO: 12643 - protein, 347 aa, unidentified
  source 1..347: note = protein_caabec7
  REGION 7..149: note = RuvC_domain
  SITE 10: note = RuvC_P1
  SITE 53: note = RuvC_P2
  SITE 88: note = RuvC_P3
  SITE 90: note = RuvC_P4
  SITE 93: note = RuvC_P5
  REGION 212..303: note = Tnp_domain
  SITE 220: note = Tnp_P1
  SITE 250: note = Tnp_P2
  SITE 258: note = Tnp_P3
  SITE 259: note = Tnp_P4
  SITE 271: note = Tnp_P5
MKQVITIGLDLAKHVFQVHGADADGSPVFNRKLRRSEVMRFFEKLPPCLVGMEACGSAHYWARAITALGHDVRLIPPAYVKPFVKRGKTDAADAEAISEAVIRKTMRFVPIKTAEQQAAAMVLKTRALLVRQRTQAVNALRAHLAELGIIATAGLAKVEALVSIVRDETDARLPAAARFALMAIADVIEASADQIDRLERAIVMEAKRDEDMRRLTTIPGVGAITAATIKALVPDPGGFKSARHFAAWLGLTPRSHSSGGKERLGRISKMGNPDLRALLVVGATAVLRVARNDARTRPWLKAILARRPFKVAAVAQANKTARIIWALLNQGGTYRRAAPLAITAAAV

SEQ ID NO: 12644 - protein, 367 aa, unidentified
  source 1..367: note = protein_48b4921
  REGION 7..157: note = RuvC_domain
  SITE 10: note = RuvC_P1
  SITE 60: note = RuvC_P2
  SITE 97: note = RuvC_P3
  SITE 99: note = RuvC_P4
  SITE 102: note = RuvC_P5
  REGION 222..308: note = Tnp_domain
  SITE 230: note = Tnp_P1
  SITE 260: note = Tnp_P2
  SITE 268: note = Tnp_P3
  SITE 269: note = Tnp_P4
  SITE 281: note = Tnp_P5
MKDSMFIGLDVHKATISVAVADGERGGEVRDWGKLPNRPDRVRKLAEQLGSKGRKLYFCYEAGPCGYGLYRQLVELGHDCIVVAPSLIPLKAGDRVKTDRRDARMLAKLHRASELTSVWVPDVEHEAMRDLVRARASAVRAANQARQHLQSFLLRHGRHYPGKKSWTKAYRRWLSANRFDHSAQQIVFQDYIHAVTDAEARVARLEAQIAELLPDWSLAPVVEAIQAMRGVAFIVAVTVVAEVGDFRRFPTPRQLMAYLGLTPTEHSSGNTVRRGGITKVGSSLARRVLIEGAWSYRMQPRVGRKQVDRMEELPQAVRDIAWKGQLRMCQRYKHLVGSGKPPVVANTAIAREMAGFIWAIAQEVTPA

SEQ ID NO: 12645 - protein, 338 aa, unidentified
  source 1..338: note = protein_0817348
  REGION 7..149: note = RuvC_domain
  SITE 10: note = RuvC_P1
  SITE 53: note = RuvC_P2
  SITE 88: note = RuvC_P3
  SITE 90: note = RuvC_P4
  SITE 93: note = RuvC_P5
  REGION 211..299: note = Tnp_domain
  SITE 219: note = Tnp_P1
  SITE 249: note = Tnp_P2
  SITE 257: note = Tnp_P3
  SITE 258: note = Tnp_P4
  SITE 270: note = Tnp_P5
MEQVSTIGLDLAKSVFQVHGIDAAGKVLVRKQLRRADVLRFFGGLSPCLVGMEACASAHHWGRELTKLGHRVRLMPPAYVKPYVKRGKTDAADAEAIVEAVSRPTMRFVAVKTTDQQAVLMLHKVRDLLIRQRTMLINALRGHLAEFGIVAARGPGGVTAAIEALHESQDSLPELARVALHGLIDQLRIVRDEIAKLEKRIVAWHRASEASRRLATIPGIGPITASAIAAAVPDATLFRSGRQFAAWLGLTPRAHSSGGKERLVGISKQGDGYIRRLLVIGATAVIRFARQGDASKAWAAKLLERKPARLVSVALANKTARIAWAVLARNQSYRAPAL

SEQ ID NO: 12646 - protein, 399 aa, unidentified
  source 1..399: note = protein_a5dda5d
  REGION 6..159: note = RuvC_domain
  SITE 9: note = RuvC_P1
  SITE 57: note = RuvC_P2
  SITE 98: note = RuvC_P3
  SITE 100: note = RuvC_P4
  SITE 103: note = RuvC_P5
  REGION 221..306: note = Tnp_domain
  SITE 229: note = Tnp_P1
  SITE 259: note = Tnp_P2
  SITE 267: note = Tnp_P3
  SITE 268: note = Tnp_P4
  SITE 279: note = Tnp_P5
MEHVIIGVDPHKLSATIEVVDEREHLLGSGRFSTDQAGYAAMRAYVKAWPERTWAVEGANGTGRPLAQRLLEAGEHVLDVPAKLAARVRLFDTGHNRKTDARDAHSIAVVGVRTTTLRVLSLDGELEALRMLTDRREALTRRRVQTVDRLQALLAELLPGQAKRDITTGQAKAMLATVRPRDIAGKTRRRIAVEELTELVAVEAKIKKATAELKAIVLSRGSTLMDLHGVGPVVAARTLADVGDVARFADRNRFASWTGTAPLDASSGEQNRHRLSRAGNRRMNHMIHIAAISQIRLDTDGRAYYRRKRAEGKKPLEAIRCLKRRISDAIYRQLLADAQAAAGTGPGGHCGASQESSAVDLPPHIDTSDQPLPGTANPTLRPKPTPGKTNPRKSLVGAG

SEQ ID NO: 12647 - protein, 344 aa, unidentified
  source 1..344: note = protein_ee6b95f
  REGION 6..148: note = RuvC_domain
  SITE 9: note = RuvC_P1
  SITE 52: note = RuvC_P2
  SITE 87: note = RuvC_P3
  SITE 89: note = RuvC_P4
  SITE 92: note = RuvC_P5
  REGION 211..294: note = Tnp_domain
  SITE 219: note = Tnp_P1
  SITE 249: note = Tnp_P2
  SITE 257: note = Tnp_P3
  SITE 258: note = Tnp_P4
  SITE 270: note = Tnp_P5
MTIVILGVDLGKTSCSVVGVDATGAVVARRTMRRQTLIDYVTKLPTCVVAMEACCGAHHLGRLFAAQGHEVRLMSPEYVRPYVKAQKNDDRDAEGIAEAASRPTMRFVDLKSHEKLDIQTLHRVRSRLVAERRNLINQLRAILLERGIIFPVGRRKLELGVDSLLAEAVEVMSPRVYQLVGDLRTEWKVLDTKIEALNTEFIQLARNDAAMRRLTSIPGIGVLNATALVAAVGDASSFAKARDLGAWLGLVPRQYSTGGKPRLLGISKRGNTYLRTLLIHGARAALPSLSTSDTPLGRWLKAMIERGVHRNAVIVALANKLARIAWAALRKETGFDRSYPVACA

SEQ ID NO: 12648 - protein, 338 aa, unidentified
  source 1..338: note = protein_13be86d
  REGION 7..149: note = RuvC_domain
  SITE 10: note = RuvC_P1
  SITE 53: note = RuvC_P2
  SITE 88: note = RuvC_P3
  SITE 90: note = RuvC_P4
  SITE 93: note = RuvC_P5
  REGION 211..297: note = Tnp_domain
  SITE 219: note = Tnp_P1
  SITE 249: note = Tnp_P2
  SITE 257: note = Tnp_P3
  SITE 258: note = Tnp_P4
  SITE 270: note = Tnp_P5
MSFAKVIGIDLGKSTFHLIGHDYAGREVFRHKYSRAKLVDFLSVQESTTIAMEACCGAHWLARKCKQFGHEVKLIPAQYVKPYVKSHKNDYIDADAIAEAATRPNMRFVSVKTEEAQLGIVIRRVRSGYIKERTACMNRIGSILLEFGLSFPRGHHQMKNLFQWIADQNEVLPPLLIAELTTQYEYYNQLNVWIKAQEEKLLALNKENYVAQLLQTIPGVGPMTASCCISAVGSPQDFDNGRNFAAWFGLVPFQYSTGGKPRMLGISKRGNKELRELFIHAARAVMWRDKTAEKFFGTWLIDLKCRKPFNVALVALANKIARIAWSVMTTKKPFEIRV

SEQ ID NO: 12649 - protein, 311 aa, unidentified
  source 1..311: note = protein_f4f69e2
  REGION 7..152: note = RuvC_domain
  SITE 10: note = RuvC_P1
  SITE 54: note = RuvC_P2
  SITE 94: note = RuvC_P3
  SITE 96: note = RuvC_P4
  SITE 99: note = RuvC_P5
  REGION 190..274: note = Tnp_domain
  SITE 198: note = Tnp_P1
  SITE 227: note = Tnp_P2
  SITE 235: note = Tnp_P3
  SITE 236: note = Tnp_P4
  SITE 247: note = Tnp_P5
MTEHATVGIDIAKDTFDVFIDSTRQLLHLDNTPEGHQQLLSALSAITVKLVVMEATGRYHSLLAATLELAGLPVAVVNPRQVKNFARALGTLYKTDQNDARVICEFGRRMEPEVRPTPDEQTQRLAGMVTRRRQLVDNRTMEINRYKSCDDVVVSVGIKRHIDWLTAEIRDADDDIDRQIKVMPLWREKATLLEEVKGIGPTTMAVLLAMLPELGTLNRHKISALVGVCPYAHDSGKMKGKRSIWGGRSAVRSALYMATLSAVRYNPTIRAFYERLIGRGKAFKVAVTACVRKLLTILNAMLRDNKKWVTN

SEQ ID NO: 12650 - protein, 400 aa, unidentified
  source 1..400: note = protein_f8cf246
  REGION 4..161: note = RuvC_domain
  SITE 7: note = RuvC_P1
  SITE 57: note = RuvC_P2
  SITE 98: note = RuvC_P3
  SITE 100: note = RuvC_P4
  SITE 103: note = RuvC_P5
  REGION 276..364: note = Tnp_domain
  SITE 284: note = Tnp_P1
  SITE 314: note = Tnp_P2
  SITE 322: note = Tnp_P3
  SITE 323: note = Tnp_P4
  SITE 336: note = Tnp_P5
MISVGIDVSKGKSTVCILKPYGEIVCSPFEVLHVEKELEGLDDLLRKLDGEIRVVMEATGIYHLPMMTFLEEKGYFVSVVNPFAMKEFAKDNNIRGAKTDKLDSTMIANYGIEKWFKLQRHSGDEEVYAELKLLGRRYRYYMEIHVKALQELTHILDYTMPGIKKLFNSWDEGSGKDKLSDFVERFWHFDIILEQDLEDFVETYITWAEEKKYHRSRSKAEAVYNLASDGITTLSSGTPSTKMLVQEAISVLRAVDNSLSRIISRMKELAKSLPEYPTVRAMGGVGDILAPKLIAEIGDVRRLHSAKALIAWAGIDPPPYESGKFIGSKRKITKRGSSTLRKVGYEVMRVLKTHKAPKDSAVYNYILKKESEGKDKKLAKIAGLNKFLRIYYARVTAVYR

SEQ ID NO: 12651 - protein, 416 aa, unidentified
  source 1..416: note = protein_a4c0ea4
  REGION 4..157: note = RuvC_domain
  SITE 7: note = RuvC_P1
  SITE 57: note = RuvC_P2
  SITE 94: note = RuvC_P3
  SITE 96: note = RuvC_P4
  SITE 99: note = RuvC_P5
  REGION 278..365: note = Tnp_domain
  SITE 286: note = Tnp_P1
  SITE 317: note = Tnp_P2
  SITE 325: note = Tnp_P3
  SITE 326: note = Tnp_P4
  SITE 338: note = Tnp_P5
MIGIGIDWAEQFHDVAIGTPDKGVISQFRISHRPDGVESLIERVLRMEPDPAEVRVVLETRHGLLVEALVDAGFTVVPVNPDLVARRRGPARKKDDAEDARICCLLALDRHTTLKTLVPHGRIGGEMRAIGRDDERAARDQTRLLNRLRADLQATYPAALAIAKGDLSAPTVLRMLERWPTQAELLAATRDELAGFARAAHHGRPDRFAEQVDAALRTPALAAKEYLARAKAASVRLAAVQLLALHEARRAWERRMSELLADAQTPEGVDSTEWFPGGRIYLSFPGLGPRLAARIAGEIGEHIEQFDSPAGLQCYAGQAPVTRRSGKSDFAVVRRRAHNHFLGAAVHQWAFCSLTKSGWAREFYDSKVAAGKPHHHALRTLGNRWLEILWHCLTKQMLYDESVHVANRNRALGRAS

SEQ ID NO: 12652 - protein, 324 aa, unidentified
  source 1..324: note = protein_81c06c3
  REGION 4..160: note = RuvC_domain
  SITE 7: note = RuvC_P1
  SITE 57: note = RuvC_P2
  SITE 97: note = RuvC_P3
  SITE 99: note = RuvC_P4
  SITE 102: note = RuvC_P5
  REGION 274..324: note = Tnp_domain
  SITE 282: note = Tnp_P1
  SITE 312: note = Tnp_P2
  SITE 320: note = Tnp_P3
  SITE 321: note = Tnp_P4
MNAAGIDVSSRKSTVAVLRPFGEVVKLPFDVTHSAEGLAALVQQLKSIEGETRVVMEHTGRYYEPVAQALHTAGFYVSAVNPLLIKEYGGNSLRRVKTDKADAMKIARYALDNWSELRDYTPMDTIRYDLKTLNRQFQLASKQKTAASNNLIALLEQSFPGVRKCFDSPVRKDGTQKWVDFVYTFWHADCVRKNSLNAFTERYRKWCKRHGYFFKQSNAAEVYELARSVITLVPKGPVAKVLVQQAASQLTSISRSVETYRAEMNRLASMLPEYPLVMGLYGVGESFGPQLMAEIGDVRRFDRKQALVAFAGIDPCQISPGKRM

SEQ ID NO: 12653 - protein, 413 aa, unidentified
  source 1..413: note = protein_d6d0437
  REGION 14..169: note = RuvC_domain
  SITE 17: note = RuvC_P1
  SITE 66: note = RuvC_P2
  SITE 106: note = RuvC_P3
  SITE 108: note = RuvC_P4
  SITE 111: note = RuvC_P5
  REGION 277..363: note = Tnp_domain
  SITE 285: note = Tnp_P1
  SITE 316: note = Tnp_P2
  SITE 324: note = Tnp_P3
  SITE 325: note = Tnp_P4
MTETVLEMNALWFVGIDWASEEHAVHVMAPSGRKVKAFMIEHSRDGFTNLVERLAKVGVAASMPVAIERPDGRLVDVLLAAGHPVVPVSPNAIKAWRDGEVVSGAKSDAGDAEVIAEYLRMRQHKLRVLAPFSDATRGLRAVVRARDALVEQRVAANNQLEACLEAFWPGANAIFADICSDIALAFLERYPTPASALRLTEKQLATFLTRHGYSGRRSASELLERLRSVPDGISPGLENRARQATVIGYIGVIRALNDAIKQLARETAAQLGEHPDHTIFTSLPRSGSINAAQMLAEWGDCREAYDSPEAVCALAGLTPVTKHSGKHHAVHFRWACNTRFRDAVTTFADNSRHASPWAANIYQRAKDRGCDHPHAIRILARAWVRVIWRCWTNGTAYDPNLHNGAQQLTTNAA

SEQ ID NO: 12654 - protein, 429 aa, unidentified
  source 1..429: note = protein_84a83e0
  REGION 6..159: note = RuvC_domain
  SITE 9: note = RuvC_P1
  SITE 57: note = RuvC_P2
  SITE 98: note = RuvC_P3
  SITE 100: note = RuvC_P4
  SITE 103: note = RuvC_P5
  REGION 221..306: note = Tnp_domain
  SITE 229: note = Tnp_P1
  SITE 259: note = Tnp_P2
  SITE 267: note = Tnp_P3
  SITE 268: note = Tnp_P4
  SITE 279: note = Tnp_P5
MARVIIGMDPHKRSATIEIIDGRERVLAQGRYGTDSAGYRAMLAAGRRYPQRVWAVEGCNGIGRHVAQRLVADGETVLDVPAKLSARARVFATGQGRKTDPVDAHSVAVVALRTTGLRQVGVDDATVALRLLVDRRDWLGRARTDTVNRLHALLLDLVPGGAKKHLSASQARTILATVRSRDVVGRTRRQLAAELITELAVIDRKIKQANAALTELIAATGSRLQQLNGIGPSVAARLLGDIGDITRFASRNHFASWNGTAPLDASSGDQQRHRLSRAGNRRINRALHIMAVVQLRHDTEGRAYFRRKLAAGKTPMEAMRCLKRRLSDVVYRQMAADMKASPGGHWGTTLTSSAADPTPTVDSSDKPQPGLTVEPTPPTTPVEADPGPAPTPAAKQPQTRTAKPARPTALTRTSRTTSAHPRKRSSSKA

SEQ ID NO: 12655 - protein, 404 aa, unidentified
  source 1..404: note = protein_f0d3679
  REGION 4..160: note = RuvC_domain
  SITE 7: note = RuvC_P1
  SITE 57: note = RuvC_P2
  SITE 97: note = RuvC_P3
  SITE 99: note = RuvC_P4
  SITE 102: note = RuvC_P5
  REGION 270..356: note = Tnp_domain
  SITE 278: note = Tnp_P1
  SITE 309: note = Tnp_P2
  SITE 317: note = Tnp_P3
  SITE 318: note = Tnp_P4
MIFVGVDWAEAHHDVCVLDEDGAVLGRRRVDAGVTGLAELHRLVADHAEEPEEVAVGIETDRGLLVSALVGAGYALYAINPLSVARYRDRHHVSGAKSDPSDAKLLADLVRTDRHNHRQVAGDSELAEVVKVLARVHQSAIWGRQRQANALRSALREYYPAALEAFGTELHSPDALAVLAMAPTPELGRQLSRSKIAAALRRGGRERNLERRAQEIQAALRSDQLGQSPVLTGAYGAVATSAVRLLAAYNAEIAELEVSLSEHFEQHPDAKIICSLPGLGMVLGARVLGEFGDDHARYADGKSRRNYAGTSPVTKASGKSRVVLARFARNRRLADALDQWAFCSLTRSAGARRYYDELRARDKTHRQALRQLANRWVGILHGCLDHGCLYDEDVAWRTAQRPAA

SEQ ID NO: 12656 - protein, 400 aa, unidentified
  source 1..400: note = protein_8a33276
  REGION 7..162: note = RuvC_domain
  SITE 10: note = RuvC_P1
  SITE 59: note = RuvC_P2
  SITE 99: note = RuvC_P3
  SITE 101: note = RuvC_P4
  SITE 104: note = RuvC_P5
  REGION 269..354: note = Tnp_domain
  SITE 277: note = Tnp_P1
  SITE 306: note = Tnp_P2
  SITE 314: note = Tnp_P3
  SITE 315: note = Tnp_P4
  SITE 327: note = Tnp_P5
MDHQLYLGIDLGKTEHHATGITAAGTVVHDKPLPQSEPKIRALLEGLQATHGPVLVVVDQPKTIGALVIAVAQDLGIDVAYLPGLTMRRVADLHPGQAKTDARDAFIIANTARTLPHTLRGITVSEESIAELSMLCDFDDDLAAQITQVRNRLRGFLTQIHPALERVLGPRLDHRAVITLLTRYPSPARLRTAGRGHVRSVLKKHAPRLAEKLTEEIFTALAEQSVIVTGTSAAEKIIGRLAEQLVQLGAQRTEIETEILTVVDAHPLTQVLTSMPGVGVRTAARILTEVVGKDFKDAAHLASYAGIAPVTRRSGSSIRGESPSRRGNKVLKRALFLSAFASINASPASRAYYDRKRAQGKRHNQAVIALARRRTDVLYAMLRDGTFYSEPTPPVVALAA

SEQ ID NO: 12657 - protein, 406 aa, unidentified
  source 1..406: note = protein_7a3d299
  REGION 4..162: note = RuvC_domain
  SITE 7: note = RuvC_P1
  SITE 59: note = RuvC_P2
  SITE 99: note = RuvC_P3
  SITE 101: note = RuvC_P4
  SITE 104: note = RuvC_P5
  REGION 270..356: note = Tnp_domain
  SITE 278: note = Tnp_P1
  SITE 309: note = Tnp_P2
  SITE 317: note = Tnp_P3
  SITE 318: note = Tnp_P4
MLFIGDDWAEDHHDIELQDQSGQSLVRTRLAEGLAGMAQLHELIGKHIGDQAADHVAIGIETDRGPWVVALVAAGYRVFAVNPLQAARYRERQSVSGAKSDAADAHMLADMVRTDSHQLRQVAGDSDQAEAVKVVARAHKTLIWERTRHVQRVRNALREFFPAALTAFEDLAAADALELLAKAPDPDAAARLTITQITAALKRARRHHAGEKAKAIQAALRTQQLRQPAAVTAAYAATVRAQVAVIGTLNAQITTMSSQVDAHFGQHPDVEIYLSQPGMGPVIGARVLAEFGDDQSRYADARARKNYAGTSPITRASGRKKTVLARYVHNNRLIDALGQQAFSALTGSPGARAYYDGLRARGTGHRAALRQLANRLVGILHGCLKTGTRYDETTAWSHRDEPAAAA

SEQ ID NO: 12658 - protein, 413 aa, unidentified
  source 1..413: note = protein_3359654
  REGION 9..165: note = RuvC_domain
  SITE 12: note = RuvC_P1
  SITE 62: note = RuvC_P2
  SITE 102: note = RuvC_P3
  SITE 104: note = RuvC_P4
  SITE 107: note = RuvC_P5
  REGION 280..367: note = Tnp_domain
  SITE 288: note = Tnp_P1
  SITE 318: note = Tnp_P2
  SITE 326: note = Tnp_P3
  SITE 327: note = Tnp_P4
  SITE 340: note = Tnp_P5
MKTNTITAVGIDVSKGKSTVAIRRPGGEIVMAPFTVLHTAEGLDKLIDTLRSVDSEIRVVMEHTGMYWRPVALALKSAGFFVSVVNAMLIHNFSDNSIRKVKTDKADSLKIANYALTFWQELRDYSLEDENRQLLKIQSRLYERTLNSSVALRNGLISLLDQTFPDANKLFGMETRTTSGHIKWVDFVRRFWHKDCVAALSLHSFADTFQKWCKRTGYHFNLSDAERIHNIARNSVATLTKNDSTKLLITQAVDSLNAVYDTLQILRNEMYRLASLLPEFEIVMSMQGAGKITGPQLMAEIGDVRRFTSKGALVAFAGVDAPPYQSGTFDSKSRHVSKRGSPHLRRVLFTICSVILQHADPENPIYQFMNRKRAEGKHFYVYTVAGTAKFLRIYYARVKEYLNAEDAQTDTVA

SEQ ID NO: 12659 - protein, 304 aa, unidentified
  source 1..304: note = protein_b327d40
  REGION 1..79: note = RuvC_domain
  SITE 19: note = RuvC_P3
  SITE 21: note = RuvC_P4
  SITE 24: note = RuvC_P5
  REGION 142..227: note = Tnp_domain
  SITE 150: note = Tnp_P1
  SITE 180: note = Tnp_P2
  SITE 188: note = Tnp_P3
  SITE 189: note = Tnp_P4
  SITE 200: note = Tnp_P5
MPAKLSAQVRVFATGNGRKTDPVDAHSVALAALRSPNLRRVQADPELVALGLLVDRRDELGRTRTELLNRIHRLLMELVAGGAKRFLSAMQARALAEAIEPADAAARVRLRLVLELIDDLEVVDRKTKAADKELKQLVVDRGSTLMDLNGIGPSGAARLLADVDDVHRFASRDRFASWNGTAPLDASSGQQQRHRLSRAGNRKINRVLHVMAIVQLRNPTPGRVYYDGKRAAGKTSMESMRALKRRLSNVVYHRMLADQRRRDAASPGGIRERQLTPARPARPRTPILRTSHNPDLPPHSLTPS

SEQ ID NO: 12660 - protein, 384 aa, unidentified
  source 1..384: note = protein_462d3c4
  REGION 1..146: note = RuvC_domain
  SITE 42: note = RuvC_P2
  SITE 83: note = RuvC_P3
  SITE 85: note = RuvC_P4
  SITE 88: note = RuvC_P5
  REGION 252..338: note = Tnp_domain
  SITE 260: note = Tnp_P1
  SITE 290: note = Tnp_P2
  SITE 298: note = Tnp_P3
  SITE 299: note = Tnp_P4
  SITE 311: note = Tnp_P5
MCVVDGAGAVVLSRRLVNDEQSIRALIGEIELLGDQVSWTVDLTTVYAALLLTVLADAGRSVRYLAGRAVWQAATVYRGGEAKTDAKDARVIADQSRMRGNDLPLLHPDDDLITELRMLTAHRSDLVADRTRTINRLRQQLVAVCPALERVAQLSSDRGWVVLLARYQRPKAIRQSGVSRLTRILTDAGVRNAATIAAAAVAAAKTQTVRLPGEQVAAGLVAELAKGVIALDDRIKQTDADIEDRFRRHPLAEVITSMPGMGFRLGAEFLAAVGDPKLIGSADQLAAWAGLAPVSRDSAKRTGRLHTPKRYSRRLRRVMYMSALTAIRCDPASRTYYQHKRDQGKRPILATICLARRRTNVLYALIRDNRTWQPDSPPATQSAA

SEQ ID NO: 12661 - protein, 264 aa, unidentified
  source 1..264: note = protein_a1ff9c5
  REGION 6..147: note = RuvC_domain
  SITE 9: note = RuvC_P1
  SITE 52: note = RuvC_P2
  SITE 87: note = RuvC_P3
  SITE 89: note = RuvC_P4
  SITE 92: note = RuvC_P5
  REGION 210..247: note = Tnp_domain
  SITE 218: note = Tnp_P1
MKYTPVGVDIAKHLIQVHFINEHTGEVVDKQLRSKDFLTFFSNREPCLIGMEACGSSQHWARELKKLGHKVRLLQARFVKAFVMGNKNDVMDARAIWMAVQQPGKAIAVKTEEQQSVLVLHRSRRQLVKFRTAQINALHGTLLEFGETIHKGRAALDRELPAALERMKAKLPPYLITVLEDQYNRLSELDSLIDGLEKQLNSVVRQSETCKRLMEIPGVGPLIATAAVATMGEASAFKSGRSLQLMSVWCQNKPVQEAKFDCWG

SEQ ID NO: 12662 - protein, 310 aa, unidentified
  source 1..310: note = protein_9821588
  REGION 1..76: note = RuvC_domain
  SITE 13: note = RuvC_P3
  SITE 15: note = RuvC_P4
  SITE 18: note = RuvC_P5
  REGION 183..268: note = Tnp_domain
  SITE 191: note = Tnp_P1
  SITE 221: note = Tnp_P2
  SITE 229: note = Tnp_P3
  SITE 230: note = Tnp_P4
  SITE 242: note = Tnp_P5
MRRIADLYPGQAKTDARDAFIIADTARTMPHTLRRVDTGDDTLAELDVLIGFDDDLAGEATRISNRIRGLLTGIHPALERVLGPRVTHPAVLKILSRCGGPAGIRAAGKRKLTAIAAKNAPRMGARLVAEIYAALESQTVVVPGSAAAETVLPKLADSLKETLQQSKTIAVDVERMLDAHPLSSVLISMPGIGIRTAPRILLEVGDGSAFKSAGHLAAYAGIAPVTHRSGTSIRGEHPARSGNRKLKRALFLSAFAALHDPTSRAYYDRKRAEGKKHNAALICLARRRCDVLFAMLKTKTLYQPPTTQAA

SEQ ID NO: 12663 - protein, 328 aa, unidentified
  source 1..328: note = protein_7eea941
  REGION 20..163: note = RuvC_domain
  SITE 23: note = RuvC_P1
  SITE 67: note = RuvC_P2
  SITE 107: note = RuvC_P3
  SITE 109: note = RuvC_P4
  SITE 112: note = RuvC_P5
  REGION 202..287: note = Tnp_domain
  SITE 210: note = Tnp_P1
  SITE 239: note = Tnp_P2
  SITE 247: note = Tnp_P3
  SITE 248: note = Tnp_P4
  SITE 259: note = Tnp_P5
MVRFYKAGSTKMTQTTTLTAGIDTSKDKLDIAIDDGTACWHDKNTAAGWRRVAARLAETGVRRVGIEPTGGYERGVVKHLRERGFTVLVLQPTQVKAYAKMHLRRAKNDEIDAGLIAGCAAGLKPPAIPPDARLEALAGQLTFVEQIEEDMARLKTRLEHVDDARLRGIIKADIAALKMRRAAEMLRIIKALRAHTDLARRYHLVLSVPGIGERTAIAIIIRLPELGRISREEAAALAGLAPYDADSGKHKGQRHIAGGRARLRRSLYAAALPAAFRWNKALIELYARLIARGKCHKAALVACARKLLIYANTVVQRGTPWVESPAAA

SEQ ID NO: 12664 - protein, 254 aa, unidentified
  source 1..254: note = protein_4f9e4a2
  REGION 1..65: note = RuvC_domain
  SITE 5: note = RuvC_P3
  SITE 7: note = RuvC_P4
  SITE 10: note = RuvC_P5
  REGION 129..216: note = Tnp_domain
  SITE 137: note = Tnp_P1
  SITE 167: note = Tnp_P2
  SITE 175: note = Tnp_P3
  SITE 176: note = Tnp_P4
  SITE 188: note = Tnp_P5
MKSNKNDAADAAAIWEAAQRPGMRFVAVKTEDQQAMLAMHRIRQQLVRIRVMQVNQLRGLLYEFGVILPAGRRASIEAAKVALASMAEQLPTMLADSLQDQISRLRGLDEQIARIEQRILEWRRNNDACRRISEIPGVGVLTATAAVSVIGQAKTFRSGREFAAYLGLVPRQNGSGGKVKLGGISKRGDVYLRTLLIHGARSVISSSRYLPERLRQMLTRRPTNVVAVALANKMARTIWALLAYGRTYQAAPAQ

SEQ ID NO: 12665 - protein, 336 aa, unidentified
  source 1..336: note = protein_de11ad3
  REGION 7..149: note = RuvC_domain
  SITE 10: note = RuvC_P1
  SITE 53: note = RuvC_P2
  SITE 88: note = RuvC_P3
  SITE 90: note = RuvC_P4
  SITE 93: note = RuvC_P5
  REGION 210..293: note = Tnp_domain
  SITE 218: note = Tnp_P1
  SITE 246: note = Tnp_P2
  SITE 254: note = Tnp_P3
  SITE 255: note = Tnp_P4
  SITE 267: note = Tnp_P5
MNKMTLLGIDIGKHSFHLHGQDAKGHQVLRKKTNRGQLLSTLARLPACTVVMESCGGAHWLARQVGALGHEVKLIASQNVKPFVKGNKSDFINAEAICEAASRPAMHFCSIKTAEQQTLLALHRVRDSLIGHRTVATNQIHGFLLEFGISSPIGATALHRVPALLDDAQHTVPLCLKGVVMRLHHQIQLLNDEIKDIESDLKQQLKDDAGSRLRSIPGIGPITASAVLADVGVELSKWTRFCRFARAGAEAIFDGRKDSATGDQQARDKHIRQLLVQGARSMQHIDKREDALGPWVRELLTRRHSNVVACALANKLARIVWAVLAKGGQYAPHPNA

SEQ ID NO: 12666 - protein, 350 aa, unidentified
  source 1..350: note = protein_f658ff0
  REGION 9..157: note = RuvC_domain
  SITE 12: note = RuvC_P1
  SITE 61: note = RuvC_P2
  SITE 97: note = RuvC_P3
  SITE 99: note = RuvC_P4
  SITE 102: note = RuvC_P5
  REGION 225..311: note = Tnp_domain
  SITE 233: note = Tnp_P1
  SITE 264: note = Tnp_P2
  SITE 272: note = Tnp_P3
  SITE 273: note = Tnp_P4
  SITE 284: note = Tnp_P5
MEQNNEVILGVDTHLDAHVGAVISETGKLLGTLSVSTDTAGYLNLVSWAHSFGHLRRAGVEGTGTYGAGLARVLRDHEIEVLEVNRPDRAMRRSRGKSDPTDAENAARAVLSGRATAVPKEQSGAAEAMRAVSVARRSAVKAKTQAINQLRALLVSAPQEIRERLLKTKTAECVASCARLRSLGDTPMLQTLTTTLRLLAKRWLALAEELNTLDAMLDRLTSQHASRLRDRFGVGPQTAAVLVAVADDNPERLKSEAALAALCGTSPLQASSGKTVRHRLNRGGDRSANNALWTIAMVRMRSDPRTRAYVERRTKEGMSNKEIHRCLKRYIVRELYPLILADLADSTRVP

SEQ ID NO: 12667 - protein, 349 aa, unidentified
  source 1..349: note = protein_2d24103
  REGION 8..156: note = RuvC_domain
  SITE 11: note = RuvC_P1
  SITE 60: note = RuvC_P2
  SITE 96: note = RuvC_P3
  SITE 98: note = RuvC_P4
  SITE 101: note = RuvC_P5
  REGION 224..310: note = Tnp_domain
  SITE 232: note = Tnp_P1
  SITE 263: note = Tnp_P2
  SITE 271: note = Tnp_P3
  SITE 272: note = Tnp_P4
  SITE 283: note = Tnp_P5
MEQHEVILGVDTHLDTHVGAVISETGKLLGTLSVPAETAGYLKLLTWANSLGHLRRAGVEGTGTYGAGLARVLRDHEIEVLEVNRPDRAARRSRGKSDPTDAENAARAVLAGKATAIPKEQSGAAEAMRAVSVARRSAVKAKTQAINQLRALLVSAPQDIRERLLKTKTAECVANCARLRSLGNTPMLQTLTTTLRLLAKRYLALAEELTTLDAMLEQLTLKHARRLRERFGVGPQTAAVLVAVAGDNPERLKSDAALAALCGTSPLQASSGKTVRHRLNRGGDRAANNALWTIAMVRMRSDPRTRVYVERRTKEGMSNKEIHRCLKRYIVRELYPLILADLADSARTT

SEQ ID NO: 12668 - protein, 344 aa, unidentified
  source 1..344: note = protein_99f616d
  REGION 6..148: note = RuvC_domain
  SITE 9: note = RuvC_P1
  SITE 52: note = RuvC_P2
  SITE 87: note = RuvC_P3
  SITE 89: note = RuvC_P4
  SITE 92: note = RuvC_P5
  REGION 210..295: note = Tnp_domain
  SITE 218: note = Tnp_P1
  SITE 248: note = Tnp_P2
  SITE 256: note = Tnp_P3
  SITE 257: note = Tnp_P4
  SITE 269: note = Tnp_P5
MHDTMIGVDLAKNVFQLHGASMTGQLKFRKKLARPQFRQFMSDQPPAMVVMEACGSASYWAREMIKLGHEVRLIAPQYVRPFVKRQKNDTADAEAIVIAAQRPEMRFVEPKSEDQQARAVLFRARERLVHQRTEIANALRGVLYEYGYTVPQGIRQLKRIEIILDENNSSLPALVREECRDLMAQIAEKTARIEVKTKKVKRWAAQTDTARQLQTMPGVGPMTALAIEAFAPEMKSFRRGRDFGAWLGLVPRQHSSGGKERLGRISKAGQANIRRLLIIGAMSRLNWMGRKSIPEGSWLAQMLSRKPRMLVAIALANKMARAVWAMLTKNEDYRDPAFAKAAAA

SEQ ID NO: 12669 - protein, 343 aa, unidentified
  source 1..343: note = protein_eb0e8b8
  REGION 6..147: note = RuvC_domain
  SITE 9: note = RuvC_P1
  SITE 52: note = RuvC_P2
  SITE 87: note = RuvC_P3
  SITE 89: note = RuvC_P4
  SITE 92: note = RuvC_P5
  REGION 211..297: note = Tnp_domain
  SITE 219: note = Tnp_P1
  SITE 249: note = Tnp_P2
  SITE 257: note = Tnp_P3
  SITE 258: note = Tnp_P4
  SITE 270: note = Tnp_P5
MNIASIGIDLGKTTFHLVALDDHGNIIIRKKFSRKQLLAYTANLPSSLVGIEACSGAHFIGARLRDQDHQVRLIPAQFVKPFVKSNKNDFIDAEAIAEAVSRQNMRFVPIKTDDQLDLQALHRVRDRLVHRRTAVINQIRGFLLERGITFAKGPANLRNRMPDIVEDADANLTPRMRTLLDRLWQEWKQLESGIETASDEIEQIASEDEACQRLRQIPGVGPLVSTATVAAIGNGAAFRKGREFAAWLGLVPRQYSTGGKTRLYGISKRGNTYLRRMFIHGARAVLMRVKYDTAGLGQWVHQLEARTTRNKVIVAVANKLARIAWAVLFKAEAYRHAAVCAQA

SEQ ID NO: 12670 - protein, 411 aa, unidentified
  source 1..411: note = protein_61c55af
  REGION 4..170: note = RuvC_domain
  SITE 7: note = RuvC_P1
  SITE 67: note = RuvC_P2
  SITE 107: note = RuvC_P3
  SITE 109: note = RuvC_P4
  SITE 112: note = RuvC_P5
  REGION 278..364: note = Tnp_domain
  SITE 286: note = Tnp_P1
  SITE 317: note = Tnp_P2
  SITE 325: note = Tnp_P3
  SITE 326: note = Tnp_P4
MIWVGDDWAEDHHDVELLDDDRRRLARARLSEGLEGISRLHALIAEHMPASWADLERPEAAAQVQVGIETDRGTWVQALLTAGYQVFAINPMSVARYRERHSTSGAKSDAGDAHVLAEIVRLDHAHHRQIAGDSPLAEAVKLVARAHQSLIWDRTRQVLRLRSTLREFFPAALQAFDDLTTGEALELLDRAPDPDRAARLPRLTVVAALRRAGRRDLDGRATAIQQTLKAAQLRQPPPVQNAYAAIVSSLVQLINILNIEIAELGQLVADHFGRHRDAERYLSLPGLGTVLGARILGEFGDDPHRHADGKARRNYAGTSPITRASGNRRIVLARYARNRRLADAVHQWAFCAMRGSPGARAYYQQLRERGTGHQAALRQLGNRLVGILHGCLKTASAYDETTAWAHLQTNT

SEQ ID NO: 12671 - protein, 385 aa, unidentified
  source 1..385: note = protein_a1fa572
  REGION 39..184: note = RuvC_domain
  SITE 42: note = RuvC_P1
  SITE 88: note = RuvC_P2
  SITE 124: note = RuvC_P3
  SITE 126: note = RuvC_P4
  SITE 129: note = RuvC_P5
  REGION 249..335: note = Tnp_domain
  SITE 257: note = Tnp_P1
  SITE 287: note = Tnp_P2
  SITE 295: note = Tnp_P3
  SITE 296: note = Tnp_P4
  SITE 308: note = Tnp_P5
MQMMIEGQSHFQPFGLSYWGFEDLNKGVGSMTASYEYHIGVDYHKSYSHLVVQDSSGKTLRSGRVKNDRQSLGGFLERYRENSHAVVEATRNWMVMYDWLDDICDDVVLAHPLKVKAIADAKIKTDKIDATVLAHLLRADLVPEAWAPSERSRDLRVALRERMFYVRLRTMTKNRIVTVFDRYPEQTAQLKKLGDLFGKAGRVQLAQVNVSEIDRIQIDRGLAFIGDIDMRIKQSEATIRAMTKANANVKLLKTIPGIGEFFARLIDAEIDDISRFRHSKKLAAYAGLVPSTHSSGGKTFHGKIIKQGNKWLRWAFVEAVAPAIASDPQLRAQYEHLKIKGINKARVAIARKLLTITFQILRDQRAYEPRGESTMEGASTISRLS

SEQ ID NO: 12672 - protein, 276 aa, unidentified
  source 1..276: note = protein_f6d7171
  REGION 4..159: note = RuvC_domain
  SITE 7: note = RuvC_P1
  SITE 60: note = RuvC_P2
  SITE 100: note = RuvC_P3
  SITE 102: note = RuvC_P4
  SITE 105: note = RuvC_P5
  REGION 200..271: note = Tnp_domain
  SITE 208: note = Tnp_P1
  SITE 237: note = Tnp_P2
  SITE 245: note = Tnp_P3
  SITE 246: note = Tnp_P4
  SITE 259: note = Tnp_P5
MFYLGIDVAKAKIDCCLILENSASKKKTKTFANTPKGFEQLQTWLKQHAATSTQTIILMEATSIYHELLAKYLFDAGYQVCVTNPTRARYFAQSMSKPNKTDKVDSEVLARFAMTADLHFWQHLPQHIQLLNALLDRRAVLCEDLQREKNRLEKVESTFSMEPVLQSIHKSIRQLNKYIQGIDQQIDDHIDQTPDLKNDKELLSSIPAIADRTSLLMLSFLRSHTFEKASQATAFMGLVPIQKQSGSSIHGRSRLSKAGSSKIRAGLYGSYCRNSA

SEQ ID NO: 12673 - protein, 328 aa, unidentified
  source 1..328: note = protein_afb53c2
  REGION 8..156: note = RuvC_domain
  SITE 11: note = RuvC_P1
  SITE 57: note = RuvC_P2
  SITE 95: note = RuvC_P3
  SITE 97: note = RuvC_P4
  SITE 100: note = RuvC_P5
  REGION 200..287: note = Tnp_domain
  SITE 208: note = Tnp_P1
  SITE 238: note = Tnp_P2
  SITE 246: note = Tnp_P3
  SITE 247: note = Tnp_P4
  SITE 260: note = Tnp_P5
MKTNSKFIGIDVSKKTLDICILSDRKEFFKIDNTPQSIEEFFTGNLSKKTTHYVCIENTGKYGWALMKLMPEFNCLFYVVNPLHLKKSMGLIRGKNDKIDALRIAKFIKSNHTEIVAFITQRIEIKELQVLLTERKHRIKQRKSLVIKNKEYLSLSDEKLIKKLTQKNNRLIKELDKQIKEFEKSIQEIIKQDQKLSTLQKQLVSTPGVGKVLAWNLLVKTNEFKTITEPRKLACYAGVAPFENISGTSIFRKPRVSSFADKDLKRLLHLGAMSAIRLKNDLSIYYNRKVEEGKNKMSVLNAVRNKIIHIIFALIKNQTFYQNRLNLS

SEQ ID NO: 12674 - protein, 392 aa, unidentified
  source 1..392: note = protein_8369b3f
  REGION 4..163: note = RuvC_domain
  SITE 7: note = RuvC_P1
  SITE 60: note = RuvC_P2
  SITE 101: note = RuvC_P3
  SITE 103: note = RuvC_P4
  SITE 106: note = RuvC_P5
  REGION 267..354: note = Tnp_domain
  SITE 275: note = Tnp_P1
  SITE 305: note = Tnp_P2
  SITE 313: note = Tnp_P3
  SITE 314: note = Tnp_P4
  SITE 327: note = Tnp_P5
MIYIGIDVAKDKHDCFITHSDGEALFNSFTISNNREGFETLFQRIESVSDDLTKVKAGLEATGHYSYNLLGFLPDKGLTTFVINPLHTNLYRKSLSLRKTKTDKVDSRTIATMMMSDMNLKSYSDTSYHNEELKSLTRYRFDKVKERAKLKSSVSRLVCILFPELEKLVPTLHMASVYALLSEFPGADAVASAHLTRLSNLLSESSKGRYGKDTAVMFREAARSSIGSHMAAKSPELKHTIKLIQELTIEIDEIETAIKRIMDEEIQSPILTIPGISYRMGAMIIAEIGDFSRFDSADKILAYAGMSPSTYQSGQLDNCHSHMEKRGSRYLRYALYNATKYVCHWDESFGTYLEKKRSEGKHYNVALSHATKKLVRLIFAMEKSRRAYIPVP

SEQ ID NO: 12675 - protein, 366 aa, unidentified
  source 1..366: note = protein_89177c0
  REGION 21..164: note = RuvC_domain
  SITE 24: note = RuvC_P1
  SITE 69: note = RuvC_P2
  SITE 104: note = RuvC_P3
  SITE 106: note = RuvC_P4
  SITE 109: note = RuvC_P5
  REGION 228..315: note = Tnp_domain
  SITE 236: note = Tnp_P1
  SITE 266: note = Tnp_P2
  SITE 274: note = Tnp_P3
  SITE 275: note = Tnp_P4
  SITE 287: note = Tnp_P5
MKKHTTINQSLSADVSACTTVAVDLAKRVFQVAGEDALGQVIFEDRIKSREAFQVFLRKLPASVTVLVETGPGAQAWARLLQTQGNPVRILPAQLVANHRSGPKNDRNDALAILRAGRDCKISAVPLKSAAALAMQALHRARQGYVRRRTAVSNQMRGLLLEHGVAMAQGELAISQLVPRILEDATQPLPDLLRELIAELLGEWSQLGERVNVLTGRLETAAQEDETAKRLMTVRGVGPIIATALLAKQTEPERFANARLFAAYFGLVPSQHSTGEKVRLGKMSKHGDAYLRSLTIQGAHAVLRQLRPDSQQPDDQRLQRWISRLGRKEAAVRLANRNLRILWVLLQNDQTYRRHPGNGQEAAMSH

SEQ ID NO: 12676 - protein, 342 aa, unidentified
  source 1..342: note = protein_77f23cd
  REGION 5..157: note = RuvC_domain
  SITE 8: note = RuvC_P1
  SITE 56: note = RuvC_P2
  SITE 97: note = RuvC_P3
  SITE 99: note = RuvC_P4
  SITE 102: note = RuvC_P5
  REGION 220..305: note = Tnp_domain
  SITE 228: note = Tnp_P1
  SITE 258: note = Tnp_P2
  SITE 266: note = Tnp_P3
  SITE 267: note = Tnp_P4
  SITE 278: note = Tnp_P5
MNVMIGIDPHKGSHTAVVINGDEVVIEEIRVRASANQVVELQEWAAGFEDRCWAVESARGLGYLLSQQLVAAGERVLDVPAMLASRVRVLGSGKSQKNDPNDARSVAIAALRHQGLTPVVVDDHSRVLGLLAKRHRDLSRLKNKAACRLHALLGELTAGGLASEMTVNKANSLLEAVVVTDEVTRQRVVIATELVDDIARFNTQMRASKQRTRTAVAASGTSLCDIRGIGPIGAAVILGTVGDVSRFPTPGHFASYNATAPIDASSGNQSRHRLNPRGNRKLNHALHIAAVSQLRHPSQGRDYYQKKLTEGKTSKEAIRALKRRISDVVYRQLRADAKRIIS

SEQ ID NO: 12677 - protein, 315 aa, unidentified
  source 1..315: note = protein_f903f65
  REGION 1..73: note = RuvC_domain
  SITE 10: note = RuvC_P3
  SITE 12: note = RuvC_P4
  SITE 15: note = RuvC_P5
  REGION 187..274: note = Tnp_domain
  SITE 195: note = Tnp_P1
  SITE 225: note = Tnp_P2
  SITE 233: note = Tnp_P3
  SITE 234: note = Tnp_P4
  SITE 247: note = Tnp_P5
MDNDSLRKVKTDKADSVKIARYALDKWQNLKQYSVMDELRNQLKTMNRQFGFYMKHKTAMKNNLIGILDQTYPGVNTYFDSPARSDGSQKWVDFASTYWHVDCVRKMSINAFIDHYENWCKRKKYNFSKSKAEEIYGKAKELVPVLPKDDITKLIIKQAVDQLNSASITVESLRTLMNETASKLPEYPVVMAMKGVGTSLGPQLMAEIGDVSRFTHKGAITAFAGVDPGVNESGSYEQKSVPTSKRGSSDLRKTLFQVMDVLIKTHPQDDPVYQFLDKKRAQKKPYYVYMTAGANKFLRIYYGRVKEYLASLPES

SEQ ID NO: 12678 - protein, 337 aa, unidentified
  source 1..337: note = protein_5a651cf
  REGION 7..149: note = RuvC_domain
  SITE 10: note = RuvC_P1
  SITE 53: note = RuvC_P2
  SITE 88: note = RuvC_P3
  SITE 90: note = RuvC_P4
  SITE 93: note = RuvC_P5
  REGION 209..292: note = Tnp_domain
  SITE 217: note = Tnp_P1
  SITE 247: note = Tnp_P2
  SITE 255: note = Tnp_P3
  SITE 256: note = Tnp_P4
  SITE 268: note = Tnp_P5
MTEITTVGVDLAKSVFQVHGVDAEGAVVLRRQLRRNQMLEFFQRLAPCLVGIEACAGAHHWARELGKLGHDVRLMPPSYVKPYVRRGKTDQADAEAICEAVTRPSMRFVPVKSEETQALLMTHKAREFLVRQLTQVTNAIRAHLGEFGIVAPKGVHNVGRLLEAGERADLPPAARVPLRLLADQFSETRAKIDALTKDIRREAEAGEAARRLQTIPGIGPITATALAATLPDVTGFRTSRDLSAWLGLTPKPHSSGGKEKLGRISKMGNRYLRRLLYLGAMGVISARRRGQPGGDWLWRLLQRKTVKQAAIALANRMARTVWALLRNRTSYDAARAA

SEQ ID NO: 12679 - protein, 339 aa, unidentified
  source 1..339: note = protein_b06ac17
  REGION 6..147: note = RuvC_domain
  SITE 9: note = RuvC_P1
  SITE 52: note = RuvC_P2
  SITE 87: note = RuvC_P3
  SITE 89: note = RuvC_P4
  SITE 92: note = RuvC_P5
  REGION 210..297: note = Tnp_domain
  SITE 218: note = Tnp_P1
  SITE 248: note = Tnp_P2
  SITE 256: note = Tnp_P3
  SITE 257: note = Tnp_P4
  SITE 269: note = Tnp_P5
MTHTIVGVDIAKNVMQVHWVDPETGEIVNRPIKRAVFLEYFANRKPCLIGMESCSGSQHWARRLIEMGHQVKLMPAKFVKAFNIRNKNDAADARAIWMATQMASKEVAVKTEAQQAVLALHRMRQQLVKFRTMQINSLRGLLTEYGEVMGVGRAALDKSIVGVLERLSGRLPAILIETLREQWRGLDVLDRQICEIERRLHAWMKDDPSAKAIAAIPGVGLLTATAAVATMGHAKAFKSGREFAAWLGLVPKQTGSGGKVELQGISKRGDTYLRTLLVHGARSIVYRVKEPGPWVTQMKERRPLNVVIVAMANKLARIIWAMLAHQRPYLKGYESVKRA

SEQ ID NO: 12680 - protein, 401 aa, unidentified
  source 1..401: note = protein_e46cb8b
  REGION 9..163: note = RuvC_domain
  SITE 12: note = RuvC_P1
  SITE 60: note = RuvC_P2
  SITE 100: note = RuvC_P3
  SITE 102: note = RuvC_P4
  SITE 105: note = RuvC_P5
  REGION 270..355: note = Tnp_domain
  SITE 278: note = Tnp_P1
  SITE 308: note = Tnp_P2
  SITE 316: note = Tnp_P3
  SITE 317: note = Tnp_P4
  SITE 329: note = Tnp_P5
MSSEYAVFLGLDVGKGTHHACALDTAGKRLHDQPLPNDEARLRALFGKLAEHGQVLMVVDQPASIGALPVAVARAAGCQVAYLPGLTMRRLADLHPGAAKTDARDAYVIADAARTLPHTLRRVDIGDEALAELEVLVGYDDDLAAEATRIRNRIRGLLTQIHPALERVLGPKADHPAVLELLARFGGPAGLRQAGRRRLLTVARKLAPRMGEQLIDDIHTALDAQTVIVPGTTAAEAILPHLAASLRTVLDQRKHLASEVERMLDAHPLARVLTSMPGFGVRTTARVLLEIGDGTSFPTSGHLAAYAGLAPVTRHSGTSIRGERPPKGGNKQLKRAMFLAAFASLADPVSRAYYQRKRDQGKRHNAALICLARRRCDVLFAMLRDGTTYQPPTEQAAPNAA

SEQ ID NO: 12681 - protein, 319 aa, unidentified
  source 1..319: note = protein_5b6fc0b
  REGION 10..159: note = RuvC_domain
  SITE 13: note = RuvC_P1
  SITE 54: note = RuvC_P2
  SITE 94: note = RuvC_P3
  SITE 96: note = RuvC_P4
  SITE 99: note = RuvC_P5
  REGION 189..276: note = Tnp_domain
  SITE 197: note = Tnp_P1
  SITE 226: note = Tnp_P2
  SITE 234: note = Tnp_P3
  SITE 235: note = Tnp_P4
  SITE 247: note = Tnp_P5
MAIRVSRSVIGVDVAKSEIVVYQADLDQIQIIPNNRSALKQWLESLPSSAIAIEATGIFHMDTVELAYEMGHQVYVIDGFRLSNYRKGIGGRAKTDASDARLLARYLKNEGDDLRAWNPPPAVYTRLQSLLRRRAALIQAKVSLTQSWADEPLLKEAFKSHADSMVRLDLLIQKKIRDTLKEAGLLSQVERCQALEGVGFLTATALTMAFQRGEFKSSDAYIAFLGMDLRVSDSGQKSGRRKLTKRGDSEIRRLLHNAAMAASRSATWKPLYESYLARGLKTTQALVALARKLARIAFSLMKNQSQYQPKSMFEGSPQT

SEQ ID NO: 12682 - protein, 342 aa, unidentified
  source 1..342: note = protein_69eec8e
  REGION 6..147: note = RuvC_domain
  SITE 9: note = RuvC_P1
  SITE 52: note = RuvC_P2
  SITE 87: note = RuvC_P3
  SITE 89: note = RuvC_P4
  SITE 92: note = RuvC_P5
  REGION 211..298: note = Tnp_domain
  SITE 219: note = Tnp_P1
  SITE 249: note = Tnp_P2
  SITE 257: note = Tnp_P3
  SITE 258: note = Tnp_P4
  SITE 270: note = Tnp_P5
MDSTIYGLDLAKRVMQLHWVDMGTGEIHRKQLRRRSLLEFFANRGPGIVAMEACGSAHYWARELRKLGHEVRLIAAQFVRPFVKTNKTDAADAAAIWEAVQRPDMRFVAVKSVDQQSVLALHRMREQLVKIRTMQINAIRGLLYEFGADIPQGRQKGEKTIPQVLEQLEDQISKMTLDAMRGQLERLKALDRDIADIEKSLALWEKDQEAVSRLMAIPGVGLLTATAIVATVGDMKAFRSGREFASFLGLVPRQSGTGGRVRLLGISKRGDTYLRSLLTHGARAVVNCQIRNRSPWIDRLLSRRPHNVAVVALANKMARTIWALLAKERTYDPRYQGIMMAA

SEQ ID NO: 12683 - protein, 343 aa, unidentified
  source 1..343: note = protein_3038138
  REGION 6..148: note = RuvC_domain
  SITE 9: note = RuvC_P1
  SITE 52: note = RuvC_P2
  SITE 87: note = RuvC_P3
  SITE 89: note = RuvC_P4
  SITE 92: note = RuvC_P5
  REGION 211..297: note = Tnp_domain
  SITE 219: note = Tnp_P1
  SITE 249: note = Tnp_P2
  SITE 257: note = Tnp_P3
  SITE 258: note = Tnp_P4
  SITE 270: note = Tnp_P5
MTISILGIDIAKNTFQLHGADCTGKAVLKKRLPRHKLAAYAATLPACTIVMESCGGANYWARVFQRSGHTVKLISPQFVKPFVKTNKNDANDAQAIVEAASRPSMNFVPIKQVEQQDIQSIHRIRTRVVKNRTALINEIRGLCLEYGIVLTPGAARVKSSLCAVIAESDNELTLSSRESMQDLYEELIEIEVRLKNLDTRIRQLCRSNESCTRILKIPGVGELTATAIVAAVPNPNEFRNGRHMSAWLGLVPRQLSSGDKQVLLGISKRGDRYLRTLLIHGARSVLSHYKDLDNDYARWVGKKKATLSHNKAAVALANKNARIIWSMLNTGEDFNYGVQTAAA

SEQ ID NO: 12684 - protein, 323 aa, unidentified
  source 1..323: note = protein_5bf0d82
  REGION 9..151: note = RuvC_domain
  SITE 12: note = RuvC_P1
  SITE 56: note = RuvC_P2
  SITE 96: note = RuvC_P3
  SITE 98: note = RuvC_P4
  SITE 101: note = RuvC_P5
  REGION 191..276: note = Tnp_domain
  SITE 199: note = Tnp_P1
  SITE 228: note = Tnp_P2
  SITE 236: note = Tnp_P3
  SITE 237: note = Tnp_P4
  SITE 248: note = Tnp_P5
MTKHITICAGIDTGKSKLDVAVEGSREQLQVENTSEGHAVLLAWLRRHRVKRVGIEASGGYEQPVVAELRRKRFVVVVFQPAQVRAYAKFHLQRAKNDKIDAALIAACTAAVRKIHPAPDPRLQPFAEQLTMIDQIGEDIARLKNRIESCRNTQIKGLWEEDLARLAKREKVELKALIASIRKHPDLAKRLDLINSIDGIGLPTAVAILVRMPEIGQITREQAAALAGLAPYDDDSGEQVGTRHIEGGRKRLRHALYAAALAASFRWNKQLMTLYRRLIAAGKEHKRALVACARKMLVFANTIVARGTPWQDRPPENAALTAS

SEQ ID NO: 12685 - protein, 315 aa, unidentified
  source 1..315: note = protein_b2a29a7
  REGION 1..70: note = RuvC_domain
  SITE 7: note = RuvC_P3
  SITE 9: note = RuvC_P4
  SITE 12: note = RuvC_P5
  REGION 178..264: note = Tnp_domain
  SITE 186: note = Tnp_P1
  SITE 217: note = Tnp_P2
  SITE 225: note = Tnp_P3
  SITE 226: note = Tnp_P4
MDTSGAKSDAGDAHTLADMVRTDHHQLRRIAGDSDLAAAVKIVARAHQTLIWDRQRHLLRLRSVLRESFPAALVAFEDLTAPDVLELLGKAPDPASAARLGTAQIAAALTRAHRRNVADKAAAIRAALAAEQLGQPPVVAAAYAVAVRAQVAVLAALNAEIEALQAQVSAYFGRHPDAEVYRSQPGLGDVLAARVLGEFGDDADRYAGARARKNYAGTSPITQASGKKKVVLARYARNDRLTDALHQQAFSALQASAGSRAYYDALRARGIGHHAALRQLGNRLVGILHGCLKTRKPYDEATAWPQHADTDQAAA

SEQ ID NO: 12686 - protein, 342 aa, unidentified
  source 1..342: note = protein_dcd294e
  REGION 6..146: note = RuvC_domain
  SITE 9: note = RuvC_P1
  SITE 52: note = RuvC_P2
  SITE 87: note = RuvC_P3
  SITE 89: note = RuvC_P4
  SITE 92: note = RuvC_P5
  REGION 211..298: note = Tnp_domain
  SITE 219: note = Tnp_P1
  SITE 249: note = Tnp_P2
  SITE 257: note = Tnp_P3
  SITE 258: note = Tnp_P4
  SITE 270: note = Tnp_P5
MDIATIGIDLSKTTFHVIGLNARGEIVLRRKLSRKQLLLYTANRQQMLIGMEACGGAHYLGRALREQGHDVRLMPAQYVKPYVKTNKNDYLDAEAIAEAVQRPTMRFVPIKTDEQLDLQALHRVRDRWVARRTAVMNQMRGFLLERGVVIRKGPSYLVAQVQEILVGGGTFFSARLRGLLRELKQEWDELDKRIEQTNAELQRIAKQDDACHRLMEVPGVGPLVSTALVAAIGNGVTFRKGRDLSAWLGLVPRQHSTGGKPKLLGISKHGNEYLRRMFLHGARSVVMQMQRKPSALATWLTDLTQRTHRNVAIVALANKMARIAWAILSKGTHYCAPALATV

SEQ ID NO: 12687 - protein, 265 aa, unidentified
  source 1..265: note = protein_3180360
  REGION 1..77: note = RuvC_domain
  SITE 16: note = RuvC_P3
  SITE 18: note = RuvC_P4
  SITE 21: note = RuvC_P5
  REGION 137..223: note = Tnp_domain
  SITE 145: note = Tnp_P1
  SITE 175: note = Tnp_P2
  SITE 183: note = Tnp_P3
  SITE 184: note = Tnp_P4
  SITE 196: note = Tnp_P5
MVHPQRMKAIASARLKNDKVDSETLAHLSRADLLPEAWMANERTQQVRLLTRLRITLGQQRAKAKNQLQAVLHQEGFLKPVADVFGKRGRAWLAELALSPAARVVVQVWLQVVDQMNAAILEQERTLKKMAQEDARARWLQSMPGIGAYSAMVILAEIGEIERFHTKRALASYAGLTPSVRESAGKRKRGGIGHHGSATLRWIMLQVAQVAARRSPAAGAWLKKLKQRKPAQVALIALARKLLTALWALLRHGLCFDEAIFARQD

SEQ ID NO: 12688 - protein, 331 aa, unidentified
  source 1..331: note = protein_8832b84
  REGION 8..159: note = RuvC_domain
  SITE 11: note = RuvC_P1
  SITE 62: note = RuvC_P2
  SITE 100: note = RuvC_P3
  SITE 102: note = RuvC_P4
  SITE 105: note = RuvC_P5
  REGION 204..291: note = Tnp_domain
  SITE 212: note = Tnp_P1
  SITE 242: note = Tnp_P2
  SITE 250: note = Tnp_P3
  SITE 251: note = Tnp_P4
  SITE 264: note = Tnp_P5
MNKFNHFVGIDISKEYFDATLFNGLTTLEHNQFNNSKKGVDELIDWIKGFKASLEKTLICMEHTGIYKNFLVDILSSNKCNLWIEMPLRIIKSSGVQKGKNDKIDSQRIAMYAHRFQDKAMLFSGSKIVLDKLHALSKQRRMYLTSKSAIQTRLKEQKLFDKEIYNTLFENDNKIINLYENIIEDIDNQLDKLIKENQEILEVYQFATSVRGVGPRTAIALICYTKNFTTFNTSRELASYCGVVPFQHTSGKSIRGKNKVHFMANKDLKRLLHLCAVSCVQSDPEIKTFYERKQEEGKHKMSILNSVRNKLIHRICACVRDRKMYVEKQVI

SEQ ID NO: 12689 - protein, 313 aa, unidentified
  source 1..313: note = protein_2cd62ba
  REGION 8..156: note = RuvC_domain
  SITE 11: note = RuvC_P1
  SITE 56: note = RuvC_P2
  SITE 96: note = RuvC_P3
  SITE 98: note = RuvC_P4
  SITE 101: note = RuvC_P5
  REGION 192..276: note = Tnp_domain
  SITE 200: note = Tnp_P1
  SITE 229: note = Tnp_P2
  SITE 237: note = Tnp_P3
  SITE 238: note = Tnp_P4
  SITE 249: note = Tnp_P5
MAQMVTNAGIDVSKQWLDVALWPKRDEVSRFKRDAAGLEELAFWLRERHVVRVGLEASGGYEREVIDALEAQGLEVALLNPLQVRRFAQAKGRLAKNDRVDARTIAQFTAVMIEAPQPGRRRELDSLSEHLLFRRQLRAWIDDCGNRLEHLRDKALRRKIEAKRVKLRAELAAHDKALAKLTAEHADWNGLAKRLRTVPGVGPVLSQTLIALLPELGHLSRRAIASLVGVAPFDNDSGQRSGKRHIKGGRGAVREVLYMAALSAKTHNPIIAEFAKRLAGKEPKVMLVACMRKLLVILNAMMRDGMDWQVKTA

SEQ ID NO: 12690 - protein, 292 aa, unidentified
  source 1..292: note = protein_7012020
  REGION 3..98: note = RuvC_domain
  SITE 37: note = RuvC_P3
  SITE 39: note = RuvC_P4
  SITE 42: note = RuvC_P5
  REGION 161..249: note = Tnp_domain
  SITE 169: note = Tnp_P1
  SITE 199: note = Tnp_P2
  SITE 207: note = Tnp_P3
  SITE 208: note = Tnp_P4
  SITE 220: note = Tnp_P5
MEACASSHHWSRELTALGHTVRLMPAAYVKPYVKRQKNDAADAEAICEAVTRANMRFVATKTLEQQSCLMLHRTRHLFIRQQTAVINAIRAHLAEYGIVAAVGRNGVEELLGVVADPGDKRVPEIARACLAALGAQLRMLKAQILEFDRMITAWHRSNETSKRLDAIPGVGPALATALVASVPDPKAFRSGRNFSAWIGLVPKQHSSGGKDKLGSISKQGDRYLRSLFTVGALAVIRYAKIHGTKHRPWLTPLLARRPAKVAAVALANKIARMAWAMMAKGERYKEPVALAV

SEQ ID NO: 12691 - protein, 341 aa, unidentified
  source 1..341: note = protein_c0cdc68
  REGION 7..148: note = RuvC_domain
  SITE 10: note = RuvC_P1
  SITE 53: note = RuvC_P2
  SITE 88: note = RuvC_P3
  SITE 90: note = RuvC_P4
  SITE 93: note = RuvC_P5
  REGION 211..295: note = Tnp_domain
  SITE 219: note = Tnp_P1
  SITE 249: note = Tnp_P2
  SITE 257: note = Tnp_P3
  SITE 258: note = Tnp_P4
  SITE 270: note = Tnp_P5
MTTATIIGLDLAKNVFHAHGASEAGAVVFRKKLSRSQVLPFLSEQPKCIVAMEACATAHGWAREIERLGHSPRLIPPQYVKPYVKRQKNDMADAEAIAEAGSRPTMRFVEPKPEDQQISAMAYRTRQMFIGQRTQTINALRSHLAEHGVIAATNMCGLKKLSAMIEDETVSMPCKVRELAHVYVDHIAQLTAQIAEMTGEMREMAKKSAVVKRLQTVPGVGLQTAMAVETFAPDPGCFSRGRDFSAWLGLVPRQNSTGGKSRLGKVSKMGQVDIRSHLIRGAMSVISAATRFGIKKGSWLERLLARKPKLVAAVTLANRMARAIWAMLTKNEDYKNPEAVA

SEQ ID NO: 12692 - protein, 338 aa, unidentified
  source 1..338: note = protein_64f7abc
  REGION 7..149: note = RuvC_domain
  SITE 10: note = RuvC_P1
  SITE 53: note = RuvC_P2
  SITE 88: note = RuvC_P3
  SITE 90: note = RuvC_P4
  SITE 93: note = RuvC_P5
  REGION 212..298: note = Tnp_domain
  SITE 220: note = Tnp_P1
  SITE 250: note = Tnp_P2
  SITE 258: note = Tnp_P3
  SITE 259: note = Tnp_P4
  SITE 271: note = Tnp_P5
MNKITTIGLDLAKNVFHAICCDSRGKVQSKKMLRRGQMLNYFAKIPSALVGMEACASAHYWARELNKLGHEVKLIPPQYVKAFLRGNKNDYNDAQAIAEAVTRPEMRFVQIKTVEQQDIQAIHRMRERCQKMRTGLSNQLRGLLAEYGIVMPQGIPTLRKRLPVLLEDGENGLSQDFRCLLAQGYQQLLVADKDMAFYDRELKRQSQQSEACQRLQTIPGFGPIVSSAFHGAVGAGEAFKRGRDVSASLGLVPRQHSSGGKERLLGISKRGDRYLRSLLVHGARAILYRASAKDDRLSCWAEKIRQKRGFNKAVVALANKLARIGWAVLANRTVYQMS

SEQ ID NO: 12693 - protein, 314 aa, unidentified
  source 1..314: note = protein_3e18a84
  REGION 6..154: note = RuvC_domain
  SITE 9: note = RuvC_P1
  SITE 53: note = RuvC_P2
  SITE 93: note = RuvC_P3
  SITE 95: note = RuvC_P4
  SITE 98: note = RuvC_P5
  REGION 189..273: note = Tnp_domain
  SITE 197: note = Tnp_P1
  SITE 226: note = Tnp_P2
  SITE 234: note = Tnp_P3
  SITE 235: note = Tnp_P4
  SITE 246: note = Tnp_P5
MNPSTIGVDVSKDGLDAHRLADGAARRFANDKAGCKALIKWLAATPVARVVFEPTGPYHRLLERALDAAGVPIAKVNPRQARRFAEAAGKLVKTDRADAAMLARMGEVLDLQPRPCVSQTIAELKELHLARAALVKDRTAAKNRAKAITLPLLEKQNKKRLAEIDVKIEEIDAAIEKLIDDDAQLARRFKILLSIPGVAKITAFALLIEMPELGTLEGRQAASLAGLAPIQRQSGSWKGHAFIRGGRAFLRQALYMPALVACRFNKDSRTLYQKLVEAGKPPKVAITAVMRKLVVLANALLRKDLSWAENAPCQ

SEQ ID NO: 12694 - protein, 393 aa, unidentified
  source 1..393: note = protein_43840fc
  REGION 5..159: note = RuvC_domain
  SITE 8: note = RuvC_P1
  SITE 59: note = RuvC_P2
  SITE 98: note = RuvC_P3
  SITE 100: note = RuvC_P4
  SITE 103: note = RuvC_P5
  REGION 268..354: note = Tnp_domain
  SITE 275: note = Tnp_P1
  SITE 305: note = Tnp_P2
  SITE 313: note = Tnp_P3
  SITE 314: note = Tnp_P4
  SITE 327: note = Tnp_P5
MHSCLAIDVAKGKSMVTLVSSSGEVLIDPYEVNHSINDFTNLLNRINKFKLDNISVIMESTGIYHRPIERFFLENNFKVFVINPIYGKMKKRNLRKTKTDKEDCFNLVNLFISNTFKEYIKPDQLYLDLNALSRQYFALDELCINIKNRYRNLLYLCFPEYEEIFKGNMVYSSIALEFIENYPHADIISNIRIDKLQNFFKKREYKSWKSKPIIIKDIALKSYPSVNMNDELVSNLSQMASLVNEYQKAIDIIKYKITFLAKKSKYFEPINSIYGLGEFTTSIIIAELGDINRFNNIKELTAYCGLDPSIKQSGKSVNIHGPISKSGNKYIRKILYIACSNIITIVGKTKVKNDIEIYYRKKRNEGKHHYASVIACTTKLLRIILALCKQLEK

SEQ ID NO: 12695 - protein, 339 aa, unidentified
  source 1..339: note = protein_06922c1
  REGION 6..148: note = RuvC_domain
  SITE 9: note = RuvC_P1
  SITE 52: note = RuvC_P2
  SITE 87: note = RuvC_P3
  SITE 89: note = RuvC_P4
  SITE 92: note = RuvC_P5
  REGION 211..297: note = Tnp_domain
  SITE 219: note = Tnp_P1
  SITE 249: note = Tnp_P2
  SITE 257: note = Tnp_P3
  SITE 258: note = Tnp_P4
  SITE 270: note = Tnp_P5
MSVKTVSLDLAKDVFQDHGISENGRVIFNKAIKRAKLLAFFENLPPCIVGMEACGSSHHWGRTWRKLGHDVRLMPANYVKPYVKRGKTDAVDAEAICEAVRRPTMRFVEIKTENQQAVLSIHRTRDLAVRQRTQMANMIRSLLREFGHILPLGVEAVTAFSKRHLDGDQPDMPDIANGMLEMQCYQFIGLSERIAGYTKMIEQHALLSTDARRLMGMPGIGPITASAIVATIGDAHQFRTGRDLAAWLGLTPLNKSSGGKERLGKITKKGDRYIRKLLVVGMTSRAVMAKRSPEKVDLRTAKIIADKPLRSATTAMANKAARIIWAMLTKKQEYRQPTF

SEQ ID NO: 12696 - protein, 282 aa, unidentified
  source 1..282: note = protein_5f0e99a
  REGION 6..148: note = RuvC_domain
  SITE 51: note = RuvC_P2
  SITE 88: note = RuvC_P3
  SITE 90: note = RuvC_P4
  SITE 93: note = RuvC_P5
  REGION 208..282: note = Tnp_domain
  SITE 216: note = Tnp_P1
  SITE 246: note = Tnp_P2
  SITE 254: note = Tnp_P3
  SITE 255: note = Tnp_P4
  SITE 267: note = Tnp_P5
MKYYAGLDVSVKETLDMHRAICRELKVPSHPEDLVRTLKNPEWRLVRIGLEAGPLSQWLFSGLAEAGLPAICIETRHAKAFLKAQVNKTDRNDARGIAQMMRVNLFRPVHVKTLTSQKRRALLAARKLLQEKAIAIENDIRGLLRNFGLKVGIIGTIGFDDRIRELVDGMPDLGEIMEPLLAARQKLRETFMALHRKLLSIVRDDEACRRLMTIPGVGPVTSLAFTSTIDVPARFRNSRAVGPALGLTPVLNQSGESHRVGRVSLCGDDMMRACFTKWPRSC

SEQ ID NO: 12697 - protein, 333 aa, unidentified
  source 1..333: note = protein_f57da8c
  REGION 7..157: note = RuvC_domain
  SITE 10: note = RuvC_P1
  SITE 62: note = RuvC_P2
  SITE 100: note = RuvC_P3
  SITE 102: note = RuvC_P4
  SITE 105: note = RuvC_P5
  REGION 205..293: note = Tnp_domain
  SITE 213: note = Tnp_P1
  SITE 243: note = Tnp_P2
  SITE 251: note = Tnp_P3
  SITE 252: note = Tnp_P4
  SITE 265: note = Tnp_P5
MQNFYFIGIDVSKKKLDICVMSNSKVLKEEQVSNHPQAIATVIAGIKEELSMSNDCFIICAEHTGQYTYPLICACKSVGSKLWLENASQIKYCSGVTRGKNDKVDARRIAEYAMRFFDKAKPYQRPIEELMRLKQLEAERSLYLTDLAKYKAQLSDQEGFMEDKIFKRKAKRLKEMIKSLEKTLKEIAQEMADVIYSSEELSRQMRLLKSVEGVGPVVAMNMIIATEAFTRFDNPRQFNCYVGVAPFAYTSGSSQHSRNRVSQRAVKYIKCLLHMAAVAIAHKKTGDLKTYFERKVAEGKNKMTVLNAVRAKLVARMFAVIRNNRVYQPILSV

SEQ ID NO: 12698 - protein, 325 aa, unidentified; identical to SEQ ID NO: 10311
  source 1..325: note = protein_379be3e
  REGION 11..162: note = RuvC_domain
  SITE 14: note = RuvC_P1
  SITE 61: note = RuvC_P2
  SITE 101: note = RuvC_P3
  SITE 103: note = RuvC_P4
  SITE 106: note = RuvC_P5
  REGION 200..284: note = Tnp_domain
  SITE 208: note = Tnp_P1
  SITE 237: note = Tnp_P2
  SITE 245: note = Tnp_P3
  SITE 246: note = Tnp_P4
  SITE 257: note = Tnp_P5

SEQ ID NO: 12699 - protein, 423 aa, unidentified
  source 1..423: note = protein_d22d6b3
  REGION 15..179: note = RuvC_domain
  SITE 18: note = RuvC_P1
  SITE 72: note = RuvC_P2
  SITE 118: note = RuvC_P3
  SITE 120: note = RuvC_P4
  SITE 123: note = RuvC_P5
  REGION 297..383: note = Tnp_domain
  SITE 304: note = Tnp_P1
  SITE 334: note = Tnp_P2
  SITE 342: note = Tnp_P3
  SITE 343: note = Tnp_P4
  SITE 356: note = Tnp_P5
MVVIFLSNQLNSVYVGIDVSKQSNQVFITDFNQSLSKSFSAPNNNHGAELIETNLLSFLHNTNFTHVVIVLESTGIYSAHIATYLSASKKLFPFHIEVYCINPKISKNYRASFADMDKTDPKDAFILADLGRIGRTTSMTPFKGSQKLALQRLTRHRVHLVELITKEKNYVLTNIFLKFSEFGNKDSKFTSDIWSKTALAILEEYSSPEDIINTPLEDLVVFIMKTSKNRFDNVNDVAELIKKAARASYRLDKAAYEPINQAISSSLVLVRCFEDEIKKVNCSIELLVKGFSHHEYLSLRSIPGIGPVFAAGIISEIGSIHQFDSEESLAKYAGITWRKNQSGKFEADDTKMTKTGNHYLRYYLIQAGNSVKNYIPLYNDYYHKKFNEVTTHQHKRALALTSRKLIRLIYGLMSKGQLYNKNY

SEQ ID NO: 12700 - protein, 305 aa, unidentified
  source 1..305: note = protein_e331ed7
  REGION 5..152: note = RuvC_domain
  SITE 8: note = RuvC_P1
  SITE 52: note = RuvC_P2
  SITE 92: note = RuvC_P3
  SITE 94: note = RuvC_P4
  SITE 97: note = RuvC_P5
  REGION 186..270: note = Tnp_domain
  SITE 194: note = Tnp_P1
  SITE 223: note = Tnp_P2
  SITE 231: note = Tnp_P3
  SITE 232: note = Tnp_P4
  SITE 243: note = Tnp_P5
MISWVGIDISKSNLVVWVRPQNQGYEVPNTSEGFAQLVEQLSQYTIGRVLLEATGGYERKVMAALQEAGFNVLRINPRRARAFAVAMGKNAKTDPIDAAVLADFAEALHASHEKPISPEREALRELIQLREHFVQQRDDNKRRLQQAQLPAVIEVIKDHIRYLQIQIKQFGKAINQSMRKLDAEKADRLTSVKGIGTVATASLLVYLPELGELDRREIAALAGIAPYNDDSGNHSGKRQIYGGRARVRRALYMSCWVVIRYHADFKARYEALRGRGKSAKVALIACMRILLIRLNAMLRDGTEWR

SEQ ID NO: 12701 - protein, 400 aa, unidentified
  source 1..400: note = protein_45c6df7
  REGION 11..165: note = RuvC_domain
  SITE 14: note = RuvC_P1
  SITE 62: note = RuvC_P2
  SITE 102: note = RuvC_P3
  SITE 104: note = RuvC_P4
  SITE 107: note = RuvC_P5
  REGION 273..359: note = Tnp_domain
  SITE 280: note = Tnp_P1
  SITE 311: note = Tnp_P2
  SITE 319: note = Tnp_P3
  SITE 320: note = Tnp_P4
  SITE 332: note = Tnp_P5
MMTPDDIDVWVGLDVGKSAHHACALDHDGNTPYDKPVRQDEKAIRTMLGKLSKHGRVLLVVDQPNTIGSLPLTVARSMGITVAYLPGGAMRRTAQLLPGAAKTDQRDAHVIAWAALKLPETLRDAGPDDETLAALKMLSGHDEDLAHESTRHVNRLRSLLLQTHPAFERALKGERITRDATLALLEHYGGPAGMKTMGIEEVRAWAKANGLRAGAIIDDMFKAIGEQTVTVPGTLMAETIIPSIAHDIKAIKDRRREAGRQVEALLEGHPLPTVLTSMPGIGAGTASSILLGIGGDIANFKSSAHLAAYAGISPVTSQSGTSIKGERPSRRGNKRLKNALWQTAFVASTKHPPSIAYYKRKREQGKHHNAAVICLARRRRDVIYSMLKNGTLYQEPDLAA

SEQ ID NO: 12702 - protein, 345 aa, unidentified
  source 1..345: note = protein_6810c2b
  REGION 5..152: note = RuvC_domain
  SITE 8: note = RuvC_P1
  SITE 55: note = RuvC_P2
  SITE 92: note = RuvC_P3
  SITE 94: note = RuvC_P4
  SITE 97: note = RuvC_P5
  REGION 212..300: note = Tnp_domain
  SITE 220: note = Tnp_P1
  SITE 250: note = Tnp_P2
  SITE 258: note = Tnp_P3
  SITE 259: note = Tnp_P4
  SITE 271: note = Tnp_P5
MKHFIGLDVSVKETAVCIINESGKICREIKVVSHPDDLITVLKDSTWNVVRVGLEAGPLSQWLFEGLAKAGLPVICIETRHVKAFLKAQPNKTDRNDARGIAQMIRVNLYRPVHVKTLTSQKRRALLTARKLLQEKAIAIENDIRGLLRNFGLKVAAVGTAKFEERIRELIEGMPDLAAIMEPLLAARRKLRTEFVRLHRQTLAVVKDDATCRRLMTIPGVGPVVALAYTATIDIPQRFRNSKAVGAILGLTPKLDESGESKRVGCISLCGDGMMRTLLYEAAQILLTRVRKWSSLKAWAMNIAKRRGTAKAKVALARRLAVVMHRMWLDGTEFRWTRESMTSAS

SEQ ID NO: 12703 - protein, 340 aa, unidentified
  source 1..340: note = protein_9690386
  REGION 6..147: note = RuvC_domain
  SITE 9: note = RuvC_P1
  SITE 52: note = RuvC_P2
  SITE 87: note = RuvC_P3
  SITE 89: note = RuvC_P4
  SITE 92: note = RuvC_P5
  REGION 210..297: note = Tnp_domain
  SITE 218: note = Tnp_P1
  SITE 248: note = Tnp_P2
  SITE 256: note = Tnp_P3
  SITE 257: note = Tnp_P4
  SITE 269: note = Tnp_P5
MNIKRIGLDLAKNVFQIHAVDHREHVVLRKTLRRDRMAAFFTQLSPCLIGIEACGSAHYWARELTRMGHTVRIIPPRLVKPYLKGQKNDANDAEAICEAVSRPGMRFVAIRTERQQTLQAEHRVRARLIRARTALSNEIRGLLGEFGVVLPAGIAQLRKALPEIVSQQVQWDECFIRLLCELSEELQGLDERVARHDRRLQQSARDDIRIKRLLAIEGMGPVVASALVAAVGDGRQFRSGREMAAYLGLVPRQHSSGGKARLGHISKRGDRYVRTLIIHGARAVLNACQNKTDRRSQWLQGGSERRNRNIATVALANKNARIAWALLSREEDYHGIQVTG

SEQ ID NO: 12704 - protein, 339 aa, unidentified
  source 1..339: note = protein_bba2f2e
  REGION 6..148: note = RuvC_domain
  SITE 9: note = RuvC_P1
  SITE 52: note = RuvC_P2
  SITE 87: note = RuvC_P3
  SITE 89: note = RuvC_P4
  SITE 92: note = RuvC_P5
  REGION 211..303: note = Tnp_domain
  SITE 219: note = Tnp_P1
  SITE 249: note = Tnp_P2
  SITE 257: note = Tnp_P3
  SITE 258: note = Tnp_P4
  SITE 270: note = Tnp_P5
MQVTTVGLDLANNIFQVHGVTENGEVVFNQALRRAQLLAFFEKLPPCLVGIEACGSSHYWARQLSKLGHDVRLIPAMYVKPYVKRGKSDAVDAAAICEAVTRPTMRFVAIKSEEQQGVLFLHRARDLIVRQRTQLGNMLRSLLGEFGIVIAQGIGSAIKFAKNMLDGDKPGIPEIAVDVLNNLSNQLVALHLRVRWYEMRMQLQAKQDPRVMLLRTIPGVGPVTASAIVATAGDASQFRNGREFAAWLGLTPLNRSSGGKEKLGRITKMGDRYIRRLLVTGMTSRLRQMKTHPERVDPWSRALLDRKPIRLATVAMANKTARIIWAVLTRNEYYRPQTV

SEQ ID NO: 12705 - protein, 343 aa, unidentified
  source 1..343: note = protein_92aa09a
  REGION 6..150: note = RuvC_domain
  SITE 9: note = RuvC_P1
  SITE 54: note = RuvC_P2
  SITE 89: note = RuvC_P3
  SITE 91: note = RuvC_P4
  SITE 94: note = RuvC_P5
  REGION 213..300: note = Tnp_domain
  SITE 221: note = Tnp_P1
  SITE 251: note = Tnp_P2
  SITE 259: note = Tnp_P3
  SITE 260: note = Tnp_P4
  SITE 272: note = Tnp_P5
MRIVRVGVDLAKDVFQLHGVDRDDKTVWQRKLNRNEWIKVLLEKVEPGCVIGMEACGGAHHWARLLQSKGFVVRLIAPQFVKPYVKSNKNDMNDAEAICEAMSRPHMRFVNIKNTEQQDIQATHRIRAELMDQRKAKSNQIRGLVSEYGLVAPREICHLRSAIPYWLEELDNGLSDRFRRLLHGVWHDLLILDQRIKALDQEIEVLAANDPVAKRLQQLRGVGPMIATALLATVGDASQFNNGRQMAASLGLTPKQMSSGGKSKLLGISKRGDSYVRCLLVHGARSMIQMAKHKEDHLSQWVMRIANNRHPNIAAVAMANKTVRIAWAMIRKGLDYQPELASA

SEQ ID NO: 12706 - protein, 320 aa, unidentified
  source 1..320: note = protein_c2ca253
  REGION 2..148: note = RuvC_domain
  SITE 52: note = RuvC_P2
  SITE 92: note = RuvC_P3
  SITE 94: note = RuvC_P4
  SITE 97: note = RuvC_P5
  REGION 187..270: note = Tnp_domain
  SITE 195: note = Tnp_P1
  SITE 224: note = Tnp_P2
  SITE 232: note = Tnp_P3
  SITE 233: note = Tnp_P4
  SITE 245: note = Tnp_P5
MSDHSAIGIDADSKTLVVARHGTKGSARIANSASAIGKWLSSVPAKSRIGVEATNRHHELVVRAAQKAGHAVFLLNPRDIKHYAKGVACRGKTDSGDAQVIARYIAREADNLHEHIARSPEQERLHVLLQQRDSLVRNKATLHLSLGTDAAESAIFGPIFSGLKGAIAMLDREIQHLCRSGEQRDLYRRIMTIPGVGPTVAAFVTHHLTRWPLANSDAWVACTGLDPRPNESGARIGRRRLSKRGNAGLRQILYMAAMGLTRSKGGKPLYVAIRDRGHSSTASFNILARKLARIAWGVFKSGRDFDPSMLKVGEACFQQT

SEQ ID NO: 12707 - protein, 343 aa, unidentified
  source 1..343: note = protein_3295af3
  REGION 7..148: note = RuvC_domain
  SITE 10: note = RuvC_P1
  SITE 53: note = RuvC_P2
  SITE 88: note = RuvC_P3
  SITE 90: note = RuvC_P4
  SITE 93: note = RuvC_P5
  REGION 211..294: note = Tnp_domain
  SITE 219: note = Tnp_P1
  SITE 249: note = Tnp_P2
  SITE 257: note = Tnp_P3
  SITE 258: note = Tnp_P4
  SITE 270: note = Tnp_P5
MNEIRVLGIDLGKDICSVVGLDETGKVLLRRRMRRDNVLKLADRMPDCVMAMEACCGAHHLGRQLREQGHDVRLMSPEYVRPYVKAQKNDDRDAEAIAEAATRPTMRFVDLKSDEQLDMQILHRARDRLVGERTTLINQLRAILLERGIVIAKGRSTLERQLDQLLAGEMAISRRIRELIEDMRDEWRALDDRIGALDTEFADLARTDGSMKLLSTIPGIGPLNATAFVASVGKAETFNRGRDLAAWLGLVPRQMTTGGKPRLLGITKRGNGYLRRMLIHGARAALPSLSKGKTLMGESLRGLLSRAHKNTAIVALAAKMARIIWAVLRTGRPFDLKAIPSAA

SEQ ID NO: 12708 - protein, 393 aa, unidentified
  source 1..393: note = protein_c3dac0c
  REGION 7..152: note = RuvC_domain
  SITE 10: note = RuvC_P1
  SITE 55: note = RuvC_P2
  SITE 92: note = RuvC_P3
  SITE 94: note = RuvC_P4
  SITE 97: note = RuvC_P5
  REGION 223..307: note = Tnp_domain
  SITE 231: note = Tnp_P1
  SITE 261: note = Tnp_P2
  SITE 269: note = Tnp_P3
  SITE 270: note = Tnp_P4
  SITE 282: note = Tnp_P5
MPHVTSIGLDVHARSVAAAAFNPFTGEVVHRDFGTDAAEIAEWALGFEEPRACYESGPTGFHMARELRALGLDCAVAAVSKMQRPAADARRKNDRRDAEFIARMLATHNIVEVPLPDAAVEAARDLDRALDDATAEYRRARQRLNMFLIRLGHVWDERNADGTRKGSWTRAHWRWISGIRLEGPQRDVLEYYVTAARCAESDRRQLEKKVLALARTDRWRPAVEALSCIKGIDTLTAFRLAAEAGSFTRFRTAPAFASWCGLVPSERSSGETERRGGITKTGNRLARTALVESAWHYLTCTPRPKSPAPGADVPAAALPPPRGAGGGGQELVQGKRRRRARARLLGLGDRAPGGGDPRLTPSDNKPPAGRVRASTHRRRAFTSPFWAAQGPCP

SEQ ID NO: 12709 - protein, 401 aa, unidentified
  source 1..401: note = protein_8532c47
  REGION 5..158: note = RuvC_domain
  SITE 8: note = RuvC_P1
  SITE 57: note = RuvC_P2
  SITE 95: note = RuvC_P3
  SITE 97: note = RuvC_P4
  SITE 100: note = RuvC_P5
  REGION 266..352: note = Tnp_domain
  SITE 274: note = Tnp_P1
  SITE 305: note = Tnp_P2
  SITE 313: note = Tnp_P3
  SITE 314: note = Tnp_P4
MSYFAGIDWGGSEHAVCVVDETGKISLAMQVKHDAQGLSSLCQRLQRFDAALPIAIERPSGLLVDTLLQAGLKVVPIHPNVAKACRPRYRAAGGKHDLGDAYLLADVLRTDGHRFRALAPVSDAIQALRALVRTRDDLVAQRVSLANQLRALLESFWPGACTVFAEIDSSISLAFIERYPTPASAARLGEKRLAGFLAVEQYSGRQPVSALLKRLREAPVGHAGAAETEAKSELVRALARILSSLVSEIARITSRIEHEVAQLADGQIVMSLPRAGRLNAAQILAELGDVRERFCTADQLAAEAGLAPVTHQSGKTKAVVFRWACNHQLRRAITTWADNSRHGCAWAKAIYARARYRGCRHPHAIRILARAWARVLWRIWADRTLYQPTQHNGAKPFLIAA

SEQ ID NO: 12710 - protein, 393 aa, unidentified
  source 1..393: note = protein_9b61760
  REGION 4..163: note = RuvC_domain
  SITE 7: note = RuvC_P1
  SITE 60: note = RuvC_P2
  SITE 101: note = RuvC_P3
  SITE 103: note = RuvC_P4
  SITE 106: note = RuvC_P5
  REGION 266..353: note = Tnp_domain
  SITE 274: note = Tnp_P1
  SITE 304: note = Tnp_P2
  SITE 312: note = Tnp_P3
  SITE 313: note = Tnp_P4
  SITE 326: note = Tnp_P5
MVYVGIDVAKDKHDCFIANSDGEVLYDVFTIQNNMDGFEDLFFKIKTASRDLSKVKVGLEATGHYSCNILEFLHNKGLTTIVINPLHTNAYRKSLSLRKTKTDKADARAIASMIMSDVSLKPYSDTVYHNEDLKSLSRYRFDKVSDRSKLKQSVSRLVNILFPELEKLVSTLHTKAVYELLSEFPGAHQVASANLKHLTALLSTASKGHFGREKANEIREAARRSISTYLPAKSLELRHTIKLIRELNAEIAEIETEIKKIMDSIDSPILSIPGISYGIGSMIVSEIGDFSRFDSPDKILAYAGCSPTTYQSGQLYSSHAVMEKRGSRYLRWALINAARYVCNWEPTFASYLEKKRSEGKHYYVALSHAAKKLVRLLYHLETTGEKYIPQTLS

SEQ ID NO: 12711 - protein, 359 aa, unidentified
  source 1..359: note = protein_ca22ea9
  REGION 13..161: note = RuvC_domain
  SITE 16: note = RuvC_P1
  SITE 65: note = RuvC_P2
  SITE 101: note = RuvC_P3
  SITE 103: note = RuvC_P4
  SITE 106: note = RuvC_P5
  REGION 234..317: note = Tnp_domain
  SITE 270: note = Tnp_P2
  SITE 278: note = Tnp_P3
  SITE 279: note = Tnp_P4
  SITE 290: note = Tnp_P5
MDGNEKTTRVVVGGVDTHKDLHVAAIVDEQDHVLGTQSFPATRQGYRQMLAWMRAAGDLLRVGVESTGSYGAGLLRFLQAAGVEVLEVTAPDRHDRRRRGKSDDLDAQSAAHAAFAGQRTVTPRRRDGMVESLRVLRACRKTAVSARKIALQMIQNTIVAAPDALREQLRSMTRMQLIRTLAASRPDLTAYRNLEAAYRISLKSLARRYLELHDEIAELDLMIKAIVEELAPELVARNSIGHNGAAQLLLTAGDNPDRLKSEASFAALCGVTPVPASSGKTIRHRLNRGGDRAANSALHLIAIGRLRTDEKTRAYVARRVAEGHSKLEVIRILKRYIAREVYGVIIRRHREVNASRFAA

SEQ ID NO: 12712 - protein, 343 aa, unidentified
  source 1..343: note = protein_a8628e0
  REGION 6..148: note = RuvC_domain
  SITE 9: note = RuvC_P1
  SITE 52: note = RuvC_P2
  SITE 87: note = RuvC_P3
  SITE 89: note = RuvC_P4
  SITE 92: note = RuvC_P5
  REGION 211..299: note = Tnp_domain
  SITE 219: note = Tnp_P1
  SITE 249: note = Tnp_P2
  SITE 257: note = Tnp_P3
  SITE 258: note = Tnp_P4
  SITE 270: note = Tnp_P5
MQVVRIGLDLAKYVFEVHGVDERGNVVIRKTLRRGSVATFFANLPRCLVGMEASNGAHYWARVLAELGHKVRLISPQFVAPYVKSNKNDRNDAEAICEAVGRPTMRFVPPKSPEQLAIQALHRIRQRLVQSRTRLVNQIRGVLSEHGIVIARDIWRLRRALAEITGNATDDLNALVRVLTMEVQTELIELDRRIAFYDRRIRELYRTSELCQKLGEIEGIGPVTATALVAAVGDRSCFKNGRQFAAWLGLVPKQRSSGGRNRLFGISKRGDRYLRTLMIHGARAALGKAGGKQDPRSRWLAGLRQRRHPNIAAVALANKNARIAWAMLAGNVSYEPARSVQAA

SEQ ID NO: 12713 - protein, 354 aa, unidentified
  source 1..354: note = protein_664f354
  REGION 12..153: note = RuvC_domain
  SITE 15: note = RuvC_P1
  SITE 58: note = RuvC_P2
  SITE 93: note = RuvC_P3
  SITE 95: note = RuvC_P4
  SITE 98: note = RuvC_P5
  REGION 217..302: note = Tnp_domain
  SITE 225: note = Tnp_P1
  SITE 255: note = Tnp_P2
  SITE 263: note = Tnp_P3
  SITE 264: note = Tnp_P4
  SITE 276: note = Tnp_P5
MTRKSHDSVAVIGIDLGKNVFHLIGLNKRGAIVLRQKMSRSQLETRLANTPPCLIGMEACVGAHHLGRRLKALGHDAKLMPAKYVRPYSKGQKNDFKDAEAIAEAVQRPTMRFVAIKTVAQLDLQALHRIRERLVSQRTGVINQIRAFMLERGIAVRQGLRFLRAELPGLLATRGDVLSPHMIHLIEDLAGDWRRLDERIDALTAEIEGIARADVHCQRTMSVPGVGPIVSSAMVAAIGTGEGFCKGRDFAAWLGIVPKQISTGDRTILGSISKRGNKYLRKLFVQAAWVVLVKPMSWERHGLKSWIEAAKKRLHRNVLAIALANKLARIAWAVLAKGRGFEVTRKTNVAAQYA

SEQ ID NO: 12714 - protein, 407 aa, unidentified
  source 1..407: note = protein_c4ab12c
  REGION 4..160: note = RuvC_domain
  SITE 7: note = RuvC_P1
  SITE 57: note = RuvC_P2
  SITE 97: note = RuvC_P3
  SITE 99: note = RuvC_P4
  SITE 102: note = RuvC_P5
  REGION 274..361: note = Tnp_domain
  SITE 282: note = Tnp_P1
  SITE 312: note = Tnp_P2
  SITE 320: note = Tnp_P3
  SITE 321: note = Tnp_P4
  SITE 334: note = Tnp_P5
MNAVGIDVSKGKSMVAALRPMGEVALLPKEYPHSEAGLEQMARAIIALGEDTRVVMEATGRYHEPVAAALHEYGIYVTVLNPLFIQRSGGGSIRKVKTDKADAMKIAKYGLDNWIDLREYTPMEAVRQQLKLCSRQYNLYMKTIVALQNNLISLTDKTFPGVNELFTSPERADGHQKWVDFVMSFWHCECVCRISEKAFTERYRKWCKRKGYNFSESKALDLYADSCSHITTLPKNDNAKLLITTAAQQLIAARTTLVAIRTEMLRLAKLLPEYDTVRAMYGVGDITAAQLMAEIGDVRRYPHRSSLVAFAGVDPAVNQSGKHEARSNPTTKRGSPHLRKTLYQIICTYLKNSPTDEPVYQFIDKKRSEGKPYFVYMTAGANKFLRIYYARVKECLAALDTSPSSLN

SEQ ID NO: 12715 - protein, 307 aa, unidentified
  source 1..307: note = protein_f57f3fd
  REGION 6..146: note = RuvC_domain
  SITE 9: note = RuvC_P1
  SITE 51: note = RuvC_P2
  SITE 91: note = RuvC_P3
  SITE 93: note = RuvC_P4
  SITE 96: note = RuvC_P5
  REGION 187..274: note = Tnp_domain
  SITE 195: note = Tnp_P1
  SITE 224: note = Tnp_P2
  SITE 232: note = Tnp_P3
  SITE 233: note = Tnp_P4
  SITE 244: note = Tnp_P5
MPQIIVGCDLSRAFIDVCINAGRRTSRIENTKSGITQWIVTLETSALVVFEATSGCDAVLMQVLAEHGVTYARVNPRQAREFARALGVLAKTDKVDARVLAQMGQRLPLTITKPQEPQRKRLADFLRRRKQLVEARKAEKLRRHSAGQPELLHDIDSMIAIFDRRIEKLDKQIAAIIGESRDLAAQAHLLSAVPGIGPTVLATLLGELPELGTLDRRRIASLAGLAPHARESGTWKGTRRIWGGRRKVREALYIAALTATRRVPTLIAMRDRMRAAGKAPKTILIAAGRQLLVILNAMIRSNRPIRL

SEQ ID NO: 12716 - protein, 342 aa, unidentified
  source 1..342: note = protein_8739fca
  REGION 6..148: note = RuvC_domain
  SITE 9: note = RuvC_P1
  SITE 52: note = RuvC_P2
  SITE 87: note = RuvC_P3
  SITE 89: note = RuvC_P4
  SITE 92: note = RuvC_P5
  REGION 211..297: note = Tnp_domain
  SITE 219: note = Tnp_P1
  SITE 249: note = Tnp_P2
  SITE 257: note = Tnp_P3
  SITE 258: note = Tnp_P4
  SITE 270: note = Tnp_P5
MSAAFIGLDLAKSVFQVHGVDAQGKVVVTKRLRRDAVLAFFANLAPCVVGMEACAGSHFWAREIARLGHTVRLMAPQYVKPYVKRQKNDRADAEAICEAVQRPSMRFVAIKSEEQQSTLAIHRVRETLVAQKTQLINALRAHLAEFGIVAPQGAGKVEQLTAVVTDLEDTRVPALARSALQGLVDQLRDTERRVEELDARLARQAREDKVCQRLTTIPGIGPITATALTATVGDATVFESGRHLAAWLGLVPRQNSSGGRERLGGISKAGDGYLRRLLVHGARAVMRWHGRTSPWLAGLLKRRPVNVAVVALANKLASIAWAVMARGEDYRKPDAAAELAQG

SEQ ID NO: 12717 - protein, 306 aa, unidentified
  source 1..306: note = protein_ba688b7
  REGION 4..168: note = RuvC_domain
  SITE 7: note = RuvC_P1
  SITE 51: note = RuvC_P2
  SITE 91: note = RuvC_P3
  SITE 93: note = RuvC_P4
  SITE 96: note = RuvC_P5
  REGION 183..267: note = Tnp_domain
  SITE 191: note = Tnp_P1
  SITE 220: note = Tnp_P2
  SITE 228: note = Tnp_P3
  SITE 229: note = Tnp_P4
  SITE 240: note = Tnp_P5
MLACGVDVSKATLDVAIHGSSQVRSFANSIAGFRKLAAWLLPQAPSQVVLEATGGYEQAALDALFRSGLPMVRVNPRQVRDFAKASGQLAKTDRLDARVLAHLAATIPLMRYQPKRDWQRRLTEWHQRRGHLVEMMGAERQRLERITDSALRTWSRRHLASLQKEVRRMDVEIKSQVAAQASLDPLRSLKGVGPVLQTTLACQLPELGTLDGKAIAKLVGVAPLARDSGLMRGRRHVWGGRSEIRAVLYMATLTTIRYEPKLRDFYQGLRARGKAPKVAIVAAMRKLLVILNARMRDALALHLRAA

SEQ ID NO: 12718 - protein, 306 aa, unidentified
  source 1..306: note = protein_a931166
  REGION 5..154: note = RuvC_domain
  SITE 8: note = RuvC_P1
  SITE 52: note = RuvC_P2
  SITE 92: note = RuvC_P3
  SITE 94: note = RuvC_P4
  SITE 97: note = RuvC_P5
  REGION 186..270: note = Tnp_domain
  SITE 194: note = Tnp_P1
  SITE 223: note = Tnp_P2
  SITE 231: note = Tnp_P3
  SITE 232: note = Tnp_P4
  SITE 243: note = Tnp_P5
MISWLGIDVAKSTLSVWLHPQDVSFNVPNNSAGYAQLVEKLSEYDVQKALLEATGGYERGVMMALSLAGFIVIRINPRRARAFAEAIGKQAKTDPIDAHVLAQFAQTLKASNPQMVSTQAQCLRELVQQRERFVQQRDDDRRRIHQAHLPKVIEALKGHIAFLKVQILDLEKAIEEAMQALDALKTTQLTSVKGIGTITAASLMAYLRELGELDRHQIAALAGLAPYNNDSGTFQGKRKICGGRSAVRRALYMSCWTVIRYDASFKARYEGLCGKGKSAKVALVACMRVLLIRLNAMLRDGTAWRT

SEQ ID NO: 12719 - protein, 407 aa, unidentified
  source 1..407: note = protein_4b71eb0
  REGION 6..162: note = RuvC_domain
  SITE 9: note = RuvC_P1
  SITE 62: note = RuvC_P2
  SITE 99: note = RuvC_P3
  SITE 101: note = RuvC_P4
  SITE 104: note = RuvC_P5
  REGION 271..356: note = Tnp_domain
  SITE 278: note = Tnp_P1
  SITE 309: note = Tnp_P2
  SITE 317: note = Tnp_P3
  SITE 318: note = Tnp_P4
MTMWYAGIDWADQHHDAVVIDEAGKRVGTTRVAHSAEGLDTLVTFLKGSGDVTAHPDHLACIIETHRGLLITALLDAGLPVYPVNPNTVERHRKPAGAKTDAIDAYLLARTGRSDLSDLRRLTPDSPVIAELTALTRDQDTLIQSQTRLVNQRTACLKAYYPVARELFGKRQQPTTLAFLQAFPTPDQSRAATVEQIAAVLKAAGHPTANVKARQVQERLSQPQLRADAVVTRTKTRLMLTLVAQLQVLLPEIAAYDEEITRLFRLHSASRACARLPRAGTRLAPRLLAEWGDDRGRYTDAASVQALAGTAPVPFQSGNFAKAHRRYACNKPLRNALQPCAWQSTQKEAWALTYYQRKRRDGKSHAMAVRALANQWVRLIYALWAKHETYNPATFLAAPQAHAPRAA

SEQ ID NO: 12720 - protein, 404 aa, unidentified
  source 1..404: note = protein_9902579
  REGION 6..162: note = RuvC_domain
  SITE 9: note = RuvC_P1
  SITE 60: note = RuvC_P2
  SITE 100: note = RuvC_P3
  SITE 102: note = RuvC_P4
  SITE 105: note = RuvC_P5
  REGION 271..358: note = Tnp_domain
  SITE 279: note = Tnp_P1
  SITE 310: note = Tnp_P2
  SITE 318: note = Tnp_P3
  SITE 319: note = Tnp_P4
  SITE 331: note = Tnp_P5
MPELWAGTDAGKGEHHCTAIDTDGNKVLSRRVPNNEPELLELLGDVLELADGGPVTWAVDLNSGGAALLIALLVSHEQKLLYIPGRTVHHASAAYRGSGKTDAKDAFVIADTARMRRDLQPLTETSEIAVDLRIMTARRMDLSADRTRAINRLRAQLLEYFPALERAFDYSTSKTALILLTGYQTPSALRRIGRARLTTWLKNHGVRTVTNAKSAANTALTAAEAQHTVVPGEKTAARMVRTLAMEVMALDEEIDQLNTLIEERFREHPDAAVITSMPGIGDTLGAEFIAATGGDMAAFGSPDRLAGVAGLAPVPRDSGKISGNLQRPRRYSRRLLRMCYLAAQAAAIHCPESRRFYQRKRAEGKSHKQAVLALARRRLNVLWALIRDHRTFETAADRQATAAA

SEQ ID NO: 12721 - protein, 353 aa, unidentified
  source 1..353: note = protein_9631d5e
  REGION 17..159: note = RuvC_domain
  SITE 20: note = RuvC_P1
  SITE 63: note = RuvC_P2
  SITE 98: note = RuvC_P3
  SITE 100: note = RuvC_P4
  SITE 103: note = RuvC_P5
  REGION 222..308: note = Tnp_domain
  SITE 230: note = Tnp_P1
  SITE 260: note = Tnp_P2
  SITE 268: note = Tnp_P3
  SITE 269: note = Tnp_P4
  SITE 281: note = Tnp_P5
MNSQFTIEATNMNITTVGIDLAKNVLQIHGVNQHGKKVFNKQLQRKQVLTYFTQLTPCLIGMEACGSAHFWARKLQALGHTVKLMAPQFVKPYVKTNKNDAADAEAICESVTRPTMRFVPIKNNEQQAVLSLHRARQGFVKARTAQANQIRGLLMEYGINIPQGISHITKRIPELLEDEDNELPGVFRQLLQRLGDHLKELDRQVTELDTQIQAWHKESEVSKKLACIPGIGPLTASALIASVGDARSFKSGRQLAAWLGLVPRQHSSGGKQILQGISKRGDTYLRTLLIHGARSVIRIAAGKTTPTHCWAVNLVKRRNKNIAAVALANKNARIVWALLTQHRNYQSNYSLVV

SEQ ID NO: 12722 - protein, 344 aa, unidentified
  source 1..344: note = protein_ab1c633
  REGION 7..148: note = RuvC_domain
  SITE 10: note = RuvC_P1
  SITE 53: note = RuvC_P2
  SITE 88: note = RuvC_P3
  SITE 90: note = RuvC_P4
  SITE 93: note = RuvC_P5
  REGION 213..298: note = Tnp_domain
  SITE 221: note = Tnp_P1
  SITE 251: note = Tnp_P2
  SITE 259: note = Tnp_P3
  SITE 260: note = Tnp_P4
  SITE 272: note = Tnp_P5
MSEVTTIGLDIAKQVFHAHGADAAGRAVFSRRLTRGKLLDFFAAHPRCMVALEACGGAHHWARELQAIGHEVRLIPPAYVKPYVKRHKNDAVDAEAICEAAQRPSMRFVAVKTEQQQAAALVFRTRDLAVKQRTQLGNAIRGHLAEYGWVAPKGSAHLAMLADLLDGGEIGETLPEAARPMFAMMVDMLAGLDERIAALDKEIARRAREDEVARRLMTIPGIGPITATAIAAIAPPAETFAKGRDFAAWLGLVPKQASTGGKQKLGAISKMGERTLRRLLIIGSSAVVLQASKRGAPAGSWLEGMLARKPRMLVTVALANKMARTVWALLVRQEDYRAPVVVTA

SEQ ID NO: 12723 - protein, 348 aa, unidentified
  source 1..348: note = protein_faccd57
  REGION 7..147: note = RuvC_domain
  SITE 10: note = RuvC_P1
  SITE 53: note = RuvC_P2
  SITE 88: note = RuvC_P3
  SITE 90: note = RuvC_P4
  SITE 93: note = RuvC_P5
  REGION 210..298: note = Tnp_domain
  SITE 218: note = Tnp_P1
  SITE 248: note = Tnp_P2
  SITE 256: note = Tnp_P3
  SITE 257: note = Tnp_P4
  SITE 269: note = Tnp_P5
MEQIIRIGMDTSKSVFQLHGVNASEQPVLRKKLSRREMVKFFAKTPTTTIALEACGGSHHWARLLSSFGHEVKLIAPQLAKPYVKRGKNDAADAEALCEAMSRPTMRFVPVKTADQQAALMLVGVRERLIRNRTQLSNAIRGFAMEFGIVAAKGMCRIEPLLQRIASDEALPELARELFAMQGEEHRDLLAEIKTVDEKLMTLHRADECSKRLAEIPGVGPIGASLLMMKTPDPTMFKSGRDFAAWIGLTPRDHSTAGKVRLGVITRAGDEMLRSVLVVGATALLQQVRIGRSKHASRWLLELLQRKKPKLVAVALANKIARVAWKLMVSGEACRRSQDVPQAAGLAA

SEQ ID NO: 12724 - protein, 325 aa, unidentified
  source 1..325: note = protein_eb0b937
  REGION 12..153: note = RuvC_domain
  SITE 15: note = RuvC_P1
  SITE 58: note = RuvC_P2
  SITE 93: note = RuvC_P3
  SITE 95: note = RuvC_P4
  SITE 98: note = RuvC_P5
  REGION 217..289: note = Tnp_domain
  SITE 225: note = Tnp_P1
  SITE 255: note = Tnp_P2
  SITE 263: note = Tnp_P3
  SITE 264: note = Tnp_P4
  SITE 276: note = Tnp_P5
MSQTQNAAIAVVGIDIGKNSFHIVGHDERGAIVLRQKWSRGQVEARFANMPPCLVGMEACVGAHHLSRKLNSLGHNARLMPAKYVRPYSRGQKNDFRDAEAIAEAVQRPTMKFVATKTAEQLDLQALHRVRERLVSQRTGIINQIRAFLLERGIAVRQGQRFLRAELPRILVMPPDVLSPRMVRIIEDLAGDWRRLDERVESLSNEIETIARQDAGCERLMSVPGIGPIISSAMVAAIGAGDVFTKGRDFAAWLGLVPKQISTGDRTILGKLSRRGNRYLRVSVRAGGVGRADQAEDLGAPWAQALDRGGQEAAASQRAGDRTRQ

SEQ ID NO: 12725 - protein, 402 aa, unidentified
  source 1..402: note = protein_17773e5
  REGION 14..159: note = RuvC_domain
  SITE 16: note = RuvC_P1
  SITE 65: note = RuvC_P2
  SITE 101: note = RuvC_P3
  SITE 103: note = RuvC_P4
  SITE 106: note = RuvC_P5
  REGION 227..313: note = Tnp_domain
  SITE 235: note = Tnp_P1
  SITE 266: note = Tnp_P2
  SITE 274: note = Tnp_P3
  SITE 275: note = Tnp_P4
  SITE 286: note = Tnp_P5
MTATRPEATQVLGGADTHADTIHVAAIDALGRDLGDREFPTTPTGYRDALAFLVAFGALTVIGIEGTSSYGAGLTRAAQAAGIAVREVIRPERSVRRLQGKSDPIDAYQAARAVLSQRAAAAPKDEHTEAIRALNNARRSAVKARTAAMNQIHHMLITAPTLVREKYRPLKEKALVNALAACRPSTKDPTSHGVLTALKTLARRHQFLTEQADDLHQQIRDLAQAANPHLMSLRGVGPATAAQLLITAGGNPERLRSEASFAALCGTAPVPASSGKTTRHRLSRGGDRAANCALHTIALVRMTSDPRTRAYVRTQRDRGRDHAEITRLLKRAIAREVYRSLTRGLAAPELTDLRPARQAKNITLTAAAKALGTYPSKIVRTELGTYPDCDLADRYRQWLLAA

SEQ ID NO: 12726 - protein, 323 aa, unidentified
  source 1..323: note = protein_f6ad077
  REGION 9..158: note = RuvC_domain
  SITE 12: note = RuvC_P1
  SITE 57: note = RuvC_P2
  SITE 97: note = RuvC_P3
  SITE 99: note = RuvC_P4
  SITE 102: note = RuvC_P5
  REGION 196..280: note = Tnp_domain
  SITE 204: note = Tnp_P1
  SITE 233: note = Tnp_P2
  SITE 241: note = Tnp_P3
  SITE 242: note = Tnp_P4
  SITE 253: note = Tnp_P5
MSQPNPLCVGIDVSKTTLDIATANNEFAQFTAGNDTDGFELIIAELRKHSVALVLMEATGGLEAAVACSLQAEGFDIAVINPRQARNFSRAMGYLAKTDRIDAKVLSQMTEVINRHPERERFIKAIPDAERQILAAMVVRRRQLITMLVAERNRLHPAHPQNRKSINTIIKALEDELSRIDEAMNNHIKTHFKELAARLSSIKGVGAMTVATLLSEVPELGSLSRREISALIGVAPVNRDSGTMRGRRTIFGGRAGVRTALYMAALVATRFNPVIKDFYTRLITAGKVRKVALVACMRKLLTILNAMIRKNEEWSDSYHKFSL

SEQ ID NO: 12727 - protein, 316 aa, unidentified
  source 1..316: note = protein_6a60d04
  REGION 2..153: note = RuvC_domain
  SITE 5: note = RuvC_P1
  SITE 52: note = RuvC_P2
  SITE 92: note = RuvC_P3
  SITE 94: note = RuvC_P4
  SITE 97: note = RuvC_P5
  REGION 191..275: note = Tnp_domain
  SITE 199: note = Tnp_P1
  SITE 228: note = Tnp_P2
  SITE 236: note = Tnp_P3
  SITE 237: note = Tnp_P4
  SITE 248: note = Tnp_P5
MVGIDVASTHVDVAAVGAELPAALRHIGNDADGHGTLADGLARLKPELVLMEATGGYEAALTCALQAAGLRVAVVNPRMARDFARAMQRLAKTDRIDAATLAEFAGVLARRPDCERFIRPLSEPEQQDLAALVTRRRQLVSMQLSERQRLRLARPVARPSIEALLRAIARQLDDVEAQMAHHVEQHHAQMAKLLQSVAGIGKVAAATLIAELPELGRLNRRQICALVGVAPYANDSGATRGRRRIGGGRFEVRRALYMATLTATRHNAAIRDFYERLVAAGKLKKVALIACMRKLLTHLNAIARDHMNAQDHSSIA

SEQ ID NO: 12728 - protein, 352 aa, unidentified
  source 1..352: note = protein_63e478f
  REGION 15..163: note = RuvC_domain
  SITE 18: note = RuvC_P1
  SITE 67: note = RuvC_P2
  SITE 103: note = RuvC_P3
  SITE 105: note = RuvC_P4
  SITE 108: note = RuvC_P5
  REGION 235..319: note = Tnp_domain
  SITE 241: note = Tnp_P1
  SITE 272: note = Tnp_P2
  SITE 280: note = Tnp_P3
  SITE 281: note = Tnp_P4
  SITE 292: note = Tnp_P5
MPSITPDEAAIDVFGGVDTHQDTHTAAVIDQIGRVLGTQQFPADAAGYTALLAWMREHGRLNRVGIEGTGAYGAGLARLLRAEQVAMIEVDRPDRKTRRFQGKSDPIDSIQAARAALAGERTGTPKQRDGRVEALRNLRVVRRSAVDQRADTQRQIKALIVTATDELRARLRGLTITKLIATCGNLQPDPANSAAPSTATELALRSLARRHQQLSVEITDLDELLEPLVAAINPGLLAAHGVGAEVAGQLLVSAGQNHDRLASEAAFAMLCGVAPIPASSGKTTRHRLNRGGDRQANAALYRVVLVRLRWDPRTRDYMQRRTKEGMSKKRNHPMPEAVRRPRALPAHHQKRS

SEQ ID NO: 12729 - protein, 345 aa, unidentified
  source 1..345: note = protein_6c34e14
  REGION 4..159: note = RuvC_domain
  SITE 7: note = RuvC_P1
  SITE 58: note = RuvC_P2
  SITE 98: note = RuvC_P3
  SITE 100: note = RuvC_P4
  SITE 103: note = RuvC_P5
  REGION 263..345: note = Tnp_domain
  SITE 271: note = Tnp_P1
  SITE 301: note = Tnp_P2
  SITE 309: note = Tnp_P3
  SITE 310: note = Tnp_P4
  SITE 323: note = Tnp_P5
MIYVGIDIAKLNHFATAISSDGEVLLEPFKFTNDNDGFCLLASKLNSFEKDQIIIGLESTAHYGNNLLMFLVPKGYNVCLINPIQTAQMRKNNIRKTKTDKVDTIIICKVLMMHPHRFVTLYDIGLIQLKNLGRFRQKIVKQRTRLKIQLTSYLDQVFPELQYFFKSGIHHKGCYALLKEAPTPEAIASMHLTHLTHLLKAASKGHFQKETAVELRVLAQKSVGSSDKSLSIQITQSIEQIELLDRQLELIESEMKDIVTSLDSVIMTIPGIGYVNGGMILGEIGDITRFSNPSKLLAFAGLDPSVYQSGNFEAKHTRMSKRGSRALRYALIKAAHNVVKKQDFQ

SEQ ID NO: 12730 - protein, 342 aa, unidentified
  source 1..342: note = protein_7c3af9b
  REGION 6..148: note = RuvC_domain
  SITE 9: note = RuvC_P1
  SITE 52: note = RuvC_P2
  SITE 87: note = RuvC_P3
  SITE 89: note = RuvC_P4
  SITE 92: note = RuvC_P5
  REGION 211..297: note = Tnp_domain
  SITE 219: note = Tnp_P1
  SITE 249: note = Tnp_P2
  SITE 257: note = Tnp_P3
  SITE 258: note = Tnp_P4
  SITE 270: note = Tnp_P5
MKVTTIGLDLAKNAFQVHGADDKGRAVLKKQLKRGQVLPFFANLEPCKIGMEACGSAHHWARKLQAVGHTVQLIAPQYVKPFVKRNKNDAADAEAICEAVTRPNMPTVPIKNASQQAILSVHRARQGFVKARTAQANQIRGLLAEYGIAMPQGISHIAKRVPEIIEDGENELPGSFRLLIQRLVDHLKALDRQVGELEAEIQLWHREDSASKKLEKIPGIGPMTASALVASIGDARNFKNGRQFSAWLGIVPKQHSTGGKSALLGISKRGDSYLRTLLIHGARAVIRWAENRSDADVWLKNLLARRNKNIVAVALANKNARTIWALLAHDREYKTGYVRATA

SEQ ID NO: 12731 - protein, 420 aa, unidentified
  source 1..420: note = protein_e86d371
  REGION 22..174: note = RuvC_domain
  SITE 25: note = RuvC_P1
  SITE 73: note = RuvC_P2
  SITE 111: note = RuvC_P3
  SITE 113: note = RuvC_P4
  SITE 116: note = RuvC_P5
  REGION 281..367: note = Tnp_domain
  SITE 289: note = Tnp_P1
  SITE 320: note = Tnp_P2
  SITE 328: note = Tnp_P3
  SITE 329: note = Tnp_P4
  SITE 340: note = Tnp_P5
MKSASTTPNNTLPEFPPNDVTAGIDWARDDHAACIVDGRGRKVATITVEHTSTGLADLVGFLRRHGINEVAIERPDGPVIDALLAAELTVVVISPNQVKNLRGRYGSAGNKDDRFDAYVLADTLRTDRARLRPLVPDREDTIALRRACRARKDLVKHRIAAANQLRAHLRNVLPAVVGLFADLDSAISLAFLTRFNTQDKLDWLTPKRLGDWLSKQGYSGKVDPAVLHQRILQAPRGAHGPHSNSQATITASYVALLGTLTQQIKTLAAQIDRQLDHHPDAPIFTSLPRSGRIRAARLLAEIGDCRARFPTPESLTGLAGAAPSTRQSGKLRTVGFRWACDKQLRDAVTDFAADTRLANPWAADLYDRARARGHDHPHAVRILARAWLHIIWHCWQDHQTYDPAQHRALQRVLATQTQAA

SEQ ID NO: 12732 - protein, 353 aa, unidentified
  source 1..353: note = protein_b9d8aba
  REGION 4..158: note = RuvC_domain
  SITE 7: note = RuvC_P1
  SITE 56: note = RuvC_P2
  SITE 97: note = RuvC_P3
  SITE 99: note = RuvC_P4
  SITE 102: note = RuvC_P5
  REGION 220..306: note = Tnp_domain
  SITE 228: note = Tnp_P1
  SITE 258: note = Tnp_P2
  SITE 266: note = Tnp_P3
  SITE 267: note = Tnp_P4
  SITE 278: note = Tnp_P5
MIVIGVDPHKSTHTATALDSVTNTDLGSIRIDASITEYKRLIAWAKAWPDRRWAIENADGLGHHLALWLLALGEVVLDIPTTATARIRELSRGGRRKNDRIDAAAAASVAALQGDARQVYPETVNDALALLDERRVNLSSSRTRTVNQLHALLRELMAGGAPTSLTPKKAAAAIRGFRARTAPDKIRLELAKALITDFERFDQQLATNSRKITALLDEHGTRLRIIDGVGPVLAARILVRSGRASRFPTAAAYANYTGTAPVQIASADASHHRLSRFGDRQLNSAIYTIAMIQIRMPSSAGRAFYEKRIAEGKSPRTAARALKRHLATHLWRVMLADEKRSIRAVSRESLAAA

SEQ ID NO: 12733 - protein, 418 aa, unidentified
  source 1..418: note = protein_6344556
  REGION 10..158: note = RuvC_domain
  SITE 13: note = RuvC_P1
  SITE 64: note = RuvC_P2
  SITE 98: note = RuvC_P3
  SITE 100: note = RuvC_P4
  SITE 103: note = RuvC_P5
  REGION 255..342: note = Tnp_domain
  SITE 263: note = Tnp_P1
  SITE 294: note = Tnp_P2
  SITE 302: note = Tnp_P3
  SITE 303: note = Tnp_P4
  SITE 314: note = Tnp_P5
MLSIKHFVCCGMDVHKKFVVATIALTDYRGVTSYVKKRFATFNSDLNSLKKWLLSFNCTEICLESTGKYWIPIFNILEDSCHVVVANPKYVRAIKGQKTDDKDSAWIADLFKFDIVPSSYIPCKEIRMLRELFRYRQKLIGHRSSEKNRLQNALTVSNIALASVLSDTFGKSATAIVDYILTCEVFDPEYCKSLLLKKAKDKADDVVTSIIGYELRRDQSVKIKVCRKHFDEINECVSTLEETISDLAKPYHKFIELATTIPGITEQSATFIIAEIGVDMAVFKSSKRLCSWAGLAPENNESAGKKKSVHVSRAGVYLKPLLVQCANAAIKSKNPYFRYKYDRIKKRRGHKRAIIAIARMVLTCIYHMFQKQEVFNPADTDYSAIPEEMYRKFQEQYDRNAIKRLEKRGYMITPPAMA

SEQ ID NO: 12734 - protein, 345 aa, unidentified
  source 1..345: note = protein_f2bd268
  REGION 6..147: note = RuvC_domain
  SITE 9: note = RuvC_P1
  SITE 53: note = RuvC_P2
  SITE 86: note = RuvC_P3
  SITE 88: note = RuvC_P4
  SITE 91: note = RuvC_P5
  REGION 210..301: note = Tnp_domain
  SITE 218: note = Tnp_P1
  SITE 250: note = Tnp_P2
  SITE 258: note = Tnp_P3
  SITE 259: note = Tnp_P4
  SITE 272: note = Tnp_P5
MKKTIVGVDLAKKVVQVCVYANKKVRSNTEMTPNEFALWLANSKPMTVIFEACSTSNYWKQRTASLGHDARLISPNLVASVRQNQKTDKNDALAIIQASLLPDVAFVSGKSVEQQQLQSIMRMRELCMKQKTAAKNQIIALLSEFNIKVSKRKGGLLRVIESTLEDAENGFSMEFRVALCAAKEQYLTLVETISTYDTCLEQSIKSHPDCKKLLKIEGIGILNAINLYIALGCADIGSFTKGKDAAACIGLTPIQHSSGGKSKVGSIGRRTKNTILRSQLITGAMSIVNHLGTRAAKTKKELWLKALIERRGKKCAAVALANKNVRTAFALLTQGSEYKADPVSA

SEQ ID NO: 12735 - protein, 318 aa, unidentified
  source 1..318: note = protein_6537bcd
  REGION 7..155: note = RuvC_domain
  SITE 10: note = RuvC_P1
  SITE 54: note = RuvC_P2
  SITE 94: note = RuvC_P3
  SITE 96: note = RuvC_P4
  SITE 99: note = RuvC_P5
  REGION 193..277: note = Tnp_domain
  SITE 201: note = Tnp_P1
  SITE 230: note = Tnp_P2
  SITE 238: note = Tnp_P3
  SITE 239: note = Tnp_P4
  SITE 250: note = Tnp_P5
MSDSVFVGIDVSGQTLEVASSAQVKTWQVSNDAAGLETLVSQLTTLAPALTVLEATGGYEFEAACALQAVGLAVAVVNPRTARDFARAMGALAKTDALDARMLAAFARVLHQHPERERFVKPLADAELQRLQALVLRRRQLVQMITSERQRMRISHSAARPSIERVIEFLKTELSDSDTDVAAHVQRHHAELAAALASVPGIGAASVAVLLAELPELGKLDRRRVAALVGVAPLNRDSGQMRGQRAIWGGRADVRRILYMATLTAVRHNPILKAHYERLLAAGKRKKVALVACMRKLLTMLNAIAKHGSRWDPTLHSA

SEQ ID NO: 12736 - protein, 340 aa, unidentified
  source 1..340: note = protein_e3ec5e1
  REGION 6..147: note = RuvC_domain
  SITE 9: note = RuvC_P1
  SITE 52: note = RuvC_P2
  SITE 87: note = RuvC_P3
  SITE 89: note = RuvC_P4
  SITE 92: note = RuvC_P5
  REGION 211..297: note = Tnp_domain
  SITE 219: note = Tnp_P1
  SITE 249: note = Tnp_P2
  SITE 257: note = Tnp_P3
  SITE 258: note = Tnp_P4
  SITE 270: note = Tnp_P5
MNVTTIGIDIAKSVFQVHGVDAVGQVTVTKKLRRAEVMRFFEAIPACLVGMEACATAHFWARELSALGHQVRLMPPSYVKAYLRRQKNDAADAEAICEAVTRPTMRFVPIKSAERQGVLVLHRTRELLVRQRTMLINAIRGHCAEFGIIAPQGARRACELVEQVRQAGAGELPELARSALLRLAEQLCTLATEIHGLERQLLAWHRQDEASQRLATIPGIGIITATALSAAVTDPGLFRSGREFAAFLGLVPRQNSSGGKDRLGRISKMGDGYLRKLLVVGATSVIRRARTSTSASASWINALLERRPARVVTVAMANKNARIAWAVLKRGEVYRPPVMA

SEQ ID NO: 12737 - protein, 346 aa, unidentified
  source 1..346: note = protein_25440c0
  REGION 7..149: note = RuvC_domain
  SITE 10: note = RuvC_P1
  SITE 53: note = RuvC_P2
  SITE 88: note = RuvC_P3
  SITE 90: note = RuvC_P4
  SITE 93: note = RuvC_P5
  REGION 212..301: note = Tnp_domain
  SITE 220: note = Tnp_P1
  SITE 250: note = Tnp_P2
  SITE 258: note = Tnp_P3
  SITE 259: note = Tnp_P4
  SITE 271: note = Tnp_P5
MKHITTIGLDLAKQVFQIHGADVEGTPIVSRKLRRSEVLRFFEKQPMCLVGIEACGGAHYWAREIAALGHEVRLIPPAYVKPFVKRGKTDAADAEAISEAVTRKTMRFVQIKSAEQQAAAMVLKTRGLLVRQQTQAINALRAHLSELGIVAGIGTAKIAGLIEIVRDETDARLPKAARLALSALADQIEALKEQVDKIEREIVAEAKRDEDMRRLATIPGVGAITAATIKALVPDPGGFKSGRHFAAWLGLTPKSHSSGGKERLGGISKMGNPELRSLLVLGATTVLRYARGNDKAPKWLAALLARRPFKVVAVALANKMARIIWALLNKGGTYRRLTEASSVASA

SEQ ID NO: 12738 - protein, 272 aa, unidentified
  source 1..272: note = protein_9d652a8
  REGION 1..98: note = RuvC_domain
  SITE 37: note = RuvC_P3
  SITE 39: note = RuvC_P4
  SITE 42: note = RuvC_P5
  REGION 160..246: note = Tnp_domain
  SITE 168: note = Tnp_P1
  SITE 198: note = Tnp_P2
  SITE 206: note = Tnp_P3
  SITE 207: note = Tnp_P4
  SITE 219: note = Tnp_P5
MEACSGAHYWARELTRLGHTVRLMPPAYVKPYFKRGKTDAADAEAICEAVTRPTMRFVPAKIEAQQASLVELKVRDMLVRQRTQTVNALRSHLAEYGIVAAQGRKVSELIEVVRDGDDARLPDLARQALCELVTQIEALEERIERLDRRMVRHAREDQTARRLAGIPGIGVIGATALAAMVPDPHGFASARHFAASLGLTPKPHSSGGKERLGRISRQGNAMLRRLLVLGATSRLRYARRSPEAADWATRLLARRPFKVAAVALANKMARIA

SEQ ID NO: 12739 - protein, 392 aa, unidentified
  source 1..392: note = protein_de81ccb
  REGION 5..164: note = RuvC_domain
  SITE 8: note = RuvC_P1
  SITE 61: note = RuvC_P2
  SITE 102: note = RuvC_P3
  SITE 104: note = RuvC_P4
  SITE 107: note = RuvC_P5
  REGION 267..354: note = Tnp_domain
  SITE 275: note = Tnp_P1
  SITE 305: note = Tnp_P2
  SITE 313: note = Tnp_P3
  SITE 314: note = Tnp_P4
  SITE 327: note = Tnp_P5
MVISVGIDVSKDKHDCFILNSEGEVLAEVFTIPNTMDGFNCLLQKIQDSTTPQDKIKVGLEATGHYSYNLLGFLLDNGLSTYVLNPLRTNIYRKSLSLRKTKTDRVDARTIASMLLSDAGLKPYTDTAYHNEELKSLTRYRFDKVKERSKLKSSIARLICILFPELEKLVPSLHMASVYALLEEFPGAKQIAAAHLTRLKTLLETASKGRYKRNMALEIRDAARNSIGAWMPAKSLELQHTIRLIRELDAEIAEIEEQIQSLMEELDSPITTIPGMGFRMAAMILAEVGDFSRFDSPDKLLAYAGMSPSTYQSGQLKNCYPHMEKRGSRYLRYALYNATKYVCHWDPTFAAYLAKKRAEGKHYNVALSHAAKKLVRLIFAMEKSRAPYHMAA

SEQ ID NO: 12740 - protein, 340 aa, unidentified
  source 1..340: note = protein_fbe2235
  REGION 7..148: note = RuvC_domain
  SITE 10: note = RuvC_P1
  SITE 53: note = RuvC_P2
  SITE 88: note = RuvC_P3
  SITE 90: note = RuvC_P4
  SITE 93: note = RuvC_P5
  REGION 211..296: note = Tnp_domain
  SITE 219: note = Tnp_P1
  SITE 249: note = Tnp_P2
  SITE 257: note = Tnp_P3
  SITE 258: note = Tnp_P4
  SITE 270: note = Tnp_P5
MGEVSTIGLDLAKNVFQVHGADASGAVLFRRKLRRHQVLTFFAGQKPCTVAMEACGSAHHWAREIGKLGHAIRLIPPAYVKPFVKRQKNDAADAEAICEAAQRPTMRFVAPKSEQTQAAALVFRARDLLVKQRTQIINALRGHLAEFGLVVAKGPAHVSQLVQAVADPEEPIPEIARPVLQMLVETLHRLDKQIAGLDQEVARRAKENETARRLMTIPGVGPVTAVALAALAPPAETFKRGRDFAAWVGLTPLQHSTGGKQKLGATSKMGERTLRRLLIIGASAVVRWAARNGAPAGSWMARMVARKPPMLVRVALANKMARIVWALMARGGVYQAPAAA

SEQ ID NO: 12741 - protein, 402 aa, unidentified
  source 1..402: note = protein_204d61d
  REGION 10..164: note = RuvC_domain
  SITE 13: note = RuvC_P1
  SITE 61: note = RuvC_P2
  SITE 101: note = RuvC_P3
  SITE 103: note = RuvC_P4
  SITE 106: note = RuvC_P5
  REGION 271..356: note = Tnp_domain
  SITE 279: note = Tnp_P1
  SITE 309: note = Tnp_P2
  SITE 317: note = Tnp_P3
  SITE 318: note = Tnp_P4
  SITE 330: note = Tnp_P5
MQRPQYAVFLGLDVGKEEHHACGLNPDGDRLHDKALPQSESRIRETLASLAQHGRVLVVVDQPASIGALPVTVARSLGIDVAYLPGLAMRRIADLHPGNAKTDARDAYVIAEAARSMPHALRRVDTGDEALADLEVIVGFDDDLAGEVTRIANRIRGLLTQIHPALERVLGPKVQHPAVIELLTRFGGPQGLTKATRRQLITATKTRAPRSYEKLVEHITKALGEQTVTVPGTRAAELVLPQLATTLSGLLAQRAEAAKRIEEMLDPHPLSRVLTSMPGIGVRTGARILLEVGDGSSFPTSGHLAAYAGLAPVTRRSGTSIRGEHPSRAGNKQLKRALFLAAFASLSDPTSRAYYDRKRAAGKKHNAALICLARRRVDVLHAMLRHGTLYETREPKKMPVAA

SEQ ID NO: 12742 - protein, 339 aa, unidentified
  source 1..339: note = protein_3782587
  REGION 5..151: note = RuvC_domain
  SITE 8: note = RuvC_P1
  SITE 53: note = RuvC_P2
  SITE 91: note = RuvC_P3
  SITE 93: note = RuvC_P4
  SITE 96: note = RuvC_P5
  REGION 211..297: note = Tnp_domain
  SITE 219: note = Tnp_P1
  SITE 249: note = Tnp_P2
  SITE 257: note = Tnp_P3
  SITE 258: note = Tnp_P4
  SITE 270: note = Tnp_P5
MGEFIGLDVSLKETAISIRRAGKRVWRGKCPSDPALLAELIRKRAVNVERVVFETGPLSVWFYHELTRRDLPAICIDARHAKAALDMATNKTDANDADGLAHLAEVGFFREVRVKGYDSMLIRTLVGARTKLVRLTTDLSNQIRGLMKTFGLVVPQGRGGAFEKHVYRLLEGEDALARIILPVLEAWRAMRVRSAELGRQLSAAARQSQACQILMTIPGVGVVTATAFTTAIEDPANFARSRSVGAWVGLTTRRYQSGEVDYDGHISRRGDANLRALLYEAATVILTRTHAESDLRTWGLKLREKLGFKRAAVAVARKLAVIMHAMLKSGELFNRPVAG

SEQ ID NO: 12743 - protein, 398 aa, unidentified
  source 1..398: note = protein_690e8e9
  REGION 5..162: note = RuvC_domain
  SITE 8: note = RuvC_P1
  SITE 62: note = RuvC_P2
  SITE 101: note = RuvC_P3
  SITE 103: note = RuvC_P4
  SITE 106: note = RuvC_P5
  REGION 270..355: note = Tnp_domain
  SITE 277: note = Tnp_P1
  SITE 307: note = Tnp_P2
  SITE 315: note = Tnp_P3
  SITE 316: note = Tnp_P4
  SITE 328: note = Tnp_P5
MNLNIGIDIAKNVHEVCFVDENGKQIGNFMKLKNSRKSLEKFRNKIESISKELNAKPRIGIEATGIYWYSLYSELSKYYEIQVYNPSQISGFRSVNIRVSHNDKIDSRTIANMLRFGEAPKTDYSDKQILEMREYCRFQFKLTTIKTNLKKRFRRNLHLIFPGYDMVFKNVFTKTSRGILTEFPTPDDILEMGTEKLRELMKELSRNHINPDKASELIEIARDTIPSEIIKESALFELQMLLDLIETLEKQIEEVEFKILIIWNSVKDRYYTQTITGIGVIRVATICAEIGNFENFTHPDKILAFAGLDPKVTQSGNKEIVGGPNKRGSKMLRWALGWAVEEAKRTNPVIGSCFQKKLDEGKHYNTARCATAKKLVRIIWSVENNKKPFQIPPNYLSS

SEQ ID NO: 12744 - protein, 345 aa, unidentified
  source 1..345: note = protein_6264d09
  REGION 5..153: note = RuvC_domain
  SITE 8: note = RuvC_P1
  SITE 55: note = RuvC_P2
  SITE 93: note = RuvC_P3
  SITE 95: note = RuvC_P4
  SITE 98: note = RuvC_P5
  REGION 213..301: note = Tnp_domain
  SITE 221: note = Tnp_P1
  SITE 251: note = Tnp_P2
  SITE 259: note = Tnp_P3
  SITE 260: note = Tnp_P4
  SITE 272: note = Tnp_P5
MQYYAGLDVSVKETSVCIVNASGGTCRERKVMSHPDDLIDALNDPALPLERVGLEAGPMSQWLFDGLAKAGLPVFCIETRHTKGFLKASQTNKSDRNDARGIAQMMRVGLFKTVHVKTLTSQKRRALLTARALLLEKAVALENDMRGLLRNFGLKVGAASGGMFENRIRELVETDPDLALIIEPLLAGRRTLREEFAKLDKQVVREAKRDQVCKRLMTVPGVGPVVSLAYISTIDVPSRFRNSRAVGAVLGLTPVLNQSGESNRIGHISRCGDAMMRSLLYEAAQTMLTRLVKWYWLKAWAMNIAKRHGRKKATVALARRLAVVMHRMWVDGSEFRWTREQAPGA

SEQ ID NO: 12745 - protein, 389 aa, unidentified
  source 1..389: note = protein_7184fb4
  REGION 4..161: note = RuvC_domain
  SITE 7: note = RuvC_P1
  SITE 59: note = RuvC_P2
  SITE 100: note = RuvC_P3
  SITE 102: note = RuvC_P4
  SITE 105: note = RuvC_P5
  REGION 266..349: note = Tnp_domain
  SITE 271: note = Tnp_P1
  SITE 301: note = Tnp_P2
  SITE 309: note = Tnp_P3
  SITE 310: note = Tnp_P4
  SITE 322: note = Tnp_P5
MYYVGIDVSKYKHDCFIVTSDGEIIRDAFSFGNNHNGFQTLLSALSSLGDPANIRIGFEATAHYTLNLKLFLENAHYSFMEFNPVLLSKFNKSQTLRRTKTDAIDCAAIARWLMTVEYKPYPIGFYHAYSLKSLTRLRDSLVRQRSFYLVKITNVLDHTFPEFKPFFGNRFSKTALFLLETYGSADKISRMNSQSYENLRRISRGKFSPKKFIELKALATGTVGESNEMFESQLSSLLSLYKLSVKEIDSLEQQITDLICQINPHSLSIPGVGPLSAAVIYAEFGDISRFASPQKMLAFAGLDPGYYQSGISAHAGHMVKRGSSHLRFTLMNLCMPLMQYNVVFAEYYAKKRAEGKPHRVACTHMVKKLIRIIYTLETRDIDFDPEKLR

SEQ ID NO: 12746 - protein, 349 aa, unidentified
  source 1..349: note = protein_42adaba
  REGION 9..155: note = RuvC_domain
  SITE 12: note = RuvC_P1
  SITE 57: note = RuvC_P2
  SITE 93: note = RuvC_P3
  SITE 95: note = RuvC_P4
  SITE 98: note = RuvC_P5
  REGION 213..298: note = Tnp_domain
  SITE 221: note = Tnp_P1
  SITE 251: note = Tnp_P2
  SITE 259: note = Tnp_P3
  SITE 260: note = Tnp_P4
  SITE 272: note = Tnp_P5
MKKRNAVFVGCDLGDKFSEICVLDQVGAVLARERVRTTNSGLTKVVAHYASSVVVIEVGVHSRWVEELFRSLGHRVVVANPRQVRLIWKRRLKTDRSDAMLLARLGRVDLTLLAPVQQRGRDAQLDLVALRSRDILVRSRTRLINHVRGVLKQFGLRVRTCGSSAFAKHANEVVPIDLMPALEPALRSLHELDEQITVHDRQIDELAAASPTAQHLMQVTGVGALTALAFCLTIDDPHRFKRSRLVGAFLGLTPAKDQSGESDPEKHISKAGNPFLRRLLVQSAQHILGPCGRESDLRTWGKKLVARGGQAATKRAIVAVARKLAVLLHRLWVTGEAYDPQHYSRCLAA

SEQ ID NO: 12747 - protein, 405 aa, unidentified
  source 1..405: note = protein_189363c
  REGION 19..172: note = RuvC_domain
  SITE 22: note = RuvC_P1
  SITE 70: note = RuvC_P2
  SITE 111: note = RuvC_P3
  SITE 113: note = RuvC_P4
  SITE 116: note = RuvC_P5
  REGION 236..321: note = Tnp_domain
  SITE 244: note = Tnp_P1
  SITE 274: note = Tnp_P2
  SITE 282: note = Tnp_P3
  SITE 283: note = Tnp_P4
  SITE 294: note = Tnp_P5
MWFCRDDGKVNGYMGQLIIGVDPHKRSATIEIINEREQVLGTGRYGTDTGGYQAMLAAGRRHRDRVWAVEGCNGIGRHVAQRLVADGETVLDVPAKLAAKARTFDTGHGRKTDPHDAHHIAVTALRTPDLRRVHADGATVALRLLADRRDQLGVARTETVNRLHQLLLELIPGGAKKNLTTDQARALLERVSVPAGDIAAITRHQLAAELIDELTVLDARMKTATRQLKTVLATTGTQLMSLNGIGPSGAARLLGDIGDIHRFPTRGHFATWNGTAPIDVSSGDHHHHRLNRAGNRRINRALHIMAITQLRYDTPARAYYQRKQTEGKTAMEAMRALKRRLSDTVYRQMIKDDHTAQQTATGPGGHTGATLNSSAADPNPKIDTSEKSQPGPANHHPKTSPTPTP

SEQ ID NO: 12748 - protein, 390 aa, unidentified
  source 1..390: note = protein_e09ce09
  REGION 4..159: note = RuvC_domain
  SITE 7: note = RuvC_P1
  SITE 57: note = RuvC_P2
  SITE 98: note = RuvC_P3
  SITE 100: note = RuvC_P4
  SITE 103: note = RuvC_P5
  REGION 264..351: note = Tnp_domain
  SITE 272: note = Tnp_P1
  SITE 302: note = Tnp_P2
  SITE 310: note = Tnp_P3
  SITE 311: note = Tnp_P4
  SITE 324: note = Tnp_P5
MFYLGIDIGKNNHVASLLDEKGKVVFKAFSFSNSTDGANCLIEKIYSYSSAMEIGMEATGHYWLALYSFLFKQGFIIHVINPIQTDGWRNATEIRKHKTDVIDSVLIADFIRYGEFLETSLANEDVLSLRNLSRFRNYLVSSIGDLKRKTICILDQIFPEYQAVFSNVFGKTSKEILLQFSTPSEFESITAVQLESLLKEINLKNFAAKKIQEISSVAKTSFGITFGLDSMTLQLRLLIEQMNFIEKQVNEIERQTKTLLDKLNSPITTIPGISTVIGATILSEIGDISRFSNPSKLVAYAGIDASIHQSGNYQSSNNKMSKRGSPYLRTALFRAALIASTHDPVFKAYYQKKRSEGKHHLTCLGAVARKLCYTIHAVLKNNCAYKVQLP

SEQ ID NO: 12749 - protein, 341 aa, unidentified
  source 1..341: note = protein_1ef8417
  REGION 7..149: note = RuvC_domain
  SITE 10: note = RuvC_P1
  SITE 53: note = RuvC_P2
  SITE 88: note = RuvC_P3
  SITE 90: note = RuvC_P4
  SITE 93: note = RuvC_P5
  REGION 209..297: note = Tnp_domain
  SITE 217: note = Tnp_P1
  SITE 247: note = Tnp_P2
  SITE 255: note = Tnp_P3
  SITE 256: note = Tnp_P4
  SITE 268: note = Tnp_P5
MQDVTLIGIDLGKHSFHVHGQDRQGKALLRKKFSRKQLVEFLATFHACTVVMEACAGAHHMARLLAHYGHHVKLISPQFVRPFVKSNKNDFIDAEAICEAACRPSMRFVTPKTESQQCLSALHRVRETLVRERVKASNQIHGFLLEFGISLPVGHAVIRRLPSVLAEQALPARLVALLERLHSHFKYLDEQIADIEKELGRQLHDDDPGQRLMSIPGVGPITASMLAAEVGDGKQYRCGRDFAASIGLVPRQYSTGGKNNLLGISKRGDKNIRRLLVQCARAYMQRLERQTDRMAQWVRSMLMRRHSNVVACALANKLARTAWAIAAHHTEFKRQEAVMVA

SEQ ID NO: 12750 - protein, 341 aa, unidentified
  source 1..341: note = protein_7b3d452
  REGION 7..148: note = RuvC_domain
  SITE 10: note = RuvC_P1
  SITE 53: note = RuvC_P2
  SITE 88: note = RuvC_P3
  SITE 90: note = RuvC_P4
  SITE 93: note = RuvC_P5
  REGION 212..301: note = Tnp_domain
  SITE 218: note = Tnp_P1
  SITE 248: note = Tnp_P2
  SITE 256: note = Tnp_P3
  SITE 257: note = Tnp_P4
  SITE 269: note = Tnp_P5
MQSITTIGLDIAKSVFRVHGVDAAGRVVVRRQLKRRHVVAVFQKLPPCLVGIEACASSHHWSRELEALGHTVRLMPASYVKPYVKRQKNDATDAEAICEAVTRPTMRFVPTKTTEQQACLILHRARQFIRQQTAVINSIRAYLAEFGIVAAVGRRGVERLLEVVANKNDRRLPEIARVGVAALGEQLRALKAQILKFDRCIIAWHRSNATSRQLDIPGIGPALAIALAGSVADPNAFRSGRDFSAWVGLVPRQNSSGGKDKLGSISKQGDRYLRSLFTAGALAVIRYAKIHGTQHRPWLTALLARRPTKVAAIALANKLATMAWAMMAKDERYKEPAALAA

SEQ ID NO: 12751 - protein, 403 aa, unidentified
  source 1..403: note = protein_a093431
  REGION 4..160: note = RuvC_domain
  SITE 7: note = RuvC_P1
  SITE 57: note = RuvC_P2
  SITE 97: note = RuvC_P3
  SITE 99: note = RuvC_P4
  SITE 102: note = RuvC_P5
  REGION 269..355: note = Tnp_domain
  SITE 277: note = Tnp_P1
  SITE 308: note = Tnp_P2
  SITE 316: note = Tnp_P3
  SITE 317: note = Tnp_P4
MIYLGIDWAERHHDACVMDEAGAVLATSRVPEGVEGVAKLHEMASSFAEEPSEVIVGIETDRGLLVEALIATGYRVYAINPMAASRYRDRHHVAGTKSDPGDAKVLADLVRTDRHNHREVAGDSTLAEAIKVLARAHQRLVWTRGRQTNQLRSTLREYYPGALEVFTDLHSPDALAVLAVAPTPELGRGLSVSKVRRVLERAGRQRNLDRRSAEIVEGLRAPQLEAPGIVAEAFGATVVSIVAIVQTLNTEIARLQEELAGRFEVHPDAEILTSLPGLGSVLGARVLAEFGDDPTRYADARARRNYAGTAPITRASGTRRVVLARVARNKRLADAIYLWAFSSLQASRGARAFYDRQRTAGKTHHQALRTLGNRWVGILHGCLAHRSLYDEDIAWATRQEIAA

SEQ ID NO: 12752 - protein, 301 aa, unidentified
  source 1..301: note = protein_e12cd0b
  REGION 8..113: note = RuvC_domain
  SITE 52: note = RuvC_P3
  SITE 54: note = RuvC_P4
  SITE 57: note = RuvC_P5
  REGION 175..263: note = Tnp_domain
  SITE 183: note = Tnp_P1
  SITE 213: note = Tnp_P2
  SITE 221: note = Tnp_P3
  SITE 222: note = Tnp_P4
  SITE 234: note = Tnp_P5
MISCPISKRCRFACIEACATAHNWARQLQGLGHDVRLIPPSYVKPFVRRGAKNDATDAAAICEAVTRPNMRFVPIKSREDQAFLMLHRARGLLVRQRTMAAYAFRAHLAEYGVIVAQGIHRVDALIAKLDEIRADLPNDASFALDALVGQLDTLNRQIDRIDVRLAEIHKTNAICRLLATIPGIGPITATAFAATIPDPSTFRSGREFAAWLGLTPRQNSSGVKHRLGGITKQGDRYLRHLLVLGARTVVRYPKARSRVDGPWIEALLERRRPMVAAVAVANKLARTIWAMLSTGEVFRNA

SEQ ID NO: 12753 - protein, 406 aa, unidentified
  source 1..406: note = protein_36b16c8
  REGION 16..170: note = RuvC_domain
  SITE 19: note = RuvC_P1
  SITE 68: note = RuvC_P2
  SITE 108: note = RuvC_P3
  SITE 110: note = RuvC_P4
  SITE 113: note = RuvC_P5
  REGION 275..362: note = Tnp_domain
  SITE 283: note = Tnp_P1
  SITE 314: note = Tnp_P2
  SITE 322: note = Tnp_P3
  SITE 323: note = Tnp_P4
  SITE 335: note = Tnp_P5
MCDDELAEVTVPQIWAGVDIGKEHHHCVVIDERGERLLSRRVLNDEPALLELIKDVLTLSEDALWAVDINHGGAALLIGLLLGHDQPMVYITGLAVHQASTAYRGQGKTDEKDAFVIADQARMRQDLGLLRPGDEIAVDLRTLTARRTDLVNDRTRQTNRLRAQLLEFFPALERALNLSKKGPVVLLTGYQTPAAFRRSGINRIGTWLRNRRVKNAATLAETAVGAAKSQHTALPGEKLAAAMVARIAKGVLALDEEISELDALIEARFHEHRHAAVIRSLPGMGALLGAEFIAATGGDMDPFGTADRLASFAGLSPVPRDSGRVSGNMRRPRRYHRGLLRAFYLSSMASLRTCTASQAYYARKRNEGKGHKQALLSLARRRANVLWAMIRDGACYIALPKVTAAA

SEQ ID NO: 12754 - protein, 345 aa, unidentified
  source 1..345: note = protein_5fe44e7
  REGION 7..149: note = RuvC_domain
  SITE 10: note = RuvC_P1
  SITE 54: note = RuvC_P2
  SITE 89: note = RuvC_P3
  SITE 91: note = RuvC_P4
  SITE 94: note = RuvC_P5
  REGION 213..298: note = Tnp_domain
  SITE 221: note = Tnp_P1
  SITE 250: note = Tnp_P2
  SITE 258: note = Tnp_P3
  SITE 259: note = Tnp_P4
  SITE 271: note = Tnp_P5
MNTIKVVGIDLAKNVFQVCVWMADGSVASNRKISRQKLLDTVRSFPPGTVIAMEACATSHYWGRTLQAMGYTVRLVPTQHVKAFSHHQKNAANDALAICETACRPGLHFVPVKTVEQQDIKALRSARQLMVEQRTALANQMRAFLAESGLIVPAGIQKLQQHLAEILEDGSTNLSYVLRRLLHTLWEEMQNLNTGIHDMDNEIAALSRQQPGYEHLLTIPGVGPLIAAAFVSDVRASQFANGRQLSAWCGLVPRQHSSGGKNRLSSLSKNGHRHLRTLIIHGARAVMRCVQRRDDYLGEWLRKLIDRCGFMKATVALANKLTRIIWRVLRDNVDFNMKKAFLSVN

SEQ ID NO: 12755 - protein, 349 aa, unidentified
  source 1..349: note = protein_6818883
  REGION 12..153: note = RuvC_domain
  SITE 15: note = RuvC_P1
  SITE 58: note = RuvC_P2
  SITE 93: note = RuvC_P3
  SITE 95: note = RuvC_P4
  SITE 98: note = RuvC_P5
  REGION 217..303: note = Tnp_domain
  SITE 225: note = Tnp_P1
  SITE 255: note = Tnp_P2
  SITE 263: note = Tnp_P3
  SITE 264: note = Tnp_P4
  SITE 276: note = Tnp_P5
MTRDTSAEAAVHGVDLGKNIFHVVSLDDHGAVVRRAKFRRDALLDFFERAPRAIVGMEACPGSQWLARKLLAMGHRVRIIPAQFVKPYVKSKKNDTIDAEAIAEAVTRPTMRFTQIRTPDQVDLQALHRVRDQLISSRTRLINQMRAFCLEYGLAIRQGSEFFRKALPDMVADETNDLTPAMRRMLKDLFDDLSRLDQRIDRITREVETLAAGDERARRLMTIPGIGPLAATALLAAIGDGHQFRRARDLAAWLGLVPREYSTGGKTTLLGISKRGNRYVRRLLIHGARSCVAHLNRTRDRLGNWMAALEARMHVNKVVVALAAKIARITWVIVTKPGALYERRDPAVV

SEQ ID NO: 12756 - protein, 279 aa, unidentified
  source 1..279: note = protein_aee46d4
  REGION 7..139: note = RuvC_domain
  SITE 10: note = RuvC_P1
  SITE 57: note = RuvC_P2
  SITE 97: note = RuvC_P3
  SITE 99: note = RuvC_P4
  SITE 102: note = RuvC_P5
  REGION 151..237: note = Tnp_domain
  SITE 159: note = Tnp_P1
  SITE 189: note = Tnp_P2
  SITE 197: note = Tnp_P3
  SITE 198: note = Tnp_P4
  SITE 210: note = Tnp_P5
MQILTPVGIDVASQKFDVEVWKGKAAYKSKAFSNTPKGFDALKKWLEPFGDCHICMEATGAYSEPLSTFLADAGYAVSVENPARIKSFGCSELSRNKTDKGDARMIARYCKLHVPVLWQPLPLNERKLKALVNRLINLKNIGNNPSLKQNRELLESIPGIAGVLSSTILGYFGDMSRFDSSKAIVAWAGLNPMLQESGLWKGKSRISKVGNAMIRKALYMPALTAMRYNPAIIALKERMNARNKSGKVVVCAAMKKLLQQAYGVLKSGQVFDAGICLAR

SEQ ID NO: 12757 - protein, 344 aa, unidentified
  source 1..344: note = protein_0fb594a
  REGION 5..152: note = RuvC_domain
  SITE 8: note = RuvC_P1
  SITE 55: note = RuvC_P2
  SITE 92: note = RuvC_P3
  SITE 94: note = RuvC_P4
  SITE 97: note = RuvC_P5
  REGION 212..300: note = Tnp_domain
  SITE 220: note = Tnp_P1
  SITE 250: note = Tnp_P2
  SITE 258: note = Tnp_P3
  SITE 259: note = Tnp_P4
  SITE 271: note = Tnp_P5
MEHYAGLDVSLELTSVCLVDGHGQVVREAKVASEPEALIRFLREQDLEIARVGLEAGPLSQWLHAGLVAVGFAAVLLETRHVKAALSAMTVKTDRRDARGIAQLLRLGWYRPVHTKSASAQEVRSLLTARKLIQGKLLDIESGIRGVLRGFGLKVSPISRGRFGARIRELVSGQAVLETVIGSMLTARAALQMEFARLHRSLLALVRADPVCQRLMSVPGVGAVVAITFRSGVDDPTRFRRSRDVGPHFGLTPKKYQSGELDVTGSISKVGDRMVRTALYEAASVMLTRTVRMSPLKSWAIAVAKRRGAKKARVALARKLGVVLHRMWVDGTNFRLTDETPTIA

SEQ ID NO: 12758 - protein, 407 aa, unidentified
  source 1..407: note = protein_e110bec
  REGION 9..163: note = RuvC_domain
  SITE 12: note = RuvC_P1
  SITE 60: note = RuvC_P2
  SITE 100: note = RuvC_P3
  SITE 102: note = RuvC_P4
  SITE 105: note = RuvC_P5
  REGION 271..357: note = Tnp_domain
  SITE 279: note = Tnp_P1
  SITE 309: note = Tnp_P2
  SITE 317: note = Tnp_P3
  SITE 318: note = Tnp_P4
  SITE 330: note = Tnp_P5
MNTRFAVVVGLDVGKTAHHACALDPEGNKLFDKPLPQDETKLRELFTQLQNHGEVLMVVDQPNTIGTLPIAVARDTGCTVAYLAGLAMRKAADLYPGRSKTDARDAFIIADTARTMPHTLRQVDRDNEILSALKVLAGFDEDLAHETTRALNRIRSLLTQIHPALERVFVGGSFSTTLVLDLLEKFGGPTGLKTAGRGKVLRFARSHSRRSPEALVDQIFTALGEQTVIVPATAAVELVIPRVAGQVKELKEQRATVAREVEGMLEDFPLASVLMSMPGIGIKTAAQILLNIGDGSAFETPGHLAAYAGIAPVTRRSGASIRGEFPARSGNKRLKNARFYSAWVASNHDPISKAYYDRKRAQGKRHNAAVICLARRRCNVIFAMLRDGTYYQPPTNAPTPEPAALAA

SEQ ID NO: 12759 - protein, 343 aa, unidentified
  source 1..343: note = protein_e7108f4
  REGION 5..153: note = RuvC_domain
  SITE 8: note = RuvC_P1
  SITE 55: note = RuvC_P2
  SITE 92: note = RuvC_P3
  SITE 94: note = RuvC_P4
  SITE 97: note = RuvC_P5
  REGION 212..300: note = Tnp_domain
  SITE 220: note = Tnp_P1
  SITE 250: note = Tnp_P2
  SITE 258: note = Tnp_P3
  SITE 259: note = Tnp_P4
  SITE 271: note = Tnp_P5
MEYYAGIDVSLKESSVCVVDSAGKVVREVKVASEPEALVRYFDELGLPVGRIGLEAGPLSQWLHAGLIAAGREVVLLETRHVKAALSAMTVKTDRKDARGIAQLLRMGWYRPVHAKSAPCKDIRALLVGRKLLQGKLLDVELSIRGILRGYGLKVGEVSRGRFEARIRELTAGHAILEAVIGAMLAARMALWNEFTRLHREMLKIARADMVCRRLMTTPGVGALVALTYRSAVDDPSRFGKSAATGAYFGLTPKKYQSGETDRDGGVSKVGDGMVRTALFEAAHIMLTRATRFSSLKRWALGVAQRRGMKRAKVALARKLGVVLHRMWVDKTDFRWTNAVAAA

SEQ ID NO: 12760 - protein, 278 aa, unidentified
  source 1..278: note = protein_83b676b
  REGION 2..84: note = RuvC_domain
  SITE 24: note = RuvC_P3
  SITE 26: note = RuvC_P4
  SITE 29: note = RuvC_P5
  REGION 149..232: note = Tnp_domain
  SITE 157: note = Tnp_P1
  SITE 182: note = Tnp_P2
  SITE 190: note = Tnp_P3
  SITE 191: note = Tnp_P4
  SITE 203: note = Tnp_P5
MRELGHTVRLIAPQFVKPYVKGDKHDAHDAEAICEAASRPSMRYVPVKSAEQQAVQSMHRVRSRLVRARTALCNEVRGLLGEFGLIATRRGRAATMALLETVMATEPASLPAPMGELLRELKDELQTLEARIARLERQIQAHVRGDARIQRLLAVEGIGAVAASAGDARQFRTGRQFAAWLGLVPRQHSTGGQQRLGNISKRGDTYLRTLLIHGARAVVRCCANKTDARSRWLQGLLQRRPANVVAVALANKQECPDPLGLTQPGDMLPARLSVPATP

SEQ ID NO: 12761 - protein, 320 aa, unidentified
  source 1..320: note = protein_0e1d2b5
  REGION 5..154: note = RuvC_domain
  SITE 8: note = RuvC_P1
  SITE 52: note = RuvC_P2
  SITE 92: note = RuvC_P3
  SITE 94: note = RuvC_P4
  SITE 97: note = RuvC_P5
  REGION 188..272: note = Tnp_domain
  SITE 196: note = Tnp_P1
  SITE 225: note = Tnp_P2
  SITE 233: note = Tnp_P3
  SITE 234: note = Tnp_P4
  SITE 245: note = Tnp_P5
MLSFGGIDVSKDRLDVMVLPEEQCSSVPNDAAGWAKLVEQLRGFSISAVGIEASGGYERGAVRALLAAGMSVRQVNPFKLRQFARASGVLAKNDPLDARMIASFIAIMPTRPAQPHAPAVERLAEILTMRRQLSDAKVAAENASRLLEDAMLQRLSRRRIARLAADIDLLDGRLVEIVMADAALVRRYQLLTSMPGVGPVLACTLIALLPELGRMNRKQVAALVGLAPYAFDSGKLKGARCIWGGRASIRRVLYMAALIAMRCNPALKAFHNRLAATGKKPKVVIVAVMRKMIITLNAMLRNETPWVDRSSGRHSVLTAR

SEQ ID NO: 12762 - protein, 346 aa, unidentified
  source 1..346: note = protein_3abc09a
  REGION 6..148: note = RuvC_domain
  SITE 9: note = RuvC_P1
  SITE 52: note = RuvC_P2
  SITE 87: note = RuvC_P3
  SITE 89: note = RuvC_P4
  SITE 92: note = RuvC_P5
  REGION 211..304: note = Tnp_domain
  SITE 219: note = Tnp_P1
  SITE 249: note = Tnp_P2
  SITE 257: note = Tnp_P3
  SITE 258: note = Tnp_P4
  SITE 270: note = Tnp_P5
MKITTIGIDLAKTVFQIHGVDVQGKAILRKQLRRNEMAKFFANLEPCLIGIEACGSSHHWARKLSEFGHTVKLMPPQFVKPYVKTNKHDMADAEAICEAVNRPNMRYVSVKTVEQQAILSVHRARQSFVKTRTAQSNQIRGLLSEFGIVIPLGIYSIMKRVPEILEDGENGLPGMMRTLLERLTENLEEMNRQIGELEKQIVLWHRENEASRRVSEIAGIGPITASAIVATVGRAKEFKNGRQLAAWMGLVPRQHSSGGKQNLLGISKRGDTYLRTLLIHGARAVIRFAENKAKPESWLRKLMTRCNKNVAAVALANKNARIVWALLANSQTYHPDYTSATIVAKM

SEQ ID NO: 12763 - protein, 344 aa, unidentified
  source 1..344: note = protein_edafa22
  REGION 7..149: note = RuvC_domain
  SITE 10: note = RuvC_P1
  SITE 53: note = RuvC_P2
  SITE 88: note = RuvC_P3
  SITE 90: note = RuvC_P4
  SITE 93: note = RuvC_P5
  REGION 212..299: note = Tnp_domain
  SITE 220: note = Tnp_P1
  SITE 250: note = Tnp_P2
  SITE 258: note = Tnp_P3
  SITE 259: note = Tnp_P4
  SITE 271: note = Tnp_P5
MEEITTIGLDIAKSVFQVHAISATGTVVIRRQLKRRYVLQFFAGLNPCLVGIEACATAHHWGRELTKLGHEVRLMPPRYVKPYVKRNKNDAADAEAICEAVTRPNMRFVPIKTLEQQSILMLHRTRMLFIRQRTMTINAVRAHLAEFGIVAGVGRNGLLELLHLIRKGEKPEIPAEACICLAALADQIDLLKQRILELDRQIMKWHRANELSRKLEGIPGVGPLVATALAASIPDPSVFRSGRDLSAWIGLVPKQNSSGGKEKLGGISKAGNRYLRQLLVVGALAVIKRAKLLGYTRHPWLVSLMERRPAKVAAIALANKMARIAWAMMSRNEAYRIMPATAGN

SEQ ID NO: 12764 - protein, 352 aa, unidentified
  source 1..352: note = protein_0020f6d
  REGION 38..189: note = RuvC_domain
  SITE 41: note = RuvC_P1
  SITE 88: note = RuvC_P2
  SITE 128: note = RuvC_P3
  SITE 130: note = RuvC_P4
  SITE 133: note = RuvC_P5
  REGION 227..311: note = Tnp_domain
  SITE 235: note = Tnp_P1
  SITE 264: note = Tnp_P2
  SITE 272: note = Tnp_P3
  SITE 273: note = Tnp_P4
  SITE 284: note = Tnp_P5
MDSVLVFPMPERLAEPLSASSHAQARVTKTMSGSSVMVGIDVASEHVDVAAIGAELPAALARVSNDADGHSALAEGLVRLAPGLVLMEATGGYEAALACALQAAGLRVSVINPRMARDFARAMQRLAKTDRIDAATLAELAEVLARRPDAERFIRPLTEPEQQDLAALVTRRRQLITMQLSERQRLRLARPVARPSIEAMIEAIKRQLDDVEAEMARHVGQHHSALAKVLQGVAGIGKVAAATLIAELPELGRLNRRQICALVGVAPYANDSGSSRGRRRIAGGRFEVRRTLYMATLTATRHNAPIREFYERLVTAGKLKKVALIACMRKLITHLNAIARDHLNAPHRPAIA

SEQ ID NO: 12765 - protein, 347 aa, unidentified
  source 1..347: note = protein_89117b8
  REGION 4..147: note = RuvC_domain
  SITE 7: note = RuvC_P1
  SITE 51: note = RuvC_P2
  SITE 86: note = RuvC_P3
  SITE 88: note = RuvC_P4
  SITE 91: note = RuvC_P5
  REGION 207..294: note = Tnp_domain
  SITE 215: note = Tnp_P1
  SITE 245: note = Tnp_P2
  SITE 253: note = Tnp_P3
  SITE 254: note = Tnp_P4
  SITE 266: note = Tnp_P5
MKRIAVDLAKSVYQVAESVRSGQVVQRKRLNREAFRRYIQEQTEPVEWVMEACGTAHYWGRVAQALGHSIKLIHPRYVRPYRRRNKTDRNDCDAMLEAARCKDIYPVPVKTHEQQQVQQLHGLRETWKKSRTQRINLLRGILREAGIEAPVATAAFIRAAHELVERPEVAPLSHQLHIVLAEINLHEQCVAECEQQLKRWHADDEVVRKLDEVSGIGLLTASALKNAVGKPERFASGRQLSAWLGLTPREFSSGDRRKLGHISRQGNVYVRTLLIHGSRAALLAAQRCQARSPEKLTQLQRWAVETAARIGHNKAAVALANKLVRICWAVWCHERRFSGNWQSLKPA

SEQ ID NO: 12766 - protein, 317 aa, unidentified
  source 1..317: note = protein_363b4ee
  REGION 9..151: note = RuvC_domain
  SITE 12: note = RuvC_P1
  SITE 56: note = RuvC_P2
  SITE 96: note = RuvC_P3
  SITE 98: note = RuvC_P4
  SITE 101: note = RuvC_P5
  REGION 191..276: note = Tnp_domain
  SITE 199: note = Tnp_P1
  SITE 228: note = Tnp_P2
  SITE 236: note = Tnp_P3
  SITE 237: note = Tnp_P4
  SITE 248: note = Tnp_P5
MAQTSTTTAGIDTSKAKLDIVVHGRDEGWEVANDLPGWRKLVQLLTKAGVKRVGIEATGGYERGVVEHLRAAGVIVLVLQPIQVKAFGRSRLRRAKNDTLDAALIAACAASLEEVRSAPDPRLAELAEQLTFLEQIEDDIKRFKTRLEHLEKPGLRRIVLDDIARLKARRLSQIRHLAKQLRAHHDLAVRLDLVMSIPGIGERTALALLVRMPELGRVSREEVAALAGLAPFDNDSGQYKGQRRIAGGRARLRRSLFAAALPAAFRWNKAVMALYARLTAAGKAHNAALIACARKLLIYANTVVQRGTPWTEKLLGV

SEQ ID NO: 12767 - protein, 344 aa, unidentified
  source 1..344: note = protein_a2f7ac4
  REGION 7..149: note = RuvC_domain
  SITE 10: note = RuvC_P1
  SITE 53: note = RuvC_P2
  SITE 88: note = RuvC_P3
  SITE 90: note = RuvC_P4
  SITE 93: note = RuvC_P5
  REGION 212..298: note = Tnp_domain
  SITE 220: note = Tnp_P1
  SITE 250: note = Tnp_P2
  SITE 258: note = Tnp_P3
  SITE 259: note = Tnp_P4
  SITE 271: note = Tnp_P5
MAKLTTIGIDLAKNTFALYGLGPRGQCGWKRKVRRKQLLEHLVRLEPCTVALEACGSSHYWARQIRDMGHQVELLPPQHVKGYLRGQKNDYNDAQAIAEASEHGRIRPVPIKGAEQQDEQMLHKLRRGVSTERTRISNQLRGLLAEYGVIIPQGIAALRRELPLALGDAENGLTDRARQLLNRQYERFLAVEEELAWYDEQVKRMAKQDETCQRLQAIPGVGEVVASLLKGWMGNGRQFRRGRDAAAALGLIPRQNSTGGKDILLGISKRGDPYMRAQLVHGARAVVARADRKADRLSLWIQRLKAERGFNKATVALANKLVRIAWVIIARGECYQPSEQRLAG

SEQ ID NO: 12768 - protein, 341 aa, unidentified
  source 1..341: note = protein_5fe7a54
  REGION 6..148: note = RuvC_domain
  SITE 9: note = RuvC_P1
  SITE 52: note = RuvC_P2
  SITE 87: note = RuvC_P3
  SITE 89: note = RuvC_P4
  SITE 92: note = RuvC_P5
  REGION 211..297: note = Tnp_domain
  SITE 219: note = Tnp_P1
  SITE 249: note = Tnp_P2
  SITE 257: note = Tnp_P3
  SITE 258: note = Tnp_P4
  SITE 270: note = Tnp_P5
MQVTTIGLDIAKNVFQIHAIDSDDKVVVRKQLRRCQVLRFFQELPRCLVGLEACATSHYWARELTKLGHEVRLMPAKDVKAYVKRNKNDAADAEAICEAVRRPTMRFVQVKSAEQQAQLMQHRARDLLMHQRTQLINALRSHLAELGITAPQGREGIKELLAIIADDANTHLPNDARASLMVLAAQLQAMQTTIGAIEKRITVQHRATKESKRLQTIPGIGVIGASAIAATVTNPKIFRSGRDFAAWIGLVPRQMSTGGKPKLGPISKQGDRYLRRILVVGAVSVLRRAKHNPQKFPWVTRLLARRPFKVVAVALANKMARIAWALMISGKTCRSAWFAAA

SEQ ID NO: 12769 - protein, 406 aa, unidentified
  source 1..406: note = protein_3bcf72e
  REGION 12..167: note = RuvC_domain
  SITE 15: note = RuvC_P1
  SITE 63: note = RuvC_P2
  SITE 103: note = RuvC_P3
  SITE 105: note = RuvC_P4
  SITE 108: note = RuvC_P5
  REGION 274..360: note = Tnp_domain
  SITE 282: note = Tnp_P1
  SITE 312: note = Tnp_P2
  SITE 320: note = Tnp_P3
  SITE 321: note = Tnp_P4
  SITE 333: note = Tnp_P5
MGLDHRSIEVFVGVDMAREDHYAQAITGAGVEVFHRPVLNDEAAITELIADAAKHGRVALVIDMPSSAAQLLVEVARAQGVAVAYVTGLQMRRAAELYAGAAKTDPRDAWVLADFARRHADRLVWLDVNNDALLHKLRILNGRDVDLASDLNRAINRCRDALVSVSPALERVLGAQLLAGGVRDLLRAAPTPSALRELDTETLASQLRARSPRLASKLAASVRKALDAQSVTLPGEATWGEIIAGLLDDIDRLVAQRVQLGKQIEEAFLAHPLGAVLVTLCGFGPRTGARTLAEIGDPRRFATGSRLAAYAGLAPVDRRSGKSINNAAASRRGNHRLKNAMFLAAFVATRHDPSAKAYYERKRAEGKNHNAAVICVVRRRCDLILAMLTTGHAYDPQRHEKPALAA

SEQ ID NO: 12770 - protein, 357 aa, unidentified
  source 1..357: note = protein_2f6e78e
  REGION 7..149: note = RuvC_domain
  SITE 10: note = RuvC_P1
  SITE 53: note = RuvC_P2
  SITE 88: note = RuvC_P3
  SITE 90: note = RuvC_P4
  SITE 93: note = RuvC_P5
  REGION 212..275: note = Tnp_domain
  SITE 220: note = Tnp_P1
  SITE 250: note = Tnp_P2
  SITE 258: note = Tnp_P3
  SITE 259: note = Tnp_P4
MKQVSTIGLDLAKHIIQVNGAGGDGSPVFNRRLRRSEVLHFFSKQPACLVGIEACGSAHYWAREIATLGHEVRLIPPAYVKPFVKRGKTDAADAEAISEAVTRKTTRFVPIKTAEQKAAMMFLKSRAPLVKQQTQTINALRSHLAELGIIAGAGRTKVEALVAIVRDVADIRLPTAARVALTAVADQIEAQADQIDKLERAIVAAAKTDKDMRRLTTIPGIGAITAATIKALVPDPGGFKSSRHFAAWLRLTPRRHSSGGQGADGTHLEDGKPRTSEPPRSWGDIRPANCPEGRSNAAMVEGAARQTSVQGGSGRAGQQDSANCLGALEQGRDLSASGDASDDYGCRSMNTAVVKEI

SEQ ID NO: 12771 - protein, 411 aa, unidentified
  source 1..411: note = protein_f9c63e5
  REGION 6..165: note = RuvC_domain
  SITE 9: note = RuvC_P1
  SITE 62: note = RuvC_P2
  SITE 102: note = RuvC_P3
  SITE 104: note = RuvC_P4
  SITE 107: note = RuvC_P5
  REGION 275..361: note = Tnp_domain
  SITE 283: note = Tnp_P1
  SITE 314: note = Tnp_P2
  SITE 322: note = Tnp_P3
  SITE 323: note = Tnp_P4
MLVLFIGDDWAEDHHDVEIQDETGRRLGTARLPEGVEGIAKLHSLIARHGGEDLEPGQVVVGIETDRGPWVQALIAAGYRVYAVNPRQAARFKERYGTSGAKSDKGDAHALADMVRIDGDQLRPVAGDSDQAQAVKVVARGHQTLIWERTRAFQRLRSTLREYFPGALNAYVGLELTSTDALELLVKAPTPGQATKLTKPQIIAVLARHRRRNRDQRAAAIQAGLREPQLGVAAPVAAAYAAAATAHARVLIALNEQIAAMEEQVSAHFLAHPDAEIYLSMPGIGEITGARVLAEFGDDPTRYTSAKARKNYAGTSPITRASGRTHAVYARHARNDRLADALHKQAFSAINTSPGARRYYDKQRARDAGYNPALRQLGNRLVGILHGCLKTRSLYDEATAWSHHATLAAAA

SEQ ID NO: 12772 - protein, 345 aa, unidentified
  source 1..345: note = protein_cf05416
  REGION 6..147: note = RuvC_domain
  SITE 9: note = RuvC_P1
  SITE 52: note = RuvC_P2
  SITE 87: note = RuvC_P3
  SITE 89: note = RuvC_P4
  SITE 92: note = RuvC_P5
  REGION 211..298: note = Tnp_domain
  SITE 219: note = Tnp_P1
  SITE 249: note = Tnp_P2
  SITE 257: note = Tnp_P3
  SITE 258: note = Tnp_P4
  SITE 270: note = Tnp_P5
MEIRIIGIDLGKTVFHFVGVHARGEVVVRKKGSRTQLLRFTANLRECLIGMEACGGSHFLGRALREQGHDARLMPAQYVKPYVKTNKNDYIDAEACAEAVTRPTMRFVPIKTDDQLDLQTLHRVRERWVVRRTAVINQIRGLLLERGITIRKGRNHIEQSLPGILEDADNKLSGALRVLLTQLRLEMQYLHGQIGETDKLIGRICGELEQCRRLVAIPGIGPITATATVAAIGNGAAFKKGRGFSAWLGVVPGEHSTGGKQKLTGTSRRGNKYLRKLFVQGAHTVLLQKTKQSSGLSTWLLNLTSRKRKQVATVALANKMARMAWAVLFKGEAYRPPTAAQVIAA

SEQ ID NO: 12773 - protein, 343 aa, unidentified
  source 1..343: note = protein_3d59002
  REGION 5..152: note = RuvC_domain
  SITE 8: note = RuvC_P1
  SITE 55: note = RuvC_P2
  SITE 92: note = RuvC_P3
  SITE 94: note = RuvC_P4
  SITE 97: note = RuvC_P5
  REGION 212..301: note = Tnp_domain
  SITE 220: note = Tnp_P1
  SITE 250: note = Tnp_P2
  SITE 258: note = Tnp_P3
  SITE 259: note = Tnp_P4
  SITE 271: note = Tnp_P5
MEHFAGLDVSVNETSVCIVDGTGRIIREAKVASEPEALLAVLKGDVYHFKRIGLEAGPLSQWLYSALGEANLPVVCVETRHMRAVLKAQINKTDRNDARGIAQMMRAGLYRPVHVKTLRNQKLRMLLTHRKLLQSKAIAVDNDLRGTLRNFGLKVGLVGAARFETRIKELVENLPDIAALVEPLLIVRRVLREQIAVLHRRLLVIVKDDEVCRRLMTIPGVGPVVALTYRTTIDVPARFRNSRAVGAVLGLTPCKYQSGESDYTGAISKCGDEMMRVMLYEAAQILLMRSTRWSWLKAWAMQIARRRGLKKAIVALARRLAVIMHRIWVDGTEFCWTREAAVA

SEQ ID NO: 12774 - protein, 342 aa, unidentified
  source 1..342: note = protein_249a6da
  REGION 7..149: note = RuvC_domain
  SITE 10: note = RuvC_P1
  SITE 53: note = RuvC_P2
  SITE 88: note = RuvC_P3
  SITE 90: note = RuvC_P4
  SITE 93: note = RuvC_P5
  REGION 211..296: note = Tnp_domain
  SITE 219: note = Tnp_P1
  SITE 249: note = Tnp_P2
  SITE 257: note = Tnp_P3
  SITE 258: note = Tnp_P4
  SITE 270: note = Tnp_P5
MVEVSIIGLDLAKNVFQAHGSAADGSVVFRRKLSRLQVLKFLAEQPRCTVAMEACASAHHWARAIAELGHAVKLIPAAYVKPFVKRQKNDMADAEAIAEAAARPTMRFVAPKSAAQQAAAMAFRTRELLVRQRTQTINALRGHLAEYGVIAPTGPSHVGRLAAMIECEQSALPAPVVTLARILLAQIAGLSAQIDALEKEVRQRAAQDETTRRLMTIPGVGAIVATALTTFAPPPETFSKGRDFAAWAGLTPRQHSSGGKERLGKTSKMGQRDIRRLLIIGAVGCVRWAARKGAPEGTWLARMMARKPRMLVAVALANRMARIAWALMHKGEDYRNPATVAA

SEQ ID NO: 12775 - protein, 350 aa, unidentified
  source 1..350: note = protein_46f8701
  REGION 13..161: note = RuvC_domain
  SITE 16: note = RuvC_P1
  SITE 65: note = RuvC_P2
  SITE 101: note = RuvC_P3
  SITE 103: note = RuvC_P4
  SITE 106: note = RuvC_P5
  REGION 230..316: note = Tnp_domain
  SITE 238: note = Tnp_P1
  SITE 269: note = Tnp_P2
  SITE 277: note = Tnp_P3
  SITE 278: note = Tnp_P4
  SITE 289: note = Tnp_P5
MTTIAAPARFVTGGVDTHLDVHVAAALDSIGGVLGTAPFPTTTAGYRQLLAWLRTFGELGRVGVEGTGSYGVALSRHLTAKGVAVIEVSRPNRQVRRRYGKTDVVDAIAAARAVLSGEANATPKTHDGSVEALRALKVLQRSATKARTQALNQLRNLLVTAPDELRGRLRDLRTKELLSECAAFRVAADDDTLNAITRFALRELAQRILDLDQRREQVRARLHRITAVIAPQLVALKGIGPDVAATLLLTAGDNPERLRNERSFAALCGTSPVPASSGKTQRHRLNSGGDRQANSALWRITLVRIGSDQRTKDYMAKRVSEGKSKKEAMRCLKRYIAREVFNVLPNAALS

SEQ ID NO: 12776 - protein, 342 aa, unidentified
  source 1..342: note = protein_f990f47
  REGION 7..149: note = RuvC_domain
  SITE 10: note = RuvC_P1
  SITE 53: note = RuvC_P2
  SITE 88: note = RuvC_P3
  SITE 90: note = RuvC_P4
  SITE 93: note = RuvC_P5
  REGION 209..293: note = Tnp_domain
  SITE 217: note = Tnp_P1
  SITE 247: note = Tnp_P2
  SITE 255: note = Tnp_P3
  SITE 256: note = Tnp_P4
  SITE 268: note = Tnp_P5
MNNVAIAAIDLGKHTFHLHAQDDRGHEVCRKKFTRAALTQHLSNLAPCTVVMEACGGAHFMAQEVARLGHTPKLIAPHLVRPYVKSNKNDFADAEAICEAATRPTMRFVPPKTQAQQALAMLNSTRDAFIKDRTATVNRIHAALLEVGVSLAPGFKSIKDLPALLEASSFSECIKKILTTLYEHFDYLNGRIKNLDKDVECQAAEDDLAARLMTMPCVGPITSSALAAELGDGKQFKCGRGYAASIGLVPKQHSTGDKTVLLGISKRGDRNQRRLLIQCARVYLINLEHQKGALADWVRQLLASRHHSNLVVCALANKLARIAWAIAAHHSEFDAGPAAMNA

SEQ ID NO: 12777 - protein, 346 aa, unidentified
  source 1..346: note = protein_b1f4d22
  REGION 5..152: note = RuvC_domain
  SITE 8: note = RuvC_P1
  SITE 55: note = RuvC_P2
  SITE 92: note = RuvC_P3
  SITE 94: note = RuvC_P4
  SITE 97: note = RuvC_P5
  REGION 212..300: note = Tnp_domain
  SITE 220: note = Tnp_P1
  SITE 250: note = Tnp_P2
  SITE 258: note = Tnp_P3
  SITE 259: note = Tnp_P4
  SITE 271: note = Tnp_P5
MQYFAGLDVSLQETSVCVVDETGRICREMKVVSHPDDLVAALKSLGWEFVRIGLEAGPMSQWLYSGLVEAELPTVCIETRHAKAFLKAQVNKTDRNDARGIAQMMRVNLFRPVHVKTLTSQKRRALLTARKLLQEKALAFENDIRGLLRNFGLKVGIARVGKFENRINELLEAIPDLKEIIAPLLDARQKLRDEFSRLHRKVLDIARDDVTCKRLMTIPGIGPVISLAYICTIDSPARFVHSRAVGPALGLTPVINQSGESKRVGRVSACGDAIMRGLLYEAAQVLLTRVKKWSWLKAWAMNVAKRRGLRKAIVALARRLAVIMHRMWSDGTEFRWSRDSDVAKAA

SEQ ID NO: 12778 - protein, 417 aa, unidentified
  source 1..417: note = protein_46507e0
  REGION 15..171: note = RuvC_domain
  SITE 18: note = RuvC_P1
  SITE 68: note = RuvC_P2
  SITE 108: note = RuvC_P3
  SITE 110: note = RuvC_P4
  SITE 113: note = RuvC_P5
  REGION 280..366: note = Tnp_domain
  SITE 288: note = Tnp_P1
  SITE 319: note = Tnp_P2
  SITE 327: note = Tnp_P3
  SITE 328: note = Tnp_P4
MSQEGCREELELIFAGVDWAETHHDVYVQDEHGQKLASGRLPEGVQGIARFHELAGAHAGEPGQVVIGIETDRGLFVNALAAAGYLVFAVNPMSASRYRDRHSVSGAKSDPGDAKVLADLVRTDRHNHRPAATDSDQVLAVRALARAHQSMIWSRRRQANQLRSALREFYPAALAAFDDLTSGEAIAVLKAAPRPDRGAALSRTQVTAALRRGGRARRLPERTAAVQAALRSPQLAPAPGLAAAMGATVAAMAAVIGEMNTQIAALERELSAGFEQHPDAEVVRSLPGLGTILGARVLSEFGDAPDRYPTAKSRKNYAGTSPITRASGSKRAVLARHVRNRRLADAIYLWAFAAITASPGARTFYDQHRAAGATHHAALRALGNRLVGILHGCLTHHTSYDENTAWAHRSCQPATAA

SEQ ID NO: 12779 - protein, 338 aa, unidentified
  source 1..338: note = protein_dfe7767
  REGION 7..149: note = RuvC_domain
  SITE 10: note = RuvC_P1
  SITE 53: note = RuvC_P2
  SITE 88: note = RuvC_P3
  SITE 90: note = RuvC_P4
  SITE 93: note = RuvC_P5
  REGION 211..297: note = Tnp_domain
  SITE 219: note = Tnp_P1
  SITE 249: note = Tnp_P2
  SITE 257: note = Tnp_P3
  SITE 258: note = Tnp_P4
  SITE 270: note = Tnp_P5
MTHAHIIGIDLGKNSFHIVAHDIHGHQLFKKKFTRTKLIDFISTQQPTIVAMESCGGSHWLARKCEEYGHTAKLIPPQYVKPYVKTNKNDFIDADAIAEAASRPTMRFTSVKSESAQAISTIRKIRSGYIKERTACMNRVGSILLEFGISFPKGHVCMRKLFQWLADKNEYLPPLIIFELSELHEHYEHLNELVEHQDKKIEKLLAENEQMKQLQSIPGVGPVVASACLSSIGDPNDFKNGRNFAAWIGLVPTQYSTGGKSTLLGISKRGNKELRTLLIHAARSVLWRDKSVEKYFGSWLANLKKRKPFNVAVVALANKIARIIWAVLVSKKEFEIRA

SEQ ID NO: 12780 - protein, 397 aa, unidentified
  source 1..397: note = protein_d808722
  REGION 9..163: note = RuvC_domain
  SITE 12: note = RuvC_P1
  SITE 60: note = RuvC_P2
  SITE 100: note = RuvC_P3
  SITE 102: note = RuvC_P4
  SITE 105: note = RuvC_P5
  REGION 270..355: note = Tnp_domain
  SITE 278: note = Tnp_P1
  SITE 308: note = Tnp_P2
  SITE 316: note = Tnp_P3
  SITE 317: note = Tnp_P4
  SITE 329: note = Tnp_P5
MNTSYAVFCGIDVGKGEHHAVGLDASGTRLFDKALRNDETRLRAVFDGLAVSGPLLVIVDQPNTIGALPVTVARACGHDVAYLPGLSMRRIADLYPGQAKTDARDAFIIADTARTMPHTLRRVDTGDETLAELGVLVGFDDDLAGEATRTSNRIRGLLTGIHPALERVLGPRVTHPAVLEILARLGGPDGIRRAGKRKLTSVAVKHAPWMGARLADEILAALDAQTVTVPGSKAAEIVLPHLADSLKEVLLQRKRICEDVERMLDDHPLSHVLISMPGVGVRTAARILLEVGDASAFKSAGHLAAYAGIAPVTHRSGSSIRGEHPARSGNRKLKRALFLSAFAALHDPTSRAYYDRKRAEGKKHNAALICLARRRCDVLYAMLKNKTLYQIPAAAAA

SEQ ID NO: 12781 - protein, 345 aa, unidentified
  source 1..345: note = protein_9f44f32
  REGION 6..148: note = RuvC_domain
  SITE 9: note = RuvC_P1
  SITE 52: note = RuvC_P2
  SITE 87: note = RuvC_P3
  SITE 89: note = RuvC_P4
  SITE 92: note = RuvC_P5
  REGION 211..300: note = Tnp_domain
  SITE 219: note = Tnp_P1
  SITE 249: note = Tnp_P2
  SITE 257: note = Tnp_P3
  SITE 258: note = Tnp_P4
  SITE 270: note = Tnp_P5
MKHSVIGMDIAKRVFQLHSVDPTTGEIERIKLRRDEVLPFFAQRSASLVAIEACGSAHWWARELRRLGHEVKLLAPKSVRPFVRSNKTDAADARAIWTAVQQPEARLVAVKSEQQQAILALHRLRAQLMKFRIMQTNALRGLLYEFGEVLPEGYSALAKALPAALASVAERLPAMLIDSLREQWARVQMINTEITTIERRLASALRASEPCRQIAAIPGVGLLTATAAVAALGEPNSFASGREFAAWLGLVPRQSGTGGRIRQLGLSKRGDSYLRTLLIHGARSVMVRGKHSPWVAALLKRRPYSVAVAALANKLARTIWAVLARGRPYDVTVFDVSVEPAMHIA

SEQ ID NO: 12782 - protein, 341 aa, unidentified
  source 1..341: note = protein_7c51990
  REGION 5..151: note = RuvC_domain
  SITE 8: note = RuvC_P1
  SITE 53: note = RuvC_P2
  SITE 91: note = RuvC_P3
  SITE 93: note = RuvC_P4
  SITE 96: note = RuvC_P5
  REGION 211..297: note = Tnp_domain
  SITE 219: note = Tnp_P1
  SITE 249: note = Tnp_P2
  SITE 257: note = Tnp_P3
  SITE 258: note = Tnp_P4
  SITE 270: note = Tnp_P5
MEEYIGLDVSMKETSISIRRAGERIWRGKCASDPRLIAELIRKRAPAVKRVVFETGPLSIWFYHSLRTEGLPAICIDARHANAALDMAANKTDANDADGLAQLAEVGFFREVRVKGFDSMLTRTLVAARTRLVRITTELSNQIRGVMKTFGLLVPAGKGSTFEKNVRSLLADQGGLALIVLPMLEAWRGIRIRAAELGRQLVRDARQSQACRILMSIPGIGAITATAFSTAIERPDNFKKSRSVGAWIGLTTRRYQSGEVDYDGHISRRGDRHLRGLLYEAAAVILTRSSTDSTLRTWGLKLRERIGFKRAAVAVARKLAVIMHTMLKTGELFNPNAGAAA

SEQ ID NO: 12783 - protein, 343 aa, unidentified
  source 1..343: note = protein_e594d6c
  REGION 7..149: note = RuvC_domain
  SITE 10: note = RuvC_P1
  SITE 53: note = RuvC_P2
  SITE 88: note = RuvC_P3
  SITE 90: note = RuvC_P4
  SITE 93: note = RuvC_P5
  REGION 212..303: note = Tnp_domain
  SITE 220: note = Tnp_P1
  SITE 250: note = Tnp_P2
  SITE 258: note = Tnp_P3
  SITE 259: note = Tnp_P4
  SITE 271: note = Tnp_P5
MQAITTVGLDIAKSIFQVHGIDAEGNVLVRRRLKRRYVLAFFQKLSPCLVGIEACASSHHWSRELQALGHRVRLMPPAYVKPYVKRQKNDATDAEAICEAVSRPNMRFVETKTPEQQSCLMLHRTRHLFIRQQTAVINSIRAHLAEFGIVAPVGRHGVDQLLAVVADTSDKRLLEVTRSCVAALGAHLQMLKAQILQFDRLIRVWHRSSEVSKRLDAIPGVGPVLATALVASVTDPKAFRSGKDLSAWIGLVPKQNSSGGKDKLGNISKRGDRYLRSLFTTGALAVIRYAKIHGTTHRPWLTALLARRPTKVAAIALVNKLARMAWAMMARGERYREPAALAA

SEQ ID NO: 12784 - protein, 407 aa, unidentified
  source 1..407: note = protein_958aa30
  REGION 6..159: note = RuvC_domain
  SITE 9: note = RuvC_P1
  SITE 57: note = RuvC_P2
  SITE 98: note = RuvC_P3
  SITE 100: note = RuvC_P4
  SITE 103: note = RuvC_P5
  REGION 221..306: note = Tnp_domain
  SITE 229: note = Tnp_P1
  SITE 259: note = Tnp_P2
  SITE 267: note = Tnp_P3
  SITE 268: note = Tnp_P4
  SITE 279: note = Tnp_P5
MTKVIIGVDPHKLSATIEVVDRRERLLGSGRFSTDQAGYTAMRTYAKTWPERVWAIEGSNGAGRPLAQRLLKAGKHVVDVPAKLAARVRLFDTGHNRKTDARDAHSIAIVAVRTTTLRVLRPDGELEALQMLCDRREELTRLRVQTVNRLHRLLTELVPGHAKKDLTALQAKAILATVRPRDVAGKTRRRIAAEELADLVAVEAKMKKATAELKVLVKARGSRLMDLRGVGPVVAARTLADVGDVARFADRNRFASWTGTAPLDASSGEQNRHRLSRAGNRRMNHMLHIAAISQIRLDTEGRAYYRRKLAAGKTKLEALRCLKRRISDALYRQLLADADRAALSKQQAPDDTGPGGHCGASQESSAADLPPHIDTSDQPLPGPAELTLRQAPTTRKTHHRDTLITTP

SEQ ID NO: 12785 - protein, 410 aa, unidentified
  source 1..410: note = protein_8fcc1bc
  REGION 15..169: note = RuvC_domain
  SITE 18: note = RuvC_P1
  SITE 66: note = RuvC_P2
  SITE 106: note = RuvC_P3
  SITE 108: note = RuvC_P4
  SITE 111: note = RuvC_P5
  REGION 276..361: note = Tnp_domain
  SITE 284: note = Tnp_P1
  SITE 314: note = Tnp_P2
  SITE 322: note = Tnp_P3
  SITE 323: note = Tnp_P4
  SITE 335: note = Tnp_P5
MEDVDNPAEPYTVFGGLDVGKAAHHATALNPAGKKLHDRPLPNDEPALRALFAKLGGHGRLLVIVDQPASIGALAIAVARSMSIDVAYLPGLAMRRIADLHPGESKTDARDAYVIADAARTLPHTLRRVGTDDDTLAALTVLVGYDADLAAESTRLSNRLRDALLHIHPAAERLLGSHIHRPGVLELLAAAPTPTDWNRLGEARIAELMRPRSPRLAKTLPAKLIAALGEQTVVVPGTAAFGRVIAGVARSLLGVLDERADLAQAVEAALEAHPLAPVLNSLPGVGVRTAAGLLTIVRDVTDFPSAAHLAAYAGLAPVTRRSGSSIKGEVRSQRGNHALKSTLFLSAFASLHDPTCRAYYDRKRAEGKRHNAALICLARRRVDVLYAVIRDRKPYQPINPKPATDQAQAA

SEQ ID NO: 12786 - protein, 326 aa, unidentified
  source 1..326: note = protein_816a058
  REGION 8..160: note = RuvC_domain
  SITE 11: note = RuvC_P1
  SITE 60: note = RuvC_P2
  SITE 100: note = RuvC_P3
  SITE 102: note = RuvC_P4
  SITE 105: note = RuvC_P5
  REGION 195..282: note = Tnp_domain
  SITE 203: note = Tnp_P1
  SITE 233: note = Tnp_P2
  SITE 241: note = Tnp_P3
  SITE 242: note = Tnp_P4
  SITE 255: note = Tnp_P5
MEQELHFIGIDVSKAKLDVDVLRPDGRHRSKKFANTPKGHDELVRWLNSHQAAPAHICMEATSTYMEDAAAHLSDAGFTVSVINPARGKAFAQSEGLRSKTDAVDARMLAEFCRQKRPAAWQVPHPVERALRALVLRHQSLTDMHTQELNRLETARDVQMPSIDAHLLWPDAELKRLEKQIKDLTDDDPDMKHRRKLLESIPGIGEKTSAVLLAYIGLENRFGGARQFAAFAGLTPRHHESGSSVRGAGRMSKAGHVSLRRALYMPAMVAVSKTTWGRAFRDRLAANGKRGKVIIGAMMRKLAQVAYGVLKSGEPFDTSRHAPVAA

SEQ ID NO: 12787 - protein, 392 aa, unidentified
  source 1..392: note = protein_31531a6
  REGION 4..162: note = RuvC_domain
  SITE 7: note = RuvC_P1
  SITE 60: note = RuvC_P2
  SITE 101: note = RuvC_P3
  SITE 103: note = RuvC_P4
  SITE 106: note = RuvC_P5
  REGION 267..354: note = Tnp_domain
  SITE 275: note = Tnp_P1
  SITE 305: note = Tnp_P2
  SITE 313: note = Tnp_P3
  SITE 314: note = Tnp_P4
  SITE 327: note = Tnp_P5
MLYLGIDIAKNNHVASLIDENAKPLFKAFSFSNTLDGANSLLAKLSAYATNPDCVEIGMEATGHYWLSIYSFLIENGYTVHVVNPIQTDGWRKGTEIRKRKTDIIDSVLIADLIRYGDFVETSLSDEDTLSLRNLSRFRSYLVSSIGDLKRKVVCVLDQIFPEYQSVFADIFGKTSKEILLHFQSAEDFENITSEQLESVLENVSFKKFAKNKISCISELAATSFGLKFCRESFSLQLKLLIEQIKFIEAQVADVESEIAIILDKIDSPITTIPGIGVITAAVILGEIGDISRFSNASKLAAYAGIDASVSQSGEYQSSNNKMSKRGSPYLRKALFNAAMIAAFHDPVFSAFYQKKRNEGKHHLTAIGAVARKLCNTIFAVLKYNKPYEVQL

SEQ ID NO: 12788 - protein, 344 aa, unidentified
  source 1..344: note = protein_e58fe3f
  REGION 6..148: note = RuvC_domain
  SITE 9: note = RuvC_P1
  SITE 52: note = RuvC_P2
  SITE 87: note = RuvC_P3
  SITE 89: note = RuvC_P4
  SITE 92: note = RuvC_P5
  REGION 211..298: note = Tnp_domain
  SITE 219: note = Tnp_P1
  SITE 249: note = Tnp_P2
  SITE 257: note = Tnp_P3
  SITE 258: note = Tnp_P4
  SITE 270: note = Tnp_P5
MQITTIGLDLAKSIFQVHGVDATGQVVVRKSLRRSQMLAFFTKLPPCLVGIEACGTSHHWARELIKLGHEVRLMPPAYVKAYVKRGKTDAADAEAVCEAVARPTMRFVPVKSPQQQAALSMHRTRDLLVKQRTQLINMIRNLLAEFGVDIPKGLERALLMARQIVDGKAPDVPIEAAKILGTLSQQVLTTHVRLREIDRDLAVLLRGNEVARRLMTIPGIGPVGATALAASVTDPHQFRSGRQFAAWLGLTPLQKSSGGKERLGRITKMGDKYLRKLLIVGMTSLVRRAKYNPGKIDPRLADLLTRKPTRVATVAMANKTARIIWAIMTRGETCRAGHRPTLAA

SEQ ID NO: 12789 - protein, 328 aa, unidentified
  source 1..328: note = protein_8544b89
  REGION 8..155: note = RuvC_domain
  SITE 11: note = RuvC_P1
  SITE 60: note = RuvC_P2
  SITE 100: note = RuvC_P3
  SITE 102: note = RuvC_P4
  SITE 105: note = RuvC_P5
  REGION 195..282: note = Tnp_domain
  SITE 203: note = Tnp_P1
  SITE 233: note = Tnp_P2
  SITE 241: note = Tnp_P3
  SITE 242: note = Tnp_P4
  SITE 255: note = Tnp_P5
MEQELHFIGIDVSKAKLDVDVLRPDGRHRSKKFANTPKGHNELLSWLHNHGVAPAHICMEATSTYMEDAAACLSDAGFTVSIINPALGKAFAQSEGLRSKTDAVDARMLAEFCRQKRPAVWEAPHPLESALRELVLRHQSLTDMHTQELNRRETAREVQMPSIDAHLLWLEAELKRLEKQIKDLTDDDPDMKHRRKLLDSIPGIGEKTSAVLLAYVGLKDRFGQARQFAAFAGLTPRQHESGSSINRASRMSKAGHVSLRRARYMPAMVALYKTEWGKAFRSRLENNGKGAKLIIGAMMRKLAQVAYGVLKSGRPFDATLHEKNACVA

SEQ ID NO: 12790 - protein, 343 aa, unidentified
  source 1..343: note = protein_749937c
  REGION 7..149: note = RuvC_domain
  SITE 10: note = RuvC_P1
  SITE 53: note = RuvC_P2
  SITE 88: note = RuvC_P3
  SITE 90: note = RuvC_P4
  SITE 93: note = RuvC_P5
  REGION 212..295: note = Tnp_domain
  SITE 220: note = Tnp_P1
  SITE 250: note = Tnp_P2
  SITE 258: note = Tnp_P3
  SITE 259: note = Tnp_P4
  SITE 271: note = Tnp_P5
MEGIATVGLDLAKNTFQVHAVNAVGDVIVRRALRRSQVLAFFERLPPCLVGMEACGSAHYWAQEIGAMGHTVRLMPAAYVKAYVKRNKTDAADAEAICEAVTRPTMRYVAVKGRQEQAAAIILRTRDLLTRQRTQSINALRGHMAQLGVIAAAGAKSCGKLIAIIRDDADDRLPATAREALAEIADQIETLNEKIAALERKIVATVRQDEVARRLTAIPGVGPITAATVRAAVPHPGGFRRGRDFAAWIGLTPRSSSSGGKEKLGSISKRGNPQLRSLLVVGAMAILKLSRNGFGMPPWVAALQQRRPFKVVATAMANKMARVIWALMMKGEQYSAPTAMMKP

SEQ ID NO: 12791 - protein, 345 aa, unidentified
  source 1..345: note = protein_c4c29b5
  REGION 18..165: note = RuvC_domain
  SITE 21: note = RuvC_P1
  SITE 68: note = RuvC_P2
  SITE 108: note = RuvC_P3
  SITE 110: note = RuvC_P4
  SITE 113: note = RuvC_P5
  REGION 209..296: note = Tnp_domain
  SITE 217: note = Tnp_P1
  SITE 247: note = Tnp_P2
  SITE 255: note = Tnp_P3
  SITE 256: note = Tnp_P4
  SITE 269: note = Tnp_P5
MTNSPVNTATQSTSRLFAGVDVGADELVLVIRKNGKPFDPQKYANTRSGRTRLVNKLIKLSGIKVCLEATGIYHFDLAIALHDAGIPVMVVNPKASHNFAKVLMKNSKTDAVDANTLAEYVERMDFVAWTRPSNQSLALRGYARRIDALTGQKAAAKNHLHALSATEETPKALLRDAKLAISQLEKRIDTLAAEAMHLINDHQTLKRVFELLTGIKGIAQTSTIALMGELLLLPPNLSHREWVKFAGLDPKAFESGKSVHKKMRLSKAGNRHIRSALYMPALSAKQHDPHVRAYFQHLIDNGKKPLQAVCAVMRKLLHAIHGMLTHDQPFDNTRFYAIPESIIAE

SEQ ID NO: 12792 - protein, 340 aa, unidentified
  source 1..340: note = protein_3258d19
  REGION 7..149: note = RuvC_domain
  SITE 10: note = RuvC_P1
  SITE 53: note = RuvC_P2
  SITE 88: note = RuvC_P3
  SITE 90: note = RuvC_P4
  SITE 93: note = RuvC_P5
  REGION 212..299: note = Tnp_domain
  SITE 220: note = Tnp_P1
  SITE 250: note = Tnp_P2
  SITE 258: note = Tnp_P3
  SITE 259: note = Tnp_P4
  SITE 271: note = Tnp_P5
MGTVTTIGLDIAKSVFQVHGVDADGGEVLRQRLTRSRMLKFFAKLPPCLIGIEACASSHYWARELLALGHDVKLLPAQYVKPYVKRSKNDAADAEAICEAVTRPTMRFVGIKSPEQQSAMMLHRVRLILCRQRTQLSNAIRAHLAEFGVIAPIGRNGIEQLLDVIADMTDGRVPTDARMCLEMLAVQLRIVKEQILENDRRILASARETELGRRLMEIPGVGPLLASAIVATVPDPAIFRSGRNLAAWIGLVPRQNSSGGKERLGSITKAGNSYLRQMLIVGAMAVVRYAERNGAKRPWLVQLLARRKTKVAAVALANKNARTIWAMMTSGERYREPLVA

SEQ ID NO: 12793 - protein, 339 aa, unidentified
  source 1..339: note = protein_eeb39ec
  REGION 6..147: note = RuvC_domain
  SITE 9: note = RuvC_P1
  SITE 52: note = RuvC_P2
  SITE 87: note = RuvC_P3
  SITE 89: note = RuvC_P4
  SITE 92: note = RuvC_P5
  REGION 211..302: note = Tnp_domain
  SITE 219: note = Tnp_P1
  SITE 249: note = Tnp_P2
  SITE 257: note = Tnp_P3
  SITE 258: note = Tnp_P4
  SITE 270: note = Tnp_P5
MHVTTIGLDLAKNVFQVHGIDDHGEIAFNRALRRAQVLAFFERLEPCLVGIEACGTSHHWARELIKLGHNVKLIPPAYVKPYVKRGKSDAVDAAAICEAVTRPTMRFVEVKTPEQQAILAVHRTRDLIVRQRTQTINMLRAQLAEFGLVLPQGVYHPLRFAKDCVDGEQPDLPQDAQEVVFDLCDELLFLHAKILRHSRHMTRIAKSEKRVALLRTIPGVGPITASAIVATVGSGKQFNNGREFAAWLGLTPLNRSSGGKERLGQISKMGDQYIRRLLVLGMTSRIRSIRLEPEKFDPWFADILSRKPSRVAAVAMANKTARMIWAVLTRNEPYKVRTV

SEQ ID NO: 12794 - protein, 269 aa, unidentified
  source 1..269: note = protein_c6d07eb
  REGION 2..75: note = RuvC_domain
  SITE 14: note = RuvC_P3
  SITE 16: note = RuvC_P4
  SITE 19: note = RuvC_P5
  REGION 138..230: note = Tnp_domain
  SITE 146: note = Tnp_P1
  SITE 176: note = Tnp_P2
  SITE 184: note = Tnp_P3
  SITE 185: note = Tnp_P4
  SITE 197: note = Tnp_P5
MPPAYVRPYVKRQKNDATDAEAICEAVTRPNMRFVPTKTVEQQSCLMLHRARHLFIRQQTAVINSIRAYLAEFGIVAPVGRRGVEQLLEVVADTADRRLPEVGRACLAALGSQLRALKAQILEFDRRIIAWHRSNATSKRLDAIPGVGPALATALVASIADPEAFRSGRDFSAWVGLVPKQNSSGGKDKLGSISKQGDRYLRSLFTAGALAVIRYAKIHGTQHRPWLTALLARRPTKVAAIALANKLARMAWAMMARNEGYKEPAALAA

SEQ ID NO: 12795 - protein, 351 aa, unidentified
  source 1..351: note = protein_729d451
  REGION 12..154: note = RuvC_domain
  SITE 15: note = RuvC_P1
  SITE 58: note = RuvC_P2
  SITE 93: note = RuvC_P3
  SITE 95: note = RuvC_P4
  SITE 98: note = RuvC_P5
  REGION 217..303: note = Tnp_domain
  SITE 225: note = Tnp_P1
  SITE 255: note = Tnp_P2
  SITE 263: note = Tnp_P3
  SITE 264: note = Tnp_P4
  SITE 276: note = Tnp_P5
MKTSATAIPATIGLDIAKNFFQVHAVDAAGQVVLRRKLSRGDVLSFFKDRPKALVGIEACGTGHYWAREIAALGHEVRLLPPTYVKPYVKRGKTDAADAEAICEAVTRPNMHFVPIKTPEQQAALMMHRSRELLVGQRTALVNALRGHLAELGIIAAQGIRRVADLLAELVDADNTRIPPLARASLNCLAAQIEAVETQIDKLEALILEWHKGNEASRRLAKIPGVGPITASAVVATIGDASNFTSARHLSAAWGLVPKQNSSGGKAKQGGISKAGNAYLRRLLFIGAVAVIRSQRAQEAESWLGRLLERRPAKVAAIAIANKTARVIWAMLRSGDAYRAPKLAGAVPAAA

SEQ ID NO: 12796 - protein, 327 aa, unidentified
  source 1..327: note = protein_32ad0b5
  REGION 4..154: note = RuvC_domain
  SITE 7: note = RuvC_P1
  SITE 59: note = RuvC_P2
  SITE 99: note = RuvC_P3
  SITE 101: note = RuvC_P4
  SITE 104: note = RuvC_P5
  REGION 199..285: note = Tnp_domain
  SITE 207: note = Tnp_P1
  SITE 236: note = Tnp_P2
  SITE 244: note = Tnp_P3
  SITE 245: note = Tnp_P4
  SITE 258: note = Tnp_P5
MHYLGIDVAKAKLDCTLLLDAANKRKAKCVSNDKTGIHALLSWLTKQGLEPRQVHAVMEGTGVYHEQAAIALCDAGVIVSIINPAQIRDFAKGLAIRTKTDGVDSLVLARYGALLQPMAWIPPSRQARALQALLARREALQQDLRRELNRQEKAEATDTPELIQQSLIESIAFIGTQLAKLQQDIDDHIDHHPELKADLALLSSIPAIGPQSGSNLLAIMHTHHFVSAEQLAAYLGLVPVERQSGSSLLGRAHLSKAGPARLRAVLYMAAVVAIRYNPHVKALYQRLLARGKTKMSALGAAMRKLVHLCFGVLKTRQPYRADYAGAA

SEQ ID NO: 12797 - protein, 400 aa, unidentified
  source 1..400: note = protein_8b98c64
  REGION 10..164: note = RuvC_domain
  SITE 13: note = RuvC_P1
  SITE 62: note = RuvC_P2
  SITE 102: note = RuvC_P3
  SITE 104: note = RuvC_P4
  SITE 107: note = RuvC_P5
  REGION 270..356: note = Tnp_domain
  SITE 278: note = Tnp_P1
  SITE 308: note = Tnp_P2
  SITE 316: note = Tnp_P3
  SITE 317: note = Tnp_P4
  SITE 329: note = Tnp_P5
MSERKTHVWAGIDAGKAHHWAAVVDETGTTLWSKKIDNDESTMLTTLGEILDLADEVHWAVDISGTSSALLLALLAAHGQQAVYVPGRTVNRMSGAYRGEAKTDARDAYVIAETARHRRDFAAIDVPAQLAADLALLTAHRTDLVADRVRMINRLRDVLTGVFPALERSFDYSSHKGALILLTGYQTPAGIRRCGRTRLTAWLANRGVRGADAVAATALEAAQAQQTALPGEDVAAQIVADLAVQILALDDRLKRVDRQISETFRSHPQAEIIESLPGMGPILGAEFVVAAGDLTAYADAGHLASAAGLVPVPRDSGRRTGNLHRPKRYSRRLRRVFYMSAQTSMMREGPNRDFYLKKRGEGLKHVQAVIALARRRASVLWALLRDNRVFTSAPPVTQTA

SEQ ID NO: 12798 - protein, 396 aa, unidentified
  source 1..396: note = protein_d67d97e
  REGION 6..160: note = RuvC_domain
  SITE 9: note = RuvC_P1
  SITE 58: note = RuvC_P2
  SITE 98: note = RuvC_P3
  SITE 100: note = RuvC_P4
  SITE 103: note = RuvC_P5
  REGION 265..352: note = Tnp_domain
  SITE 273: note = Tnp_P1
  SITE 304: note = Tnp_P2
  SITE 312: note = Tnp_P3
  SITE 313: note = Tnp_P4
  SITE 325: note = Tnp_P5
MPQIWAGVDIGKEHHHCVVVDERGERLLSRRVFNDEPALLELIADVLALSEDALWAVDINHGGAALLIGLLLSHDQPMVYITGLAVHQASTAYRGQGKTDEKDAFVIADQARMRQDLGLLRPGDEIAVDLRTLTARRLDLVNDRTRQTNRLRAQLLEFFPALERALNLSKKGPVVLLTGYQVPAAIRRSGARRIGTWLKNRKVKNAVALAETAVEAARAQHTALPGETLAAAMVARIAKGVLALDEEIAELDALIEARFNEHRHATVIRSLPGMGALLGAEFIAATGGDLEAFGTADRLASFAGLSPVPRDSGRVSGNMRRPRRYHRGLLRAFYLSAMASLRTCSASQAYYGRKRNEGKGHKQALLALARRRANVLWAMLRDGACYQVLPTVTAAA

SEQ ID NO: 12799 - protein, 333 aa, unidentified
  source 1..333: note = protein_b135dcb
  REGION 6..147: note = RuvC_domain
  SITE 9: note = RuvC_P1
  SITE 52: note = RuvC_P2
  SITE 87: note = RuvC_P3
  SITE 89: note = RuvC_P4
  SITE 92: note = RuvC_P5
  REGION 200..286: note = Tnp_domain
  SITE 208: note = Tnp_P1
  SITE 238: note = Tnp_P2
  SITE 246: note = Tnp_P3
  SITE 247: note = Tnp_P4
  SITE 259: note = Tnp_P5
MKVTTIGFDLAKNVFQVHGVDERGHVVVRKQLRRDQVAIFFANLPACLVGMEACGSAHHWARKLQGFGHEVRVISPQFVKPYVKSNKTDAADAEAICEAVVRPSMRFVPVKTVEQQAVLSVHRVRQGFVKARTAQANQIRGLLTEFGLVLPQGITNVMNRVPQLIDAAADLPASMRQLLDRQVKELEAQIKAWHLGSELSRKLEKIPGIGALAASALVASIADARSFKNGRQLAAWLGLVPKQDSSGGKPKLLGMSKRGDTYLRTLLIHGARSAIIAAQKKAKPNVWLSGLLTRRHPNIAAVALANKNARTIWALLAHEREFRPDYMPRPATA

SEQ ID NO: 12800 - protein, 344 aa, unidentified
  source 1..344: note = protein_a8776db
  REGION 6..148: note = RuvC_domain
  SITE 9: note = RuvC_P1
  SITE 52: note = RuvC_P2
  SITE 87: note = RuvC_P3
  SITE 89: note = RuvC_P4
  SITE 92: note = RuvC_P5
  REGION 211..297: note = Tnp_domain
  SITE 219: note = Tnp_P1
  SITE 249: note = Tnp_P2
  SITE 257: note = Tnp_P3
  SITE 258: note = Tnp_P4
  SITE 270: note = Tnp_P5
MKVTTVGIDLAKNVLQVHGVDGRGKTVLRKQIKRDQVAAFFANLPPCLIGMEACGSAHHWARKLQSFGHTVKLMAPQFVKPYVKTNKNDVADAEAICEAVARPNMRFVPIKTAEQQSVLSLHRARQSFVKARTGQANQIRGLLGEYGVVIPQGIGYIAERLPQILEDGENGLPGQFRRLLERLGENLKEMDRQVDELEREIKTWHRESEASRTLEEIPGIGPITASALAASVGDGKCFESGRQMAAWLGLVPRQHSTGGKQTLLGISKRGDTYLRTLLIHGARSVVRVCERKPETDSWLIRLTGRRNRNIAAVALANKNARIAWALLAHERQYASDYLPTPVNG

SEQ ID NO: 12801 - protein, 387 aa, unidentified
  source 1..387: note = protein_a09bcd0
  REGION 6..159: note = RuvC_domain
  SITE 9: note = RuvC_P1
  SITE 57: note = RuvC_P2
  SITE 98: note = RuvC_P3
  SITE 100: note = RuvC_P4
  SITE 103: note = RuvC_P5
  REGION 221..306: note = Tnp_domain
  SITE 229: note = Tnp_P1
  SITE 259: note = Tnp_P2
  SITE 267: note = Tnp_P3
  SITE 268: note = Tnp_P4
  SITE 279: note = Tnp_P5
MPNVVIGVDPHKRSATIEVIDPRERVLGKGRFGTDHDGYKAMLAAGRKHGERIWAVEGCNGIGRHVAQRLVADGETVVDVPTKLSARARVFATGQGRKTDPVDAHSVAVAALRTAGLRQVQADDTTVALRLLVDRRDQLGRTRTEVVSRLHHLLLELIPGGAKKFLSAQQARALLNTVRPRDLVGKTRRWLASELIHELVTIDKKIKLANAELTDLVASTGSTLQELTGIGPSGAARLIGDIGDIARFASRGHFASWNGTAPIDASSGDQNRHRLSRAGNRRINRALHIMAVVQLRRDTEGRRYYRRKLADGKTPMEAMRALKRRLSDIVYKRMVADAKRIETGPGGHMGATLQSSAADLNPMIDTSEKSLPGPAETHHRTDLAAAS

SEQ ID NO: 12802 - protein, 411 aa, unidentified
  source 1..411: note = protein_1fd2d55
  REGION 5..164: note = RuvC_domain
  SITE 8: note = RuvC_P1
  SITE 61: note = RuvC_P2
  SITE 101: note = RuvC_P3
  SITE 103: note = RuvC_P4
  SITE 106: note = RuvC_P5
  REGION 272..358: note = Tnp_domain
  SITE 280: note = Tnp_P1
  SITE 311: note = Tnp_P2
  SITE 319: note = Tnp_P3
  SITE 320: note = Tnp_P4
MRLFVGDDWAEDHHDVEVMDEAGTVLVRKRLPEGAGGMARLHALVGGLLGEDADDSEVLVGIETDHGPWVMALLAAGYRVYPVNPQQSARFRARHWVSGAKSDAGDAHVLADMVRTDSHQLREAAGDSAEAAGIKVLARTHKTMIWERTREVQRLRHQLLEYFPAALEAFGDLDAPDVLELLAKAPDPQRARKLTRAQVSAALKRARRRNIPDKATAILAALRGEQLAQPAALTAAYAATVRSLIAVIAALNEQVTVLEEQVREHFGRHPDAEIILSQPGMGAILGARVLAEFGDDPGRYRDGKARRNYAATSPITRASGKRKIVAARFVHNDRLVDALNAQAFTALTASPGARAYYDELRTRGISHNDALRRLANRLVGILHGCLKTRTLYDEETAWGHRQNQPQSPAAA

SEQ ID NO: 12803 - protein, 340 aa, unidentified
  source 1..340: note = protein_0117f5e
  REGION 6..147: note = RuvC_domain
  SITE 9: note = RuvC_P1
  SITE 52: note = RuvC_P2
  SITE 87: note = RuvC_P3
  SITE 89: note = RuvC_P4
  SITE 92: note = RuvC_P5
  REGION 211..298: note = Tnp_domain
  SITE 219: note = Tnp_P1
  SITE 249: note = Tnp_P2
  SITE 257: note = Tnp_P3
  SITE 258: note = Tnp_P4
  SITE 270: note = Tnp_P5
MNVITIGIDLAKSVFQVHGVDAEGTVTVRKKLRRAEVLKFFEGLPPCLVGMEACATAHYWAREIGTLGHDARLMPPSYVKAYVRRQKNDAADAEAICEAVTRPTMRFVPVKSAERQGVLVLHRTRDLLVRQRTMLINAIRGHCAEFGMIAPQGAYWAGDLVEQVREAEGSVLPDLARSTLLMLAEQLDALAAQIHVLERQLMVWHRQDEASQRLATIPGVGVITATALAASVTDPGLFRSGREFAAFLGLVPRQNSSGGKDRLGRISKMGDGYLRKLLVVGATSVIRRAGDNTSATGAWVRTLMERKPARVVTVAMANKTARIAWAVLARGETYRAPAMS

SEQ ID NO: 12804 - protein, 317 aa, unidentified
  source 1..317: note = protein_e1311c4
  REGION 11..154: note = RuvC_domain
  SITE 14: note = RuvC_P1
  SITE 58: note = RuvC_P2
  SITE 98: note = RuvC_P3
  SITE 100: note = RuvC_P4
  SITE 103: note = RuvC_P5
  REGION 193..277: note = Tnp_domain
  SITE 201: note = Tnp_P1
  SITE 230: note = Tnp_P2
  SITE 238: note = Tnp_P3
  SITE 239: note = Tnp_P4
  SITE 250: note = Tnp_P5
MQQRKTSTKCAGIDVGKHWLDGAVHGQAETERVSRDAAGIDVLIAWLQGHGVERVGLEASGGYERMVMEALEAVGLEVVLHQPLEVRLFARLKRLRAKNDRLDAALIAAATAQADAAKAAADPKLRDLADRLTAYEQIGDQLAELKGFLEHVAPKDVMRQLKAQVASLARLKTRLAAGVLERLKSHPDLAARYELLISLPGVGPIVAASLVVRMPELGQMKRGQAAALLGVAPFDRDSGQLKGKRFIAGGRRRPRRLIYLAALSAKRWDPNQKAFAQRLAARGKPAKLIVVAVMRRLIEAANLVLARQKPWIKATAS

SEQ ID NO: 12805 - protein, 343 aa, unidentified
  source 1..343: note = protein_24df675
  REGION 6..147: note = RuvC_domain
  SITE 9: note = RuvC_P1
  SITE 52: note = RuvC_P2
  SITE 87: note = RuvC_P3
  SITE 89: note = RuvC_P4
  SITE 92: note = RuvC_P5
  REGION 211..300: note = Tnp_domain
  SITE 219: note = Tnp_P1
  SITE 249: note = Tnp_P2
  SITE 257: note = Tnp_P3
  SITE 258: note = Tnp_P4
  SITE 270: note = Tnp_P5
MQVSTIGLDLAKNVFQAHGVSAEGKVVLKKQLRRGQVLSTFAKLPPCLVGMEACAGAHYWARELRKLGHDVRLMPARDVKAYVKRDKTDAADAVAICEAVSRPSMRFVALKTPEQQGRLMQHRVRDLLLRQRTQTINALRAHMAELGLVAATGRQGLCLLLAILADAKDERLPQDARASLKLLASQITALQAQIDSLDKRLHAQHRQCPASRRLETIPGIGVIGATALAATITDPKAFKSGRDLAAFIGLVPRNNSSGGKQRLGPISKQGDRYLRRILVVGAHSILKQARTRPDKHPWLARLMARKPGKLAAVALANKTARIAWAVLARGESYRAPTAPAAAG

SEQ ID NO: 12806 - protein, 399 aa, unidentified
  source 1..399: note = protein_befa25a
  REGION 5..164: note = RuvC_domain
  SITE 8: note = RuvC_P1
  SITE 62: note = RuvC_P2
  SITE 102: note = RuvC_P3
  SITE 104: note = RuvC_P4
  SITE 107: note = RuvC_P5
  REGION 274..363: note = Tnp_domain
  SITE 282: note = Tnp_P1
  SITE 312: note = Tnp_P2
  SITE 320: note = Tnp_P3
  SITE 321: note = Tnp_P4
  SITE 334: note = Tnp_P5
MRPVIGIDVAKGKSVIQAFIKRNAPYGRDQVIWHTLNGLEHLLRVLREMERKTKMKPAVILEPTGHYHRVLVQRLQSEGYDPILINPLQAQRARRTSLRKVKTDASDAWHLGDLYYQREDWITQPQREEHLVDLQFLTRHHEFITSLYVQAKLNLRTLLDQVFPGYEGVFKDLFSKTSLNLLEMLLTHEKVQSGEEEEWKEAVRQATRTSRSEAWMNRKIDHLRTAMLQNPVTYVPFGLETALRSMLATVREFQVQLTELEKTILELSELIEEVKLLETIPGVGAKIAASIVAEIGDATQFQNAKQLVAYAGLDPSVFSSGKFTATQNRITKRGSKRLRRAVYLAVTCGLRVGLNLHLREYYDKKKSEGKPHKVAVIACANKLLHHIYAMLKRRQSYTY

SEQ ID NO: 12807 - protein, 291 aa, unidentified
  source 1..291: note = protein_826e18f
  REGION 5..151: note = RuvC_domain
  SITE 8: note = RuvC_P1
  SITE 53: note = RuvC_P2
  SITE 91: note = RuvC_P3
  SITE 93: note = RuvC_P4
  SITE 96: note = RuvC_P5
  REGION 211..286: note = Tnp_domain
  SITE 219: note = Tnp_P1
  SITE 249: note = Tnp_P2
  SITE 257: note = Tnp_P3
  SITE 258: note = Tnp_P4
  SITE 270: note = Tnp_P5
MEEYIGLDVSMKETAVSIRRGGQRVWRGKCITDPATIAAPIRKRASAARRVVFETGPLSVWFYHALRAKGVPAICIDARHAKAALDMARNKTDANDADGLAHLAEVGFFREVRVKGFDSMLTRTLVGARHQLIRMATQLSNQIRGVMKTFGLLVPAGKGSKFERNVRNLLADRAELAAIVLPLLEAWHGIRMRAAELGTRLVSAARQSQGCRLLMSIPGIGVVTATSFAAAIEDPDNFKNSRSVGAWVGLTTRRYQSGEVDYDGHISRRGDRNLRWLLYESCGDHTDTRLN

SEQ ID NO: 12808 - protein, 358 aa, unidentified
  source 1..358: note = protein_88565c6
  REGION 16..164: note = RuvC_domain
  SITE 19: note = RuvC_P1
  SITE 68: note = RuvC_P2
  SITE 104: note = RuvC_P3
  SITE 106: note = RuvC_P4
  SITE 109: note = RuvC_P5
  REGION 237..320: note = Tnp_domain
  SITE 242: note = Tnp_P1
  SITE 273: note = Tnp_P2
  SITE 281: note = Tnp_P3
  SITE 282: note = Tnp_P4
  SITE 293: note = Tnp_P5
MRSITPQDAAIIEVAGGVDTHSDTHTAAVIDQVGRVLGTEQFPADTAGYAALLDWMRSFGQLVGVGVEGTGAYGAGLARLLHRQEVLVIEVDRPDRKTRRFQGKSDPIDAVQAAKTALAGERTGVPKQRDGRIEALRNLRVARRSAVDQRADAQRRIKTLIVTAPDDLRERLRSLGVKDLITTCANLRPDRTGAASPATAVKIALRSPARRHQQLTAEIADLDELLEPLVAAINPGLVAANGVGTDVAGQLLVTTGDNHDRLRSEAAFAMLCGAAPIPASSGKTNRHRLNRGGDRQANKALYRVVICRLRWDPRTRAYMERRTKDGLSKKEIIRCLKRYVARELYQLITTPNDLELAA

SEQ ID NO: 12809 - protein, 339 aa, unidentified
  source 1..339: note = protein_3e075af
  REGION 6..147: note = RuvC_domain
  SITE 9: note = RuvC_P1
  SITE 52: note = RuvC_P2
  SITE 87: note = RuvC_P3
  SITE 89: note = RuvC_P4
  SITE 92: note = RuvC_P5
  REGION 210..296: note = Tnp_domain
  SITE 218: note = Tnp_P1
  SITE 248: note = Tnp_P2
  SITE 256: note = Tnp_P3
  SITE 257: note = Tnp_P4
  SITE 269: note = Tnp_P5
MKYTPIGVDIAKHLIQLHFINEHTGEVIDKQVRSQDFLTFFSNREPCLIGMEACGGSQHWARELTKQGHKVRLMQARFVKAFLMGNKNDVMDARAIWMAVQQPGKAIAVKTEEQQSVLVLHRSRRQLVKFRTAQINALHGTLLEFGETLHKGRAALDKELPAALERLKIRLPPYLITVLEDQYNRLGELDSQINSIEKQLVSVARQNETCQRLLKIPGVGPLIATAAVATMGEASAFKSGREFSAYIGLVPKQTGSGGKIRLLGISKRGDTYMRTLFIHGARAAALLTKEPLPWITELKKRCPTSVAIVAMANKLARTVWAIAAHQCEYDKAHVSVRPD

SEQ ID NO: 12810 - protein, 346 aa, unidentified
  source 1..346: note = protein_3adb02e
  REGION 7..149: note = RuvC_domain
  SITE 10: note = RuvC_P1
  SITE 53: note = RuvC_P2
  SITE 88: note = RuvC_P3
  SITE 90: note = RuvC_P4
  SITE 93: note = RuvC_P5
  REGION 212..298: note = Tnp_domain
  SITE 220: note = Tnp_P1
  SITE 250: note = Tnp_P2
  SITE 258: note = Tnp_P3
  SITE 259: note = Tnp_P4
  SITE 271: note = Tnp_P5
MQQITTIGLDLAKQVFQVHGAEADGSPVVSRKLRRGDVLPFFKKLSPCLVGMEACGEAYYWAREIAKFGHDVRLVPPSYVKPFVKRGKTDAADSEAICEAVIRKTMRFVPVKSADQQAAAMVLKTRELLVRQRTQAINALRAHLSELGIIAGTGPAKIATLIEIVRDGEDARLPPAARFALSELANQIEWTKQRIDKLERAIVIEAKRDEDMRRLVTIPGVGVIIAASIKALVPDPHGFKSGRHFAAWLGLTPRSHSSGGKERLGRISKMGNSTLRSLLIIGATAVLKHVRHKADAPKWLVAILARRPFKVVATALANKMARIIWALLTKGGTYRKSGLAIGTANA

SEQ ID NO: 12811 - protein, 345 aa, unidentified
  source 1..345: note = protein_cfef1a2
  REGION 7..147: note = RuvC_domain
  SITE 10: note = RuvC_P1
  SITE 53: note = RuvC_P2
  SITE 88: note = RuvC_P3
  SITE 90: note = RuvC_P4
  SITE 93: note = RuvC_P5
  REGION 210..300: note = Tnp_domain
  SITE 218: note = Tnp_P1
  SITE 248: note = Tnp_P2
  SITE 256: note = Tnp_P3
  SITE 257: note = Tnp_P4
  SITE 269: note = Tnp_P5
MDQISRIGMDTSKHIFQLHGVNAAEVPVLRKKLRRKEMVAFFQKLAPTVIAIEACGASHHWARLLQSFGHSVKLIAPQLVKPYIKRGKNDAADAEALCEAMSRPTMRFVPVKTAEQQAALMLVGVRDRLIRNRTQLSNAIRGYAAEFGLTAAKGLAHLVVLLDRIQADESLPARARELFAMQATEYTQLQAQIDEVDAKLMACHRADECSRRLAKIPSVGPIGAMLLRMKTPEPELFRSGRQFAAWIGLTPKDHSTAGKVRLGVITRAGDEGLRSVLVAGATAVIQQARRGGRASPWLAELLKRKSPKLAAVALANKTARIAWKMMMTGENYAAKAAPAVLAGAA

SEQ ID NO: 12812 - protein, 387 aa, unidentified
  source 1..387: note = protein_abff0de
  REGION 5..158: note = RuvC_domain
  SITE 8: note = RuvC_P1
  SITE 56: note = RuvC_P2
  SITE 97: note = RuvC_P3
  SITE 99: note = RuvC_P4
  SITE 102: note = RuvC_P5
  REGION 220..305: note = Tnp_domain
  SITE 228: note = Tnp_P1
  SITE 258: note = Tnp_P2
  SITE 266: note = Tnp_P3
  SITE 267: note = Tnp_P4
  SITE 278: note = Tnp_P5
MTVIIGMDPHKRSATIEAIDSTGTILSTGRYGTDTAGYTAMLAAAKRFDERVWAIEGCNGVGRHLAHRLVHDGEIVVDVPAKLSAQVRVFATGNGRKTDPVDAHSVALAALRSPNLHRVHADPQLIALGMLADRRDELGRARTDTVNRLHRLLLELLPGGAKKFLSAMQARKLVATVKPRDPAGKVRRRLAVELIEDLERIDCTIKTLDKELRELVGERGPILSGLNGIGPSGAARLLADVGDIHRFCDRGRFASWNGTAPLDASSGEQKRHRLSRAGNRKINRVLHTMAIVQLRNPTAGRVYYDGKKAAGKTSMEAMRALKRRLSNVVYAAMLADQRNRETASPGGQSGASTDSCATGLTPETGSSDKPQPGPTITHHSPDLHATP

SEQ ID NO: 12813 - protein, 320 aa, unidentified
  source 1..320: note = protein_ffd0f9d
  REGION 7..149: note = RuvC_domain
  SITE 10: note = RuvC_P1
  SITE 52: note = RuvC_P2
  SITE 92: note = RuvC_P3
  SITE 94: note = RuvC_P4
  SITE 97: note = RuvC_P5
  REGION 187..271: note = Tnp_domain
  SITE 195: note = Tnp_P1
  SITE 224: note = Tnp_P2
  SITE 232: note = Tnp_P3
  SITE 233: note = Tnp_P4
  SITE 245: note = Tnp_P5
MSDSRVIGLDVDSKEFVPAVADCKAGERIPNTRAGIAKWLKTLPPRCRIGMEATGRHHELVARMAGQAGHVVYVINPRLIKNYARAMGARGKTDAMDAQVIARYVKKESDRLREYVPRSDEQQQMHDLLRKRQTLVETRARLEQSFDATKSDPRELADIFRALASTLSTLESDLQRLGRDGEQGPLYKRLLTIPGIGPAVAAHLVYYMTRWPLANANAWIACTGLDPRPNESGGRTGRRRLSKQGAPVLRQMLYMAAMGLKRCRNGQPLYDALSGRGHPSTAVFNILARKLARIAWGVFKSGKDFDPAMLKVGQACFQQA

SEQ ID NO: 12814 - protein, 387 aa, unidentified
  source 1..387: note = protein_36cdac0
  REGION 5..158: note = RuvC_domain
  SITE 8: note = RuvC_P1
  SITE 56: note = RuvC_P2
  SITE 97: note = RuvC_P3
  SITE 99: note = RuvC_P4
  SITE 102: note = RuvC_P5
  REGION 220..305: note = Tnp_domain
  SITE 228: note = Tnp_P1
  SITE 258: note = Tnp_P2
  SITE 266: note = Tnp_P3
  SITE 267: note = Tnp_P4
  SITE 278: note = Tnp_P5
MTVIIGMDPHKRSATIEIIDPAGTVLSTGRYGTDAVGYAEMLTAAQRFGDRIWAIEGCNGVGRHLAHRLVHDGETVVDVPAKLSAQVRVFATGNGRKTDPVDAHSVALAALRSPNLCRVQVDSELIALGMLADRREELGRARTDTVNRLHRLLLELLPGGAKKFLSATQARKLVASVKPRDPAGKVRRRLTVELMEDLERIDRKIKAADKELRELVGERGPILIGLNGIGPAGAARLLADVGDIHRFSDRGRFASWNGTAPLDASSGEQKRHRLSRAGNRKINRVLHTMAIVQLRNPSAGRVYYDGKKAAGKTSMEAMRALKRRLSNVVYTAMLTDQRNRETASPGGQSGATTDSSATGLAPDTGPSDKPQPGLTNTHHSPDLHTTP

SEQ ID NO: 12815 - protein, 417 aa, unidentified
  source 1..417: note = protein_2dd856f
  REGION 18..170: note = RuvC_domain
  SITE 21: note = RuvC_P1
  SITE 69: note = RuvC_P2
  SITE 107: note = RuvC_P3
  SITE 109: note = RuvC_P4
  SITE 112: note = RuvC_P5
  REGION 277..363: note = Tnp_domain
  SITE 285: note = Tnp_P1
  SITE 316: note = Tnp_P2
  SITE 324: note = Tnp_P3
  SITE 325: note = Tnp_P4
  SITE 336: note = Tnp_P5
MEYPPNTLPAVPPGGVTCGIDWASSDHAVCLLDRAGQIVQQFIAGHTARGLTGLVRRLRRAGVGEVAIERPDGKVVDALLEAGLTVVVISPNQLKNLRGRYGSAGNKDDRFDAFVLADTLRTDRARLRPLLPDSPATVIMRQACRARKDLVAHRVAVCNQLRAHLQIAFPGAVGLFADLDSPISLAFLSRFDCQDRADWLSPGRLAAWLQAQGYSGRKDPAGLHARLAAAPRGATGHDGTASAHITRALLAVLTSLVTQIKALNTQLAEQLALHPDAHIFTSLPRSGTVHAARLLAEIGDCRARFPTPEALICLAGVAPSTRKSGKTTFVDFRWAADKQLRDAVCDFAGDSRHASPWAARLYHDATARGKDHPHATRILARAWLYIIWHCCQDSTRYDPARHKALQRILAADTPAAA

SEQ ID NO: 12816 - protein, 345 aa, unidentified
  source 1..345: note = protein_d50722e
  REGION 6..147: note = RuvC_domain
  SITE 9: note = RuvC_P1
  SITE 52: note = RuvC_P2
  SITE 87: note = RuvC_P3
  SITE 89: note = RuvC_P4
  SITE 92: note = RuvC_P5
  REGION 209..295: note = Tnp_domain
  SITE 217: note = Tnp_P1
  SITE 247: note = Tnp_P2
  SITE 255: note = Tnp_P3
  SITE 256: note = Tnp_P4
  SITE 268: note = Tnp_P5
MKTIMIGLDLAKSVFQVHGVDGAGQVVVRKQLKRVQVERFFTKLEPAVIGMEACSGAHHWGRVLQTMGHEVRLMPAAYVKPYVKRNKTDGRDAEAICEAMQRPSMRFVAVKRPEQQAMMTVHRTRAVFVRQRTMLANALRAIFAEFGLVAPGGLKGLQSLMAQLPAPVGVPEASHEALTMLARQWQALDANIKALEQQIVRSVRADEAARRIMAIPGVGPITASAVVAAVPDMKQFRSGRGFAAWLGLTPRQNNSAFTRRSGGISKQGQRDIRCLLILGASSHLRQEQARRRMKAASDPWISGLLARRPVKVAAVARAAKTARIIWALLAKDRCYRAPAYLQHAA

SEQ ID NO: 12817 - protein, 341 aa, unidentified
  source 1..341: note = protein_2c8958e
  REGION 6..147: note = RuvC_domain
  SITE 9: note = RuvC_P1
  SITE 52: note = RuvC_P2
  SITE 87: note = RuvC_P3
  SITE 89: note = RuvC_P4
  SITE 92: note = RuvC_P5
  REGION 211..297: note = Tnp_domain
  SITE 219: note = Tnp_P1
  SITE 249: note = Tnp_P2
  SITE 257: note = Tnp_P3
  SITE 258: note = Tnp_P4
  SITE 270: note = Tnp_P5
MKTITIGLDLAKTVFQAHGVDDAGTVTIRKKLRRSELLTFFTDLPACLIGIEACATAHYWARELAALGHEVRLMPPTYVKAYVRRQKNDAADAEAICEAVTRPTMRFVPVKSAERQSILVLHRSRELLVRQRTMLINTIRGHCAEFGLIVAQGARRAIELVDQVRQADDRILPDLARSTLLMMADHLQVLAAQIHQLERRLLAWHRQDQVSQRLATIPGVGIITATALSASISNPALFRSGREFAAFLGLVPRQNSSGGKDRLGRISKMGDGYLRRLLVVGATSVIRRVRTGASLASASWVQSLLERRPARLVTVAMANKTARIAWAVMARGETYRMPVMA

SEQ ID NO: 12818 - protein, 355 aa, unidentified
  source 1..355: note = protein_259a3d2
  REGION 16..158: note = RuvC_domain
  SITE 19: note = RuvC_P1
  SITE 62: note = RuvC_P2
  SITE 97: note = RuvC_P3
  SITE 99: note = RuvC_P4
  SITE 102: note = RuvC_P5
  REGION 221..307: note = Tnp_domain
  SITE 229: note = Tnp_P1
  SITE 259: note = Tnp_P2
  SITE 267: note = Tnp_P3
  SITE 268: note = Tnp_P4
  SITE 280: note = Tnp_P5
MNATDEGAAHMQVTTIGLDIAKRVFQAHGVDETGKAVLRRKLQRPEVLAFFKGLSPCLVGIEACGTAHHWAREIQALGHEVRLMPASYVKPYVKRGKTDAADAEAICEAVTRPTMRFVPVKTPEQQAVLMLHRTRDLMVRQRTMLVNALRGHMAELGMVAPQGISRVADLVAVLLGEDETTMPKLARQALRGLAAELESLGERIEAIEAAILTWHRGNEASRRLASIPGVGPITASAIVASITDPTLFRSGRHLAAWIGLVPKQNSSGGKERQGGISKQGDRTLRRLLVLGATAVIRHTRTKAASEASWLKGLLERRPAKLAAVAQANKTARIVWALLVRGGAYRAPATAQAATA

SEQ ID NO: 12819 - protein, 341 aa, unidentified
  source 1..341: note = protein_3e590a3
  REGION 7..149: note = RuvC_domain
  SITE 10: note = RuvC_P1
  SITE 53: note = RuvC_P2
  SITE 88: note = RuvC_P3
  SITE 90: note = RuvC_P4
  SITE 93: note = RuvC_P5
  REGION 212..298: note = Tnp_domain
  SITE 220: note = Tnp_P1
  SITE 250: note = Tnp_P2
  SITE 258: note = Tnp_P3
  SITE 259: note = Tnp_P4
  SITE 271: note = Tnp_P5
MEAAVTIGLDLGKSVFQVHGVDQQGTVVVERRLTRARLLAFFAKQPACLVGMEACAAAHHWGRELQKLGHQVKLMPPRYVKPYVKRQKNDAADAEAICEAVTRPTMRFVEIKSCEQQGVLVLHCVRLMLTRQRTALSNAIRGHMAEYGLVAPVGRNGLQRLIAIIADQHDERLPAMARASLVILASQLQLVNEQVLDNDRRVRATARSTDLGRRLMEVPGVRPVLASALVASVPEPRAFKSGRDLAAWIGLVPKQNSSGGKEKLGGITKQGDRYLRQLLVVGALSVIRYAQRHGTRRPWLIYLLARRAPKVAAVALANKMARMIWAMMVTGERYREPQVAA

SEQ ID NO: 12820 - protein, 354 aa, unidentified
  source 1..354: note = protein_7ef0f8c
  REGION 12..153: note = RuvC_domain
  SITE 15: note = RuvC_P1
  SITE 58: note = RuvC_P2
  SITE 93: note = RuvC_P3
  SITE 95: note = RuvC_P4
  SITE 98: note = RuvC_P5
  REGION 217..304: note = Tnp_domain
  SITE 225: note = Tnp_P1
  SITE 255: note = Tnp_P2
  SITE 263: note = Tnp_P3
  SITE 264: note = Tnp_P4
  SITE 276: note = Tnp_P5
MPKTASAQIAVIGIDIGKNSFHVVGHNKQGAIVLRQKWSRGQIEARLSNMPPCLIGMEACVGAHHLSRKLAMFGHDARLMPAKYVRPYAKGQKNDFNDAEAIAEAVQRPTMKFVATKTADQLDLQALHRVRERLVSQRTGIINQIRAFMLERGIAVRQGIRFLRTELPIILASRTDVLSPRMLRVIEDLAGDWRRLDERIETLSREIETIARQDAGCDRLMSVPGIGPIISSGVVAAIGSGDVFSKGRDFAAWLGLVPKQISTGDRTILGKISKRGNRYLRVLFVQAAWVVLVKPMSWERHGLKPWIEAAKKRLHHNVLAIALANKLARVAWAVLAKGRDFEVTKKSEVSPQPA

SEQ ID NO: 12821 - protein, 400 aa, unidentified
  source 1..400: note = protein_ac79cda
  REGION 10..164: note = RuvC_domain
  SITE 13: note = RuvC_P1
  SITE 62: note = RuvC_P2
  SITE 102: note = RuvC_P3
  SITE 104: note = RuvC_P4
  SITE 107: note = RuvC_P5
  REGION 270..356: note = Tnp_domain
  SITE 278: note = Tnp_P1
  SITE 308: note = Tnp_P2
  SITE 316: note = Tnp_P3
  SITE 317: note = Tnp_P4
  SITE 329: note = Tnp_P5
MSERQARVWAGVDAGKGHHWAAVVDETGATLWSKKIENDETAILTAMGEILDLADEVSWAVDISGTASALLLALLAAHGQRAVYVPGRTVNRMSGAYRGEAKTDARDAYVIAETARHRRDFAAIDVPAQLAADLALLTAHRSDLVADRVRMINRLRDVLTGVFPALERAFDYSAHKGALVLLTGYQTPAAIRRRGRARLTAWLANRSVRGADSVAATALEAARAQQTALPGEDVAAQIVADLAVQILALDDRLKRIDQQIRDTFRAHPQAEIIESLPGMGPILGAEFVVAAGDLSAYADAGHLASAAGLVPVPRDSGRRTGNLHRPKRYSRRLRRVLYMSAQTSMMREGPNRDFYLKKRGEGCKHVQAVIALARRRASVLWALLRDGRVFTSAPPVTQAA

SEQ ID NO: 12822 - protein, 412 aa, unidentified
  source 1..412: note = protein_6389e25
  REGION 5..164: note = RuvC_domain
  SITE 8: note = RuvC_P1
  SITE 63: note = RuvC_P2
  SITE 103: note = RuvC_P3
  SITE 105: note = RuvC_P4
  SITE 108: note = RuvC_P5
  REGION 274..374: note = Tnp_domain
  SITE 282: note = Tnp_P1
  SITE 312: note = Tnp_P2
  SITE 320: note = Tnp_P3
  SITE 321: note = Tnp_P4
  SITE 334: note = Tnp_P5
MNPVIGLDVSKGESQVQAFLDKGKPYRKSFSITHDLKGLGCLLEFLQDVEKAAGGHQPSVVLESTGHYHIPVIQFLEEQNYVYIIVNPLISHRAKSSSLRKVKTDAIDAYHLCELFYKEELEPYKKRGVQLLNLRNLTRQQESIAEISAKTKIQLHSLIDQVFPEYRGVFGSLYSKVSLLTLLEFPTSKAVLSVSEKELTDKIASLCMSRSESWAKEKAQKLREAALRDPFQNNLYDSHIFNLEILVKIVLQYQEHLSNIADEIDALASEIEEYEILQSIPGVGEKIAATIISEIGEIDRFNGAKKLVAFAGIDPSVYSSGKFTASINRITKRGSCRLRHALYMAVQSGIRDARKKKTTDEIIPRNRRLREFYDKKREEGKPFRVAIIACVNKLLHWIYALLKTKSTFQDIA

SEQ ID NO: 12823 - protein, 296 aa, unidentified
  source 1..296: note = protein_4487e5d
  REGION 7..147: note = RuvC_domain
  SITE 10: note = RuvC_P1
  SITE 55: note = RuvC_P2
  SITE 92: note = RuvC_P3
  SITE 94: note = RuvC_P4
  SITE 97: note = RuvC_P5
  REGION 222..296: note = Tnp_domain
  SITE 229: note = Tnp_P1
  SITE 259: note = Tnp_P2
  SITE 267: note = Tnp_P3
  SITE 268: note = Tnp_P4
  SITE 280: note = Tnp_P5
MTHVTSIGLDVHARSVSACAFDPFTGEVVQRSFGTDAGEIAAWIKGFEEPKAVYESGPTGFALCRQLRALGVDCAVGAVSRMQKPAAEKRRKNDRRDAAFLARLLATRNVVEVWVPPAEAEAARDVRALGAQGVKRARQRLSKFLLRRGHVFDETDALGRRRGAWTRAFWRWAEGLRPDEPAAASAFDHYATCVRCAESDKRALEKLVLAEARSERWAGVVGALSCIKGVDAVTAFCLATEAGCFSRFATAGAYASWLGLTPSEHSSGEKEATGGITKTGNSASRRALVEAAWHYA

SEQ ID NO: 12824 - protein, 408 aa, unidentified
  source 1..408: note = protein_a19fa01
  REGION 4..163: note = RuvC_domain
  SITE 7: note = RuvC_P1
  SITE 60: note = RuvC_P2
  SITE 100: note = RuvC_P3
  SITE 102: note = RuvC_P4
  SITE 105: note = RuvC_P5
  REGION 273..359: note = Tnp_domain
  SITE 281: note = Tnp_P1
  SITE 312: note = Tnp_P2
  SITE 320: note = Tnp_P3
  SITE 321: note = Tnp_P4
MLFVGDDWAEDHHDVEVQDQHGRVMRTARLPEGVDGMARLHELVAGFLADDAEPAQVVVCIETDRGPWVRALVAAGYQVFGVNPKQAARHRELVSLSGAKSDKGDAHALADMVRTRRHQLRPVAADSDLAEAVKVVSRAHQTLIWERTRHMLRLRAALREYFPAALDAYQPLTLTGVDTLELLAKAPTPDQAATLTLTQISTVLKRARRRPIADKAATIQRALRTAHLRQPEVVTAAYAGTIGATVAILQTLNAQIRAMQGQVEAHFGQHPDAEVYRSQPGIGVILGARVLAEFGDAPGRYADAKARKNYAGTAPITRQSGKSKTVHARIVHNDRLVDALHTQAGAAILHDPAVRAYYDELRARDIGHNAALRQIGNRLVGILHGCLKTATLYDQTTAWSHRAQPVAA

SEQ ID NO: 12825 - protein, 315 aa, unidentified
  source 1..315: note = protein_655269d
  REGION 9..153: note = RuvC_domain
  SITE 12: note = RuvC_P1
  SITE 56: note = RuvC_P2
  SITE 96: note = RuvC_P3
  SITE 98: note = RuvC_P4
  SITE 101: note = RuvC_P5
  REGION 192..276: note = Tnp_domain
  SITE 200: note = Tnp_P1
  SITE 229: note = Tnp_P2
  SITE 237: note = Tnp_P3
  SITE 238: note = Tnp_P4
  SITE 249: note = Tnp_P5
METIVAQNVGVDISKSTLDVHLHPAGIARQFANDANGIKALLGWLGDRDIARIVFEPTGPYHHRLERRLGDAGLPLAKVNPLQARRFAQAAGAHAKTDAIDAAMLARMGALLTPPVRQITSEAIDDMRELHIARLALIKDRTAARNREHACRSPLLKRHAAQRLTRIDRQIAAIDAALNARLQTDPELVSRFEILISIPGVGALTAMIMLIEMPELGQLESKQVASLAGLAPQARDSRQYRGKRHIRGGRAVLSQALYMPALVATRFNVDLKAKYQTMVTAGKPPKVAITAIMRKLIVLANTLLKADRKWINKAA

SEQ ID NO: 12826 - protein, 331 aa, unidentified
  source 1..331: note = protein_85f839a
  REGION 5..151: note = RuvC_domain
  SITE 8: note = RuvC_P1
  SITE 55: note = RuvC_P2
  SITE 95: note = RuvC_P3
  SITE 97: note = RuvC_P4
  SITE 100: note = RuvC_P5
  REGION 199..283: note = Tnp_domain
  SITE 204: note = Tnp_P1
  SITE 234: note = Tnp_P2
  SITE 242: note = Tnp_P3
  SITE 243: note = Tnp_P4
  SITE 256: note = Tnp_P5
MALVVGVDIGSQTAPMAWRKDGKAAGTWTIEQSAKGHPLAVKKLLSLKPDLIVMEATGIYYLDLAIKLTNAGLPVAVINPKSAHNFAKVMLANSKTDKIDAQLLAEYAERMTPRVWTAPTAQMLELRALGRHLNRLTGHRTQAKNELHALKATQTTSSMLIEDAEQAIVAFDKRIDRFRKAALELILQSSELSVSYKCMIAGPGIGEVSAIAMLAELATLPPTLKSNQVSRHAGLDVRLTQSGTSLNKPGRMSKAGNAYLRAAMFMPALSAMRCDRYVKAFFDGLVARGKKKMQAIGAIMRKYLTGVWACIRSGEPFDTAKLFSEKHLLKA

SEQ ID NO: 12827 - protein, 349 aa, unidentified
  source 1..349: note = protein_c7e7277
  REGION 7..150: note = RuvC_domain
  SITE 10: note = RuvC_P1
  SITE 54: note = RuvC_P2
  SITE 89: note = RuvC_P3
  SITE 91: note = RuvC_P4
  SITE 94: note = RuvC_P5
  REGION 213..306: note = Tnp_domain
  SITE 221: note = Tnp_P1
  SITE 251: note = Tnp_P2
  SITE 259: note = Tnp_P3
  SITE 260: note = Tnp_P4
  SITE 272: note = Tnp_P5
MNQHTAIGIDLAKRVFQVCIIDTRNQHVHVNKALKRHELLDFIRQQPRCRVFMEACGGSHYWARQIKAIGHDVGLISPQFVTPFRKGHKTDANDALAIVEAGLRPNMRFVPAKGIEQQDIQSLHRIRDRYIKQRTQLINQVHGLLQEYGMISGCGQKSLTQCVWRALEDAENELTMVMRDLLADQMEELDRLNERLQSLDQRVEQVSRAFAPCRQLMAIEGVGVVSATQLYSALGDGRAFQNGRQASAYIGLTPKQYSSGGSANMRGIGRTGQVSLKCALIRGAHAAIRVVGDKQDARSQWLRALVSRVGKNRAAVALANKNVRIAWAMLCRKTPYRNDFHTVHDVMAI

SEQ ID NO: 12828 - protein, 320 aa, unidentified
  source 1..320: note = protein_4897801
  REGION 10..159: note = RuvC_domain
  SITE 13: note = RuvC_P1
  SITE 55: note = RuvC_P2
  SITE 95: note = RuvC_P3
  SITE 97: note = RuvC_P4
  SITE 100: note = RuvC_P5
  REGION 191..274: note = Tnp_domain
  SITE 198: note = Tnp_P1
  SITE 227: note = Tnp_P2
  SITE 235: note = Tnp_P3
  SITE 236: note = Tnp_P4
  SITE 248: note = Tnp_P5
MTILTSSTVIGIDVAKAEIVAYREDLNSTQVIENTREAIGRWLKTLPAQSSIALEATSIYHLDTAELAHGMGHRVYIVDAYRVAHYRESIGQRAKTDPCDARLLARYLTSEQQRLRIWSPPPHAYKLLKSLLKKRAELIKARVSITLSWSGEPLLKDILDQQMEAFKQSERAIQKLMREVSQEAGITENIKRCKAIEGIGELTAMGLATAFMRGHFVNGDAFIAFLGLDLRPKDSGKKHSPRYLSKKGDGELRRLAHTAAMAACRSPTWKPYYESYLARGLARTQALVILARKLCRVAFALMKKQSEYRPNLTVQGSPAT

SEQ ID NO: 12829 - protein, 348 aa, unidentified
  source 1..348: note = protein_ef05f18
  REGION 7..149: note = RuvC_domain
  SITE 10: note = RuvC_P1
  SITE 53: note = RuvC_P2
  SITE 88: note = RuvC_P3
  SITE 90: note = RuvC_P4
  SITE 93: note = RuvC_P5
  REGION 209..300: note = Tnp_domain
  SITE 217: note = Tnp_P1
  SITE 247: note = Tnp_P2
  SITE 255: note = Tnp_P3
  SITE 256: note = Tnp_P4
  SITE 268: note = Tnp_P5
MEDVTLIGIDLGKHSFHVHGQDRHGKALLRKKFSRKQLIEFFVKFHACTVVMEACAGAHHMARQLAGFGHEVKLISPQFVRPFVKSNKNDFVDAEAICEAAGRPSMRFVTPKNEAQQTLSALHRVRESLVRDRIKTGNQIHAFLLEFGISLPIGHAAVRRLPTILAEQSLPPRLVQVLERLHAHYKYLDGQIAEIEKDLAAQLTDDDLGQRLMTIPGIGPITASVLASEMGDGKQYRCGRDFAASLGLVPRQYSTGGRNNLLGISKRGDKNLRRLLVLGARSYMRLLERQTGQLASWVRAMLMRRHSNVVACVLANKLARIVWAIAAHHTSFEMKEAHVRMRASLDSL

SEQ ID NO: 12830 - protein, 352 aa, unidentified
  source 1..352: note = protein_ef69efb
  REGION 6..148: note = RuvC_domain
  SITE 9: note = RuvC_P1
  SITE 52: note = RuvC_P2
  SITE 87: note = RuvC_P3
  SITE 89: note = RuvC_P4
  SITE 92: note = RuvC_P5
  REGION 211..294: note = Tnp_domain
  SITE 219: note = Tnp_P1
  SITE 249: note = Tnp_P2
  SITE 257: note = Tnp_P3
  SITE 258: note = Tnp_P4
  SITE 270: note = Tnp_P5
MNITTVGIDLAKSVFQVHGVDERGKVGLRKQLKRSQVMGFFANLPRCLIGMEACGSAHFWARTFTELGHTVKLMAPQFVKPYVKTNKNDAADAEAICEAVGRENMRFVPIKNAEQQALLALHRARQGFVGARTAQVNQIRGLLAEFGIVIPAGIRRIAEHMPEILEDAENGLPGISRELFGRLFSHFRELDRQVRQMEVQIHAWHRDEPVSRRLQGIPGIGPITASALVGSIGNASSFKNGRQLAAWLGLVPRQNSSGGKEQLLGISKRGDTYLRTLLIHGARSVVRQLKLRAGGSQGWLARLALRRNLNIAAVALANKNARIVWALLAHDRDYQAGYMSQRGRATLAVAAP

SEQ ID NO: 12831 - protein, 402 aa, unidentified
  source 1..402: note = protein_dd83b5c
  REGION 5..164: note = RuvC_domain
  SITE 8: note = RuvC_P1
  SITE 61: note = RuvC_P2
  SITE 102: note = RuvC_P3
  SITE 104: note = RuvC_P4
  SITE 107: note = RuvC_P5
  REGION 271..356: note = Tnp_domain
  SITE 279: note = Tnp_P1
  SITE 309: note = Tnp_P2
  SITE 317: note = Tnp_P3
  SITE 318: note = Tnp_P4
  SITE 329: note = Tnp_P5
MRVAVGIDVAKEFHWVAIVLADGGKVLLSQRVDNDPDSIDGLITHLRAVAAEHGDLTVGIDLMGGVASLLTALLLDAGIRLVHVPGLVVNRARRATKGGEAKSDPRDAQTIADQLRLRDDWRVVDQPDEVSLDLRLLVSRRRELVVEQTRRLNRLRETLTSLFPGLERAVDVTNLGDLHLLARYATPAEIRRAGRRRITEHLLRRGVRRSYAESLVTKAIGAAEAQHTVVPGEARMAEFVREFAAEAVAARRRIADLDDQISADLDAHPDAALIRSLPGMGATLTGEFLAEAGDLTRFTTGDQLASAAGLAPVLQQSGKVRYLRRATAGSKTLKFVFYQSAFCAIQRDPASKAFYARKRAEGKRHHQALIALARRRINVLHALLRTRQPYQPDYRRNTATAA

SEQ ID NO: 12832 - protein, 328 aa, unidentified
  source 1..328: note = protein_8ccd8d7
  REGION 4..155: note = RuvC_domain
  SITE 7: note = RuvC_P1
  SITE 60: note = RuvC_P2
  SITE 100: note = RuvC_P3
  SITE 102: note = RuvC_P4
  SITE 105: note = RuvC_P5
  REGION 200..286: note = Tnp_domain
  SITE 208: note = Tnp_P1
  SITE 237: note = Tnp_P2
  SITE 245: note = Tnp_P3
  SITE 246: note = Tnp_P4
  SITE 259: note = Tnp_P5
MLYLGIDVAKAKLDCCLLLDDASGKRKTKVVNNTKSGVVDLLAWITKQNISTEELHVVMDATGVYHEQAALALADTGVIVSIVNPAQVKDFGRGLAVRTKTDGVDSFVLARYGALLKPSAWTPPAPEARMLQALLARRDAIAQDLQRERNRQEKADATDTPELIRKSLEDSIQFLVAQLAQLQQDIDDHINRHPSLKKDMNLLQSIPGVGPQVGGNMLSVLSSHHFESAEQLAAYLGLVPVERQSGSSVLGRAKLSKAGPARIRAVLYMAAVAAKRCNPHVKAVYDRMLARGKCKMSALGAAMRKLVHLCFGVLKTQQPYQRDYAKNA

SEQ ID NO: 12833 - protein, 271 aa, unidentified
  source 1..271: note = protein_8db0631
  REGION 2..77: note = RuvC_domain
  SITE 17: note = RuvC_P3
  SITE 19: note = RuvC_P4
  SITE 22: note = RuvC_P5
  REGION 141..228: note = Tnp_domain
  SITE 149: note = Tnp_P1
  SITE 179: note = Tnp_P2
  SITE 187: note = Tnp_P3
  SITE 188: note = Tnp_P4
  SITE 200: note = Tnp_P5
MKLIAPQFVKPYVKTNKTDANDAEAICEAMSRPSMRFVAVKTVEQQDLQAVHRVRSSLIRERTAKANQLRGLVYEYGLVAPREISSLRRAVPQWLEDAENGLTVRFRSLLAGLYGDLKQLDERVHELDKEVAVITREHEPVRRLMQINGVGPLIASALYALVGDARQYRNGRDLAVALGLTPRQHSSGGKEKLLGISKRGDKYVRTLLIHGARSALRTAPGRTDRISRWALALAERSHPNVAVTALANKTARVAWAMPRHGADSEPERVAA

SEQ ID NO: 12834 - protein, 345 aa, unidentified
  source 1..345: note = protein_91083ff
  REGION 6..148: note = RuvC_domain
  SITE 9: note = RuvC_P1
  SITE 52: note = RuvC_P2
  SITE 87: note = RuvC_P3
  SITE 89: note = RuvC_P4
  SITE 92: note = RuvC_P5
  REGION 211..300: note = Tnp_domain
  SITE 219: note = Tnp_P1
  SITE 249: note = Tnp_P2
  SITE 257: note = Tnp_P3
  SITE 258: note = Tnp_P4
  SITE 270: note = Tnp_P5
MKTTTVGIDLAKSVFQVHGVDERGKALLCKQLKRKDVMSFFANLEACLIGMEACGSAHFWARKLSGLGHTVRLMAPQFVKPYVKTNKSDRNDAEAICEAVARPNMRFVPVKTPEMQAVLALHRARQGFVKSRTAQGNQIRGLLAEFGIVIPKGIGHIAKRLPEILEDGENGLPAMMRQLIAQLGEQLKALDQQVGELEYQIKLWHHENERSRKLEDIAGIGPITASAFVASVGDAKSFKNARQVTAWLGMVPRHEGTGGNVRLGRISKRGDVYLRTMLIHGARSVVAQVERKPDQADEWLKKLLARRNKQIAAVALAAKNARIAWALLAHERSYESDYVATRPGA

SEQ ID NO: 12835 - protein, 345 aa, unidentified
  source 1..345: note = protein_f3ef28f
  REGION 11..155: note = RuvC_domain
  SITE 14: note = RuvC_P1
  SITE 59: note = RuvC_P2
  SITE 94: note = RuvC_P3
  SITE 96: note = RuvC_P4
  SITE 99: note = RuvC_P5
  REGION 218..305: note = Tnp_domain
  SITE 226: note = Tnp_P1
  SITE 256: note = Tnp_P2
  SITE 264: note = Tnp_P3
  SITE 265: note = Tnp_P4
  SITE 277: note = Tnp_P5
MNKVTPAFVRLAVDLAKQVFQVAGEDAYGRVVYEERINSRPAFSKLLAGLGAKVEVLLETGPGAQAWARQVQEAGAKVRILPAQRVAEHRSGAKNDRNDCLAILRAGRDEAIHGVPVKTVHALEMQAEHRVRTGYIRRQTSISNQVRGILLEHGIAIAKSNSALALWVTRIQQDTSFPIPEMLREIIADLWAEWEHLGQRRKRLDRQLEQIAQNDEVARRLMTIRGFGPIMTTALLAKQTQPERFPNARQFAAYFGLVPDQHSSGSTVRLGRMTRRGDGYIRSLAVTGAQSVLHRVRADATGADDKRLQRWCRQHGKKGAAIRLANRNLRIAWILMTTQAEYQPQ

SEQ ID NO: 12836 - protein, 340 aa, unidentified
  source 1..340: note = protein_d2bddbc
  REGION 5..158: note = RuvC_domain
  SITE 8: note = RuvC_P1
  SITE 56: note = RuvC_P2
  SITE 97: note = RuvC_P3
  SITE 99: note = RuvC_P4
  SITE 102: note = RuvC_P5
  REGION 220..306: note = Tnp_domain
  SITE 228: note = Tnp_P1
  SITE 258: note = Tnp_P2
  SITE 266: note = Tnp_P3
  SITE 267: note = Tnp_P4
  SITE 278: note = Tnp_P5
MTVMIGVDPYKATHTAVAIGDDERELATIKVRATRKQVLQLLAWAAPFESRTWAIESAAGMGYLLAQQLVDAGESVVDVSPTLASRVRLLGSGRSDKNDPNDALSVAVAALRAPTLREVYAVDHGEVLRLLAKRNLDIGSHRTRVVCRLHAALAGLAPGGMSKELNASEAEAFLDQVEPVSPVEHVRLELAREMLADVRRLDAQLKDSHRRIRAAVLASKTSLTDLFGVGPMIACSLIGYTRDVRRFRNRDQFAAYNGTAPVEVSSGGRITHRLSRRGNRRLNHAIHMAAVTQVRHAHSEGRAYFDRKLAEGKTKKEALRALKRQVSNAVYRQLLVDAAR

SEQ ID NO: 12837 - protein, 423 aa, unidentified
  source 1..423: note = protein_23babaf
  REGION 15..177: note = RuvC_domain
  SITE 18: note = RuvC_P1
  SITE 74: note = RuvC_P2
  SITE 114: note = RuvC_P3
  SITE 116: note = RuvC_P4
  SITE 119: note = RuvC_P5
  REGION 285..371: note = Tnp_domain
  SITE 293: note = Tnp_P1
  SITE 324: note = Tnp_P2
  SITE 332: note = Tnp_P3
  SITE 333: note = Tnp_P4
MSIVDDGGGKVLLFLGNDWSEDHHDVELQDAAGTVLARAKLAEGMAGMTRLHAMIGEHVGEHVGDGQEPTVLVGIETERGPWVRALVAAGYLVYAVNPLQVARYRERRGVSGAKSDPADAHVLADMIRTDHTQLRPIAGDSELAEAVKVLTRTHKTLIWERSRHTLRLRQALLDFFPAAIEAFADLTGPDTLQMLAAAPDPASAAALTIEQITAALAVAQRRNRAVKATQIAAALQAAHLGQPVQVVAAYAATVRAQVAILGVLNTQIKTLDKQVRTHFLKHPDAQIYLSQPGLGFVLGARVLAEFGDDPWRYANAKARKNYAGTSPITRQSGKRKAVIARWVHNNRLIDALGQQAFCSLCDSPGARAYYDRLRARGAGHRAALRQLGNRLVGILHGCLKTGTIYDETTAWSHRPETNLATVA

SEQ ID NO: 12838 - protein, 396 aa, unidentified
  source 1..396: note = protein_a5e91a7
  REGION 6..160: note = RuvC_domain
  SITE 9: note = RuvC_P1
  SITE 58: note = RuvC_P2
  SITE 98: note = RuvC_P3
  SITE 100: note = RuvC_P4
  SITE 103: note = RuvC_P5
  REGION 265..352: note = Tnp_domain
  SITE 273: note = Tnp_P1
  SITE 304: note = Tnp_P2
  SITE 312: note = Tnp_P3
  SITE 313: note = Tnp_P4
  SITE 325: note = Tnp_P5
MPEIWAGVDIGKEHHHCVVINADGERLLSRRVLNDETELLHLIGDVLAISADVLWAVDLNHGGAALLICLLLSHDQPMAYLTGLAVHRASATYKGEGKTDAKDAFVIADQARVRRDLGLLRPGDEIAVDLRTLTNRRLDVVFDRTRQINRLRAQLLEIFPALERSLDLVNKGPVMLLTGYQTPAAIRRAGVQRIETWLKNRKVRGAAALAKTVVEAARAQMTALPGEKLAAAMVVRLAKGVMALDEEIVELDALIEATFREHPHAEVIRSLPGMGPKLGAEFIAATGGDMDAFGSADRLAGFAGLAPRPRDSGRVSGNLRRPRRYHRGLLRSMYLSAMVSITKCPASKAYYQRKRSEGKGHKQALLALARRRLNVLWAMIRDGQCYQGSPPVTTAA

SEQ ID NO: 12839 - protein, 344 aa, unidentified
  source 1..344: note = protein_c2b112e
  REGION 6..149: note = RuvC_domain
  SITE 9: note = RuvC_P1
  SITE 54: note = RuvC_P2
  SITE 89: note = RuvC_P3
  SITE 91: note = RuvC_P4
  SITE 94: note = RuvC_P5
  REGION 213..300: note = Tnp_domain
  SITE 221: note = Tnp_P1
  SITE 251: note = Tnp_P2
  SITE 259: note = Tnp_P3
  SITE 260: note = Tnp_P4
  SITE 272: note = Tnp_P5
MKVMRVGVDLAKNVFQVHGVDAEEQPVWQRSLRRATWLRELVKRVEPGAEIGLEACAGAHHWARALGAHGYRVKLMAPQFVKPYVKSNKTDRNDAAAICEAMSRPSMRFVEVKNVEQQDIQAVHRVRSELVSQRTSKGNQIRGLVGEYGLVAPVQLAALRRALPEWLEDGENGLTDRFRRLVAGLADDLRRLDQRIAELDAEIASIAASDPAAQRLLELRGVGPITATALVAALGTGEAFRRGRDFAVSLGLTPKQHSSGGKERLLGISKRGDAYLRQLLVHGARAVVRTAPSKNDPLSRWLQKLLARRHTNVVAVALAGKTARMAWALIRHDMAYEARLAAAS

SEQ ID NO: 12840 - protein, 344 aa, unidentified
  source 1..344: note = protein_2cbfcd0
  REGION 6..148: note = RuvC_domain
  SITE 9: note = RuvC_P1
  SITE 52: note = RuvC_P2
  SITE 87: note = RuvC_P3
  SITE 89: note = RuvC_P4
  SITE 92: note = RuvC_P5
  REGION 212..296: note = Tnp_domain
  SITE 219: note = Tnp_P1
  SITE 249: note = Tnp_P2
  SITE 257: note = Tnp_P3
  SITE 258: note = Tnp_P4
  SITE 270: note = Tnp_P5
MKATTIGIDLAKNVFQVHGVSENGKIVLRRQLKRHQVAIFFANLAPALVGMEACGSAHYWARKLQGMGHTVRLMAPQFVKPYVKTNKHDAADAEAICEAVTRPNMRFVPIKNVEQQAMLALHRARQGFVSARTAQANQIRGLLSEYGFVLPQGIACIAEKVPDIIEDGSNELPGTFRQLIQRLMAHLKALHQQVSEIDAEIRAWHRQSDLSCKLEKIPGVGPVTATALVATIGDAKHFKNGRELAAWLGLVPRQHSSGGKQNLLGISKRGDSYLRTLLIHCARSAIFASRRKGMEQGWVHDVARRRNSNIAAVALANKIARTVWALWRHDREYRPAYTPAAAAA

SEQ ID NO: 12841 - protein, 343 aa, unidentified
  source 1..343: note = protein_fa5a718
  REGION 1..105: note = RuvC_domain
  SITE 2: note = RuvC_P2
  SITE 42: note = RuvC_P3
  SITE 44: note = RuvC_P4
  SITE 47: note = RuvC_P5
  REGION 220..307: note = Tnp_domain
  SITE 228: note = Tnp_P1
  SITE 258: note = Tnp_P2
  SITE 266: note = Tnp_P3
  SITE 267: note = Tnp_P4
  SITE 280: note = Tnp_P5
MEATGHYHYPILKALLNEHIYVSLVNPYVMKKYGDSNIRKGKTDKKDSIRIAYYVIEKSYQLSPYTVVDQKYDDLKFLSRQYNQVVTMKVKSRVQLGNLLDETMPGIQTLFASNNASNPSKNIFLDFIEKYECFDNIKKMGEKRFITSYIKFAEKKRCRNIQAKALAIYELAQNSITTRSTDVSTSIALHQCINLLKQCTESSNQLLVQMQSISFTLPEYTTVRAMHGVGDKLASRLIAEIGDVRRFTSGKALNAYAGNDAPPYQSGQFEGTNRHISKRGSSSLRKACYEVMQALKLHKIVDDPCYQFMIKKESEGKPKNVAKMAGVNKFLRIYYARVMELYN

SEQ ID NO: 12842 - protein, 275 aa, unidentified
  source 1..275: note = protein_b15ac78
  REGION 6..147: note = RuvC_domain
  SITE 9: note = RuvC_P1
  SITE 52: note = RuvC_P2
  SITE 87: note = RuvC_P3
  SITE 89: note = RuvC_P4
  SITE 92: note = RuvC_P5
  REGION 210..271: note = Tnp_domain
  SITE 218: note = Tnp_P1
  SITE 248: note = Tnp_P2
  SITE 256: note = Tnp_P3
  SITE 257: note = Tnp_P4
MNSIAVGVDIAKQVFEVHYVDRETGEIVNKPIKRAKFLEHFANRARCLIGMEACGGAHHWARELTRMGHEVRLMPAEFVKAFNIRNKNDAADARAIWLAVQQPGKPVAVKTEMQQAMLALHRMREQLVKFRTMQSNGLRGLLTEYGEVMSKGRAKLDKEIPAVLGRIAERLPAALIDTLREQWNGLAKLDEQITEIERRMREWKKEDRAVKMISEIPGVGLLTATAAVAMMGDPKAFRSGREFAAWAGLVPKQTGSGGKVNLHGIREATCICARC

SEQ ID NO: 12843 - protein, 344 aa, unidentified
  source 1..344: note = protein_76e4f35
  REGION 5..152: note = RuvC_domain
  SITE 8: note = RuvC_P1
  SITE 55: note = RuvC_P2
  SITE 92: note = RuvC_P3
  SITE 94: note = RuvC_P4
  SITE 97: note = RuvC_P5
  REGION 212..298: note = Tnp_domain
  SITE 220: note = Tnp_P1
  SITE 250: note = Tnp_P2
  SITE 258: note = Tnp_P3
  SITE 259: note = Tnp_P4
  SITE 271: note = Tnp_P5
MEYYAGIDVSLEQSSVCVVDATGKIVCETKVASEPEALVRFFAQLSVPVTRIGLEAGPLSQWLHAGLSEAGLETVLLETRHVKAALSAMIVKTDRKDARGIAQLLRMGWFRPVHRKSADAQEVRALLVGRKLLQSKLRDVEFSIRGILRGFGLKVGEVSKGRFAARVEELIAGHAMLEAVVGAMLTARAGLHSEFMRLHRQVLAIVRADDVCRRLMTVPGVGALVAVTFKATVDDPARFTSSKAVGAHFGLTPKKYQSGETDVTGGVSKVGDAMVRTVLYEAANVLLSRTTRFSTLKRWALDIARRRGVKRAKVALARKLATVLHRMWVDGSEFRWGKETAVAA

SEQ ID NO: 12844 - protein, 352 aa, unidentified
  source 1..352: note = protein_2df1b26
  REGION 12..152: note = RuvC_domain
  SITE 15: note = RuvC_P1
  SITE 58: note = RuvC_P2
  SITE 93: note = RuvC_P3
  SITE 95: note = RuvC_P4
  SITE 98: note = RuvC_P5
  REGION 217..302: note = Tnp_domain
  SITE 225: note = Tnp_P1
  SITE 255: note = Tnp_P2
  SITE 263: note = Tnp_P3
  SITE 264: note = Tnp_P4
  SITE 276: note = Tnp_P5
MPATAQTAIAVVGIDIGKNSFHIVGLDDRGAIALRQKWSRNQVEARFANMPPCLIGMEACVGAHHLSRKLNALGHDARLMPARYVRPYSKGQKNDFRDAEAIAEAVQRPTMKFVATKTADQLDLQALHRVRERLVSQRTGIINQIRAFLLERGVAVRQGLRFLRIELPGILAAPSDALSPRMVHVLEDLAGDWRRLDERIEGLSNEIEAIAYQDAGCDRLISVPGIGPIISSAIVAAIGAGDVFSKGRDFAAWLGLVPRQISTGDRTILGKISKRGNRYLRVLFVQAAWVVLIKPKSWERHGLKSWIEAAKKRLHRNVLAIALANKLARIAWSVLAHGRHFEAIKLGGAIAQ

SEQ ID NO: 12845 - protein, 344 aa, unidentified
  source 1..344: note = protein_14c1c55
  REGION 9..150: note = RuvC_domain
  SITE 12: note = RuvC_P1
  SITE 55: note = RuvC_P2
  SITE 90: note = RuvC_P3
  SITE 92: note = RuvC_P4
  SITE 95: note = RuvC_P5
  REGION 213..298: note = Tnp_domain
  SITE 221: note = Tnp_P1
  SITE 251: note = Tnp_P2
  SITE 259: note = Tnp_P3
  SITE 260: note = Tnp_P4
  SITE 272: note = Tnp_P5
MTKTPIAVLGIDLGKNSCSLAGLDAAGAVVMRRKMTREGVMAFTAALPACVVAMEACCGAHFLGRVIADQGHTVRLMSPEYVQPYVKAQKTDDRDAEAIAEAATRPTMRFVTLKSEAQLDLQSLHRARERLVLARTALINQLPAVLLERGITLAKGRAVLMRRLEEVGSEGLAVSDRTRRLVEDLLEECDGLSRRIKAYDDELAAVVRSDEQARRLSSIPWVGVINATALLAAVGDGSAFAKARDLASWLGLTPRQHSTGGRTRMLGIRKRGNRYLRKQLIDGARATLPHLAAKPNAMGAWLQQLLARSHPNVVVVALAAKLARIVWAVLRRKALFDHGTVAAA

SEQ ID NO: 12846 - protein, 340 aa, unidentified
  source 1..340: note = protein_b34c096
  REGION 6..147: note = RuvC_domain
  SITE 9: note = RuvC_P1
  SITE 52: note = RuvC_P2
  SITE 87: note = RuvC_P3
  SITE 89: note = RuvC_P4
  SITE 92: note = RuvC_P5
  REGION 212..296: note = Tnp_domain
  SITE 219: note = Tnp_P1
  SITE 249: note = Tnp_P2
  SITE 257: note = Tnp_P3
  SITE 258: note = Tnp_P4
  SITE 270: note = Tnp_P5
MQITTIGIDLAKAVFQVHGVDAHGKTVLKKQLKRTQVAEFFANLPPCLIGMEACGSAHYWARKLQALGHTVRLMAPQFVKPYVKTNKNDAADAEAICEAVTRPTMRFVPIKHVEQQAVLAVHRVRQGLVKARTAQANQIRGLLSEFGLIIPQGIAHISKLMPEMLDNAGDEVPGVFRELMQRLLDHLKDLDQQVGELERQIRTWHRSHALSCKLEKVPGIGPITATALVASIGDAKQFANGRQLAAWLGLVPRQHSTGGKSNLLGISKRGDCYLRTLLIHGARAVILATERKVTTQGWLVRLLDRSHKNVAAIALANKTARIVWALLAHEREFRSDYAKA

SEQ ID NO: 12847 - protein, 340 aa, unidentified
  source 1..340: note = protein_efeae75
  REGION 7..149: note = RuvC_domain
  SITE 10: note = RuvC_P1
  SITE 53: note = RuvC_P2
  SITE 88: note = RuvC_P3
  SITE 90: note = RuvC_P4
  SITE 93: note = RuvC_P5
  REGION 212..298: note = Tnp_domain
  SITE 220: note = Tnp_P1
  SITE 250: note = Tnp_P2
  SITE 258: note = Tnp_P3
  SITE 259: note = Tnp_P4
  SITE 271: note = Tnp_P5
MGEITTVGLDLAKNVFQVHGVDAEGMTVLRKQLRRAQVLVFFSRLPRCLVGLEACATSHYWARELRALGHEVRLMPAQYVKAYVKRNKNDAADAEAICEAVVRPSMRFVPVKTAEQQSAVLLHRGRERLVRQRTMLVNALRAHLAEFGVIGAQGLRNVGKLITVIRDEEDARLPDMARRVLQVLAVQIEQTEAAIAVLEKQLMDWHKSNPLSQRLATIPGIGPIIGTAIAAMVAEPSGFRSGREFAAWLGLVPRQNSTGGKNRLGGISKRGNQYLRRLLINGASANLLRSKATNADPWVIGLRRRRPSMVVAVALANKTARIAWAVMHRNEDYRRMAVAA

SEQ ID NO: 12848 - protein, 348 aa, unidentified
  source 1..348: note = protein_eef7ed0
  REGION 7..150: note = RuvC_domain
  SITE 10: note = RuvC_P1
  SITE 54: note = RuvC_P2
  SITE 89: note = RuvC_P3
  SITE 91: note = RuvC_P4
  SITE 94: note = RuvC_P5
  REGION 213..306: note = Tnp_domain
  SITE 221: note = Tnp_P1
  SITE 251: note = Tnp_P2
  SITE 259: note = Tnp_P3
  SITE 260: note = Tnp_P4
  SITE 272: note = Tnp_P5
MAKHTAIGIDLAKRVFQVCAVNIKTGKSGFNKALRRSELLDFMRRQSPCRVFMEACGGAHYWARQLSALGHEVSLIAPQFVTPFRKGHKTDANDALAIVEAGLRPDMRFVPVKGLEQQDIQSLHRIRERLIKQRTQLINQSHGLLHEYGIASGRGQKALRETMALALEDAENELGPMLRELLAEQVEELTRLNERLSALDKRVAQLARSVEACRQLQALEGVGPVVATQLYSALGDGKAFDKGRQASAYLGLTPRQYSSGGKVKLSGIGSTGHIQLKAALIRGAHAVIKMLGNKEDPKSRWLRALVARSGANKAAVALANKTVRTAWAVLHSGQAYCREYQQALSPTA

SEQ ID NO: 12849 - protein, 396 aa, unidentified
  source 1..396: note = protein_f3d4602
  REGION 6..160: note = RuvC_domain
  SITE 9: note = RuvC_P1
  SITE 58: note = RuvC_P2
  SITE 98: note = RuvC_P3
  SITE 100: note = RuvC_P4
  SITE 103: note = RuvC_P5
  REGION 265..352: note = Tnp_domain
  SITE 273: note = Tnp_P1
  SITE 304: note = Tnp_P2
  SITE 312: note = Tnp_P3
  SITE 313: note = Tnp_P4
  SITE 325: note = Tnp_P5
MTMIWAGIDAGKTHHHCVAINEDGRRLLSRRVANDEPDLLELLTDVLALGETVAWGIDLADGGAALAIAVLVNHAQPVHYISGRAIHRASESYRGEGKTDARDAAVIADQVRIRRDLHPLRVGDETVTDLKILTGRRADLVADRTRTINRLRAQLSGICPGLERALDLTNTGPLVLLTGYQTPAALRRVGKKRLETWLRNRKVLRADRLAETALDAAARQHTSLPGEKLTAQMVHTLAAEVLALNQQVTEVDKAIEARFRDHRDFAVITSMPGMGIILGAEFLAATGGDMTAFGTADRLAGFGGVAPVPRDSGKISGNPRRPRRYNRRLQRVFYISALFSIRHCDDSRRFYERKRAEGKRHIQAVLALARRRVNVLWALLRDGRTYEPLPPTPLAA

SEQ ID NO: 12850 - protein, 322 aa, unidentified
  source 1..322: note = protein_31b6886
  REGION 18..170: note = RuvC_domain
  SITE 21: note = RuvC_P1
  SITE 69: note = RuvC_P2
  SITE 107: note = RuvC_P3
  SITE 109: note = RuvC_P4
  SITE 112: note = RuvC_P5
  REGION 183..268: note = Tnp_domain
  SITE 190: note = Tnp_P1
  SITE 221: note = Tnp_P2
  SITE 229: note = Tnp_P3
  SITE 230: note = Tnp_P4
  SITE 241: note = Tnp_P5
MDYPPDTLPAVPPGGVTCGIDWANDDHAVCVCDMAGTVVRRFTVRHTSEGLVELVRRLRKADASEVAIERHDGKVVDALLEAGLTVVVISPNQLKNLRGRYGSAGNKDDRFDAFVLADTLRTDRARLRPLLPDSPATVTLHQTCRARKDLVQHRVAVCNQLRAHLKIAFPGAVGLFHELDRPHIFTSLPRSGTIRAARLLAEIGDCRARFATPEALICLAGVAPSTRKSGKTTFVDFRWAADKQLRDAVCDFAGDSRHANPWAARLYNDAIARGKDHPHATRILARAWLYIIWHCWQDGHAYDPARHNALQRIFADQRPAAA

SEQ ID NO: 12851 - protein, 343 aa, unidentified
  source 1..343: note = protein_01d8bc3
  REGION 7..149: note = RuvC_domain
  SITE 10: note = RuvC_P1
  SITE 53: note = RuvC_P2
  SITE 88: note = RuvC_P3
  SITE 90: note = RuvC_P4
  SITE 93: note = RuvC_P5
  REGION 212..303: note = Tnp_domain
  SITE 220: note = Tnp_P1
  SITE 250: note = Tnp_P2
  SITE 258: note = Tnp_P3
  SITE 259: note = Tnp_P4
  SITE 271: note = Tnp_P5
MQAITTVGLDIAKSVFQVHAIDAQGNMIVRRQLRRRGVLAFFEKLPPCLIGIEACASSHHWSRELQGLGHTVRLMPPAYVKPYVKRQKNDLADAEAICEAVTRPTMRFVATKTPEQQSCLMLHRTRHLFIRQQTAVINAIRAHLAEFGIVAPVGRKGVEQLLDVVGDSNDKRLPEIARLCVAALGAQLRVLKAQILEFDRQIMAWHRSNATSKRLDAIPGVGPALATALVASVADPKAFRSGRNFSAWVGLVPKQNSSGGKERLGSINKQGDRYLRGLFTAGALAVIRYAKIYGTRHRPWLTALLTRRPTKVAAIALANKIARMAWAMLARGERYKEPIALTA

SEQ ID NO: 12852 - protein, 344 aa, unidentified
  source 1..344: note = protein_3f7bd52
  REGION 6..148: note = RuvC_domain
  SITE 9: note = RuvC_P1
  SITE 52: note = RuvC_P2
  SITE 87: note = RuvC_P3
  SITE 89: note = RuvC_P4
  SITE 92: note = RuvC_P5
  REGION 211..297: note = Tnp_domain
  SITE 219: note = Tnp_P1
  SITE 249: note = Tnp_P2
  SITE 257: note = Tnp_P3
  SITE 258: note = Tnp_P4
  SITE 270: note = Tnp_P5
MKITTVGIDLAKNVFQVHGIDERGQVVLKKQLRRDQMAAFFVNLPQCLVGMEACGGAHHWARKLQGMGHTVRLMAPQFVKPYVKTNKNDAADAEAICEAVARPNMRFVPVKNVEQQAVLALHRVRQGFVRARTAQANQIRGLLGEFGIIIPQGIGYIATRVPELIEDGANELPGAFRLLVQRLLDHLKELDRQVEELEAKIQAWHRGNEVSRKLAQVPGIGPITASALVASIGNAKNFDSGRQVAAWLGLVPRQHSSGGKANLLGMSKRGDTYLRTLLIHGARSVIYRVSQNADACSWISAVVNRRNKNVAAVALANKNARIVWALLAHDRHFDADYVRSESLA

SEQ ID NO: 12853 - protein, 333 aa, unidentified
  source 1..333: note = protein_42b1bc5
  REGION 12..164: note = RuvC_domain
  SITE 15: note = RuvC_P1
  SITE 69: note = RuvC_P2
  SITE 109: note = RuvC_P3
  SITE 111: note = RuvC_P4
  SITE 114: note = RuvC_P5
  REGION 209..294: note = Tnp_domain
  SITE 217: note = Tnp_P1
  SITE 246: note = Tnp_P2
  SITE 254: note = Tnp_P3
  SITE 255: note = Tnp_P4
  SITE 267: note = Tnp_P5
MNKGSYKMNYYIGIDIAKDKFDCLWLRDVDALKIKTKVLPNTTKGFGLLKTWIEKNITSDLNTVCVTMEATGIYHEALCYALHEIGVRVSVMNPAFIRDFAKGLGVRGKTDKKDSMVLARYAALVQPREWKPEPKDVRTLRAMLSRLTSLEKDLQRENNRLEKAEISQASETVIDSLQLMIRSIGTEVARIKKQVDDHIEQNPTLKKNRAILKSIPAIGDVLSREMLALLESKDFTSARQVAAFVGLVPKLWESGKMKGRTTLCKNGSSHLRAVLYMGAIVAIQYNPDIKRQYERLLKAGKTKMQALGAAMRKLVQICFGVLKHQSEYRPQMS

SEQ ID NO: 12854 - protein, 341 aa, unidentified
  source 1..341: note = protein_22e868f
  REGION 7..149: note = RuvC_domain
  SITE 10: note = RuvC_P1
  SITE 53: note = RuvC_P2
  SITE 88: note = RuvC_P3
  SITE 90: note = RuvC_P4
  SITE 93: note = RuvC_P5
  REGION 211..299: note = Tnp_domain
  SITE 219: note = Tnp_P1
  SITE 249: note = Tnp_P2
  SITE 257: note = Tnp_P3
  SITE 258: note = Tnp_P4
  SITE 270: note = Tnp_P5
MGEVNIIGLDLAKTVFQAHGADASGAVVFRKKLRRDQLLTFFAGQPRCLVAMEACAGAHYWAREIGPLGHETKLIPPSYVKPFVKRQKNDISDAEAICEAAQRPTMRFVAPKSADAQGAALIFRTRDLLVRQRTQLINALRAHLAEFGFIVRQGPGHVDRLIALMQDPASDLPDMARPILVVLVQSLQALRDQIALLDREIAARSKADPVAKRLMTIPGIGPIVATALVALAPPASTFRRGRDFAAWVGLTPRQHSSGGKERLGRISKMGERSLRRLLILGASSAAKVAAREPSRANPWLTGMLARKPRMLVTVALANKIARIVWALMAHGGTYRAPAAAA

SEQ ID NO: 12855 - protein, 343 aa, unidentified
  source 1..343: note = protein_1796245
  REGION 5..151: note = RuvC_domain
  SITE 8: note = RuvC_P1
  SITE 53: note = RuvC_P2
  SITE 91: note = RuvC_P3
  SITE 93: note = RuvC_P4
  SITE 96: note = RuvC_P5
  REGION 211..298: note = Tnp_domain
  SITE 219: note = Tnp_P1
  SITE 249: note = Tnp_P2
  SITE 257: note = Tnp_P3
  SITE 258: note = Tnp_P4
  SITE 270: note = Tnp_P5
MDQYIGLDVSLKETAISIRQDGKRIWRGKCASDPKLVAEMIRKHAPHARRVVFETGPLSTWFYHELTKEGLPAICIEARHAQKVLNETLNKTDANDADGLAHLAEAGFYKAVRVKAFDSMLMRTLVTARNQLLNISTQLSNQIRGVMKTFGLIVPQGTGRVFDGNVRQLLDGNDGLAKIILPLLEGWRDIRMRAADLGRQLVAVARESQATKRLMTIPGIGAVTAVSYVAAIEGPDNFKTSRSVGAWLGLTTRRYQSGEVDYDGHISRRGDPHLRGLLYEAATVILTRTSARSESRLKSWGLKLRERLGFKRAAVAVARKLAVIMHSMLKTGDVFNRLAGATA

SEQ ID NO: 12856 - protein, 411 aa, unidentified
  source 1..411: note = protein_3912646
  REGION 16..170: note = RuvC_domain
  SITE 19: note = RuvC_P1
  SITE 67: note = RuvC_P2
  SITE 107: note = RuvC_P3
  SITE 109: note = RuvC_P4
  SITE 112: note = RuvC_P5
  REGION 277..362: note = Tnp_domain
  SITE 285: note = Tnp_P1
  SITE 315: note = Tnp_P2
  SITE 323: note = Tnp_P3
  SITE 324: note = Tnp_P4
  SITE 336: note = Tnp_P5
MSGSDKTRDHGFAVFCGLDVGKSAHHACALDPTGQRLHDKALPNDETALTEVFQRLATNGRVLVIVDQPASIGALAVAVARSLGIEVAYLPGLAMRRIADLHPGQGKTDARDAYVIADAARTMPHTLRRVGTDDEILAELTVLAGYDDDLAAQTTRLTNRLRDALLHVHPALERLLGPRMDRGGVLDLLAAAPTPDGLRQLGEDGITAVMRSRSPRLAKTLPRQILAALDAQTVVVPGTVAFGRVIVGVATQLREVRTERDTLAAELETRLEAHPLAEVLTSMPGLGFRTALKILTIVGDGAAFPTAGHLAAYAGLAPVTRRSGTSIKGETRSQRGNHALKSALFLSAFASLADPTSRAYYDRKRAQGKRHNAALICLARRRTDVIYAMLRDRKPYQLSAPAEPDSHPAAA

SEQ ID NO: 12857 - protein, 398 aa, unidentified
  source 1..398: note = protein_4c800a3
  REGION 10..164: note = RuvC_domain
  SITE 13: note = RuvC_P1
  SITE 61: note = RuvC_P2
  SITE 101: note = RuvC_P3
  SITE 103: note = RuvC_P4
  SITE 106: note = RuvC_P5
  REGION 271..356: note = Tnp_domain
  SITE 279: note = Tnp_P1
  SITE 308: note = Tnp_P2
  SITE 316: note = Tnp_P3
  SITE 317: note = Tnp_P4
  SITE 329: note = Tnp_P5
MITSDIDIFLGLDVGKTDHWACAVTRDGTKVCNRTLPNDEARLTEVYEELHTKGTVLVVVDQPATIGALAIAVAQHLGIPVAYLPGLSMRRIADMYPGTAKTDEKDAFIISDAARTMPHTLRSIEVADEDEATLGMLTGFDLDLARQITQTSNRIRGLFTQIHPPLERVLGPWLEHDAVLEVLTTWPTPALLKHAGKARIDAKLKKHGARRHTARAGTIIDALGAQTVTVIGTDAAGLVIPHLAKQLISLHAQRVDVAAHLEKMVEAHPLYPVLTSMPGVAVRTAAIIIAEISGKTFTSAAALASYAGLAPTTRQSGTSIKSERVSHSGNKRLKRALFLSAFASIRFDPTSRAYYDRKRAQGKRHNQALIALAHRRLTVIFAMLRDGTLYDIPELKVA

SEQ ID NO: 12858 - protein, 416 aa, unidentified
  source 1..416: note = protein_afe937c
  REGION 4..163: note = RuvC_domain
  SITE 7: note = RuvC_P1
  SITE 60: note = RuvC_P2
  SITE 100: note = RuvC_P3
  SITE 102: note = RuvC_P4
  SITE 105: note = RuvC_P5
  REGION 279..365: note = Tnp_domain
  SITE 287: note = Tnp_P1
  SITE 318: note = Tnp_P2
  SITE 326: note = Tnp_P3
  SITE 327: note = Tnp_P4
MLFVGDDWAEAHHDVELVDEAGRVLARRRLPEGVVGLERLHALIGDHLAQDDEPGDVVVGIETDRGPWVQALIAAGYAVFAINPLQAARYRERHAVSGAKSDPGDAHVLAEVVRLDRAHHRPVAGDSAIAEEVKVLARVHQSMIWSRQRQTNMLRSMLREFYPAALDAFTGDGAEDEGLAGRDALAVLAIAPGPQQGRALSLSKITSALRRAGRQRNVEARAAAIQAALRTPQLAAHPGVVGAYTASVRSLVAVIAEIAVQVAALQGEVEAGFGRHPDAEIYRSQPGLGTVLAARVLAEFGDDPHRYTDAKARRNYAGTSPVTRASGTKRVVLARHVRNRRLADALYQQAFCALTSSPGARAYYDKQRARGATHHQALRALGNRLVAILHGCLRHHTPYNETLAWANQAKINEAAA

SEQ ID NO: 12859 - protein, 396 aa, unidentified
  source 1..396: note = protein_72a7553
  REGION 6..160: note = RuvC_domain
  SITE 9: note = RuvC_P1
  SITE 58: note = RuvC_P2
  SITE 98: note = RuvC_P3
  SITE 100: note = RuvC_P4
  SITE 103: note = RuvC_P5
  REGION 265..352: note = Tnp_domain
  SITE 273: note = Tnp_P1
  SITE 304: note = Tnp_P2
  SITE 312: note = Tnp_P3
  SITE 313: note = Tnp_P4
  SITE 325: note = Tnp_P5
MATIWAGIDAGKTHHHCVAIDESGRRLLSRRVANDEPELLELLTDVLALGDEVVWGIDMADGGAALTITILLNHDQPVHYISGRAVHRASESYRGEGKTDAKDAAVIADQVRIRRDLHPLRTGDETVTDLKILTGRRIDLVTDRTRTVNRLRSRLTGFFPGLERELDLTNTGPLMLLTGYQTPAAIRRIGSRRLQTWLRNRHVTHAERLAGTAVQAAERQHTSLPGEKLAAELVRTLAMEVMALNQQVTELDKAIEARFREHPAYDVITSMPGLGIILGAEFLAATGGDMTAFGTADRLAGFGGVAPVPRDSGKISGNLRRPRRYNRRLQRVLYISALFSIRTCEESRRFYDRKRAEGKRHTQAVLALARRRVNVLWALLRDRRCYEPTPPTALAA

SEQ ID NO: 12860 - protein, 345 aa, unidentified
  source 1..345: note = protein_4571131
  REGION 6..147: note = RuvC_domain
  SITE 9: note = RuvC_P1
  SITE 52: note = RuvC_P2
  SITE 87: note = RuvC_P3
  SITE 89: note = RuvC_P4
  SITE 92: note = RuvC_P5
  REGION 211..298: note = Tnp_domain
  SITE 219: note = Tnp_P1
  SITE 249: note = Tnp_P2
  SITE 257: note = Tnp_P3
  SITE 258: note = Tnp_P4
  SITE 270: note = Tnp_P5
MQIASIGIDLGKTNFHLVALGERSKVLVRKKFSRAQLLAYTANLPASLIGLEACSGAHFLGAALREQGHEVRLIPAQFVKPYRKSNKNDFLDAEAIAEAVTKQNMRFVQIKTQEQLDVQAMHRVRDRRVQRRTALINEIRGFLLERGITFPAQPIHLRKNLPTVVEDAERNLSPRLRWLLDRLWQEWKQTEIDIQSITDEIERISNQDERCQRLRQIPGFGPLISTAMVAAIGNGAAFRRGRDLAAWLGVVPRQYSTGGKQKLFGMSKRGNIYLRRMLIHGARAVLFRVKYDTAGLGQWVRRLSQRAPRNKVVVAIANKLARIAWAVLSSGRNYRHQPLQQRAAA

SEQ ID NO: 12861 - protein, 401 aa, unidentified
  source 1..401: note = protein_a1e7d6b
  REGION 9..163: note = RuvC_domain
  SITE 12: note = RuvC_P1
  SITE 61: note = RuvC_P2
  SITE 101: note = RuvC_P3
  SITE 103: note = RuvC_P4
  SITE 106: note = RuvC_P5
  REGION 270..357: note = Tnp_domain
  SITE 278: note = Tnp_P1
  SITE 309: note = Tnp_P2
  SITE 317: note = Tnp_P3
  SITE 318: note = Tnp_P4
  SITE 330: note = Tnp_P5
MAETDRVWVGIDVGKSTHHACAIDHAGNVAWSKKIPNEQAAIEALIALAGGTAHRVVWGIDLTSPPAALLIATLLSSKAAVVYVPGRTVNTMSHAFRGEGKTDAKDARVIAETARLRRDLSPVVPGDDLVAELRSLTAYRSDLMADWVRGVNRLRSMLTAIFPALEAAFDYSTRAPLILVSNMCTPAEIRLAKRTGVIKHLRKRQAWPTGIEVIADKAVAAAAGQTITLPGEAGTAGLIKQLAARLLDLDRQIKDIDKQITKKFREHPSAAIIESMPGMGPHLGAEFIVITGGNMAAFTNAGRLASFAGLVPVPRDSGRITGNLHRPKRYNRRLRRVFYLAALSSLKIEGPSRAFYDRKRSENRIHTQALLALARRHVDVLWALLRENRTWQPQQPSAAAA

SEQ ID NO: 12862 - protein, 401 aa, unidentified
  source 1..401: note = protein_bb4e037
  REGION 9..163: note = RuvC_domain
  SITE 12: note = RuvC_P1
  SITE 61: note = RuvC_P2
  SITE 101: note = RuvC_P3
  SITE 103: note = RuvC_P4
  SITE 106: note = RuvC_P5
  REGION 270..357: note = Tnp_domain
  SITE 278: note = Tnp_P1
  SITE 309: note = Tnp_P2
  SITE 317: note = Tnp_P3
  SITE 318: note = Tnp_P4
  SITE 330: note = Tnp_P5
MAETNQVWVGIDVGKSTHHACAIDDTGNVLWSRKVPNEQAAIEELITLAGGTADRVVWAIDLTSPPAALLIATLLSANAAVVYVPGRTVNTMSHAFRGEGKTDAKDARVIAETARHRRDLSPVVPGEDLVAELRSLTAYRSDLMADWVRGVNRLRSMLTAIFPALEAAFDYSSRAPLILVSGMCTPAEIRSAKRAGVIKHLRKHQAWPNSIESIADKALAAAVGQTITLPGEAGTAALIKQLAVRLLDLDRQIKDIDKQITTKFREHPSAAIIESMPGMGPHLGAEFLVITGGNMAAFTNAGRLASFAGLVPVPRDSGRISGNLHRPKRYNRRLRRVFYLAALSSLKIEGPSRAFYDRKRSENHIHTQALLALARRHVDVLWALLRDNRTWQPQQPAAAAP

SEQ ID NO: 12863 - protein, 343 aa, unidentified
  source 1..343: note = protein_3178872
  REGION 6..147: note = RuvC_domain
  SITE 9: note = RuvC_P1
  SITE 52: note = RuvC_P2
  SITE 87: note = RuvC_P3
  SITE 89: note = RuvC_P4
  SITE 92: note = RuvC_P5
  REGION 212..295: note = Tnp_domain
  SITE 220: note = Tnp_P1
  SITE 250: note = Tnp_P2
  SITE 258: note = Tnp_P3
  SITE 259: note = Tnp_P4
  SITE 271: note = Tnp_P5
MDVSILGIDLGKNSCSVVGLDPSGRVVLRRRLRREGIIGLAAKLPGCVVAMEACCGAHHLGRLLAEQGHEVRLMSPEYVRPYVKAQKNDDRDAEAIAEAATRPTMRFVALKTEAQLDVQVLHRVRDRLVGQRTALMNQVRSILLERGIVVPQGRRKLLDALAALSAEPEGSGVGPRVRLLLDDMLDQWRSLDRRIAALDDEFAGMARNDPAARRLATIPGVGVLNATALVAAIGDGRTFSRGRDLSAWLGLVPRQATTGGKPKLLGITKRGSKYLRKLIIQGARAALPSLSRTATPLGGWLRDLLGRAHSNTVVVALASKLARIAWALLRDQTAFAYGGPVAA

SEQ ID NO: 12864 - protein, 392 aa, unidentified
  source 1..392: note = protein_a18ea9e
  REGION 4..164: note = RuvC_domain
  SITE 7: note = RuvC_P1
  SITE 62: note = RuvC_P2
  SITE 103: note = RuvC_P3
  SITE 105: note = RuvC_P4
  SITE 108: note = RuvC_P5
  REGION 267..354: note = Tnp_domain
  SITE 275: note = Tnp_P1
  SITE 305: note = Tnp_P2
  SITE 313: note = Tnp_P3
  SITE 314: note = Tnp_P4
  SITE 327: note = Tnp_P5
MIFIGIDVAKDKHDCCIINSDGVILNDSLRIPNCREGFESLYSSILSFLPNRDIYNVKIGLESTGHYSTNLQNFLYSKGFKLTILNPLATNLFRKAQTLRKTKTDKTDALVIAKMLFSDDTKSYLPVSYQIQELKSLTRHRYRLIGYRSKLKLSITRLVDIIFPELSKYVWSIHQTSSYSLLSELPGPKDIADCHLTKLTNILNKASRGKYGKEKAIALKEAASTSIGTNTRALSFELKQTIRLIQSVQAEINALDLQIKEIVTEIDSPIMSIPGISYTLAAIILAEIGDIERFTKPAKLLAFAGLDPSTYQSGKYKASHTPMVKRGSSYLRWAILTASRIVSIKNHTFAEYLAKKQAEGKHFYVAMSHVAKKLIHVIFHLLKTNTTFVPQM

SEQ ID NO: 12865 - protein, 409 aa, unidentified
  source 1..409: note = protein_9ff7f58
  REGION 4..163: note = RuvC_domain
  SITE 7: note = RuvC_P1
  SITE 60: note = RuvC_P2
  SITE 100: note = RuvC_P3
  SITE 102: note = RuvC_P4
  SITE 105: note = RuvC_P5
  REGION 271..357: note = Tnp_domain
  SITE 279: note = Tnp_P1
  SITE 310: note = Tnp_P2
  SITE 318: note = Tnp_P3
  SITE 319: note = Tnp_P4
MLFVGDDWAEDHHDVEIQDEAGRRLGKAKLEEGIAGIAGLHALIGQQLGEDGDPVQVVVGIETDRGPWVQALIAAGYQVYAINPLQVARYRERHAVSGAKSDAGDAHALADMVRTDRHQLRPVAGDSAAAEAVKVVARAHKTLIWERTRHTLRLRQTLREFFPAALVAFDDLTAVDALQLLGKAPDPASAARLTTAQITAALRRARRRDVPAKAEKVQAALRTQQLGQPPVVTAAYAATVRAQVAILTTLHTQIKAMEEQVEAHFGQHPDAEIYLSQPGLGRILGARVLAEFGDDTTRYADAKARRNYAGTSPITRQSGKKKIVLARYVHNDRLIDALGRQAFAALKASPGARAYYDQQRHRGLGHHAALRQLGNRLVGILHGCLKTGTHYDEATAWHHREQHHQDAAA

SEQ ID NO: 12866 - protein, 299 aa, unidentified
  source 1..299: note = protein_d76ca57
  REGION 2..82: note = RuvC_domain
  SITE 22: note = RuvC_P3
  SITE 24: note = RuvC_P4
  SITE 27: note = RuvC_P5
  REGION 148..235: note = Tnp_domain
  SITE 156: note = Tnp_P1
  SITE 186: note = Tnp_P2
  SITE 194: note = Tnp_P3
  SITE 195: note = Tnp_P4
  SITE 207: note = Tnp_P5
MGQECHVVAPSKIPKKPGDRIKTDRRDARKLARLLRSGDLTAVWVPGEEQEAMRDLARARNDFKIQERKARQQLSAFMLRHGHSWPKGKTRWTKGHFEWMETRKFPHEWQYVVLQGYIRAVNAAEKRVADITAEMSMALPHWSMAPVVYSLMAFRGIDMVSAMGLLAELGDLTRFDSPKQLMGFLGLVPSIHASGPTKREGEITKTGNSRARRLLVEAAWAYRHPARMTAHLRRKAKNASEEAREISWKAQKRLCGRYRSLVYSGKNKNQTTVAVARELSGFIWDVTRVEMARFETPAR

SEQ ID NO: 12867 - protein, 316 aa, unidentified
  source 1..316: note = protein_0d5b9e5
  REGION 10..157: note = RuvC_domain
  SITE 13: note = RuvC_P1
  SITE 55: note = RuvC_P2
  SITE 95: note = RuvC_P3
  SITE 97: note = RuvC_P4
  SITE 100: note = RuvC_P5
  REGION 190..274: note = Tnp_domain
  SITE 198: note = Tnp_P1
  SITE 227: note = Tnp_P2
  SITE 235: note = Tnp_P3
  SITE 236: note = Tnp_P4
  SITE 248: note = Tnp_P5
MAMHVEPSLIGVDVSKAELVIRQSWSSNLVKLGNERKAIDSYLKALTGPVCLAVEATNIFHVLLIERAHALGHAVYVIDGLRLKRYRESIGGRAKTDASDAALLLRYLTHEKSDLRPWTPPPAGYATVQRLLRRRSVLVQTETTLRQSLQCLPELKASVRAMLARMKHMQHLIDQRLAQTLKRQGWKGDVRRCQGIEGIGPITAAALTLIFHRGAFKSADAYIAFIGLDVRVRESGTFSGRRKLTKKGDPELRRLLYMAAMTACRSSTWKPFYERALARGLSCIQALVALGRKLARIAFALLKTQSDYVPKVVQVA

SEQ ID NO: 12868 - protein, 403 aa, unidentified
  source 1..403: note = protein_0dfd931
  REGION 9..161: note = RuvC_domain
  SITE 12: note = RuvC_P1
  SITE 60: note = RuvC_P2
  SITE 98: note = RuvC_P3
  SITE 100: note = RuvC_P4
  SITE 103: note = RuvC_P5
  REGION 267..353: note = Tnp_domain
  SITE 275: note = Tnp_P1
  SITE 306: note = Tnp_P2
  SITE 314: note = Tnp_P3
  SITE 315: note = Tnp_P4
  SITE 326: note = Tnp_P5
MHDPTVRYGGVDWATDTHAVCVVDDDGRVVVEFDVDHTAEGLSALCRRLRAAGVARVAIERPDGPVVDALMAHDFEVVVISSRSVKALRERYGTAGNKSDRSDAYVLADCLRTDGHRWASLKPDTPATVTLRSHVRARKDLVEARVAACNQLRAHLRVVFPGAVGLFAHLDSAISLRFLERFPSATRAAWLSEKRLGAWLRANGYSGRTHPAELYRRIATAPRGHDDDGDTSATVALAFVAVLKALRTQIDELDHRIAELLDAHPDAHIFTSLPRAGVIRAATLLAEIGDCRDRFPTPDTLACLAGVAPSTRASGRHRVITFRWSADKKLRDALCDFAGDSRHANAWAHTRYRQLRAAGKTHPHATRILARSWTHIIWRCWQDHTAHDPTRHAAFQHLHQHAA

SEQ ID NO: 12869 - protein, 323 aa, unidentified
  source 1..323: note = protein_8a72e16
  REGION 9..153: note = RuvC_domain
  SITE 12: note = RuvC_P1
  SITE 56: note = RuvC_P2
  SITE 96: note = RuvC_P3
  SITE 98: note = RuvC_P4
  SITE 101: note = RuvC_P5
  REGION 191..276: note = Tnp_domain
  SITE 199: note = Tnp_P1
  SITE 228: note = Tnp_P2
  SITE 236: note = Tnp_P3
  SITE 237: note = Tnp_P4
  SITE 248: note = Tnp_P5
MAKRITICAGIDTGKRKLDVALDGSSEQLQVENTAEGHQALVEWLKNHKVKRVGIEASGGYEQAVVSELRRKRFIVVVFQPAQVRAYAGFLLQRAKNDKIDAALIAACTAAVKEIHPAPDPRLQPFAEHLTMIDQIKEDIAKLKNRLESCRNERIQKHWKEQIALLAKHKRAEFKALVAAIRRHRDLAARLDLICSVGGSGLPTAVAILVRMPEIGQITRERAAALAGLAPYDDDSGDRRGARHIDGGRERLRQALYTAALPASFRWNPQLMALYRRLSAAGKGHKCALVACARKLLVIINAVVARGTPWLAEPSKAAGVPAT

SEQ ID NO: 12870 - protein, 341 aa, unidentified
  source 1..341: note = protein_3300fb9
  REGION 7..149: note = RuvC_domain
  SITE 10: note = RuvC_P1
  SITE 53: note = RuvC_P2
  SITE 88: note = RuvC_P3
  SITE 90: note = RuvC_P4
  SITE 93: note = RuvC_P5
  REGION 209..295: note = Tnp_domain
  SITE 217: note = Tnp_P1
  SITE 247: note = Tnp_P2
  SITE 255: note = Tnp_P3
  SITE 256: note = Tnp_P4
  SITE 268: note = Tnp_P5
MQDVTLVGIDLGKHSFHLHGQDRHGKPVFRKKVSRKQLVEFFATFHACTVVMEACAGAHHMARKLASFGHQVKLISPQFVRPFVKSNKNDFVDAEAICEAASRPAMRFVTPKTESQQTLSALHRVRESLVRDRVKTSNQMHAFLLEFGISLPIGQAVIRRLSTVLAEHSLPPSLVSILERLHAHFKYLSEQINEIDKELGRQLAADDLGQRLLSIPGVGPITASVLAAEMGDGKQYGCSRDFAASIGLVPRQYSTGGKSNLLGISKRGDKNLRRLLVLGARSYMQRLDKHAGRLADWVRAMLTRRHPNVVACALANKLARTAWALATHHSTFDAGSAAMPA

SEQ ID NO: 12871 - protein, 402 aa, unidentified
  source 1..402: note = protein_36b3583
  REGION 5..160: note = RuvC_domain
  SITE 8: note = RuvC_P1
  SITE 57: note = RuvC_P2
  SITE 97: note = RuvC_P3
  SITE 99: note = RuvC_P4
  SITE 102: note = RuvC_P5
  REGION 268..354: note = Tnp_domain
  SITE 276: note = Tnp_P1
  SITE 307: note = Tnp_P2
  SITE 315: note = Tnp_P3
  SITE 316: note = Tnp_P4
MRFLVGIDWASLAHAVCILDETGRIHWQGSVPHTAEGLAQLLGHLRRFRRRGLVRVALERPSGVLVDTLLEAGFEVVPVHPNALKASRPRYSAAGGKTDLGDAFILADLLRTDGHRLRPLRPPSDDTRALRALVRGRDDLVAQRLALANQLRALLERFWPGAAGLFADVDSPIALAFLTRYPTPQSAARLGEKRLAQFVRQHAYCGRRPVVDLIARLRRAPTSQVGEAEAEASGEVVRALVAVLIPLVAHIQQLSAAIAAALPQHPDGPLVQSLPRSGAVNAAQILAELGDDRARFPSDGQLAAESGLAPVTHASGKHHAVVFRWACNKRLRRALTTFADNSRHASRWAALVYQRARARGCRHQHAIRILARAWVRILWRCWQDRAVYDVTRHHAAQALTAA

SEQ ID NO: 12872 - protein, 374 aa, unidentified
  source 1..374: note = protein_6ff5fc4
  REGION 36..178: note = RuvC_domain
  SITE 39: note = RuvC_P1
  SITE 82: note = RuvC_P2
  SITE 117: note = RuvC_P3
  SITE 119: note = RuvC_P4
  SITE 122: note = RuvC_P5
  REGION 241..331: note = Tnp_domain
  SITE 249: note = Tnp_P1
  SITE 279: note = Tnp_P2
  SITE 287: note = Tnp_P3
  SITE 288: note = Tnp_P4
  SITE 301: note = Tnp_P5
MYGLLPLAGVLRYKVKSIHSNQLLPGVHTMTQCNVIAIDLAKDIFQVCIMTTNGKITFNKAMSRAKLKEWLVKQQLSLVAMESCGGAHYWARFAKSLGHKVMPIPPKQVKPFRTGQKTDANDAIAIAVASRAPNIKPARVLTNEEQGLQSVSKMRDLLDKQKLQLSNQVRGLLLEFGIIISKSIKSFKARIPEILEDGENQLPMPMRHSISKMWALYSRLEDDFKTLNNELMHLTEQDDDCKKLMKLEGVGPITSMRLKIQLGCGEHFKSSRQVSACIGLTPKQHSSGGKVQLGSVGKSSCDNPLRSCLFLGARAVVSKLKNRPAKTEKERWLKALIERRGANCASMALANKNARTAYALLKNNTDYNPVLIAA

SEQ ID NO: 12873 - protein, 346 aa, unidentified
  source 1..346: note = protein_ced0984
  REGION 7..147: note = RuvC_domain
  SITE 10: note = RuvC_P1
  SITE 53: note = RuvC_P2
  SITE 88: note = RuvC_P3
  SITE 90: note = RuvC_P4
  SITE 93: note = RuvC_P5
  REGION 210..295: note = Tnp_domain
  SITE 218: note = Tnp_P1
  SITE 248: note = Tnp_P2
  SITE 256: note = Tnp_P3
  SITE 257: note = Tnp_P4
  SITE 269: note = Tnp_P5
MSEIIRIGMDTSKHIFQLHGVDASEQVALCKRLGRKAMLAFFAKLAPTVVVIEACGAAHYLARELGKLGHQVKLIAPQLVKPYVTRNKNDGRDAEGLCEAASRPRMRFVPVKTVEQQAALMLLGVRDQLVARRTQLSNTIRGYAAEFGLVEAKGLDKIASLLAAVARDESVPALACELFATLARDYAQVQVELKAVEAKLVTWHRANALSRRLAQIPGVGPVTAAALVMKAPDPHAFRSGRLFAAWLGLTPKDHSTAGKTRLGKITRAGDESLRRLLVVGATSVVKQAKGTRGRGPRWLLELLKRKTPKLAAVALANKMARIAWKLMTTGESYDSARIDAQVASAA

SEQ ID NO: 12874 - protein, 403 aa, unidentified
  source 1..403: note = protein_a0f6037
  REGION 9..163: note = RuvC_domain
  SITE 12: note = RuvC_P1
  SITE 60: note = RuvC_P2
  SITE 100: note = RuvC_P3
  SITE 102: note = RuvC_P4
  SITE 105: note = RuvC_P5
  REGION 270..355: note = Tnp_domain
  SITE 278: note = Tnp_P1
  SITE 308: note = Tnp_P2
  SITE 316: note = Tnp_P3
  SITE 317: note = Tnp_P4
  SITE 329: note = Tnp_P5
MGPEYAVFLGLDVGKGEHHACALDPSGKKLHDKPLPNDEQRLRALFTQLSRHGRVLVVVDQPASIGALPVAVARAEGCQVAYLPGLTMRRLADVHPGNAKTDARYAFVIADAARTLPHTLRRVDSGEEALAELEVLVGFDDDLAGEATRLVNRIRGLLVTVHPALEKAIGPRLHHPAALELLITYGGPDGLRAATADQLLATTKPLAPRMAGRLVEAVKAALDAQTVVVPGTTAAATVLPHLARSLRSVHDQRKQVAIGVEEILDAHPLAKVLISMPGLGIRTSARILLEIGDISAFATPGHLAAYAGLAPVTRRSGSSVKGEHPPKGGNKALKRAMFLAAFASLSDPLSRAYYDRKRSEGKKHNAALICLARRRSDVIYAMLRDKQPYQPSRKASVQVPQAA

SEQ ID NO: 12875 - protein, 402 aa, unidentified
  source 1..402: note = protein_c12ac7b
  REGION 7..162: note = RuvC_domain
  SITE 10: note = RuvC_P1
  SITE 59: note = RuvC_P2
  SITE 99: note = RuvC_P3
  SITE 101: note = RuvC_P4
  SITE 104: note = RuvC_P5
  REGION 270..356: note = Tnp_domain
  SITE 278: note = Tnp_P1
  SITE 308: note = Tnp_P2
  SITE 316: note = Tnp_P3
  SITE 317: note = Tnp_P4
  SITE 329: note = Tnp_P5
MAYDYVIGMDGGKYFHHACVLDSHGAQVLSKRINQNEQSLRALFSNFCSGNNKVLVVVDQPNNIGRLTVAVAQDLGIDVRYLPGLAMRQLSRIHAGNAKTDIRDAYIIAHAGKNLPESLRSVDRVEKAFCQLKVLNGIDEDLARSYTRLINQIRSALVGCYPQFEQAIRGQIIHRKWVLHLLARYGGPTKIKRLGKAKTIAFARRHKARNPEPVIDAIFAAIAEQTVSIAGAHYAEMGVAMSAKDALAKLDHRKEIEKEVIDLIDDIPHTQILLSMPGIGPKTAAQILMTVGDMSDFPTPGHLASYAELSPRTNQSGTSIMSNSLNRTGNKKLKNALWQSSFASIRFHERSRQFYERKRKEAKRHNAAVVALARRRINVLYAMMRNHEYYRDPAPAKEAATA

SEQ ID NO: 12876 - protein, 346 aa, unidentified
  source 1..346: note = protein_4f61775
  REGION 13..155: note = RuvC_domain
  SITE 16: note = RuvC_P1
  SITE 59: note = RuvC_P2
  SITE 94: note = RuvC_P3
  SITE 96: note = RuvC_P4
  SITE 99: note = RuvC_P5
  REGION 218..305: note = Tnp_domain
  SITE 226: note = Tnp_P1
  SITE 256: note = Tnp_P2
  SITE 264: note = Tnp_P3
  SITE 265: note = Tnp_P4
  SITE 277: note = Tnp_P5
MKNNTAKGPITVLGIDLAKQSFQLHGVNAEGEVVLKKKLNRKQLSAFMANLPVCLIGLEACGGSHHWVRIFTEMGHAVRMMAPQFVKPYVKSNKNDAVDAEAICEAVQRPNMRFVPAKSIEQQDIQSIHRIRSQLVARRTAQANQIRGLLMEYGIIIPQGIKCIRKNLPDILEDGENLLTAIFREQLSALYDEMVHLDERVDSLELSLKRVCNQNEDCKRLLTIPGIGLMTATALIAAIGDIGAFKSARELAAWLGLVPRQHSTGGKPTLLGISKRGDSYLRTLLIHGGRSVVRCAHKHQDKRSQWIGEVEQRRGKNITAVAVANKNARITWALLTKKEDYQAQAA

SEQ ID NO: 12877 - protein, 266 aa, unidentified
  source 1..266: note = protein_c738a2b
  REGION 9..153: note = RuvC_domain
  SITE 12: note = RuvC_P1
  SITE 56: note = RuvC_P2
  SITE 96: note = RuvC_P3
  SITE 98: note = RuvC_P4
  SITE 101: note = RuvC_P5
  REGION 191..266: note = Tnp_domain
  SITE 199: note = Tnp_P1
  SITE 228: note = Tnp_P2
  SITE 236: note = Tnp_P3
  SITE 237: note = Tnp_P4
  SITE 248: note = Tnp_P5
MTQTSTRTAGIDTSKSKLDVAVHGRTEHWQVANSLAGWRILTTKLAEADVSRIGIEATGGYERGAVEHLRAAGFTVLVLQPIQVKAFGRVHLRRAKNDVLDAVLIAACAAAIEQVRDAPDPRLAELAEHLTFLEQIEDDIKRCKTRLEHIDQPALRRLVLGDIARLKARRLAQIRYLARQLRAHRDLAARLDLVLSIPGIGERTALALLIRMPELGRVSREEAAALAGLAPFDNDSGQHKGQRRIAGGRARLRRSLFAAALPAAFR

SEQ ID NO: 12878 - protein, 310 aa, unidentified
  source 1..310: note = protein_6476821
  REGION 6..153: note = RuvC_domain
  SITE 9: note = RuvC_P1
  SITE 53: note = RuvC_P2
  SITE 93: note = RuvC_P3
  SITE 95: note = RuvC_P4
  SITE 98: note = RuvC_P5
  REGION 187..271: note = Tnp_domain
  SITE 195: note = Tnp_P1
  SITE 224: note = Tnp_P2
  SITE 232: note = Tnp_P3
  SITE 233: note = Tnp_P4
  SITE 244: note = Tnp_P5
MFSYPAGIDVSSGSLQVQVNQLDAAMSFPNSESDFPSLIRWLTLHHVGRVLLEATGGYERKVMKALQTAGFEVVRINPCRAKSFARAMGQHAKTDPIDASLLAQFAAVIKSPDSRITSAEQDDLRALVQQRENFVQQRDDDKRRLKTAASEVIKPALQSHIDYLQSAVKALEILIRQSAERLDSKKAALLCSVKGIGLVTAASLMSYLPELGEVSRHQIAALSGTAPYNDDSGKHKGKRHISGGRFAARRSLYMACWSVIRFQPEFAKRYQELRAKGKCAKVALIACMRILLVRLNAMIRDCSEWKENAA

SEQ ID NO: 12879 - protein, 373 aa, unidentified
  source 1..373: note = protein_3529a1a
  REGION 33..187: note = RuvC_domain
  SITE 36: note = RuvC_P1
  SITE 84: note = RuvC_P2
  SITE 124: note = RuvC_P3
  SITE 126: note = RuvC_P4
  SITE 129: note = RuvC_P5
  REGION 294..363: note = Tnp_domain
  SITE 302: note = Tnp_P1
  SITE 331: note = Tnp_P2
  SITE 339: note = Tnp_P3
  SITE 340: note = Tnp_P4
  SITE 352: note = Tnp_P5
MPRLATDVAGQCVSLRLTFMQEPLQHNSIDVFVGVDVGKGQHHAVALDRSGKRLYNKALPNDEAKLRALINELKAYGQLLFVVDQPATIGALPMAVARDEGVLVAYLPGLAMRRIADLHAGEAKTDARDAAIIAEAARSMPHTLRSLRLADEPLAELTMLCGFDDDLAAQVTQTSNRIRGLLTQIHPALERVLGPRLDHPAVLDLLERYPSPAALAETSEKTLANRLTKLAPRMGKRLAAEIVQALGEQTVVVPGTQAATVVMPRLAKQLAALLQQRDEVASEVERLVHAHPLYSVLTSMPGVGVRTAARLLTEVAHKTFASAAHLAAYAGLAPVTRRSGSSIRGEHPSRRGNKVLKRKAPQPSTHRAGTATL

SEQ ID NO: 12880 - protein, 391 aa, unidentified
  source 1..391: note = protein_fa4ec0d
  REGION 4..163: note = RuvC_domain
  SITE 7: note = RuvC_P1
  SITE 60: note = RuvC_P2
  SITE 101: note = RuvC_P3
  SITE 103: note = RuvC_P4
  SITE 106: note = RuvC_P5
  REGION 266..353: note = Tnp_domain
  SITE 274: note = Tnp_P1
  SITE 304: note = Tnp_P2
  SITE 312: note = Tnp_P3
  SITE 313: note = Tnp_P4
  SITE 326: note = Tnp_P5
MIYVGIDIAKDKHDCFITNSDGETLYKPFTISNNREGYEELYSKICSSTGDISKVKVGLEATGHYSYNLLGFLVDKGLATFVINPLHTNLYRKSLSLRQTKTDKVDARTIASMLMSDVNLKSYSDTSYHNEELKSLTRYRFDKVKERAKLKTSVSRLALILFPELEKMVPTLHMASVYALLSEFPGASNVASAHLTRLTNLLETASKGRYSKDTAILFREAARSSIGSNMPAKSLELKHTIKLIQELDTEIEEIEKEIKIIMDEINSPILSIPGINYRMGAMIIAEIGDFSRFDSPDKILAYAGLSPSTYQSGQLDSAYSHMEKRGSRYLRYALFNAAKFVCHWDPTFAAYLAKKRAEGKHYNVAISHAAKKLVRVIYQLEKSGQAYIKAA

SEQ ID NO: 12881 - protein, 347 aa, unidentified
  source 1..347: note = protein_1f767de
  REGION 6..148: note = RuvC_domain
  SITE 9: note = RuvC_P1
  SITE 52: note = RuvC_P2
  SITE 87: note = RuvC_P3
  SITE 89: note = RuvC_P4
  SITE 92: note = RuvC_P5
  REGION 211..299: note = Tnp_domain
  SITE 219: note = Tnp_P1
  SITE 249: note = Tnp_P2
  SITE 257: note = Tnp_P3
  SITE 258: note = Tnp_P4
  SITE 270: note = Tnp_P5
MKIAIVGLDLAKNLLQVHAVDLQGHIVVRKQLRRADVLRYFASLEPCVIGMQACGSSYYWGRELAKLGHTVRLIAPQFVRPYVKSNKTDAADAEAICEAIQRPHMRFVPVKTQAQQTILSLHRARAGLVKSGTALANQIRGLLGEFGIALPQGIRLLGQRAIAALSSHDSEHCEPFRALVQMLVEHLRELGDKVAELEGRIRAIHRTDAPGQLLETIPRIGPLTASALAASIGNPRAFRSGRELAAWLGLVPREHSSGGTPHLLGISKRGDTALRTLLIHGARAVIRMAASKPEMADSWLMKLCRRRHKNIAAVELAAKNARTAWAMLIRGQAYQASHVPTRSSTTD

SEQ ID NO: 12882 - protein, 272 aa, unidentified
  source 1..272: note = protein_3498df9
  REGION 2..75: note = RuvC_domain
  SITE 14: note = RuvC_P3
  SITE 16: note = RuvC_P4
  SITE 19: note = RuvC_P5
  REGION 138..224: note = Tnp_domain
  SITE 146: note = Tnp_P1
  SITE 176: note = Tnp_P2
  SITE 184: note = Tnp_P3
  SITE 185: note = Tnp_P4
  SITE 197: note = Tnp_P5
MAPQFVKPYVKTNKNDAADAEAICEAVARSNMRFVPVKSAEQQGVLALHRARQGFVKARTAQANQIRGLLGEYGVVIPRGIGHITRCLPAILGDGENELPGPFRALLHRLGEHLQVLDRHVGELEVQIQIWHQHNPMSRCLAQIPGIGPITASALAASIGDAKSFTSGRQLAAWLGLVPKQHSSGGKALLLGISKRGDTYLRTLLIHGARALIRVAKHQAGYEDSWLARLISRRHQNVAAVALANKNARIAWALLAHERVYQSDYAPSAATA

SEQ ID NO: 12883 - protein, 322 aa, unidentified
  source 1..322: note = protein_f3451ce
  REGION 8..158: note = RuvC_domain
  SITE 11: note = RuvC_P1
  SITE 64: note = RuvC_P2
  SITE 102: note = RuvC_P3
  SITE 104: note = RuvC_P4
  SITE 107: note = RuvC_P5
  REGION 194..281: note = Tnp_domain
  SITE 202: note = Tnp_P1
  SITE 232: note = Tnp_P2
  SITE 240: note = Tnp_P3
  SITE 241: note = Tnp_P4
  SITE 254: note = Tnp_P5
MEQFSFFTGIDVSKLWLDIAVFKPGYGIVYQTRVNNNTKEIRSFLKGLKKQLKAEITGNLFCMEHTGKYGHAFLNASILEQAKVWVELPIQIKRSQGLVRGKTDKWDAIRIAQYAYRFADKAVFWMPANKIIQDIKELQVKRNRLVKAHSQLSQENKNDPLFKKPLLALKLGIEAIELKMEQLIEQNELANHQYELLKTVPGIGKQTAMALIIVTNGFTRLTDSRKLSCYSGLAPFPYQSGSSVKGRTKVSKMGDKKLKVLLNLSAWNAIRSITAFKDYFNRKVSEGKHKMSVINAVRNKLIALALAVIKRNSPFEKNYSFS

SEQ ID NO: 12884 - protein, 405 aa, unidentified
  source 1..405: note = protein_c02c3cc
  REGION 11..165: note = RuvC_domain
  SITE 14: note = RuvC_P1
  SITE 62: note = RuvC_P2
  SITE 102: note = RuvC_P3
  SITE 104: note = RuvC_P4
  SITE 107: note = RuvC_P5
  REGION 272..357: note = Tnp_domain
  SITE 280: note = Tnp_P1
  SITE 310: note = Tnp_P2
  SITE 318: note = Tnp_P3
  SITE 319: note = Tnp_P4
  SITE 331: note = Tnp_P5
MNQDSGFDIWCGLDVGKQAHHACALDAAGKRVFDKPLPQDQKRLEELFDKLQSHGRVLVVVDQPNTIGALPIAVARSMGIQVAYLPGLAMRRAADLYPGNAKTDARDAYVIADTARTMLHTLRRVDAGEETLAELKVLVGFDEDLAAEATRLSNRIRGLLTQIHPALERVVGPRLGTKQGLAVVEQLGGPQGMAAASKSKLLRVITKAYPRNAQDFADAITQALTEQTVTVAGTAAAEQVLPKLAASLRATLDQRAELAVQVEKVVDAHPLAEVLTSMPGVGVRTAARILLDVGDASQFPTAGHLAAYAGLAPVTRRSGTSIRGEFPARSGNKHLKRALFLSAFAALKDPTSRDYYDRKRAQGKKHNAALICLSRRRCDVLFAMIKNREPYRAPAPTPSPMPLVA

SEQ ID NO: 12885 - protein, 262 aa, unidentified
  source 1..262: note = protein_a343620
  REGION 1..77: note = RuvC_domain
  SITE 16: note = RuvC_P3
  SITE 18: note = RuvC_P4
  SITE 21: note = RuvC_P5
  REGION 137..229: note = Tnp_domain
  SITE 145: note = Tnp_P1
  SITE 175: note = Tnp_P2
  SITE 183: note = Tnp_P3
  SITE 184: note = Tnp_P4
  SITE 196: note = Tnp_P5
MLISPQFVRPFVKSNKNDFVDAEAICEAASRPSMRFVQPLTESQQAMRALHRVRESLVQDKVKTTNQMHAFLLEFGISVPRGSAVISRLSTILEDNNLPLYLSQLLLKLQQHYHYLVEQIKELEFQLKRKLDEDEVGQRLLSIPCVGTLTASTISTEIGDGKQYASSRDFAAATGLVPRQYSTGGRTTLLGISKRGNKKIRTLLVQCARVFIQKLEHQSGRLANWVRELLCRKSNFVVTCALANKLARIAWALTTRQQTYEA

SEQ ID NO: 12886 - protein, 311 aa, unidentified
  source 1..311: note = protein_305c4ec
  REGION 7..149: note = RuvC_domain
  SITE 10: note = RuvC_P1
  SITE 54: note = RuvC_P2
  SITE 94: note = RuvC_P3
  SITE 96: note = RuvC_P4
  SITE 99: note = RuvC_P5
  REGION 189..273: note = Tnp_domain
  SITE 197: note = Tnp_P1
  SITE 226: note = Tnp_P2
  SITE 234: note = Tnp_P3
  SITE 235: note = Tnp_P4
  SITE 246: note = Tnp_P5
MNSEAYVGVDVSKDLLDVKALPSNEAQQFSNDDPGVKKLTIFAKKIDPRLIVLESTGGLEMLAVSSLIENHLPVVVINPRQVRDFAKANGRLAKTDSIDADTIACFARDIRPEVRPLKDEHTKLLSALNARRRQIVDMLVAEKNRLHTAPKPNRKSIQKHIQWLERALEDINKDIEKRIKKSPTWRENDKILQSFKGVGPVVSATLLCDLPELGTLNRKKIAALVGVAPLNCDSGRFRGRRRIKGGRGNVRRKLYMAAVASLRHNDMIQEFYNKLIAAGKPPKLALTACMRKILTILNAMMKNQTYWIAPY

SEQ ID NO: 12887 - protein, 334 aa, unidentified
  source 1..334: note = protein_b29df0f
  REGION 7..149: note = RuvC_domain
  SITE 10: note = RuvC_P1
  SITE 53: note = RuvC_P2
  SITE 88: note = RuvC_P3
  SITE 90: note = RuvC_P4
  SITE 93: note = RuvC_P5
  REGION 208..295: note = Tnp_domain
  SITE 216: note = Tnp_P1
  SITE 246: note = Tnp_P2
  SITE 254: note = Tnp_P3
  SITE 255: note = Tnp_P4
  SITE 267: note = Tnp_P5
MEQITTVGIDLAKNVFSLHGVDAGGKTVFRRTVRRDRLAETVACLSPCLIGMEACSGAHEWGRRFEQFGHRVRLMAPKFVAPYRKSDKNDGNDAEAVCEAVTRPNMRFVPVKSTEQQALLTLHRVRQGFVVERTAVINRLRGLLSEFGVVLPLRSVSVRRQAAHAAEALPELARRAVGDLLEQLRLLDGRIGGYDKEIEAQARLSEPARRLMKIRGIGATTALAIVATAGNAREFKNGRQFAAWIGLVPGQYSTGGKSRLGHISKRGDAYLRNLLVQGARSVLQTAGAHQDRLSRWALELQQRRGYYRTLVAIANKNARIAWALLAKNDTLRMN

SEQ ID NO: 12888 - protein, 290 aa, unidentified
  source 1..290: note = protein_3bcc335
  REGION 7..97: note = RuvC_domain
  SITE 37: note = RuvC_P3
  SITE 39: note = RuvC_P4
  SITE 42: note = RuvC_P5
  REGION 160..245: note = Tnp_domain
  SITE 168: note = Tnp_P1
  SITE 198: note = Tnp_P2
  SITE 206: note = Tnp_P3
  SITE 207: note = Tnp_P4
  SITE 219: note = Tnp_P5
MEACAGSHHWGRELTRLGHEVRLIAPAYVKPFVKRQKNDAADAEAICEAAQRPTMRFVPVKSEQQQASAAVFRARDLFVRQRTQLIDALRGLLAEHGWVSPKGLFHARAMMAKIEDPSCSLPRGARDAFLALIGSVKVLDEQIIVLDREIAQRAKEDPAARRLMTIPGIGPITATAILALAPPPESFRKGRDFAAWLGLTPLQRSTGGKQKLGQITKMGERTLRRLLIIGSAAVVLHAARRGAPKGSWLEQMMARKPRMLVTVALANKTARIVWAVLASGEDYRAPVAAA

SEQ ID NO: 12889 - protein, 289 aa, unidentified
  source 1..289: note = protein_921f4ea
  REGION 1..98: note = RuvC_domain
  SITE 37: note = RuvC_P3
  SITE 39: note = RuvC_P4
  SITE 42: note = RuvC_P5
  REGION 161..247: note = Tnp_domain
  SITE 169: note = Tnp_P1
  SITE 199: note = Tnp_P2
  SITE 207: note = Tnp_P3
  SITE 208: note = Tnp_P4
  SITE 220: note = Tnp_P5
MEACGGAHYWAREFRKLGHDVGVMAAKFIAPFRKGGKNDNNDAEAICEAVNRKGIWFVPVKTADQQASLCVHRIRQGVIAERTALINQLRGLLMEFGFVIPKGRYPAQKEIPLILEDADNGLPMLARQMIQNIWQKIKQANEEILFYDRELSKQVRQNPNAKRLMTIPGVGEQVATCVTSSVPDPSLFKNARQFAAWIGLVPRQHTTGGHVRLGRITKQGDSYLRTCLVHGARSVIANLKNKQDKVSCWIRQLVERRGYLRAIVAVAARNARMIWTLLVKQEEYKVIPV

SEQ ID NO: 12890 - protein, 326 aa, unidentified
  source 1..326: note = protein_14b89d6
  REGION 8..161: note = RuvC_domain
  SITE 11: note = RuvC_P1
  SITE 60: note = RuvC_P2
  SITE 100: note = RuvC_P3
  SITE 102: note = RuvC_P4
  SITE 105: note = RuvC_P5
  REGION 195..282: note = Tnp_domain
  SITE 203: note = Tnp_P1
  SITE 233: note = Tnp_P2
  SITE 241: note = Tnp_P3
  SITE 242: note = Tnp_P4
  SITE 255: note = Tnp_P5
MEQKLHYIGIDVSRAKLDVDVLRPDGRHRCKKFENTPKGHDALVSWLNGHQVAPAHVCMEATSTYMEDAATCLSDAGFIVSIINPALSKAFAKSEGLRSKTDAVDARMLAEFCRQKRPAAWEAPHPLERRLRALVLRHQALTDMHTQELNRLETARDVQMPSINAHLQWLEAELKRLEKQIKDLTDDDPDMKHRRKLLESIPGIGEKTSAVLLAYIGLKNRFAHARQLAAFAGLTPRIYELGSSVRGASRMSKAGHVSLRRALYMPAMVATSKTEWGRAFRDRLAANGKKGKVILGAMMRKLAQVAYGVLKPGVPFDASRHNPVEA

SEQ ID NO: 12891 - protein, 322 aa, unidentified
  source 1..322: note = protein_8df2473
  REGION 9..156: note = RuvC_domain
  SITE 12: note = RuvC_P1
  SITE 56: note = RuvC_P2
  SITE 96: note = RuvC_P3
  SITE 98: note = RuvC_P4
  SITE 101: note = RuvC_P5
  REGION 195..279: note = Tnp_domain
  SITE 203: note = Tnp_P1
  SITE 232: note = Tnp_P2
  SITE 240: note = Tnp_P3
  SITE 241: note = Tnp_P4
  SITE 252: note = Tnp_P5
MSLPGPLCVGIDVSKATLDIAASSAIEPFSVTNDTDGFDSIIAELRKYSVALVLMEATGGLEAAVACALQAEGFELAVVNPRQARDFARAMGYLAKTDRIDARVLAQMAEVINRHPERSRFIRALPDVERQVLNAMVVRRRQLIAMLVAERNRLYLASPQSRKSINTIIKALEDELVRIDDDMNNHIRSHFKELSERLSSIKGVGAMTVAALLAEVPELGRLSRREISALVGVAPVNRDSGTMRGRRTIFGGRAGVRTALYMAALVATRYNPVIKAFYTRLVAAGKPKKVALVACMRKLLTILNAMLRKNEEWNESYHHVAP

SEQ ID NO: 12892 - protein, 322 aa, unidentified
  source 1..322: note = protein_a585c4d
  REGION 9..157: note = RuvC_domain
  SITE 12: note = RuvC_P1
  SITE 56: note = RuvC_P2
  SITE 96: note = RuvC_P3
  SITE 98: note = RuvC_P4
  SITE 101: note = RuvC_P5
  REGION 195..279: note = Tnp_domain
  SITE 203: note = Tnp_P1
  SITE 232: note = Tnp_P2
  SITE 240: note = Tnp_P3
  SITE 241: note = Tnp_P4
  SITE 252: note = Tnp_P5
MSQPNPLCVGIDVSKASLDIAVNRSVESFTASNDINGFDTIVSVLKQHTVSLVLMEATGGLESAVACSLQAERFDVVVINPRQARDFARAMGYLAKTDRIDAKVLAQMAEVINRHPERERFIRALPDAERQVISAMVVRRRQLITMLVAERNRLHPAHPQSRKSINIIISALEVELERIDENMNKHIQTYFKALADRLSAIKDVGAMTATTLLAEVPELGKLSRREISALVGVAPVNRDSGTLRGRRTIFGGHAGVRPALYMATLVATRFNPVIKTFYNRLLAAGKPKKVALVACMRKPLTILNAMIRKDEEWNNSYHQITP

SEQ ID NO: 12893 - protein, 341 aa, unidentified
  source 1..341: note = protein_ed949f9
  REGION 7..149: note = RuvC_domain
  SITE 10: note = RuvC_P1
  SITE 53: note = RuvC_P2
  SITE 88: note = RuvC_P3
  SITE 90: note = RuvC_P4
  SITE 93: note = RuvC_P5
  REGION 212..298: note = Tnp_domain
  SITE 219: note = Tnp_P1
  SITE 249: note = Tnp_P2
  SITE 257: note = Tnp_P3
  SITE 258: note = Tnp_P4
  SITE 270: note = Tnp_P5
MDEVTIIGVDLAKSVFQVHGATASGEPVFRKKLSRGQFLRFISDQPACVVAMEACASSHYWGREIMKLGHQVRLIPPIYVKPFVKRQKNDANDAEAITEAAVRPTMRFVPVKTAVQQSQSMVFKTRDLLVRQRNQLINALRGHLMEYGIIAPPGRNFVKKLAEQIENPESGLPPIVVELSRVHLDQLSVCTDKIVVMERRLKDEAKSDPETIRLQTAPGIGPVSAMAIKAFAPPLEGFKRGRDFAAWLGLVPVQKSTGGRQILGRTSKMGQRDIRRLLIIGAMTRIRWAIKNGPPKGSWLEQMLERKPRMLVAIALANKTARTIWAMMTKHEDYRDPVAAA

SEQ ID NO: 12894 - protein, 400 aa, unidentified
  source 1..400: note = protein_e8f7625
  REGION 11..168: note = RuvC_domain
  SITE 14: note = RuvC_P1
  SITE 66: note = RuvC_P2
  SITE 106: note = RuvC_P3
  SITE 108: note = RuvC_P4
  SITE 111: note = RuvC_P5
  REGION 274..361: note = Tnp_domain
  SITE 282: note = Tnp_P1
  SITE 313: note = Tnp_P2
  SITE 321: note = Tnp_P3
  SITE 322: note = Tnp_P4
  SITE 334: note = Tnp_P5
MDERKGFRWFLGIDISKETFDACCISGQGEKRFSISASMDRKGFEELIKQLSSLSVPQESVLVGMESTACYHVNLYSFLISLGYTVIVINPLLISNFVKLQLRKTKTDKKDAYVIAQFLLLNRDSLGRTVGSSDFSDIRDLSRQRESLVDQMTSIKIEIKRLLTMTFPELEHIACIFTKSMLRLLCQYPSAVSIRQAKRSKIARILIPGSYGKQTDASVERIVKAAETSIGTASSAKEIILKQKVSLLMQLEQHLQELTDILTEQCQGKMRRDMDILTSMRGIGKKTAMNFLIEVGRDVKEFESHKKVIAMAGLDPALYQSGKIDRKGKITKRGNRHLRRVIWLMTTRVIQFNARFKQYYLKRIQDGLPYKMAVLATAHKLIRIMFAMLTNETQFNESMN

SEQ ID NO: 12895 - protein, 353 aa, unidentified
  source 1..353: note = protein_b7f792e
  REGION 6..167: note = RuvC_domain
  SITE 9: note = RuvC_P1
  SITE 68: note = RuvC_P2
  SITE 106: note = RuvC_P3
  SITE 108: note = RuvC_P4
  SITE 111: note = RuvC_P5
  REGION 212..299: note = Tnp_domain
  SITE 220: note = Tnp_P1
  SITE 250: note = Tnp_P2
  SITE 258: note = Tnp_P3
  SITE 259: note = Tnp_P4
  SITE 272: note = Tnp_P5
MKKIIIGIDISKEKIDASAIDVQNAMQGVQKLGYETFENRPMGFRRMLVWARHLIKGVTLDDVLFCCETTGGYDRCLCDYIYAKDLDIWRESALQIKRSMGVRKGKDDKSDSLMIAEYAMRHMDKAVIYETTCDTVRELKAMLQYRHKLVQEKTEKKVRMSHLGDTAAKSKSVSFILRDARKSIRALEKSIKECERQILELIKGDEELAWNYRHITSVSGMGIVNATALIAYSNNFKGITTANRMASYYGIAAFRDTSGTSVDKKAYVKCYSNSVLKAYLTQAAEWTIRENGIYHPYYLRLKDKGKPYGIIINNARNKLIHLVFSLIHNDMDYEQDHEYIRTMGRAMTEIQLN

SEQ ID NO: 12896 - protein, 320 aa, unidentified
  source 1..320: note = protein_055a497
  REGION 4..150: note = RuvC_domain
  SITE 7: note = RuvC_P1
  SITE 51: note = RuvC_P2
  SITE 91: note = RuvC_P3
  SITE 93: note = RuvC_P4
  SITE 96: note = RuvC_P5
  REGION 190..277: note = Tnp_domain
  SITE 198: note = Tnp_P1
  SITE 228: note = Tnp_P2
  SITE 236: note = Tnp_P3
  SITE 237: note = Tnp_P4
  SITE 250: note = Tnp_P5
MTYIGIDVSKDSFVAAYPTKSGYTTKTFPNTTSGVRKFINSLPADCHCVLEATGNYSMLLLYLLQQANIIVSMENPQKIKHFARAMLSTTKTDEIDAKLIATYGEKMTPVPYKIPSESIIMLKQKRTVLRQLKKQLTATINLQQSLAVLPKQDPASKVAIERTVKFLRKQISKMEEEITNLSNKEFGRQVKLLTSIKGISVTIASALILATGGFTYFSNAKQISRFLGLCPTYQQSGTSVNFKGHINRNGDTHLRSQMYVAAFASIRCNTACRETYERLRARGKSGKLAVVAVANKLIRQAFAVVTNNQPYIDGFVSSYA

SEQ ID NO: 12897 - protein, 344 aa, unidentified
  source 1..344: note = protein_9fabac3
  REGION 7..148: note = RuvC_domain
  SITE 10: note = RuvC_P1
  SITE 53: note = RuvC_P2
  SITE 88: note = RuvC_P3
  SITE 90: note = RuvC_P4
  SITE 93: note = RuvC_P5
  REGION 213..297: note = Tnp_domain
  SITE 221: note = Tnp_P1
  SITE 251: note = Tnp_P2
  SITE 259: note = Tnp_P3
  SITE 260: note = Tnp_P4
  SITE 272: note = Tnp_P5
MSEVTTIGLDIAKSVFHAHGADEHGAMLFSRKLTRAKLLEFFAGQPRCIVALEACGGAYHWARQLQEMGFAVRLIPPAYVKPYVKRHKNDAIDAEAICEAAQRPGMRFVAVKSEKQQAAGLVFRTRDLAVRQRTQLINAIRGHLAEYGWVAPRGKASMTMLADLLGEEEMASSLPKAAVPMFRLMVDTLAELDERIATLDREIARRAKEDEAARRLMTIPGVGPIAATAIVALAPPLETFRKSRDFAAWLGLAPRQHSTGGKQRLGSISKMGERTIRRLLIIGGSSIVRQACRRGAPAGSWLEGMLARKPRMLVSVALANKMARTVWALLTKNENYRAPAAITA

SEQ ID NO: 12898 - protein, 350 aa, unidentified
  source 1..350: note = protein_c3c2e29
  REGION 13..155: note = RuvC_domain
  SITE 16: note = RuvC_P1
  SITE 59: note = RuvC_P2
  SITE 94: note = RuvC_P3
  SITE 96: note = RuvC_P4
  SITE 99: note = RuvC_P5
  REGION 218..304: note = Tnp_domain
  SITE 226: note = Tnp_P1
  SITE 256: note = Tnp_P2
  SITE 264: note = Tnp_P3
  SITE 265: note = Tnp_P4
  SITE 277: note = Tnp_P5
MKAYNSPKDAAVFGIDIGKNVFHVVGLDAVGAPIQKVTFRRETLLQFFARAAPVLVGMEACPGSQWLARKLVTLGHTVRIVPAQFVKPYVKSNKNDIIDAEAIAEAVTRPTMRFVAIRTPEQVDLQALHRVRDRMIAQRTRLISQMRAFCLEYGIAIHQGAGKFKADMPRILADESNDLTPGMRDILSEVLDELADIERRIARVNREIEAVAARSDTARRLMSIPGIGPLTATALLAAAGSGRQFRKARDLAAWLGLVPREYSTGGKTTLLGISKRGNKYLRRMMIHGARSCVVHLDRSRDRLGPWLNALEARMHRNKVTVALAAKIARIVWVVMTKAGASYERRDPAFG

SEQ ID NO: 12899 - protein, 343 aa, unidentified
  source 1..343: note = protein_1b0adcd
  REGION 5..153: note = RuvC_domain
  SITE 8: note = RuvC_P1
  SITE 55: note = RuvC_P2
  SITE 92: note = RuvC_P3
  SITE 94: note = RuvC_P4
  SITE 97: note = RuvC_P5
  REGION 212..300: note = Tnp_domain
  SITE 220: note = Tnp_P1
  SITE 250: note = Tnp_P2
  SITE 258: note = Tnp_P3
  SITE 259: note = Tnp_P4
  SITE 271: note = Tnp_P5
MEYYAGIDVSLKECSVCVVDGTGKIVREIKVASEPEALVRYFDELELPVSRIGLEAGPLSQWLYAGLVASGRDAVLLETRHVKAALSAMTVKTDRKDARGIAQLLRMGWCRQVHAKSVPCKDTRALLVGRKLLQGKLLDVELSIRGILRGYGLMVGEVSRGRFEMRIRELTAGHVTLKTVIGAMLAARTALWNEFTKLHREMLKIARADKICRRLMSTPGVGALVALTYRSAVDDPARFGKSSTVGAYFGLTPRKYQSGETDRDGGVSKVGDTMVRTALFEAAHIMLTRAIRFSSLKRWALDVAQRRGMKRAKVALARKLGVILHRMWVDATEFCWSRTATAA

SEQ ID NO: 12900 - protein, 403 aa, unidentified
  source 1..403: note = protein_aec505d
  REGION 4..160: note = RuvC_domain
  SITE 7: note = RuvC_P1
  SITE 57: note = RuvC_P2
  SITE 97: note = RuvC_P3
  SITE 99: note = RuvC_P4
  SITE 102: note = RuvC_P5
  REGION 274..361: note = Tnp_domain
  SITE 282: note = Tnp_P1
  SITE 312: note = Tnp_P2
  SITE 320: note = Tnp_P3
  SITE 321: note = Tnp_P4
  SITE 334: note = Tnp_P5
MNSIGIDVSKGKSMVAILRPLGEVVQKSVEVIHSTIELERLAYQIIGLGENTRVIMEATGRYHEPVAAALHEMGIYVSILNPILIKQSGGGSVRKVKSDRKDALKIAKYGLDNWKDLREYTPVDAVRQQLKLFSRQYNLYMKTSLALQNNLISLLDKTFPGANELFDSPTRADGHQKWVDFVTLFWHCDCITRSSQQTFTERYQKWCKRKGYHFSNTKAEDAYIASAGHFPTLPKNANTKLLITSAANALTEAQKVLMSIKAEVLRLAKLMPEYNAVIAMYGVGDITAAQLMAELGDVRRFENRGAIVAFAGIDPEVNQSGKIKSESNPATKRGSPHLRKTLYQIATTHLRRSPADEPVYQFLDKKRKEGKPYFVYMTAAANKFLRIYHAKVKEYLNNLDVQS

SEQ ID NO: 12901 - protein, 359 aa, unidentified
  source 1..359: note = protein_ec3c328
  REGION 4..163: note = RuvC_domain
  SITE 7: note = RuvC_P1
  SITE 60: note = RuvC_P2
  SITE 101: note = RuvC_P3
  SITE 103: note = RuvC_P4
  SITE 106: note = RuvC_P5
  REGION 266..353: note = Tnp_domain
  SITE 274: note = Tnp_P1
  SITE 304: note = Tnp_P2
  SITE 312: note = Tnp_P3
  SITE 313: note = Tnp_P4
  SITE 326: note = Tnp_P5
MVCVGIDVAKDNHDCCILCSEGKVLANVFTITNSMEGFQLLLEKIHNCVSSQDSIKVGLEATGHYSYNLLGFLLDSGLPTYVLNPLHTNLYRKSLSLRKTKTDRVDARTIAIMLLSDLGLKPYTDTAYHNEELKSLTRYRFDKVRERAKLKQSVSRLVCILFPELEKLVPNLHMNSIYALLEEFPGAKQTAAANLTRLKTLLSEFSKGHYKRDMAVTIRDAVRASVGSVMSDKSLELRHTIRLIWELDTEITDIEASIQSIMEELHSPITTIPGMGLRMGAMILAEVGDFSRFDSPDKVLAYAGLSPSTYQSGHLNDCYAHMEKLGSRYLRFALYNATKYVCIWDTTFAAYLAKKTSRG

SEQ ID NO: 12902 - protein, 346 aa, unidentified
  source 1..346: note = protein_520d164
  REGION 6..147: note = RuvC_domain
  SITE 9: note = RuvC_P1
  SITE 52: note = RuvC_P2
  SITE 87: note = RuvC_P3
  SITE 89: note = RuvC_P4
  SITE 92: note = RuvC_P5
  REGION 211..297: note = Tnp_domain
  SITE 219: note = Tnp_P1
  SITE 249: note = Tnp_P2
  SITE 257: note = Tnp_P3
  SITE 258: note = Tnp_P4
  SITE 270: note = Tnp_P5
MKITTIGIDLAKNVFQVHGVNEHGKVAVKKQLKREQMAAFFANLPPCLIGMEACGGAHHWARQLQRFGHTTKLMAPQFVKPYVKTNKNDAADAEAICEAVARPNMRFVPVKTTEQQAILSVHRARQNFVKARTALANEIRGLLSEFGLVMPQKIQTIGLRLPEILEDGDNGLPGTFKQLLQRLGEHLKELDRQVAELERDIQIWHRGNEASRRLEKIPGIGPITASALVATVGDAKNFSNGRQLAAWLGLVPRQNSSGGKATLLGISKRGDRYLRTLMIHGARAVLRFAQNKTDATSMWLNEVQTRRHVNVVTVALANKNARIVWALLAHGSEFRAGYTSSESVAV

SEQ ID NO: 12903 - protein, 398 aa, unidentified
  source 1..398: note = protein_a1b100f
  REGION 6..162: note = RuvC_domain
  SITE 9: note = RuvC_P1
  SITE 60: note = RuvC_P2
  SITE 100: note = RuvC_P3
  SITE 102: note = RuvC_P4
  SITE 105: note = RuvC_P5
  REGION 267..354: note = Tnp_domain
  SITE 275: note = Tnp_P1
  SITE 306: note = Tnp_P2
  SITE 314: note = Tnp_P3
  SITE 315: note = Tnp_P4
  SITE 327: note = Tnp_P5
MSRIWAGIDSGKGHHHGLALDAEGKTLLSRRVANDEPELLNLISDVLALADCGQVTWAIDMTGGEPALLLSLLIAHGQEVLYIPGRLVNRASDGYRGEGKTDARDAYVIADQARMRRDLQPIRPGDEAAIELKLLTGRRADLVEDRTRAVNRLRGTLLGMFPALERALDVTNTGPLKLLTEYQTPAALRRVGVARLAKWLANRKVRNARALAETAVEAAGRQYTSVPGEKTIARLVHTLAEGVMALNEQIAEMDKLIEGRFREHELAEIVQSVPGIGAILGAEFLAGVGGNLDGFASPDALAAFAGVAPAPRDSGKVSGNLHRPTVYHRRLQRVFYTSALVSIRCDPNSRTFYDRKRAEGKKHVQAVMALARRRVNVLWALIRDRRCYHVTPPVTETA

SEQ ID NO: 12904 - protein, 343 aa, unidentified
  source 1..343: note = protein_8bddddb
  REGION 6..147: note = RuvC_domain
  SITE 9: note = RuvC_P1
  SITE 52: note = RuvC_P2
  SITE 87: note = RuvC_P3
  SITE 89: note = RuvC_P4
  SITE 92: note = RuvC_P5
  REGION 211..295: note = Tnp_domain
  SITE 219: note = Tnp_P1
  SITE 249: note = Tnp_P2
  SITE 257: note = Tnp_P3
  SITE 258: note = Tnp_P4
  SITE 270: note = Tnp_P5
MSIVILGVDLGKNACSIVGVDATGAVVLRRSMRRQTLIDYVSKLPACIVAMEACCGAHHMGRLFAGHGHEIRLMSPEYVRPYVKAQKNDDRDAEGIAEAASRPTMRFVELKSQDQLDIQTLHRVRSRLVAERRSLINQLRAIMLERGTIFPVGRRKLELGVDALLLQGEAGLSPRIRRLIGDLRTEWRHLDEKIESLNAEFVELARNDAAARRLTSIPGIGVLNATALIAAVGNAGSFAKARDLGAWLGLVPRQHTTGGKPRLLGISKRGNTYLRTLLIHGARASLPSISRSDTPLGRWLKAMLERGVHRNAAVVALANKLARIAWAALRKGATFERSYPVAV

SEQ ID NO: 12905 - protein, 391 aa, unidentified
  source 1..391: note = protein_d0ec7f6
  REGION 9..161: note = RuvC_domain
  SITE 12: note = RuvC_P1
  SITE 60: note = RuvC_P2
  SITE 101: note = RuvC_P3
  SITE 103: note = RuvC_P4
  SITE 106: note = RuvC_P5
  REGION 225..309: note = Tnp_domain
  SITE 232: note = Tnp_P1
  SITE 262: note = Tnp_P2
  SITE 270: note = Tnp_P3
  SITE 271: note = Tnp_P4
  SITE 282: note = Tnp_P5
MATQRRVVIGMDPHKRSVTVEVMEADETIVGHGRFGTDVAGFAQLVGFAAQWPQRVWAVEGCEGIGRHVAQRLIAAGEQVVDVPAKLSARMRMFATGQGRKTDDTDAHSIALVGVRIAGLQAVVADDQLEMLRLLVDRRRRIGQEHVTKICQLHQLLLELVAGGAKKDLSAAQARKILAGIRPKDDVGKLRKRVALELVVDLERIYQRKKQANKELVTLLKTTGTGLLDLHGIGPTGAARLLVEVGDITRFPNRGHFASWTGTAPIDVSSGDKQHHRLSRGGNRQINMVLHMMAVVQLRNPTEGRAYYDRKVADGKSPNEAMRCLKRRLSDIVYRALLDDYVTAKATGPGGHRGATLKSSAAGSHPHTSTSDKSLPGPITTKPTTDLPKAS

SEQ ID NO: 12906 - protein, 355 aa, unidentified
  source 1..355: note = protein_d3b89cf
  REGION 4..155: note = RuvC_domain
  SITE 7: note = RuvC_P1
  SITE 57: note = RuvC_P2
  SITE 97: note = RuvC_P3
  SITE 99: note = RuvC_P4
  SITE 102: note = RuvC_P5
  REGION 221..308: note = Tnp_domain
  SITE 229: note = Tnp_P1
  SITE 259: note = Tnp_P2
  SITE 267: note = Tnp_P3
  SITE 268: note = Tnp_P4
  SITE 280: note = Tnp_P5
MVVVGADVHKKSHTFVAVDERARKIGQFTVRATTPGHREALRWARRQFGDELEWAIEDCRHLSTRLEMDLLAAGQVVVRVPPKMMAHARASARTRGKSDPIDALAVARAALAEPGLPRAVHDEQARELKLLVDRRDTLVKQRTATINSLLWRVHELDPEHEIPAGAMDRIKHQRALQAWLEGRGEGVVVELALDELSDICAVSVRIKDLEKRIAALVSVRAPALVAVPGCAELTAAKLVGEIGGIARFSTDAQLARHAGIAPIPVWSGSTEGRVRMTRSGNRQINCAVHRVAVTQIRLPRSLGRAYYDKKKAQGMSNREALRCLKRHLIRVVFTTLKTTTQPLHQPTTTTVAAAA

SEQ ID NO: 12907 - protein, 343 aa, unidentified
  source 1..343: note = protein_38f3aea
  REGION 6..148: note = RuvC_domain
  SITE 9: note = RuvC_P1
  SITE 52: note = RuvC_P2
  SITE 87: note = RuvC_P3
  SITE 89: note = RuvC_P4
  SITE 92: note = RuvC_P5
  REGION 212..297: note = Tnp_domain
  SITE 220: note = Tnp_P1
  SITE 250: note = Tnp_P2
  SITE 258: note = Tnp_P3
  SITE 259: note = Tnp_P4
  SITE 271: note = Tnp_P5
MQITTVGLDLAKHIFQVHVVDAAGHVVARKRLRRGEVLSFFTGLSPWMIGMEACATAHHWARELIKLGHIVKLMPPAYVKPYVKRQKNDMADAEAICEAVTRPTMRFVPIKSAEQQSVLMLHRVRALLIRQRTMLVHALRGHLAEFGIIVAQGISRIRELIQLLTDESADAALSPLARRALAPLVDQLLDLQPRIRALEAELLIWHRQSQESRRLETIPGVGFITATAIAATVTDPSQFRSGREFAAWLGLTPRPNSSGGKERLGRISKMGNGYLRTLLAVGATAVIRYARTRTAAGTGWINSLLSKKPVRLVSMALANKTARIAWALLARGEVYQSPAPAAG

SEQ ID NO: 12908 - protein, 336 aa, unidentified
  source 1..336: note = protein_132ecd4
  REGION 15..152: note = RuvC_domain
  SITE 18: note = RuvC_P1
  SITE 65: note = RuvC_P2
  SITE 105: note = RuvC_P3
  SITE 107: note = RuvC_P4
  SITE 110: note = RuvC_P5
  REGION 211..294: note = Tnp_domain
  SITE 219: note = Tnp_P1
  SITE 246: note = Tnp_P2
  SITE 254: note = Tnp_P3
  SITE 255: note = Tnp_P4
  SITE 267: note = Tnp_P5
MKTLSISQLKNCTAIGIDVSKKTLDFAGLTAGKTILYQLNNTVESIEKLAEKLVESQYKGKIICESTGHYHLKLVSVFSKHNLNLYVINPLQSSKHSKANIRKTKTDPVDAETLATMCLTERNLPKPTKLSDRNLLITLKVGQIKAIEKLIQKMGSSLRLFEETYQGLGFELDEVQQELATKLAELKSLHKRMLRELEALIVETNESARDTDILASIPGISSTTAALLSQLDRRVKSCHSWVAFVGLDTSIRQSGTWRGKGKLSKRGNTYLRKRIFCSAWGATMHDEHFKAYYDKLRAEGRSYKEALCILAKKQIRIAYHLLSSGEKYDPIKAFGA

SEQ ID NO: 12909 - protein, 400 aa, unidentified
  source 1..400: note = protein_17b9f06
  REGION 4..160: note = RuvC_domain
  SITE 7: note = RuvC_P1
  SITE 57: note = RuvC_P2
  SITE 97: note = RuvC_P3
  SITE 99: note = RuvC_P4
  SITE 102: note = RuvC_P5
  REGION 275..362: note = Tnp_domain
  SITE 283: note = Tnp_P1
  SITE 313: note = Tnp_P2
  SITE 321: note = Tnp_P3
  SITE 322: note = Tnp_P4
  SITE 335: note = Tnp_P5
MNAVGIDVSKGKSTVAVLRPFGEVVASPFDVIHNDNDLKRLVKLIRSLPGESKVVMEYTGTYFEPIAQFLHNNGIFVSVVNALLVHDYGGNSLRKVKTDKKDALKLASYALDRWTELDEYVPADEQRKILKLLNRQYNQSIKIQTMMKNNLISLTDSVFPGINRLFTSLERQSDGHEKWVDFLHAFPHKDCVAKLYLSAFKAKYKSWCSRNKYRYSESKAEKIHSYAKSVIAVLPLNESVKLIVTQVVSQLNTILETAFSIRTEMNRIASSLPEYDTVMSMFGVGKVYGPQLIAEIGDTRRFRNRRAITAFAGLDAPPYQSGQLDVSSRHISKRGSAALRKVLFQITEVFILSKPQDEPVYQFIIKKRSEGKHYYSYRIAAANKFLRIYYAKVNQILNAT

SEQ ID NO: 12910 - protein, 324 aa, unidentified
  source 1..324: note = protein_d22f82e
  REGION 5..159: note = RuvC_domain
  SITE 8: note = RuvC_P1
  SITE 58: note = RuvC_P2
  SITE 98: note = RuvC_P3
  SITE 100: note = RuvC_P4
  SITE 103: note = RuvC_P5
  REGION 196..282: note = Tnp_domain
  SITE 204: note = Tnp_P1
  SITE 234: note = Tnp_P2
  SITE 242: note = Tnp_P3
  SITE 243: note = Tnp_P4
  SITE 255: note = Tnp_P5
MTIVVGIDIAKQTFDIATLQDNGKYRTKAKLSNNAAGFEVFRQWLLKHAEADAWVVMEATGIYHEALAEWLFKLGYRVCVLNPAQMAYYARSQLQRVKTDKVDAKLIADYGRRHQTELRAWQPEQPSIRRLKALVRRLKDLQELEQIEQNRLDVTNEQKVRASIESVLEHLRQQIDETLKAIKQHFDDNDDLRGQRDLLTSIDGIADRTAALVLAELGDIERFESSRAVTAFAGLNPRLQESGMLKGHVRISRMGSVRLRAGLYMPGIVSITRNPAIRALAERMRANGKTGKQIICAAMRKLLCIAYGVLKSGKPFDPLLAIAR

SEQ ID NO: 12911 - protein, 343 aa, unidentified
  source 1..343: note = protein_09b4eda
  REGION 7..149: note = RuvC_domain
  SITE 10: note = RuvC_P1
  SITE 53: note = RuvC_P2
  SITE 88: note = RuvC_P3
  SITE 90: note = RuvC_P4
  SITE 93: note = RuvC_P5
  REGION 212..300: note = Tnp_domain
  SITE 220: note = Tnp_P1
  SITE 250: note = Tnp_P2
  SITE 258: note = Tnp_P3
  SITE 259: note = Tnp_P4
  SITE 271: note = Tnp_P5
MNEVITIGVDLAKNVFQVHGVDAEGGVVFRRQLRRSQMLPFFKKQPLCLVGVEACATSHHWGREIEALGHQVRLMPPRYVKPYVKRNKNDMADAEAICEAVTRPTMRFVKIKTQEQQSVLMLHRTRHLFIRQRTMLINALRAHLAEFGIVAGIGRNGLEKLLEVIEDGADERVPSTARDCLLALRDQLEFVKRQILDADRRVLAWHRSSELSRRLDDIPGVGPLIATALAASVPDPHAFKSGRDLSAWIGLVPKQHSTGGKERLGHISKAGNRYLRSLLVIGALSVIRRAKQLGYSRRPWLMKLLERRSTKVAAIALANKIARTAWAMMAHGTVYQEPVSQAV

SEQ ID NO: 12912 - protein, 394 aa, unidentified
  source 1..394: note = protein_62d7a56
  REGION 4..161: note = RuvC_domain
  SITE 7: note = RuvC_P1
  SITE 60: note = RuvC_P2
  SITE 100: note = RuvC_P3
  SITE 102: note = RuvC_P4
  SITE 105: note = RuvC_P5
  REGION 266..353: note = Tnp_domain
  SITE 274: note = Tnp_P1
  SITE 304: note = Tnp_P2
  SITE 312: note = Tnp_P3
  SITE 313: note = Tnp_P4
  SITE 326: note = Tnp_P5
MFFVGIDVAKRKHEAVVIDDKGRIVQKSFSFPNSLSGYNSLISCVKRITSTRKDIVFGMESTSHYWLALYSHLIKDGYTAHVINPIQSDAFRGLFIRQTKTDPIDAVIIAEVIRFGKYSSTHFPQHKILALREMCRNRLYMVDAISDLKRKTIALIDQVFPEYDQLFSDTFLVSSIEVLYRYPTPKKLLHIRRNTLTNLLIKTSGGHFGSAKADEIIHAAKNTFGIDDPYDVYADLIQTFIKQIKFIQKNVSEIDQKITAIMDEIASPITSIPGIGVTLGAVILSEIGDISRFKSADKLAAFAGIDPSLKQSGNYSSIRNHMSKRGSPYLRRALWMACIPATQVDPMFHAYYLKKRSEGKSHMKTMGHVAKKMICVIYAVLRDNKEYQPVLTAA

SEQ ID NO: 12913 - protein, 349 aa, unidentified
  source 1..349: note = protein_e01d9f3
  REGION 6..147: note = RuvC_domain
  SITE 9: note = RuvC_P1
  SITE 52: note = RuvC_P2
  SITE 87: note = RuvC_P3
  SITE 89: note = RuvC_P4
  SITE 92: note = RuvC_P5
  REGION 211..298: note = Tnp_domain
  SITE 219: note = Tnp_P1
  SITE 249: note = Tnp_P2
  SITE 257: note = Tnp_P3
  SITE 258: note = Tnp_P4
  SITE 270: note = Tnp_P5
MQITTIGIDLAKNVFQVHGADERGKPVLRKQLRREQMVVFFSNLPQCLIGMEACGGAHHWARKLQALGHTVKLMAPQFVKPYVKSNKNDVADAEAICEAVTRPTMRFVPVKTIDQQSLLALHRARQGFIKARTAQANQIRGLLAEFGLVVPQGINNVRSRVHDLIEDASNELSGAFRLLVDRLLGYLKVLDTQVDELEIQINVWHKNSDASMRLEKVPGIGPLTATAIVATVGDAKNFDNGRQLAAWLGLVPRQHSSGGKQTFLGVSKRGDAYVRTLLIHGARSVIYHLSLKPDKLKDSAWISALLTRRNKNVAAVAMANKTARIVWAMLAHERSYEVNVPVAGVATAA

SEQ ID NO: 12914 - protein, 316 aa, unidentified
  source 1..316: note = protein_fdc73d6
  REGION 4..159: note = RuvC_domain
  SITE 7: note = RuvC_P1
  SITE 57: note = RuvC_P2
  SITE 98: note = RuvC_P3
  SITE 100: note = RuvC_P4
  SITE 103: note = RuvC_P5
  REGION 252..316: note = Tnp_domain
  SITE 260: note = Tnp_P1
  SITE 290: note = Tnp_P2
  SITE 298: note = Tnp_P3
  SITE 299: note = Tnp_P4
  SITE 311: note = Tnp_P5
MLYVGIDIAKNKHDVTALNVPGKTVLKPLTFSNNKAGFELLDLSLRQLNQDCLIALENTGHYAFNLLNFLHEQGYKVYTYTPLLIKEFAKSLSLRKTKTNKKDAHGIALKLLSDPNREQFQHDNRQVELKILARHIHRLKKKQSDWKVQYTRCLDIIFPELDKIVGKHSEYTYQLLTRYPNPQKRLEAGFDKLIEIKRLTASKIQDILSVAPRSIGTTSPAREFEIIEIIKHYKRLIDKAETCVNDLMAEFNSVITTGTGIGDRLGAVILAEIRNIHAFDNPAQLQAFAGLDSSIYQSGQIDLAGRMVKRSSPHLR

SEQ ID NO: 12915 - protein, 376 aa, unidentified
  source 1..376: note = protein_ce22de2
  REGION 4..159: note = RuvC_domain
  SITE 7: note = RuvC_P1
  SITE 57: note = RuvC_P2
  SITE 98: note = RuvC_P3
  SITE 100: note = RuvC_P4
  SITE 103: note = RuvC_P5
  REGION 252..338: note = Tnp_domain
  SITE 260: note = Tnp_P1
  SITE 290: note = Tnp_P2
  SITE 298: note = Tnp_P3
  SITE 299: note = Tnp_P4
  SITE 311: note = Tnp_P5
MLYVGIDIAKNKHDVTALNVPGKTVLKPLTFSNNKAGFELLDLSLRQLNQDCLIALENTGHYAFNLLNFLHEQGYKVYTYTPLLIKEFAKSLSLRKTKTNKKDAHGIALKLLSDPNREQFQHDNRQVELKILARHIHRLKKKQSDWKVQYTRCLDIIFPELDKIVGKHSEYTYQLLTRYPNPQKRLEAGFDKLIEIKRLTASKIQDILSVAPRSIGTTSPAREFEIIEIIKHYKRLIDKAETCVNDLMAEFNSVITTVTGIGGRLGAVILAEIRNIHAFDNPAQLQAFAGLDSSIYQSGQIDLAGRMIKRGSPHLRWALIQAAKACARFSPAFKAYLKTKLEQGKHYNVAIIHLAKKLIRTLFYILKKSCHLTNKK

SEQ ID NO: 12916 - protein, 316 aa, unidentified
  source 1..316: note = protein_a636142
  REGION 8..149: note = RuvC_domain
  SITE 11: note = RuvC_P1
  SITE 55: note = RuvC_P2
  SITE 95: note = RuvC_P3
  SITE 97: note = RuvC_P4
  SITE 100: note = RuvC_P5
  REGION 190..275: note = Tnp_domain
  SITE 198: note = Tnp_P1
  SITE 227: note = Tnp_P2
  SITE 235: note = Tnp_P3
  SITE 236: note = Tnp_P4
  SITE 247: note = Tnp_P5
MTQTSTTAGIDTSKSKLDIALHGRPERWQVVNSVSGWRILTDKLTTAGVSRVGIEATGGYERGVVQHLRAAGFTVQVLQPVQVKAFGRVHLRRAKNDVLDAVMIAACTATLDQVRDAPDPRLAELAEQLTFLEQIEEDIKRYKIRLEHIGEPRLRRLMLAEIKRLTTRRLTQIRFIARQLRAHRDLAVRLGLVLSIPGIGERTALAILIRMPELGRISREEAAALAGLAPFDNDSGQHKGQRRIAGGRARLRHSLFAAALPAAFRWNKALIALYQRLTAAGKPHKAALIACARKLLIYANTVVQRGTPWTERPIGV

SEQ ID NO: 12917 - protein, 285 aa, unidentified
  source 1..285: note = protein_27cdf0a
  REGION 7..95: note = RuvC_domain
  SITE 34: note = RuvC_P3
  SITE 36: note = RuvC_P4
  SITE 39: note = RuvC_P5
  REGION 158..245: note = Tnp_domain
  SITE 166: note = Tnp_P1
  SITE 196: note = Tnp_P2
  SITE 204: note = Tnp_P3
  SITE 205: note = Tnp_P4
  SITE 217: note = Tnp_P5
MRECAAWGRAFEQLGHTVKLMHPKYVKPYVKTNKNDRRDAEAICEAVSRPTMRGVSIKTVEQADLQAVHRTRSLFVKHRTAVINQIRGLLAEYGLVIGQSPEKVRPALVRFLDDPASGLTALARETFAELYAQLTELDARIERVTHRVECLFRAHPVCQKLAAVPGIGPLTATALVATVGRPHAFHNGRHLAAWLGLVPRQYSSGGKERLGGISKHGSRYVRTLLIHGARAVVQRAERRTDRQGRWLCALQHRKGTNVAAVALANKNARVIWALLAHDEAYRSPA

SEQ ID NO: 12918 - protein, 409 aa, unidentified
  source 1..409: note = protein_27c107e
  REGION 9..165: note = RuvC_domain
  SITE 12: note = RuvC_P1
  SITE 62: note = RuvC_P2
  SITE 102: note = RuvC_P3
  SITE 104: note = RuvC_P4
  SITE 107: note = RuvC_P5
  REGION 280..368: note = Tnp_domain
  SITE 288: note = Tnp_P1
  SITE 318: note = Tnp_P2
  SITE 326: note = Tnp_P3
  SITE 327: note = Tnp_P4
  SITE 340: note = Tnp_P5
MKTNIITAVGIDVSKVKSTVAARCPGGEVALIPFEVTHDAEGLRKLVATLRELDGEVRIVMEHTGMYWRPVALALREAGFFVSVVNAILIHDFSDNSLRKVKTDRADALKIANYGLTFWSELREYSVEDETRQLLKIQSRLYERTTTTGIMLRNGLISLLDQTFPGANKLFLNEQKNQKGHVKWVDFIIRFWHKECVAALPLHSFADTFQKWCKRTGYRFSTSDAERIHTIARNAVATLPKNDSTKLLITQAANSLNAVYDSLQMLRNEMNRLASLLPEYELVMSMEGVGQITGPQLMAEIGDIRRFSHKGALVAYAGVDAPPYQSGTFDAKNRHVSKRGSPHLRKVLFEIASMILVRSNMDNPIFRFMDKKRAEGKHFYVYTVAGSAKFLRIYYAKVKEYLSAKEAAA

SEQ ID NO: 12919 - protein, 343 aa, unidentified
  source 1..343: note = protein_009e4ae
  REGION 7..149: note = RuvC_domain
  SITE 10: note = RuvC_P1
  SITE 53: note = RuvC_P2
  SITE 88: note = RuvC_P3
  SITE 90: note = RuvC_P4
  SITE 93: note = RuvC_P5
  REGION 211..297: note = Tnp_domain
  SITE 219: note = Tnp_P1
  SITE 249: note = Tnp_P2
  SITE 257: note = Tnp_P3
  SITE 258: note = Tnp_P4
  SITE 270: note = Tnp_P5
MTKDMMIGVDLAKAVFQLHAASMTGQLRFCKKLSRQSFLKFMAEQPRAVVVMEACGSAHYWAREMTSLGHEVKLIAPQYVKPFVKRQKNDAADAEAIVIAAQRPEMRFVEPKSAEQQGRAMLFRARTRLVQQRTELVNMLRAFLYELGHVVPQGINNVSRIAAIITEPNSDLPEIARIECRDLLEQIEAMTVRIATSDRRIKDLAGQADMARRLQTMPGVGPMTALAVEAFAPPMESFKCGRDFAAWLGLVPKQHSSGGKTRHGRVSKAGQSDIRQLLIMGAMSRLNWMGRKSISETSWLARMLARKPRMLVAIALANKMARMIWAMLTKQEDYRTPATAIAA

SEQ ID NO: 12920 - protein, 311 aa, unidentified
  source 1..311: note = protein_0b415e5
  REGION 10..149: note = RuvC_domain
  SITE 13: note = RuvC_P1
  SITE 55: note = RuvC_P2
  SITE 95: note = RuvC_P3
  SITE 97: note = RuvC_P4
  SITE 100: note = RuvC_P5
  REGION 191..277: note = Tnp_domain
  SITE 198: note = Tnp_P1
  SITE 227: note = Tnp_P2
  SITE 235: note = Tnp_P3
  SITE 236: note = Tnp_P4
  SITE 248: note = Tnp_P5
MTILTLQTVVGIDIAKAEIVAYRTDRQATDSIKNDRTALKRWLKTLPAQSAIAVEATNIYHLDTVELAHAMGHQVYVVDAYRVSNYRRGIGQRAKNDPCDARLLARYLTNEQDGLRIWSPPPKAYTSLKSLLHRRATLIQNHAGLMLSWANEPLLKKVQAAQQKAFKQADQAIQKLLRKVSKEAGIEANIDRCKAIEGVGELTATGLATTFMRGDFANGDAFIAFLGMDLTVDDSGKKNGPRYLTKKGDPEVRRLAYNAAMAACRSAKWKPFYEAYLARGFSKTQALVALARKLCRVAFALMKNQSEYRPA

SEQ ID NO: 12921 - protein, 410 aa, unidentified
  source 1..410: note = protein_5de7027
  REGION 11..166: note = RuvC_domain
  SITE 14: note = RuvC_P1
  SITE 63: note = RuvC_P2
  SITE 103: note = RuvC_P3
  SITE 105: note = RuvC_P4
  SITE 108: note = RuvC_P5
  REGION 274..360: note = Tnp_domain
  SITE 282: note = Tnp_P1
  SITE 313: note = Tnp_P2
  SITE 321: note = Tnp_P3
  SITE 322: note = Tnp_P4
MSEDTAEIVYVGLDWATATHAVCVLSAVGKILAQFMIDHTVDGIATLVRKLAKFGEPADVHIGIERPNGRLVDLLLDAGHPVIPVSPNAIKTWRDGEVVSGAKSDAGDALVIAEYLRLRHHRLHPVAPYSGHTKALRTVVRTRDDLVAMRVSATNQLSALLDDHWPGAKAIFADVQSPISLAFLHQYPTAVSAARLGEKRLAAFLIKHGYSGRRPAGELLGRLRAAPAGTSDPILSIAVADAVTALVTVLDTLNKVGKTLDRCVIARLGEHPDAEIFTSLPRSGQINAAQVLAEWGDSRAAYDGPDAVAALAGATPVTKASGKQHAVHFRWACNKRFRRALTTFADNSRHQSPWAADIYTRARARGHDHPHAIRILARAWIRVIYRCWHDHRPYNPNLHGGTQRLLPKTA

SEQ ID NO: 12922 - protein, 328 aa, unidentified
  source 1..328: note = protein_a888c79
  REGION 8..159: note = RuvC_domain
  SITE 11: note = RuvC_P1
  SITE 60: note = RuvC_P2
  SITE 100: note = RuvC_P3
  SITE 102: note = RuvC_P4
  SITE 105: note = RuvC_P5
  REGION 201..288: note = Tnp_domain
  SITE 209: note = Tnp_P1
  SITE 239: note = Tnp_P2
  SITE 247: note = Tnp_P3
  SITE 248: note = Tnp_P4
  SITE 261: note = Tnp_P5
MNSYKIVIGVDVSKNSFTATVLYDNKKETFEVKSDPVEFEMKVKPYLKKFKKSDMLIIMEHTGVYHLKLANYLYENDYKVAVVNPFSIKKFMEAKMTRVKTDKADSFFIAEYGRTFFDGELYKPKSDVEKEIEVKLKILEDLQQQLTMLRNKRESLSHVPMKKLKENLEYYDELIRKIEKNIKELEKEIKELSKKNYQEEYKLLKSIPGISDRTIGMIISVYGNFERFKSVKDISSFIGINPSPYESAACVKKSGWIKKMGNPYARKILYMAALSAIRFNKYCRELYERLVSKGKAKKLALVAVAHKLLRQAYGVLKNKRPFDENFCT

SEQ ID NO: 12923 - protein, 392 aa, unidentified
  source 1..392: note = protein_7c592c5
  REGION 4..161: note = RuvC_domain
  SITE 7: note = RuvC_P1
  SITE 60: note = RuvC_P2
  SITE 100: note = RuvC_P3
  SITE 102: note = RuvC_P4
  SITE 105: note = RuvC_P5
  REGION 267..354: note = Tnp_domain
  SITE 275: note = Tnp_P1
  SITE 305: note = Tnp_P2
  SITE 313: note = Tnp_P3
  SITE 314: note = Tnp_P4
  SITE 327: note = Tnp_P5
MFFVGIDVAKRSHQAAVTDISGNIIVKPFNFRNSSDGFAKFLSALTNNSIEKDNCTIGLESTGHYWYPLYFFLIENGLSVKVFNPIQTAAFREITIRKVKNDNLDSLLIADFTRFGRYSETYIPDETMLALKNLTRFRLSISDICGSLKKKVIAILDQVFPEYTNVFSDVFGKTSKQLLEQFSTPDEFMEISTTKLANLLNKVSRGRNGREKAELLKTAAKTSIGISYALDSFSFEIKQLVAQIEFMENQISEVDAEMAKLLSQTEYGVITTISGIGPTLGSVIVSEIGDINRFENSSKLVAYAGLDASVKQSGEFNSSKNKISKRGSPYLRRALWMAAFMSLQCDPALYDYYSKLRARGKSHRLATTAVARKLCIIVWAIMKSKQPYSPKV

SEQ ID NO: 12924 - protein, 310 aa, unidentified
  source 1..310: note = protein_1bd7dbb
  REGION 6..149: note = RuvC_domain
  SITE 9: note = RuvC_P1
  SITE 53: note = RuvC_P2
  SITE 93: note = RuvC_P3
  SITE 95: note = RuvC_P4
  SITE 98: note = RuvC_P5
  REGION 187..271: note = Tnp_domain
  SITE 195: note = Tnp_P1
  SITE 224: note = Tnp_P2
  SITE 232: note = Tnp_P3
  SITE 233: note = Tnp_P4
  SITE 244: note = Tnp_P5
MFSYPAGIDVSKDSLEARVNLIDVGVSCANAEDDFPGLIGWLLLHQVGRVLLEATGGYERKVMKALQAAGLNVICINPRRAKSFSTAMGQQAKTDPIDAKSLAQFAAVLDSPNSRITSPKHDELRALVQQRENFIQQRDDDKRRLKTASCDVVKPALQSHIDYLIKAVNAIDQLIRQSANVLDREKVERLCSVKGIGLVTAASLMAYLPELGEVGKRPIAALAGLAPYNNDSGKHIGARHIRGGRFSARRSLYMACWVVIRDQPEFQARYKALRGKGKCAKVALIACMRVLLIRLNAMLRDRTEWKEHAA

SEQ ID NO: 12925 - protein, 348 aa, unidentified
  source 1..348: note = protein_e682f6f
  REGION 7..145: note = RuvC_domain
  SITE 10: note = RuvC_P1
  SITE 49: note = RuvC_P2
  SITE 84: note = RuvC_P3
  SITE 86: note = RuvC_P4
  SITE 89: note = RuvC_P5
  REGION 208..295: note = Tnp_domain
  SITE 216: note = Tnp_P1
  SITE 246: note = Tnp_P2
  SITE 254: note = Tnp_P3
  SITE 255: note = Tnp_P4
  SITE 267: note = Tnp_P5
MQSISAIGLDIAKSVFQVHGVDATGQVVLRRQLKRPFFQKLPLCLVGIEACASSHYWSRELQALGHTVRLMPPTYVKPYVKRQKNDTTDAEAICEAVTRPNMRFVPTKTVEQQSCLMLHRARHLFIRQQTAVINSIRAYLAELGIVAPVGRRGVEQLLDVVADTADDRLPEVARACLAALGSQLRALKVQILEFDRRIIAWHRSSATSKRLDAIPGVGPALATALVASIADPKTFRSGRDFSAWVGLVPKQNSSGGKDRLGSISKQGDRYLRSLFTAGALAVIRYAKIHGTGHRPWLTGLLARRPTKIAAIALANKLARMAWAMMARNERYKELPLSRRKRDHTGHPA

SEQ ID NO: 12926 - protein, 323 aa, unidentified
  source 1..323: note = protein_aed56ea
  REGION 8..150: note = RuvC_domain
  SITE 11: note = RuvC_P1
  SITE 52: note = RuvC_P2
  SITE 92: note = RuvC_P3
  SITE 94: note = RuvC_P4
  SITE 97: note = RuvC_P5
  REGION 191..278: note = Tnp_domain
  SITE 199: note = Tnp_P1
  SITE 229: note = Tnp_P2
  SITE 237: note = Tnp_P3
  SITE 238: note = Tnp_P4
  SITE 251: note = Tnp_P5
MDKYSKIHGVDISKDFFDVIDDLGNHYQFDNSLNGFRKYLKTLDAESLVVMEATGYYHYLLAQFLHDSDIAVSVVNPLSVKRFLQMKLTKVKTDKSDAMGIRDYAMVNEVPLYDGKGAVQAECLQLLALMDIYLKQRTQVKNKIHGEKVLGTPSKAVFGSLKRTLKMLDRELVSLNERLLSLVKQDQQVQLTNLKSIPGLGDRTSALLIVLTEGFTKFDNASQLRNYAGITPTIRRSGSSIRGRSRISKVGNRKLRNHLFLCAFSASRHNKACRELYERITAKGKSKKLALIAVSNKLLKQAFAIAKSGLPYDDGYVSRLVKE

SEQ ID NO: 12927 - protein, 396 aa, unidentified
  source 1..396: note = protein_53fd254
  REGION 19..167: note = RuvC_domain
  SITE 22: note = RuvC_P1
  SITE 73: note = RuvC_P2
  SITE 106: note = RuvC_P3
  SITE 108: note = RuvC_P4
  SITE 111: note = RuvC_P5
  REGION 234..319: note = Tnp_domain
  SITE 241: note = Tnp_P1
  SITE 271: note = Tnp_P2
  SITE 279: note = Tnp_P3
  SITE 280: note = Tnp_P4
  SITE 292: note = Tnp_P5
MLRTNLQKQNDFTGQDFYIGLDVHKQSWYVTIRSLGIEVGHFSQVPDAAALHQYLQRNFPGGDYHSAYEAGFCGTGAHEQLCKAGLDNIIVHAADVPSTDKQKKNKTDLRDSRAIADHLERGNLHGIYVLSQEQQELRSLFRLRECKVKDTTRANNRLKSFLMYYSILIPESVSKRGDLTGRALTWLDMELRSAAGTIALQQYVGELKYQRKQLFELTKTLREQVMAYDMQTYINLITVPGMGSITAMGLIAEIGDFRRFEDPDDYASLLGLCPWEDSSGDCIKTKGMQPRCNSHLRPLLIEASWHSIRKSRNLFAYYSKHSGGKNGKKAIVKVARKLAMIARGVAMSGQPYQEDYQKNKDNQQPVKKVKAERFSSGITKQHINKQSSYGLLPMPG

SEQ ID NO: 12928 - protein, 400 aa, unidentified
  source 1..400: note = protein_eb98c2e
  REGION 10..164: note = RuvC_domain
  SITE 13: note = RuvC_P1
  SITE 62: note = RuvC_P2
  SITE 102: note = RuvC_P3
  SITE 104: note = RuvC_P4
  SITE 107: note = RuvC_P5
  REGION 270..356: note = Tnp_domain
  SITE 278: note = Tnp_P1
  SITE 308: note = Tnp_P2
  SITE 316: note = Tnp_P3
  SITE 317: note = Tnp_P4
  SITE 329: note = Tnp_P5
MNEQRTRAWAGIDAGKAHHWAAVVDDTGTTLWSRKIVNDEAAILDALADILGLAGQVSWAIDIAGTASALLLALLAAHGQQAVYVPGRTVNRMTGAYRGEAKTDARDAYVIAETSRVRKDFAMIDVPAQLAADLGLLTAHRSDLVADRVRLINRLRDVLTGVSPALERAFDYSAHKGALVLLTGYQTPAAIRRIGQTRLTAWLVNRKVRGGEAVAVTALSAARSQHTTLPGEHVAATIVAELARQILALDDRLTAIETQIRDTFRAHPQAEIIESMPGIGPILGAELVAAAGDLAAYADAGRLASAAGLVPVPRDSGRRTGNLHRPKRYSRRLRRVFYLSAQSSIIRDGPNRDFYLKKRGQGLKHVQAVIALARRRVDVLWALLRDNRVFTPAQPVTQSA

SEQ ID NO: 12929 - protein, 322 aa, unidentified
  source 1..322: note = protein_fb78ba1
  REGION 9..157: note = RuvC_domain
  SITE 12: note = RuvC_P1
  SITE 56: note = RuvC_P2
  SITE 96: note = RuvC_P3
  SITE 98: note = RuvC_P4
  SITE 101: note = RuvC_P5
  REGION 195..279: note = Tnp_domain
  SITE 203: note = Tnp_P1
  SITE 232: note = Tnp_P2
  SITE 240: note = Tnp_P3
  SITE 241: note = Tnp_P4
  SITE 252: note = Tnp_P5
MSQLNPICVGIDVSKASLDIAGTNNIEQFRVSNNPDGFDTIIYQLKKNNIALILMEATGGLEAAIACALQAEGFDVAVINPRQARDFARSMGYLAKTDRIDARVLAQMADVINRHPERSRFIQAIPDAERQILAAMVVRRRQLIAMLVAERNRMHPSHPQNRKSISNIINALENELKRIDEDMHKHITDHFNELAERLSTIKGIGMMTAATLLAEVPELGKLSRREISALVGVAPVNRDSGTMRGRRTIFGGRAGVRTSLYMAALVATRFNPVIKAFYTRLVAAGKAKKVALVACMRKLLTILNAILRKNQEWDESYHNVAP

SEQ ID NO: 12930 - protein, 403 aa, unidentified
  source 1..403: note = protein_edcb35f
  REGION 4..160: note = RuvC_domain
  SITE 7: note = RuvC_P1
  SITE 57: note = RuvC_P2
  SITE 97: note = RuvC_P3
  SITE 99: note = RuvC_P4
  SITE 102: note = RuvC_P5
  REGION 276..362: note = Tnp_domain
  SITE 283: note = Tnp_P1
  SITE 313: note = Tnp_P2
  SITE 321: note = Tnp_P3
  SITE 322: note = Tnp_P4
  SITE 335: note = Tnp_P5
MNAVGIDISKGKCMVAILRPFGEVVASPFEIQHTAHELRRLVERLKSLDGETRIVMEHTGNYYLPVARHLHEAGLYVSVVNAILVHDYGQNSLRRVKTDKIDAVKIASYALSHWLDLPQYAPEEDVRHMLKTCARQCNQYVKQSVMLKNSLIALLDQTFPSVNMLFSSPPRKGDGHEKWIDFVGKFWHFECVNSLSKNVFTQRYQKWCKRTGYNFLSTKAAAIYDFACIQVSTLPRSTFAKQLITQAVSQLNSLSETLALIRQQMLSLASGLPEFPVVMAMQGVGNVLGPQLMAEIGDVRRFNRKQSLVAFAGIDAPPFQSGAFEAQSTGISKRGSSSLRKTLFQVMDCLLKHAPSHDAVFQYLDKKRGEGKHYYVYMMAGANKFLRIYYARVKEHLGSLAVQ

SEQ ID NO: 12931 - protein, 352 aa, unidentified
  source 1..352: note = protein_7765657
  REGION 12..167: note = RuvC_domain
  SITE 15: note = RuvC_P1
  SITE 68: note = RuvC_P2
  SITE 104: note = RuvC_P3
  SITE 106: note = RuvC_P4
  SITE 109: note = RuvC_P5
  REGION 233..318: note = Tnp_domain
  SITE 241: note = Tnp_P1
  SITE 271: note = Tnp_P2
  SITE 279: note = Tnp_P3
  SITE 280: note = Tnp_P4
  SITE 291: note = Tnp_P5
MAIVANTFAYVIGADTHSRTHTLAVLDAGTGARLDTQTFPTTPAGLSRAVAWIVRRTSGLADVLVAIEGVGSYGATLARACQEAGYRVVESFPTLARERRGRGKSDEIDAELIARSVLRVDVDKLRDPRQDEGVRAALRVLISARDLINLERTRSINALTALLRTVDLGIDARASLSKAQFAMIGSWRARQEVLASATARREAVRLARRVTACDDELVANRAEIAALVAASEGAFLLDEPGIGAINAAVIIVAWSHPGRVRSEAAFAVLAGVSPVPASSGNTTRHRLNRGGDRRLNRALSSIALTRMSHHPPTRAYVDRRRAQGRTTKEIRRSLKRYIARQVYRRLALTTRT

SEQ ID NO: 12932 - protein, 346 aa, unidentified
  source 1..346: note = protein_89cfb51
  REGION 6..148: note = RuvC_domain
  SITE 9: note = RuvC_P1
  SITE 52: note = RuvC_P2
  SITE 87: note = RuvC_P3
  SITE 89: note = RuvC_P4
  SITE 92: note = RuvC_P5
  REGION 211..299: note = Tnp_domain
  SITE 219: note = Tnp_P1
  SITE 249: note = Tnp_P2
  SITE 257: note = Tnp_P3
  SITE 258: note = Tnp_P4
  SITE 270: note = Tnp_P5
MEIKTIGIDLAKNVFQVHAVDSRGKVVLRKQFRRDRVATFFANLSPCLIGMEACGSAHHWARKLESLGHTVKLMAPQFVKPYVKSNKNDAADAEAICEAVSRPSMRFVPVKNVEQQAVLSLHRVRQGFVKARTAQANQIRGLLSEFGIVVPQGIAYVTQRVPQLIEDASHELPGSFRCLIDRLLEHLRLLHHQVEEIEAQIQAWHRENVLSQRVEKIPGIGYLTASALVATIGDAKNFDNGRQLAAWLGLVPRQHSSGGKQNLLGMSKRGDAYLRTLMIHGAQSVIYRVVQKADPRSWAFSVAIRRNKNVAAVALANKSARIVWALLAHDRSFRPDYAVASAAVAV

SEQ ID NO: 12933 - protein, 342 aa, unidentified
  source 1..342: note = protein_bdbca4f
  REGION 7..150: note = RuvC_domain
  SITE 10: note = RuvC_P1
  SITE 53: note = RuvC_P2
  SITE 89: note = RuvC_P3
  SITE 91: note = RuvC_P4
  SITE 94: note = RuvC_P5
  REGION 213..298: note = Tnp_domain
  SITE 221: note = Tnp_P1
  SITE 251: note = Tnp_P2
  SITE 259: note = Tnp_P3
  SITE 260: note = Tnp_P4
  SITE 272: note = Tnp_P5
MTEVSTIGFDLAKRVFQVHGVDGDGAVTIRRQLRRSEVVTFFAKLSPCVVGMEACASAHYWARTLAKLGHEVRLIPPSRVKPYVKRGRKNDAADAAAIAEAVTRPHMEFVPVKSEEAQAVLMLHRTRRLLVTQRTMLGNALRSHFAEYGIIEPEGQGGLARLVVCALDAPDAALPQAAREAMAMLAAHVRETDSKIDALDHEILRWHRNDADSQRVASIPGIGPLIASAIVAAMGDPKRFKTGRDFAAWLGLVPSQNSTGGKTVLGPITKAGDRYLRSLLVVGATGTLWRRRKEQGTWLAGMMARGKTARQISVALANKMARTAWAILAKGGLYHDAAAQAA

SEQ ID NO: 12934 - protein, 411 aa, unidentified
  source 1..411: note = protein_a4ef575
  REGION 16..170: note = RuvC_domain
  SITE 19: note = RuvC_P1
  SITE 67: note = RuvC_P2
  SITE 107: note = RuvC_P3
  SITE 109: note = RuvC_P4
  SITE 112: note = RuvC_P5
  REGION 277..362: note = Tnp_domain
  SITE 285: note = Tnp_P1
  SITE 315: note = Tnp_P2
  SITE 323: note = Tnp_P3
  SITE 324: note = Tnp_P4
  SITE 336: note = Tnp_P5
MSEPDKISDHGYVVFCGLDVGKAVHHACALDPSGKRLHDKALPNDEAALVEVFEKLRVHGRVLVIVDQPASIGALPIAVARSLGIDLAYLPGLAMRRIADLHPGEGKTDARDAYVIADAARTMPHTLRRVGTDDDTLAELTVLAGYDDDLAAQSTRLTNRLRDALLHIHPALERLVGPRLERGGVLDLIVAAPTPQALRDLGVDGITAIMRARSPRLAKTIPVKILAALDAQTVVVAGTPAFGRVIGGVAAQLRDVRAERDTLAAELEARLEAHPLAEVLTSMPGNGFRTALKILTIVGDGAAFPTAGHLAAYAGLAPVTRRSGSSIKGETRSQRGNHALKSALFLSAFASLADPTSRAYYDRKRAQGKRHNAALICLARRRVDVIYAMLRDRKPYQQPMPTERDTSPAAA

SEQ ID NO: 12935 - protein, 321 aa, unidentified
  source 1..321: note = protein_87e498d
  REGION 10..151: note = RuvC_domain
  SITE 13: note = RuvC_P1
  SITE 55: note = RuvC_P2
  SITE 95: note = RuvC_P3
  SITE 97: note = RuvC_P4
  SITE 100: note = RuvC_P5
  REGION 190..276: note = Tnp_domain
  SITE 198: note = Tnp_P1
  SITE 227: note = Tnp_P2
  SITE 235: note = Tnp_P3
  SITE 236: note = Tnp_P4
  SITE 248: note = Tnp_P5
MAMSATPIEAGVDTAKDELVIQSAPSTKPFAIPNTPKAIKTWLKTLPKGSALAIEATSTYHMEMAEQAHAAGFAVYVIDGLRLSKYRESVAVRAKTDAHDAALLARFLSNERGSLKAWVPPPAGHREFQMLLRRRAKLVAVRGMLRMSLSGDTMFASALKSLEETVKRVELLLEKQLRRVIKTAGLSDQLRRVQKLPGVGFLTAAGLVMSFMRGEFKNSDAFVAYLGMDVTVAQSGKWAGRGRLSKRGDSEVRRLLYNASMSGSRTKTWSQFYAHHQARGKKTTQALVILARRLARLAFGLMRHQADWKPEIYTGGAKPAS

SEQ ID NO: 12936 - protein, 341 aa, unidentified
  source 1..341: note = protein_f034bdb
  REGION 6..148: note = RuvC_domain
  SITE 9: note = RuvC_P1
  SITE 52: note = RuvC_P2
  SITE 87: note = RuvC_P3
  SITE 89: note = RuvC_P4
  SITE 92: note = RuvC_P5
  REGION 211..298: note = Tnp_domain
  SITE 219: note = Tnp_P1
  SITE 249: note = Tnp_P2
  SITE 257: note = Tnp_P3
  SITE 258: note = Tnp_P4
  SITE 270: note = Tnp_P5
MNIKRIGIDLAKQVFQLHGVDHQGKPVLRKQLRRNQMLSYFAKLSPCLIGIEACSSSHYWARELQKLGHTVKLVAPQFVKPYVKGNKNDANDAEAICEAVARPNMRFVAIKTIEQQDIQAVHRIRSGLVQQRTAKVNQIRGLLAEYGIVVERRVEKLRKALPLLLEDAENGLSFDFRALLQSLQQDLIALDDRASEMDKKIQQLANSNSTAKRLQQIPGIGPITSTALVCAIGDGKQFKRGRDLAAWLGLTPRQHSSGGKDRLLGISKRGDTYIRTLLIHGARAVLKVADKKDDPRSRWIQSLCSRRNKNIAAVALANKNARIVWALLTQETDFLPEGKPA

SEQ ID NO: 12937 - protein, 433 aa, unidentified
  source 1..433: note = protein_510fa1c
  REGION 14..173: note = RuvC_domain
  SITE 17: note = RuvC_P1
  SITE 69: note = RuvC_P2
  SITE 109: note = RuvC_P3
  SITE 111: note = RuvC_P4
  SITE 114: note = RuvC_P5
  REGION 287..374: note = Tnp_domain
  SITE 295: note = Tnp_P1
  SITE 325: note = Tnp_P2
  SITE 333: note = Tnp_P3
  SITE 334: note = Tnp_P4
  SITE 347: note = Tnp_P5
MELSECDETMDVSVGINVSKGHSMVSFFRAGDKSPSKPFMIDHDLPGLKFLERKIDQHKARGTLRVYMKCTGRYHLGLADGLQEDGYTVYTVNPKLLADFHDDSLRKPKTDPIDAQKIARYGIQYWNKERRPFSQMDSKRECLKECERQYKLYTDECVTFTNNLLSLTDLTCPGVNKLFSGNTNQNGHLKWVDFVNTWWHVDCIRKISMNAFSTRYCKWCQKHGYEFNKDKAEDIMSWAKKALVAMPKSTDIKKTIQIAVNAIDELLETIQDTKNHMNQLASQLPEYPVVMKMDGVGEITGPIIMGELGDVTRFTKRSQITAFAGVDPQKHESGDDKPKSSRATKIGSPELRRALYLVMTSKLARKPQGDRVYDFIVKKRGEGKKYLVYMTAGANKFLRIYYGTVRDYMQNKQNSSFIQDKAPAGQVSVSKTA

SEQ ID NO: 12938 - protein, 404 aa, unidentified
  source 1..404: note = protein_c64f0a5
  REGION 4..159: note = RuvC_domain
  SITE 7: note = RuvC_P1
  SITE 58: note = RuvC_P2
  SITE 96: note = RuvC_P3
  SITE 98: note = RuvC_P4
  SITE 101: note = RuvC_P5
  REGION 267..353: note = Tnp_domain
  SITE 275: note = Tnp_P1
  SITE 306: note = Tnp_P2
  SITE 314: note = Tnp_P3
  SITE 315: note = Tnp_P4
MFYAGIDWADQKHDALVLDEANRKLGAIRVAHSPEGLAKLDAWLAQLLGQQTKDQMACIIETTHGLLIAFLLEHDWPVYPVNPRTVDRKRSASGAKTDTIDAYLLAKTGRADLADLHRLTPDSEQVAELKLLTRDQSALIQMQTRLVNQLTACLKAYYPVALELFTKVQQKSTLLFLQTYPTPQAAMLASVEQITTTLKQARHPQAKHVAQQIAERLKQPYLVANAVTTRTKSRLMLVLVSQLVPLLEQIAQYDKEINALFLTHPDHALFESLPRAGQRLAPRLLAEIGDDRSRYQQASSLQALGGTSPVLFQSGMYSKAHRRLGCIKPLRNALQQFAWQSTQSEPWARDYYQRKRAEGKSHTVAVRALANVWVRIIFAMWQHHQCYQTATFEQAQHQHARRAA

SEQ ID NO: 12939 - protein, 333 aa, unidentified
  source 1..333: note = protein_9263cc3
  REGION 7..145: note = RuvC_domain
  SITE 10: note = RuvC_P1
  SITE 53: note = RuvC_P2
  SITE 84: note = RuvC_P3
  SITE 86: note = RuvC_P4
  SITE 89: note = RuvC_P5
  REGION 205..290: note = Tnp_domain
  SITE 213: note = Tnp_P1
  SITE 243: note = Tnp_P2
  SITE 251: note = Tnp_P3
  SITE 252: note = Tnp_P4
  SITE 264: note = Tnp_P5
MNEVITIGIDLAKSVFQLHGVDAEGRPSLRRQLRRSQMLEFFQRQPACLIGMEACASAHYWARELIKLGHEVRLMQPSYVKRGKTDAADAEAICEAVSRPSMRFVPVKSEDTQARLMTHKAREFLVRQQTQVVNAMRAHLGEFGIVVPKGFHNVERLIAACDRADLPAPARKALNLLADQLVHTQKKIEGLTADIRADARGNEDAQRLQTIPGIGPITASALVSALPDIADFKSGRDISAWLGLTPRPHSTGGKERLGRISKMGNRYLRRLLYLGAIAQVSARRRGEPGEDWLWKIIQRKKPKQAAIALANRIARTAYALMKKKTEFRAATTA

SEQ ID NO: 12940 - protein, 403 aa, unidentified
  source 1..403: note = protein_53b837f
  REGION 4..160: note = RuvC_domain
  SITE 7: note = RuvC_P1
  SITE 59: note = RuvC_P2
  SITE 99: note = RuvC_P3
  SITE 101: note = RuvC_P4
  SITE 104: note = RuvC_P5
  REGION 273..360: note = Tnp_domain
  SITE 281: note = Tnp_P1
  SITE 312: note = Tnp_P2
  SITE 320: note = Tnp_P3
  SITE 321: note = Tnp_P4
  SITE 333: note = Tnp_P5
MFCLGIDVSKKSCRYLILNEEGQKLKSFSLDNTHEAFQNLLERLKGLSVPKEKLLIGLEASGGFWENLYSHLKENGFSIVLLNPYHTNKFREALAKKAKTDDIDALVIAQLLRTGEYVQSQVAEELTQSLRELTKLRYELVKERKNYQRQVFSLLSIIFPEHEKTALKNPFSVASLAILQAFPTAKDLAQAKPKQIEKIVRSIKGNNFDLKEIESLLRTAQNSIYSGRAKDARGTSLRILLRHIDTLSSSIEELETEIKQLLSPQEPKDSFPGENLLTIPGVGEKTLAAVLSYLGADGSNFSDSTKAIGYVGFFPKIYQSGQSLWENKICKRGPKLLRWALYMAAVACLRHNPEMRNLYHKKLSQGKTEKQALICIAKKLLEIMLAMLKSGEAYDPLRVYINC

SEQ ID NO: 12941 - protein, 305 aa, unidentified
  source 1..305: note = protein_9abdce6
  REGION 6..147: note = RuvC_domain
  SITE 9: note = RuvC_P1
  SITE 52: note = RuvC_P2
  SITE 87: note = RuvC_P3
  SITE 89: note = RuvC_P4
  SITE 92: note = RuvC_P5
  REGION 211..297: note = Tnp_domain
  SITE 219: note = Tnp_P1
  SITE 249: note = Tnp_P2
  SITE 257: note = Tnp_P3
  SITE 258: note = Tnp_P4
  SITE 270: note = Tnp_P5
MRIASIGIDLGKTTFHLVALGERSKVLVRKKFSRAQLLAYTAKLPSSLIGLEACAGAHFLGAALREQGHQVRLIAGQFVKPYRKSNKNDFLDAEAIAEAVSKQNMRFVPIKTEEQLDVQATHRVRDRLVQRRTALINEIRGFLLERGIIFAAKPIHLRKHLPAVMEDAEQSLSPRLRWLLERMWQEWKQLEMDIQAITDELERISHDNALCRRLRQIPGFGPLVSTATVAAIGNGAAFRRGRDFAAWVGVVPRQYSTGGKQRLFGISKRGNVYLRRMLIHGARAVLLRVKYDTGGFGQWVHRHRQ

SEQ ID NO: 12942 - protein, 339 aa, unidentified
  source 1..339: note = protein_a8f3afa
  REGION 6..147: note = RuvC_domain
  SITE 9: note = RuvC_P1
  SITE 52: note = RuvC_P2
  SITE 87: note = RuvC_P3
  SITE 89: note = RuvC_P4
  SITE 92: note = RuvC_P5
  REGION 207..293: note = Tnp_domain
  SITE 215: note = Tnp_P1
  SITE 245: note = Tnp_P2
  SITE 253: note = Tnp_P3
  SITE 254: note = Tnp_P4
  SITE 266: note = Tnp_P5
MQIVRIGLDLAKYVLEVHGVDCLGKVVVRKTLRRDAVARFFANLPRCLVGMEASNGAHYWARVLSDLGHEVRLISPQFVTPYVKSNKNDRNDAEAICEAVGRPTMRFVLPKSADQLAIQAVHRIRSRLVADRVKLVNQVRGLLAEHGVVIARDIPRLRRVLADSDDGLNELVRVMIREVQTELVELDQRIASYDRRVRELFRNSELCQRLGKIEGIGPVTATALIAAVGDRTCFKNGRQFAAWLGLVPKQRSSGGRARLFGISKRGDRYLRTLMIHGARAALGKAAGKQDPRSLWLSKLRQRRHPNVAAVALANKNARIVWAMLSGGTVYEHAPSVKAA

SEQ ID NO: 12943 - protein, 366 aa, unidentified
  source 1..366: note = protein_3a61d31
  REGION 22..164: note = RuvC_domain
  SITE 69: note = RuvC_P2
  SITE 104: note = RuvC_P3
  SITE 106: note = RuvC_P4
  SITE 109: note = RuvC_P5
  REGION 228..313: note = Tnp_domain
  SITE 236: note = Tnp_P1
  SITE 266: note = Tnp_P2
  SITE 274: note = Tnp_P3
  SITE 275: note = Tnp_P4
  SITE 287: note = Tnp_P5
MKKHTTMNKPVSATDVSVCMTVAVDLAKKVQVAGEDALGQLAYEQRIKSREAFQVFLQKLPEGVTVLMETGPGAQAWARLLQAQGNLVRILPAQRVAEHRSGAKNDRNDAHAILRAGRDSSIASVPVKSVAALAMQAWHRVRRGYVRRRTAMGNQIRGLLLEQGIALAQGDVGLKQGVTRVLEDASQPLPALLRELIDEMLNEWKRLGERIAALTGRLEACAAADPTAKRLMTVRGIGPITATALLAKQVEPERFANARQFAAYFGIVPDQHSSGQKVRLGKMTKRGDAYVRSLMVVGSHAVLKQLRPDSEHPDDRRLQRWLQRLGRKGAAVRLANRNLRIAWVLLCSEQTYQRKPNACREMEMSH

SEQ ID NO: 12944 - protein, 306 aa, unidentified
  source 1..306: note = protein_094289b
  REGION 6..147: note = RuvC_domain
  SITE 9: note = RuvC_P1
  SITE 52: note = RuvC_P2
  SITE 87: note = RuvC_P3
  SITE 89: note = RuvC_P4
  SITE 92: note = RuvC_P5
  REGION 210..297: note = Tnp_domain
  SITE 218: note = Tnp_P1
  SITE 248: note = Tnp_P2
  SITE 256: note = Tnp_P3
  SITE 257: note = Tnp_P4
  SITE 269: note = Tnp_P5
MNYTTVGVDIAKSVMQLHWVEPETGEIINKPVKRAAFLEHFANRAPCLIGMEACGGAQHWARRLIEMGHQVKLMPAKFVKAFVMGNKNDAADARAIWMATQMPGKSVAVKTEAQQAVLALHRVREQKVKYRTAQVNSLRGLLTEYGEVMGKGRSALDKAMPGVLETLTERLPAMLIDSLREQWNGLTDIDRQIADIERRLKTWMKEDKACQAVAEIPGVGLLTATAAVATMGDPKSFRSGRKFAACIGIVPRQTGTGGKVQLGGISKRGDTYLRTLLIHGARSVLSHAKEPGPWVEQISKRRPPNV

SEQ ID NO: 12945 - protein, 342 aa, unidentified
  source 1..342: note = protein_378b404
  REGION 7..149: note = RuvC_domain
  SITE 10: note = RuvC_P1
  SITE 53: note = RuvC_P2
  SITE 88: note = RuvC_P3
  SITE 90: note = RuvC_P4
  SITE 93: note = RuvC_P5
  REGION 209..294: note = Tnp_domain
  SITE 217: note = Tnp_P1
  SITE 247: note = Tnp_P2
  SITE 255: note = Tnp_P3
  SITE 256: note = Tnp_P4
  SITE 268: note = Tnp_P5
MNNVAIAAIDLGKHSFHLHAQDDRGHEVHRRKFTRAALTQYLAKLEPCTVVMEACGGAHFMAQEVAKLGHTPKLIAPHLVRPYVKSNKNDFADAEAICEAATRPTMRFVHPKTQAQQALAMLNSVRESFIKDRTATVNRIHAALLEVGISLAPGFKSIKELPALLEMSSFSGSIKKILMGLHEHFNYLDGKVKALDKEVECQAAEDDLAARLMTMPCVGPITSSALAAELGDGKQFKCGRGYAASIGLVPKQHGTGDKTVLLGISKRGDRNQRRLLIQCARVYLIQLERQKGALADWVRQLLASRHHSNLVVCALANKLARIAWAIAAHHTEFDAGPAAMNA

SEQ ID NO: 12946 - protein, 315 aa, unidentified
  source 1..315: note = protein_dfaf877
  REGION 9..152: note = RuvC_domain
  SITE 12: note = RuvC_P1
  SITE 56: note = RuvC_P2
  SITE 96: note = RuvC_P3
  SITE 98: note = RuvC_P4
  SITE 101: note = RuvC_P5
  REGION 191..276: note = Tnp_domain
  SITE 199: note = Tnp_P1
  SITE 228: note = Tnp_P2
  SITE 236: note = Tnp_P3
  SITE 237: note = Tnp_P4
  SITE 248: note = Tnp_P5
MTKSNITTAGIDTSKAKLDIAVHDRAERWQVTNDLAGWRSHVASLAKSGVTRVGIEATGGYERGVVEHLRAAGFIVLLLQPLQVKAFGRVHLRRAKNDALDAILIAACAAAVDPPEIAPDPRLTELADYLTFLEQIEEDIKRFKNRLEHIDEPALRRIVNSDIARLKARKAAQIRDIAKRLRGHGDLAKRLKLVLSIPGIGERTALAIVIRMPELGCVSREEAAALAGLAPFAADSGQHRGQRKIAGGRSRLRRSLFAAALPAAFRWNKALVALYARLTAKGKAHNAALIACARKLLIYANTVVQRGTPWTENAA

SEQ ID NO: 12947 - protein, 348 aa, unidentified
  source 1..348: note = protein_5dda111
  REGION 12..153: note = RuvC_domain
  SITE 15: note = RuvC_P1
  SITE 58: note = RuvC_P2
  SITE 93: note = RuvC_P3
  SITE 95: note = RuvC_P4
  SITE 98: note = RuvC_P5
  REGION 217..302: note = Tnp_domain
  SITE 225: note = Tnp_P1
  SITE 255: note = Tnp_P2
  SITE 263: note = Tnp_P3
  SITE 264: note = Tnp_P4
  SITE 276: note = Tnp_P5
MPQILNAAIAVIGIDIGKNSFHVVGHDERGAIVLRQKWSRGQVAAHFANLPPCLVGMEACVGAHFLSRKLKGLGHDARLMPAKYVRPYSKGQKNDFRDAEAIAEAVQRPTMKFVATKTADQLDLQALHRVRERLVSQRTGIINQIRAFLLERGIAVRQGQRFLRAELPRILATPPDVLSPRMVQVIEDLADDWRRLDERIERLSGEIEAIARQDAGCERLMSVPGIGPIISSAMVAAIGAGEAFSKGRDFAAWLGLVPKQMSTGDRTILGKISKRGNRYLRVLFVQAAWVVLIKPKIWERHGLKPWIEAAKKRLHHNVLAIALANKLARIAWSVLARGRSFEVRSAAA

SEQ ID NO: 12948 - protein, 342 aa, unidentified
  source 1..342: note = protein_9d3887d
  REGION 24..171: note = RuvC_domain
  SITE 27: note = RuvC_P1
  SITE 76: note = RuvC_P2
  SITE 116: note = RuvC_P3
  SITE 118: note = RuvC_P4
  SITE 121: note = RuvC_P5
  REGION 211..298: note = Tnp_domain
  SITE 219: note = Tnp_P1
  SITE 249: note = Tnp_P2
  SITE 257: note = Tnp_P3
  SITE 258: note = Tnp_P4
  SITE 271: note = Tnp_P5
MDRLSPVTRICKVGFTMENELHFIGIDVAKAKLDVDILRPDGRHRCKKFDNTLSGHEALVRWLRGHDVNRAHVCIESTSTYMEDAAAHLSDAGYTVSIINPALSKAFAQSEGLRSKTDKVDARMLAHFCREKRPSAWEAPHPTERALKALVLRHQALTEMQTQEKNRRETAPEVQLASIDILLGCLSAELARIEKQIKDLTDNDPDMKRRRKLLNSIPGIGEKTAAVLLAYTGLRLKFGTARQFAAYAGLTPVQHESGSSVMRASRMSKAGPVQLRKALYMPALSALYHTAWGKAFRKRLEESGKRAKVIIGAMMRKLAQVAYGVLKSGKAFDASQHELLIA

SEQ ID NO: 12949 - protein, 411 aa, unidentified
  source 1..411: note = protein_70e1d9f
  REGION 4..170: note = RuvC_domain
  SITE 7: note = RuvC_P1
  SITE 67: note = RuvC_P2
  SITE 107: note = RuvC_P3
  SITE 109: note = RuvC_P4
  SITE 112: note = RuvC_P5
  REGION 280..364: note = Tnp_domain
  SITE 286: note = Tnp_P1
  SITE 317: note = Tnp_P2
  SITE 325: note = Tnp_P3
  SITE 326: note = Tnp_P4
MVYVGDDWAEDCHDVELVDESGRRLARTRLPEGLEGMTRLHALIAQHLPADYDELDPDEAARRVKVGIETDRGPWVQALVTAGYQVYAINPMSVARYRERHSTSGAKSDPGDAHVLAEIVRLDHAHHRLIAGDSDLAEATKLVARTHQTLIWDRSRQVLRLRSALREFYPAALHAFDDLTAPDALELLGRAPDPDRAAALSRAQIVAALRRANRRDIDAKAVRLQQLLREAQLRQPGPVQTAYAAIVTAQVRLITALNTEIAQLGEVVADHFGRHPDAEGYLSLPGLGVVLGARVLGEFGDAPKRFADAKARKNYAGTSPITRASGSRRVVLARYARNRRLGDAVHQWAFCAMRGSPGARAYYAAMRERGIGHQAALRQLGNRLVGILHGCLKTNTTYNEDTAWAHLQPTP

SEQ ID NO: 12950 - protein, 386 aa, unidentified
  source 1..386: note = protein_f12d786
  REGION 25..185: note = RuvC_domain
  SITE 81: note = RuvC_P2
  SITE 118: note = RuvC_P3
  SITE 120: note = RuvC_P4
  SITE 123: note = RuvC_P5
  REGION 255..340: note = Tnp_domain
  SITE 263: note = Tnp_P1
  SITE 292: note = Tnp_P2
  SITE 300: note = Tnp_P3
  SITE 301: note = Tnp_P4
  SITE 313: note = Tnp_P5
MHKLNDLSRSLTPLDSYGTLIAVVEMSQSSWLVAGIVPGVERLPLKKLKVDECTLLKLLHRWREEAEKAGHRIQRICVALEAGRDGFWLARWLRARDIEAHVIHASSVAVSREHRRAKTDRLDTELLKRAFLGWLRGERDHCKMVVIPTIKDEDAKRPNRERESLVGEQNRIINRMKATLTRLGIRGFNPKLKKAAERLEGLRTAEGEPIPPNTLAELHRDMVRRRLVSDQIRQIEDARLERLKQAPSAGPHAMVRLLARVIGIGIETADMLVQEVLRRNMRDRRAVARYAGLTGSPDESGTNRREKGLARSGNARVRRGMIQLAWRFLMFQKNSVLVQWFRTRTENARGTRKPMIVALARKLLIALWRLVQEGVVPEGIVLRPAQ

SEQ ID NO: 12951 - protein, 416 aa, unidentified
  source 1..416: note = protein_efe2eab
  REGION 4..160: note = RuvC_domain
  SITE 7: note = RuvC_P1
  SITE 57: note = RuvC_P2
  SITE 97: note = RuvC_P3
  SITE 99: note = RuvC_P4
  SITE 102: note = RuvC_P5
  REGION 274..361: note = Tnp_domain
  SITE 282: note = Tnp_P1
  SITE 312: note = Tnp_P2
  SITE 320: note = Tnp_P3
  SITE 321: note = Tnp_P4
  SITE 334: note = Tnp_P5
MNAAGIDISSRKSTVAVLRPFGEVVEVPFDVQHNAEALTALAEQLKSIDGETRVVMEHTGRYYESVAKTLHEAGLFVSAVNPLLIKEYGNNSLRRVKTDKADAMKIARYALDNWVELRDYTPMDTIRYDLKTLNRQFQLASKQKTATANNLIALQEQSFPGIRKLFDSPVRSDGTQKWVDFTHDFYHVDCVRSGSQNTFTERYRKWCKRNHYNFNAGKAAEIYALAKSAVVLVQKTPLTKTLLQEAANQLTAISRSVETYRSEMNKLASQLPEYPVIMEMYGVGESLGPQLMAEIGDVRRFERKQSLVAFAGIDPMPNQSGEKNVRSNKSSKRGSPYLRKTLFNIMGIYLKCSPQDEPVYQFLDRKRAEGKPYYVYMTAAGNKFLRRYYATVMNYFATLENLPPVDTDSTGLQHTE

SEQ ID NO: 12952 - protein, 415 aa, unidentified
  source 1..415: note = protein_b4612e1
  REGION 14..169: note = RuvC_domain
  SITE 17: note = RuvC_P1
  SITE 66: note = RuvC_P2
  SITE 106: note = RuvC_P3
  SITE 108: note = RuvC_P4
  SITE 111: note = RuvC_P5
  REGION 277..363: note = Tnp_domain
  SITE 285: note = Tnp_P1
  SITE 316: note = Tnp_P2
  SITE 324: note = Tnp_P3
  SITE 325: note = Tnp_P4
  SITE 336: note = Tnp_P5
MPDFLSASVALFHVGIDWAAETHAVCVLDDAGKVKSTFAITHTADGFADLIGRLGKLGDRADVSVGIERPDGRLVDALLEAGHPVVPVSPNAIKAWRDGEVVSGAKSDAGDALVIAEYLRLRQHKLRVAVPFSDQTKALRTTVRTRTDLVEMRVAATNQLAALLDMHWPGAKAIFADVESPIALKFLTRYPTPASAARLGEKRIAAFCAANGYSGRRPAGELLARLRGAPAGTTSPALTDALKHAILAMVTVLTALNTAIKDLDKTVVTHLGEHPDSEIFTSLPRSGQINAAQMLAEWGDCRGAYEGADAVAALAGLTPVTKESGKHRAVSFRWACNTRFRVAMTTFADNSRHASPWAADIYDRARANGKDHPHAIRILARSWTRVIYRCWHDHKPYDVANHGAVQRLGQPPQTA

SEQ ID NO: 12953 - protein, 403 aa, unidentified
  source 1..403: note = protein_071ee78
  REGION 11..176: note = RuvC_domain
  SITE 14: note = RuvC_P1
  SITE 67: note = RuvC_P2
  SITE 107: note = RuvC_P3
  SITE 109: note = RuvC_P4
  SITE 112: note = RuvC_P5
  REGION 276..361: note = Tnp_domain
  SITE 284: note = Tnp_P1
  SITE 314: note = Tnp_P2
  SITE 322: note = Tnp_P3
  SITE 323: note = Tnp_P4
  SITE 334: note = Tnp_P5
MSERKSLELRVSVDVGCRRHSVAIGWPDGQVLEEFEIAHRPEGFEEFFSRIEKHQKANGCGVAVAMEGYNGYARPLDSLVRSRGYRLYNINNLKLARFKEIFPGAAKKDRIDARKGLELFQLRDHLPLAKEVLQEVTGTPQENEILKRLTRRRRRLVNERVRVVNNLQADLQAVCPGLLEITTEASNRWFLNFLLSADTLPQLARLRKSTLLKIPAVGRKYASLIQEWQKRAHFSEEAQWVGEMIHEDAQRCLELEEKIKALETKIKEVAKNSKIAKILLSIPGFGTVCTSELAGEIGTVERFGKEGGLALYLGLSTLDNSSGNYQGTKQPKHVNTRAKAAMMTALDRHRKYVPESPRYYEKKRSQGKKHNQAIRALGRHLCRIIYKMLTEERPYQIRSKKGG

SEQ ID NO: 12954 - protein, 346 aa, unidentified
  source 1..346: note = protein_7f15471
  REGION 6..148: note = RuvC_domain
  SITE 9: note = RuvC_P1
  SITE 52: note = RuvC_P2
  SITE 87: note = RuvC_P3
  SITE 89: note = RuvC_P4
  SITE 92: note = RuvC_P5
  REGION 212..300: note = Tnp_domain
  SITE 220: note = Tnp_P1
  SITE 250: note = Tnp_P2
  SITE 258: note = Tnp_P3
  SITE 259: note = Tnp_P4
  SITE 271: note = Tnp_P5
MEISTIGLDLAKNIFQVHGINSLGEPVVRKALRRSQMLPFFAKIQPCLVGIEACGTSHHWARELIKLGHDVRLMPPAYVKPYVKRGKNDAADAEAICEAVTRQTMRFVPIKSREQQAALSLHRVRSLLIRQRTQLINMMRSMLAELGIAIPVGIEKALQMARRIVDGETELDLPTEAKNVVALLADHVLQLHAKLRKMDLRLAALQRSDETARRLATIPGIGPIGATALAASVTDPSQFTSGRQFAAWLGLTPRQNSSGGKERLGRITKMGDKYLRQLLIVGATALVRYAREKPDTVDPRFIALLARKPARVASVAIANKMARIAWAVMARGGVFERGHAPMLGAA

SEQ ID NO: 12955 - protein, 347 aa, unidentified
  source 1..347: note = protein_f3a19d8
  REGION 7..147: note = RuvC_domain
  SITE 10: note = RuvC_P1
  SITE 53: note = RuvC_P2
  SITE 88: note = RuvC_P3
  SITE 90: note = RuvC_P4
  SITE 93: note = RuvC_P5
  REGION 210..296: note = Tnp_domain
  SITE 218: note = Tnp_P1
  SITE 248: note = Tnp_P2
  SITE 256: note = Tnp_P3
  SITE 257: note = Tnp_P4
  SITE 269: note = Tnp_P5
MDQIIRIGMDTSKQIFQLHGVDEAERVVLRRKLRRKEVTAFFAGLAPTVVAIEACGGSHHWARTLSGLGHEVKPIAPQFVKPYVKRGKNDAADAAALCEAASRPTMRFVAVKSVASQAALMLAGLRERLVRNRVQLANAIRGYAAEFGLVAAKGQAKIAPLLALLQADESLPALARELFAEHAREYAQLERQLAAIEAKLMAWHRTNAVSRRLVRIPSIGPIIASLLAMRTPDPHAFRSGRHFAAWIGLTPRDHSTAGRVRLGVITRAGDETLRSLLVVGATAVIWQVRRGTGRRPSPWLVALLKRKPPKLAAVALANKTARIAWKLMTSGETYDAERAMVVSPEAA

SEQ ID NO: 12956 - protein, 341 aa, unidentified
  source 1..341: note = protein_92c4738
  REGION 7..149: note = RuvC_domain
  SITE 10: note = RuvC_P1
  SITE 53: note = RuvC_P2
  SITE 88: note = RuvC_P3
  SITE 90: note = RuvC_P4
  SITE 93: note = RuvC_P5
  REGION 209..295: note = Tnp_domain
  SITE 217: note = Tnp_P1
  SITE 247: note = Tnp_P2
  SITE 255: note = Tnp_P3
  SITE 256: note = Tnp_P4
  SITE 268: note = Tnp_P5
MQDVTVIGIDLGKRSFHLHGQDKSGKAVFRKKVSRQQLIEFLSNFHACTVVMEACAGAHFMARKLATFGHQIKLISPQFVRPFVKSNKNDFVDAEAICEAASRPAMRFVTPRTESQQTLSALHRVRDSLIRDRVCTTNQLHAFLLEFGISLPIGNAVVRRLPALLAEHSLPPRLVTILERLHTHYKYLAQQIAELDREIAQQLADDDLGRRLLTIPGVGPITASVLTAEMGDGKQYARSRDFAASIGLVPRQYSTGGRANLLGISKRGDKNLRRLLVQCARVFMQRIDKNSGPLVTWTRQMLARRHSNVVACALANKFARIAWAIAARKTSFNAGAAAMPA

SEQ ID NO: 12957 - protein, 298 aa, unidentified
  source 1..298: note = protein_c78405f
  REGION 1..97: note = RuvC_domain
  SITE 37: note = RuvC_P3
  SITE 39: note = RuvC_P4
  SITE 42: note = RuvC_P5
  REGION 161..247: note = Tnp_domain
  SITE 169: note = Tnp_P1
  SITE 199: note = Tnp_P2
  SITE 207: note = Tnp_P3
  SITE 208: note = Tnp_P4
  SITE 220: note = Tnp_P5
MEACATAHQWARELKKLGHDTRLMPPTYVKAYVKRGKNDAADAAAICEAVTRPSMRFVPIKSVEQQSALMLHRTRDLLIRQRTQLINALRAHLAELGLVAAKGHEGLHQLVTAVAESSDERLPSNARFACQAIAAQLSAVQTQINGLDKRITQAHRANPDSKRLEAIPGFGVILSTAVVATMTDPKAFKTGREFAAWIGLVPRQNSSGGKERLGSISKQGDRYLRRLLVLGAISIVGTARTRPDKYPWVTELLGRRPAKVVAVALANKMARTAWAVLARGETYRAPIRLSSAAIAAAA

SEQ ID NO: 12958 - protein, 398 aa, unidentified
  source 1..398: note = protein_f8bc352
  REGION 9..162: note = RuvC_domain
  SITE 12: note = RuvC_P1
  SITE 60: note = RuvC_P2
  SITE 101: note = RuvC_P3
  SITE 103: note = RuvC_P4
  SITE 106: note = RuvC_P5
  REGION 224..309: note = Tnp_domain
  SITE 232: note = Tnp_P1
  SITE 262: note = Tnp_P2
  SITE 270: note = Tnp_P3
  SITE 271: note = Tnp_P4
  SITE 282: note = Tnp_P5
MSSTKAVIIGVDPHKMSVTIEVVDTRERLLGRARFDTDKAGYAAMCRYVKQWPARLWAVEGANGAGRPLAQRLLAAGEQVVDVPAKLAARVRLFDTGHNRKTDALDAHSVAVVAVRTDGLRELTEDGELEALRMLTDRRDELAHQRVQTVNRLQRLLSELLPGQRKRDLSATQAKAMLATIRPRDIAGKTRRRMAAEEVADLVAVDAKLKRIKAELKAAVTARGSHLMDLYGIGPAGAARVLADVGDVARFADRNRFASWTGTAPLDASSGEQTRHRLSRAGNRRMNHLLHVAAIVQIRHDTQGRTYYRRKLAAGKTPMEALRCLKRRLSDVVYRQLIADSKQDDGADPGGHCGASLQSSAADSHPHIDTSDQPLPGPAQPTLRRPPARGKTLTTSAP

SEQ ID NO: 12959 - protein, 318 aa, unidentified
  source 1..318: note = protein_37544b2
  REGION 8..151: note = RuvC_domain
  SITE 11: note = RuvC_P1
  SITE 54: note = RuvC_P2
  SITE 94: note = RuvC_P3
  SITE 96: note = RuvC_P4
  SITE 99: note = RuvC_P5
  REGION 190..274: note = Tnp_domain
  SITE 198: note = Tnp_P1
  SITE 227: note = Tnp_P2
  SITE 235: note = Tnp_P3
  SITE 236: note = Tnp_P4
  SITE 248: note = Tnp_P5
MQTSIIFIGVDVGKFELQVSGANGEIVAGVLHNNRSSIVGWLKRLPDTSVIAMEATGGYQELLARTAHERGFEVYVLNPTHVHHYAISLGNRGKTDRLDAAVIAQYIAQHHKKLHRYEPISPQLQEVRALHALRSTVVRVGTSLRLSAQRHGCVSSHQKKALASLTAWSEQLEKEMIAKIKAHSDWAKTYGLLTGICGIGPITGVALTNLFSRIDFATSDAAVAFCGLDPRPNESGRKVGRRRLSKQGDKAARTLLYNAASSAARTAQFKDYYAMLRARGLASTAALVIIARKLLRIAYGVWRTGQPFDPEKLRPAIA

SEQ ID NO: 12960 - protein, 313 aa, unidentified
  source 1..313: note = protein_140ee8b
  REGION 10..160: note = RuvC_domain
  SITE 13: note = RuvC_P1
  SITE 55: note = RuvC_P2
  SITE 95: note = RuvC_P3
  SITE 97: note = RuvC_P4
  SITE 100: note = RuvC_P5
  REGION 190..277: note = Tnp_domain
  SITE 198: note = Tnp_P1
  SITE 227: note = Tnp_P2
  SITE 235: note = Tnp_P3
  SITE 236: note = Tnp_P4
  SITE 248: note = Tnp_P5
MAMETSDFIIGIDVAKAELVVHFQSHGTQMSLSNTKPEIKRWLKQQPANTALCVEATNVYHLDVVEMAHEKGFKVYVVDGFQLSNYRKGIGGRSKTDASDAALLARYLERESRELRPWAPPPAVYGKLQSLLRRRAALVTMRTALSQSWGNEQLLKAAFKSFTQQMDKLDLLVQKKLKELLKEAGLLEQVARCQAIEGIGFLTATALVMAFIRGEFKNSDAFIAFLGMDLRVSDSGQKTGLRRLTKRGCPEIRRLLHNASMSASRSAAWKETYEHYRNKGKATTEALVILSRKLARVAFALMKNKEEYVSRTA

SEQ ID NO: 12961 - protein, 408 aa, unidentified
  source 1..408: note = protein_1e2e5d6
  REGION 5..164: note = RuvC_domain
  SITE 8: note = RuvC_P1
  SITE 61: note = RuvC_P2
  SITE 101: note = RuvC_P3
  SITE 103: note = RuvC_P4
  SITE 106: note = RuvC_P5
  REGION 274..360: note = Tnp_domain
  SITE 282: note = Tnp_P1
  SITE 313: note = Tnp_P2
  SITE 321: note = Tnp_P3
  SITE 322: note = Tnp_P4
MLLFVGDDWAEDHHDVEVQNEQGRILRRARLPEGIAGIAGFGELVGQFLPEDGQACDVLVCIEVDRGTWVNALLAAGYRVFGVDPRQAHRHREILSSSGAKSDKGDAHALADMIRTRRHQLREAGGDSEIAAAIKVVSRAHQSMIWDRTRHMLRLRAALREYFPAILLVCAELDLALTSRPILALLAKAATPQKAAKLTARQILPMLKGYHRKEDKAARIQQILHGEHLGQPEILTSAYAASVRSTVAVISVINEEISALEQEVKAHFGQHPDAEIIASQPGLGVITGARVLAEFGDAPGRYRSSKARKNYAGTSPITRQSGKTRVVAARFVHNDRLVDALHSQASCALLHDEYARAYYDQQRARGVKHNAALRQLANRLVGILHGCLTHQSTYHQDTAWAHHTTAAA

SEQ ID NO: 12962 - protein, 341 aa, unidentified
  source 1..341: note = protein_f78c65e
  REGION 7..148: note = RuvC_domain
  SITE 10: note = RuvC_P1
  SITE 53: note = RuvC_P2
  SITE 88: note = RuvC_P3
  SITE 90: note = RuvC_P4
  SITE 93: note = RuvC_P5
  REGION 211..302: note = Tnp_domain
  SITE 219: note = Tnp_P1
  SITE 249: note = Tnp_P2
  SITE 257: note = Tnp_P3
  SITE 258: note = Tnp_P4
  SITE 270: note = Tnp_P5
MLEVSTIGLDLAKNVFQMHGADGSGAVAFRKKLRRDQVLKFLAAQPACTVAMEACAGGHYWAREIAKLGHDARLIAPGYVKPFVKRQKNDAADAEAICEATQRPTMRFVAAKSEEQQAAAMVFRVRDLMVRQRTQTINAIRGHLAEFGLVAAQGLFHAAKLVAAIEDKGTAIPEAARPILSLLVAQLRALDERVAVLDREIARRAKEDAEARRLMTIPGIGPITATALAALAPSATTFKRGRDFAAWLGLTPLQRSSGGKQKLGETSRMGERTLRRLLIIGASAAVRWAMRKGSTGDPWLSRMLERKPPMLVIVALANKTARIAWALMAKGGTYRAPAVAG

SEQ ID NO: 12963 - protein, 335 aa, unidentified
  source 1..335: note = protein_263e05d
  REGION 6..145: note = RuvC_domain
  SITE 9: note = RuvC_P1
  SITE 52: note = RuvC_P2
  SITE 87: note = RuvC_P3
  SITE 89: note = RuvC_P4
  SITE 92: note = RuvC_P5
  REGION 208..295: note = Tnp_domain
  SITE 216: note = Tnp_P1
  SITE 246: note = Tnp_P2
  SITE 254: note = Tnp_P3
  SITE 255: note = Tnp_P4
  SITE 267: note = Tnp_P5
MKISAIGLDIAKSVFHFYAVNQAGKHVRKKMLKRSQLMPYFAKIEPCLVAMEACGSAHHWAREFQKLGHQVKLIAPQYVKPYVKGNKNDYNDAEGIAEAVLLPNMRFVPIKSLEQHDVQMVRERLTKSRTALANQIRGLLAEYGLVINKGLAAVRRELPLILEDADNGLSTMSRESFFTLLDELHALDVRHEQCEQKIKGINRSNDICRRLNDIQGIGPVTATAVFAAAGNGKDFSNGRHFSAWLGLVPRQHSSGGKNTLLGISKRGNAYLRTLFIHGARAVLRCVANKSDRFSRWASALMERRGHNRACVAVANKLARIAWVIMARGESYSPAI

SEQ ID NO: 12964 - protein, 343 aa, unidentified
  source 1..343: note = protein_f9e3381
  REGION 6..146: note = RuvC_domain
  SITE 9: note = RuvC_P1
  SITE 52: note = RuvC_P2
  SITE 87: note = RuvC_P3
  SITE 89: note = RuvC_P4
  SITE 92: note = RuvC_P5
  REGION 211..296: note = Tnp_domain
  SITE 219: note = Tnp_P1
  SITE 249: note = Tnp_P2
  SITE 257: note = Tnp_P3
  SITE 258: note = Tnp_P4
  SITE 270: note = Tnp_P5
MEIHAIGIDLGKTLFHLVGVDACGTVVVRKRCSRSQLLAYTANVRVQRIGMEACSGSHFLGRALREQGHDVRLMPAQYVKPYVKTNKSDYIDAEAIAEAVQRPNMRFVPIKTEEQLDLQTVHRVRERWVMRRTAVVNQIRGLLLERGLTLPKGRSHVNQALPGILADATLRLSDSFRVLLAQLGLEMDQLTARIEQMDAVIHHTATENEACRRLTSIPGVGPVTATALVAAIGNGSGFRRGRDLAAWVGMVPREYSTGGKQKLLGISKRGNVYLRRLFVQGARTVMQYRSKQAAGLRCWLDQLMARTHQNVAIVALANKLVRMAWAVLCKNETYRAPVLLAST

SEQ ID NO: 12965 - protein, 341 aa, unidentified
  source 1..341: note = protein_5c52f76
  REGION 7..149: note = RuvC_domain
  SITE 10: note = RuvC_P1
  SITE 53: note = RuvC_P2
  SITE 88: note = RuvC_P3
  SITE 90: note = RuvC_P4
  SITE 93: note = RuvC_P5
  REGION 211..296: note = Tnp_domain
  SITE 219: note = Tnp_P1
  SITE 249: note = Tnp_P2
  SITE 257: note = Tnp_P3
  SITE 258: note = Tnp_P4
  SITE 270: note = Tnp_P5
MPEASTIGLDLAKRVFQAHGADASGNVVFRKRLRREQVLKFFADRPACVVAMEACSSAHYWARGIGELGHMVRLIPPAYVKPFVKRQKNDTTDAEAICEAAQRPTMRFVAVKSQAAQANAVVFRARDLLVRQRTQAINALRGHLGEYGLVVAKGPSHVAKLIEQVEDPATDLPEAARIVLRVLIASLQFLSERITLLDREVARRAREDNEVRRLTTIPGVGPVTATALAAMAPPAGAFRRGRDFAAWVGLTPSQHSGGGKQKLGATSKMGERTLRRLLIIGASSVVRKAIKHGTQSGSWLGQMLARKPRMLVIVALANKMARTVWALLATGEIYRAPLAAA

SEQ ID NO: 12966 - protein, 403 aa, unidentified
  source 1..403: note = protein_1ec558c
  REGION 6..158: note = RuvC_domain
  SITE 9: note = RuvC_P1
  SITE 57: note = RuvC_P2
  SITE 95: note = RuvC_P3
  SITE 97: note = RuvC_P4
  SITE 100: note = RuvC_P5
  REGION 266..352: note = Tnp_domain
  SITE 274: note = Tnp_P1
  SITE 305: note = Tnp_P2
  SITE 313: note = Tnp_P3
  SITE 314: note = Tnp_P4
  SITE 325: note = Tnp_P5
MSICFAGLDWASRTHAVCVIDERGSVLTQFEINHDASGLADLHRRLRGAGVTAVAIERPSGLIVDALLEAGLSVVPIHPNVVKASRPRYRSHGGKSDASDAYLLADLLRTDGHRFKPLAPQSDDIRSLRALVRGRDDLVATRVQLANQLRSLLHSFWPGATEVFADVDSPIGLAFIRRYPTPASAQRLGPKRMAAFCTKNAYSGRRSPEELLDRLHQAPAAALGKLEMAAKGELALSLARTLDRLGDQIRLLTRRIENHVSSIDDGRILMSFPRAGRICAAQILAELGSVRERFDSDEHLAAEAGVAPVTYASGKSKAVTFRWACNHRLRAALTCLADNSRHANAWAASVYAKAKARGCDHPHAIRILSRAWLRVIWRAWTDRKPYDPALHGSAKLLLQTQGG

SEQ ID NO: 12967 - protein, 341 aa, unidentified
  source 1..341: note = protein_03e81bf
  REGION 7..149: note = RuvC_domain
  SITE 10: note = RuvC_P1
  SITE 53: note = RuvC_P2
  SITE 88: note = RuvC_P3
  SITE 90: note = RuvC_P4
  SITE 93: note = RuvC_P5
  REGION 211..297: note = Tnp_domain
  SITE 219: note = Tnp_P1
  SITE 249: note = Tnp_P2
  SITE 257: note = Tnp_P3
  SITE 258: note = Tnp_P4
  SITE 270: note = Tnp_P5
MGEVTTIGLDLAKSIFQAHGADAAGQVVFRRKLRRDQVLSFFAGQPRCLVAMEACAGAHHWARELAALGHEVRLIPPSYVKPFVKRQKNDMADAEAISEAALRPTMRFVAPKSAEAQGAAVIFRTRDLLVRQRTQLSNALRGHLAEFGFVVPQGVGHISRLIGMAVDPTTELPDQARPILAIIAESIEALQAKIALLDREIKARAKADPVARRLMTIPGVGPVVATALVALAPPANTFRRGRDFAAWVGLTPRQNSSGGKERLGRISKMGERNLRRLIILGASSAAKVAARDPSQASPWLAGMLSRKPRMLVTVALANKIARIVWALMAHGGSYRAPAAAA

SEQ ID NO: 12968 - protein, 274 aa, unidentified
  source 1..274: note = protein_2bbc682
  REGION 12..162: note = RuvC_domain
  SITE 15: note = RuvC_P1
  SITE 57: note = RuvC_P2
  SITE 97: note = RuvC_P3
  SITE 99: note = RuvC_P4
  SITE 102: note = RuvC_P5
  REGION 192..255: note = Tnp_domain
  SITE 200: note = Tnp_P1
  SITE 229: note = Tnp_P2
  SITE 237: note = Tnp_P3
  SITE 238: note = Tnp_P4
MAMRVTLEKPIIGVDVAKNELVIYHDQYDRLEAIPNTKVAITQWLKALASRCAIAIEATNVYHVLFADAAHEAGCDVYMVDGYQLSHYRKGVNIRAKTDAQDARLLARYLKNELDELRPWIPASPLYRQLLSLFRRRAALVQARTGLVQSWTNEPFLRTAFANQVNSMKRFEALVEKKIRDVLQEAGLMRQVNRCMKVEGIGFLTAARLVTSFQRGEFSGANAFIAFLGLDLRVSKSGQSDGPPIDQTRRSRSPTVAAQRGYVREPYAGLEAFL

SEQ ID NO: 12969 - protein, 344 aa, unidentified
  source 1..344: note = protein_0c28d42
  REGION 9..169: note = RuvC_domain
  SITE 12: note = RuvC_P1
  SITE 68: note = RuvC_P2
  SITE 108: note = RuvC_P3
  SITE 110: note = RuvC_P4
  SITE 113: note = RuvC_P5
  REGION 209..296: note = Tnp_domain
  SITE 217: note = Tnp_P1
  SITE 247: note = Tnp_P2
  SITE 255: note = Tnp_P3
  SITE 256: note = Tnp_P4
  SITE 269: note = Tnp_P5
MTNIVKQVAGIDVAQNELVVSLGRMGHDTGIDIFAYKTFVNSAKGFNELTAWIKKLAGTEIKVRYVMEATGVYHERLAYYLSDQQQAVSIILPNKISNYFRTLDVKTITDKTASQAICRFGLERKLEVWQKPKKIFKDLKQLTRERDQLIDDKTALKNQLHAEKAEAFPNDSSIKRVTKRIQLVNKQELEIRAEIAEIVKKDVELVKKINTITTIPGVGKLTAVIVLAETNGFELIRNKKQLISYSGLDVKLKDSGTSVKGKPKISKRGNRHLRKAMHMPALSAMRFNQHHKALFVRLVSKHGIKMKATVAVQRKLLELIYTIFKTDTAFDKDYVESHEKKNCQ

SEQ ID NO: 12970 - protein, 388 aa, unidentified
  source 1..388: note = protein_14676d6
  REGION 5..163: note = RuvC_domain
  SITE 8: note = RuvC_P1
  SITE 62: note = RuvC_P2
  SITE 102: note = RuvC_P3
  SITE 104: note = RuvC_P4
  SITE 107: note = RuvC_P5
  REGION 263..352: note = Tnp_domain
  SITE 271: note = Tnp_P1
  SITE 301: note = Tnp_P2
  SITE 309: note = Tnp_P3
  SITE 310: note = Tnp_P4
  SITE 323: note = Tnp_P5
MGPVVGLDVSKGTSILQAFTDRNNPYGKIISIEHTQKGFEQLGDLLEELIQATGLEPAVVLEATGHYHRSLVAYLEREGYRHYIVNPLQSKRARGTQLRKVKTDAVDAWHLAEMFYRGDVRPHRTWAEEMTELQHLTRQHEFVTSMLVQAKLNARTLLDQVCPAYENVFSNLFSTTSLQVLRHMLSGGTVTQETIRETAGSSHGKAWIQAKAERIRALPPLSHSSKAQQTALLCMVEMALTAQQQLCQLEISIEETAQSLPEVGLLKTIPGVGDKLAAALVAEIGDATQFEDPKKLVAYAGLDPGVHSSGKFTASSSRISKRGSKRLRRALYVAVQCGLRKGVNERLQAYYDKKRKEGKPYKVVVIACANKLLHHVHAILVKGEPYKT

SEQ ID NO: 12971 - protein, 343 aa, unidentified
  source 1..343: note = protein_db5d6eb
  REGION 7..149: note = RuvC_domain
  SITE 10: note = RuvC_P1
  SITE 53: note = RuvC_P2
  SITE 88: note = RuvC_P3
  SITE 90: note = RuvC_P4
  SITE 93: note = RuvC_P5
  REGION 212..297: note = Tnp_domain
  SITE 220: note = Tnp_P1
  SITE 250: note = Tnp_P2
  SITE 258: note = Tnp_P3
  SITE 259: note = Tnp_P4
  SITE 271: note = Tnp_P5
MSEVSIIGLDIAKNVFHAHGADASGRALFSRKIGRGKLLEFFAGHQRCTVALEASGGAHHWGRELTRLGYEVKLIPPAYVKPFVKRNKNDAADAEAICEAAQRPSMRFVAIKSEEQQASGLVFRTRDLLVRQRTQLINAIRGHLTEYGWVAPKGPSHVAMLGDLLEDEMGSSLPEAARAMFRTMLDLLEELNEKIGDLDKEIARRAREDAVARRLMTIPGVGPITATALAALAPPAETFTKGRDFAAWLGLAPRQMSTGGKQKLGSISKMGERTLRRLLIIGCSAVVLQASKRGAPKGSWLEQMMARKPRMLVTVALANKTARIIWAVLVKDEDYRAPVAAAA

SEQ ID NO: 12972 - protein, 406 aa, unidentified
  source 1..406: note = protein_6cddd73
  REGION 4..163: note = RuvC_domain
  SITE 7: note = RuvC_P1
  SITE 60: note = RuvC_P2
  SITE 100: note = RuvC_P3
  SITE 102: note = RuvC_P4
  SITE 105: note = RuvC_P5
  REGION 271..357: note = Tnp_domain
  SITE 279: note = Tnp_P1
  SITE 310: note = Tnp_P2
  SITE 318: note = Tnp_P3
  SITE 319: note = Tnp_P4
MLFVGDDWAEDHHDVEVQDETGRRLAKARLPEGIAGIARLHGLVGRFLPEDVDPAEVKIGIETDRGPWVAALIASGYQVYAVNPLQSARARQGQDVSGAKSDAGDAHVLADLVRTHSHQLRTVAGDSKQAGAVKVLTRMHQSLIWDRTRLVLRLRSSLREFFPAALEAYDDLDSPDVLELLTKAPEPSRAARLTRAQISAALKRARRHDRDTKTTAIMAALRTEHLTQPPVIAAAYGVTVRALAALITTSNEQITALEGPVEACFGQHPDAEIYLSQPGLGSILGARVLAEFGDDPTRYDGARARKNYAGTSPITRASGKKKVVLARYVRNKRLTNALHQQAFSALSGSPGARAYYDALRDRDIGYNAALRQLGNRLVGILHGCLKTRTCYDEATAWDQHTQRVAA

SEQ ID NO: 12973 - protein, 315 aa, unidentified
  source 1..315: note = protein_e937ef8
  REGION 9..154: note = RuvC_domain
  SITE 12: note = RuvC_P1
  SITE 57: note = RuvC_P2
  SITE 97: note = RuvC_P3
  SITE 99: note = RuvC_P4
  SITE 102: note = RuvC_P5
  REGION 195..279: note = Tnp_domain
  SITE 203: note = Tnp_P1
  SITE 232: note = Tnp_P2
  SITE 240: note = Tnp_P3
  SITE 241: note = Tnp_P4
  SITE 252: note = Tnp_P5
MVTSYQNFIGIDIGKFKNVVAIHKQKNAVEFDNNASGWQQLFQEFSDILPNALVTLENTGKYELGLSHFLTDKNIAVHRANTRKVKSFILSHGALAKSDRSDARALAQYGFERHRTISLFVPTSTEQSTLAALCQRRDDITQMRTQEKCRLEAPENDHIKESCQKTIEFFDSQINELNDTIQKIIDESRELQQRQKILKTVPGIGKKLSQDFLCLMPELGYLNRKEVASLAGVAPHPKESGKAVGYRRITGGISNVRSKLFTAAMAATRSKSILGAFYSKLVESGKKKMVAITALMRKIIVIANTRLKEAINLHT

SEQ ID NO: 12974 - protein, 345 aa, unidentified
  source 1..345: note = protein_5612835
  REGION 19..154: note = RuvC_domain
  SITE 60: note = RuvC_P2
  SITE 95: note = RuvC_P3
  SITE 97: note = RuvC_P4
  SITE 100: note = RuvC_P5
  REGION 218..304: note = Tnp_domain
  SITE 226: note = Tnp_P1
  SITE 256: note = Tnp_P2
  SITE 264: note = Tnp_P3
  SITE 265: note = Tnp_P4
  SITE 277: note = Tnp_P5
MYATQPREPSYDDYQNWSGYRLFQVHGVDENEQTVVRRQLRRSEIAKFFNRLPPTRIGLEACGASHYWARLLRGLGHEVVLLPPQYIKPYLKRGKNDANDAEAICEAMSRPGMRFVPIKSAERQAELMPLGVRDLLIKQRTAVINAIRGYAAEFGVIAAKGPVKVAELLQQAHAEEASVPAVALDMLRLLTAQLDALDVKLKQIETRLVAVHRENPLSQCLASQPGIGPIGAVSFALKVTDPKSFRSGRHFAAWLGLTPKDNSSGGRRRQGRISRQGNETLRKLLVLGATAVIRFARPGHASPWLLNLLARKPRKLAAIALANKMARTLWAMMVSGEVYRRPLPA

SEQ ID NO: 12975 - protein, 310 aa, unidentified
  source 1..310: note = protein_ddcf338
  REGION 6..148: note = RuvC_domain
  SITE 9: note = RuvC_P1
  SITE 52: note = RuvC_P2
  SITE 87: note = RuvC_P3
  SITE 89: note = RuvC_P4
  SITE 92: note = RuvC_P5
  REGION 211..295: note = Tnp_domain
  SITE 219: note = Tnp_P1
  SITE 249: note = Tnp_P2
  SITE 257: note = Tnp_P3
  SITE 258: note = Tnp_P4
  SITE 270: note = Tnp_P5
MHVTTVGLDLAKSVFQVHEITHDGTVAFNRSLRRAQLLGFFERLEPCLVGMEACGSSHYWARELSKLGHEVKLIAPVYVKPYVKRGKSDAADAEAICEAVTRPTMRFVEIKSPEQQAILSLHRARDLIVRQRTQAINMLRGLLAEFGIVFAQGVGHAIQFAKRVTGGHSPELPQAARDVILDLSEQLLALHLRVNWYGRRMTAAAKLEPRIALLQTIPGIGPITASAIVATVGSGKQFQSGRDLSAWLGLTPINKSTGGKERLGRISKMGDRYIRRLMVVGMTSRIKQTKAHQSGLILGSLTSCNESQPS

SEQ ID NO: 12976 - protein, 358 aa, unidentified
  source 1..358: note = protein_87f457f
  REGION 32..179: note = RuvC_domain
  SITE 35: note = RuvC_P1
  SITE 83: note = RuvC_P2
  SITE 124: note = RuvC_P3
  SITE 126: note = RuvC_P4
  SITE 129: note = RuvC_P5
  REGION 226..312: note = Tnp_domain
  SITE 233: note = Tnp_P1
  SITE 263: note = Tnp_P2
  SITE 271: note = Tnp_P3
  SITE 272: note = Tnp_P4
  SITE 285: note = Tnp_P5
MSKQIVSIGKSVSSSDTSTETSTNPQQARVFCGIDVSRESLAVAVLTPDQPIEQREFANSASGHKALIAWLGKMKALARVSLEATGIYSMDLALALDAATGIEVAVLNPKRVHDFAKSMMRRSKTDRADAAVLAEFSLRMEFVAWQRPSQSALALRAISRHIEALGLEHTRTSNRLHAAEGSLGTPRCVVEDLKRSLAGLERRMVKLRREARKLIDSDEQMRGQFLLLTGVPGIAEISALQILGELVLLAPDLKARQWVARSGLDPVHQDSGSSVHKPARISRAGSRHLRRALYMPALSAVRCDPHLKAFYETLLARHKSKLQALIAVARKLLHAIYGIFKSRTPYDGSKLFPQLQIA

SEQ ID NO: 12977 - protein, 416 aa, unidentified
  source 1..416: note = protein_4679907
  REGION 12..167: note = RuvC_domain
  SITE 15: note = RuvC_P1
  SITE 64: note = RuvC_P2
  SITE 104: note = RuvC_P3
  SITE 106: note = RuvC_P4
  SITE 109: note = RuvC_P5
  REGION 275..361: note = Tnp_domain
  SITE 283: note = Tnp_P1
  SITE 314: note = Tnp_P2
  SITE 322: note = Tnp_P3
  SITE 323: note = Tnp_P4
MSLALPEALFFTGIDWGAEIHAVCVTDTAGKIAASFTIEHSADGIALLIRRLARHGEAGGMPVAIERPNGRLVDLLLEAGHPVVPVSPNAIKTWREGEVLSGAKSDAGDAAVIAEYLRLRQHKLKTAAPYSDETRALRTVVRARDDLVDMRVAATNQLSALLDAHWPGARAIFADIESPISLEFLTRYPTPAAAVHLGEKRMAAFCVKHGYSGRRTAAQLLARLRAAPAGTGREALTEALRDAVLAAVGVLAALNASVKNLDRSAAAHLGEHPDSAIFTSLPRSGQISAAQVLAEWGDCREAYAGPDSVAALAGCTPVTRQSGKHRDVHFRWACNKRFRKAVTTFADNSRHASPWAAQIYDNARASGKDHPHAIRILARAWIRVIYRCWLTGIPYDPAAHGAAAITARPATKQIAA

SEQ ID NO: 12978 - protein, 419 aa, unidentified
  source 1..419: note = protein_ff7d222
  REGION 36..191: note = RuvC_domain
  SITE 39: note = RuvC_P1
  SITE 90: note = RuvC_P2
  SITE 130: note = RuvC_P3
  SITE 132: note = RuvC_P4
  SITE 135: note = RuvC_P5
  REGION 295..382: note = Tnp_domain
  SITE 303: note = Tnp_P1
  SITE 333: note = Tnp_P2
  SITE 341: note = Tnp_P3
  SITE 342: note = Tnp_P4
  SITE 355: note = Tnp_P5
MGYPCQSTYFNQVYEGKHQWNCHSVNTQKGAFMIYVGIDIAKLNHFASALSSDGEIMLQPFKFTNDYDGFHLLAQKLDSFDSDELIIGLESTAHYGNNLVEFLVNHHYKVCVINPIQTSTMRKNNIRKTKTDKVDTFIIAKTLMMNPHRLYSQYDISLMHLKELGRFRMKIIKKRTQAKIQLTSYVDQAFPELQYFFKSGIHQKSVYAVLKEAPTPDAVASMHMTHLSHLLETTSHGHFKKDSATELRILAQKSVGSNDSSISTQITQTIDLIELLDSQVKDVESQMELIVTSLDSVIMTIPGIGFINGGMILGEIGDITRFSNPSKVLAFSGLDPTVYQSGNFNASHTKMSKRGSRPLRFALVNAAHNVVRNNKTFKDYYDQKISEGKSHYNALGHCAGKLVRIIYKMLTDNVEFKLD

SEQ ID NO: 12979 - protein, 353 aa, unidentified
  source 1..353: note = protein_0053ab9
  REGION 4..157: note = RuvC_domain
  SITE 7: note = RuvC_P1
  SITE 56: note = RuvC_P2
  SITE 97: note = RuvC_P3
  SITE 99: note = RuvC_P4
  SITE 102: note = RuvC_P5
  REGION 220..306: note = Tnp_domain
  SITE 228: note = Tnp_P1
  SITE 258: note = Tnp_P2
  SITE 266: note = Tnp_P3
  SITE 267: note = Tnp_P4
  SITE 278: note = Tnp_P5
MMVIGVDPHKGTHTATAVDPATNADLGSIRVEATLAGYKKLIAWAKPWPQRRWAVENADGLGRHLTRWLIARGETVVDVPTTATARVRELSRGGRRKNDRIDAAGAACVAALQGDCRPVVPDEHSDALRMLDERRNNLAANRTRAVNQLHALLRELLAGGAPTSLTANTAAAVLRGFRARTLSDRVRVGLCKDLIADVRRLDQLLATNQKDLDGLLDEHGTRLRTIDGIGPVLAARLIGRTGLATRFSTAAAYATYNGTAPVEISSADHRVHRLSRYGDRQLNAAIHTIAMVQVRMPGSAGRAYYDRRIAAGASARSAMRCLKRHLSNVIWRIMTADDTRRLRQQSIESCSAT

SEQ ID NO: 12980 - protein, 304 aa, unidentified
  source 1..304: note = protein_f20ed05
  REGION 4..148: note = RuvC_domain
  SITE 7: note = RuvC_P1
  SITE 50: note = RuvC_P2
  SITE 90: note = RuvC_P3
  SITE 92: note = RuvC_P4
  SITE 95: note = RuvC_P5
  REGION 182..266: note = Tnp_domain
  SITE 190: note = Tnp_P1
  SITE 219: note = Tnp_P2
  SITE 227: note = Tnp_P3
  SITE 228: note = Tnp_P4
  SITE 239: note = Tnp_P5
MNGIGIDVSKRQLDVGTTDGQTLQVSNSRSGFAELDLWLRKRPAGQIVLEATGGYEQSVLDFLHSVGHPVVRANALRARRLAQGMGQMAKTDRLDAYALAQMAALVKLPSYQPLEPWQRKMREFVRARRQAMHALTVARQQQQMVTDRELRRLLLANITCLQTMVERLGKQIAEQVAQQPQLAVLKSMKGVGPGLQAVLASYLPELGKISGKAVASLVGVAPMSHDSGTMRGKRSIHGGRAEIRQVLYMASMSAMRHEPRLRDFYQSLRARGKEGKVAIVAVMRKMLVILNARMRDAQGGSIPA

SEQ ID NO: 12981 - protein, 343 aa, unidentified
  source 1..343: note = protein_1cc3c24
  REGION 6..149: note = RuvC_domain
  SITE 9: note = RuvC_P1
  SITE 54: note = RuvC_P2
  SITE 89: note = RuvC_P3
  SITE 91: note = RuvC_P4
  SITE 94: note = RuvC_P5
  REGION 213..299: note = Tnp_domain
  SITE 221: note = Tnp_P1
  SITE 251: note = Tnp_P2
  SITE 259: note = Tnp_P3
  SITE 260: note = Tnp_P4
  SITE 272: note = Tnp_P5
MKLTRVGVDLAKQVFQVHGVDRAERPVWCQRLKRGRWIAELERNVEPGCEIGMEACGGAHHWARLLQSKGYVVKLIAPQFVKPYVKSNKNDANDAQAICEAMSRPTMRYVAVKTVEQQDIQAVHRIRASLITERTAKANQLRGLVYEYGLVAPREIASLRRAIPAWLEDATNGLSARFRMLLAALYRDLRSLDERVRELDREIAAIVRENEAVQRIEQLRGIGPLTASALVAMVGDGRQFKNGRHLAVALGLTPRQHSSGGKEKLLGISKRGDKYIRTLLIHGARSALRTAPGKTDRLSCWALALAERAHPNVAAVALANKMARVAWAMLRNGTTYEPERVAA

SEQ ID NO: 12982 - protein, 328 aa, unidentified
  source 1..328: note = protein_55fbc2c
  REGION 4..155: note = RuvC_domain
  SITE 7: note = RuvC_P1
  SITE 60: note = RuvC_P2
  SITE 100: note = RuvC_P3
  SITE 102: note = RuvC_P4
  SITE 105: note = RuvC_P5
  REGION 200..286: note = Tnp_domain
  SITE 208: note = Tnp_P1
  SITE 237: note = Tnp_P2
  SITE 245: note = Tnp_P3
  SITE 246: note = Tnp_P4
  SITE 259: note = Tnp_P5
MYFIGIDVSKAKLDCSLLLDVATSKRRAKAAANSKAGIADLLAWCAKQHVLPHELRAILEGTGVYHEQAALALTDAGVTVSIVNPAQVKDFGRSLGIRTKTDGVDSLILARYGALLNPKPWHPPSQEARVLQALLSRREAIAQDLQRERNRLEKAGATDTPALIHQSLLDSIAFLEKQLAKLQHDIDEHIHKHPGLKADRELLTSIPAVGPQVGNHLLSVMHNHCFQSAEQLAAYLGLVPVERQSGTSLLGRPRLSKAGPARIRAILYMAAVVGTQHNPHLKALYLRLQARGKTKMSALGAVMRKLAHLCFGVLKTRQPYRPDYGIPA

SEQ ID NO: 12983 - protein, 303 aa, unidentified
  source 1..303: note = protein_e330018
  REGION 3..111: note = RuvC_domain
  SITE 15: note = RuvC_P2
  SITE 51: note = RuvC_P3
  SITE 53: note = RuvC_P4
  SITE 56: note = RuvC_P5
  REGION 174..258: note = Tnp_domain
  SITE 182: note = Tnp_P1
  SITE 212: note = Tnp_P2
  SITE 220: note = Tnp_P3
  SITE 221: note = Tnp_P4
  SITE 233: note = Tnp_P5
MSFFSSLAPCLVGIEACATAHHWARQIRQFGHDVRLIPPGYVKLYVRRGAKNDAADAAAICEAVTRPNMRFVPIKSVENQGFLMLHRARGLLVRQRTTTACAVRAHFAEFEIIVGQGRQRVDGLVDLLGDEELTLPTHARIALAVLVNQLKELDRQVEAIQRELAQIQRVNPMAKSLSSIPGIGPITATALAATVPDATMFRSGREFASWLGLTPKQNSTGGKDRLGRITKQGDSYLRHLLVIGARNVVRYPKARSRVGGGWIEALLERRRPMVVAVAVANKLARIVWAMMTTGEFYRPKLAA

SEQ ID NO: 12984 - protein, 347 aa, unidentified
  source 1..347: note = protein_c0e7f23
  REGION 5..152: note = RuvC_domain
  SITE 8: note = RuvC_P1
  SITE 55: note = RuvC_P2
  SITE 92: note = RuvC_P3
  SITE 94: note = RuvC_P4
  SITE 97: note = RuvC_P5
  REGION 213..299: note = Tnp_domain
  SITE 221: note = Tnp_P1
  SITE 251: note = Tnp_P2
  SITE 259: note = Tnp_P3
  SITE 260: note = Tnp_P4
  SITE 272: note = Tnp_P5
MTYFTGIDVSLRSVSICVVDDRGEVCREAKVDAHVDVIVDWLHAFSPELKSVGFEAGALSQYLTYGLQAAGFEVICLEARQVKNTLDAMRNKTDRNDARGIAQILRTGWYSRVHIKSLHSHRVRALLASRKAILTKCVDLENELRGLLRVFGIRLAPRVGHGSFDAQVRQTFADDEMLSCALVPLLDARTVLYKTYLKLDNAVKALTKADPLCVRLMSIPGVGPVAALTFKSAVDDPARFKSSRNVAAHFGLTPERYQSGEMDNPGHISRAGDADVRSALYVAAHSLLTRNAQWSSLKAWGMRLAKTRGHRRAVIAVARKLAVILHRMWVDGSEFRWGSQEPIAVKA

SEQ ID NO: 12985 - protein, 343 aa, unidentified
  source 1..343: note = protein_b6a963f
  REGION 6..146: note = RuvC_domain
  SITE 9: note = RuvC_P1
  SITE 52: note = RuvC_P2
  SITE 87: note = RuvC_P3
  SITE 89: note = RuvC_P4
  SITE 92: note = RuvC_P5
  REGION 211..296: note = Tnp_domain
  SITE 219: note = Tnp_P1
  SITE 249: note = Tnp_P2
  SITE 257: note = Tnp_P3
  SITE 258: note = Tnp_P4
  SITE 270: note = Tnp_P5
MQIRSVGIDLGKTTFHLVALGDNGKILLRKKFTQKQLITFTANVQTCLIGMEACSGAHFLGRTLREQGHDVKLIPAQFVKPFVKSNKNDFLDAEAIAEAVDRHNMRFVPIKTDDQLDLQALHRVRDRLITRRTSVINQLRAFLLERGLVFAKSPAKLRERMPQLLENDAEDLTPRMRNLLALLWNEWKDLEQQVIDLNLEVEQIASSDAACTRLRQIPGIGPLIATAIVAAIGNGAAFRKGREFAAWMGLVPKQYSTGGRAKLSGISKRGNSYLRKILIHGARAVVLRCKRDRLTIGPWMTALEARAPRNVLIVAAANKLARIAWAVLSTGKEYRGIPAAIAA

SEQ ID NO: 12986 - protein, 304 aa, unidentified
  source 1..304: note = protein_66df92b
  REGION 4..145: note = RuvC_domain
  SITE 7: note = RuvC_P1
  SITE 50: note = RuvC_P2
  SITE 90: note = RuvC_P3
  SITE 92: note = RuvC_P4
  SITE 95: note = RuvC_P5
  REGION 182..266: note = Tnp_domain
  SITE 190: note = Tnp_P1
  SITE 219: note = Tnp_P2
  SITE 227: note = Tnp_P3
  SITE 228: note = Tnp_P4
  SITE 239: note = Tnp_P5
MNGIGIDVSKRRLDVGTSDGQTLQVSNDPSGFAELDLWLRQRPSNQIVLEATGGYEQPVLDFLHKAGHPVVRANALRARKLAQGLGQRAKTDRLDAYALAQMATLVKLPAYQPLEAWQQKLREFVRARRQMIQALAVARQQQEMVGDRELRRLLQANITHLKTLVKRLGKQIAEQLAQQPQLTVLKSMKGVGPVVQAVLASYLPELGHISGKAIASLVGVAPMSHDSGTMRGKRSIHGGRAEIRQVLYMAGMSALQHEPRIRDFYRSLRARGKEAKVAIVAVMRKMLVILNARVRDAQSGPIPA

SEQ ID NO: 12987 - protein, 342 aa, unidentified
  source 1..342: note = protein_21b67a9
  REGION 7..149: note = RuvC_domain
  SITE 10: note = RuvC_P1
  SITE 53: note = RuvC_P2
  SITE 88: note = RuvC_P3
  SITE 90: note = RuvC_P4
  SITE 93: note = RuvC_P5
  REGION 212..294: note = Tnp_domain
  SITE 219: note = Tnp_P1
  SITE 249: note = Tnp_P2
  SITE 257: note = Tnp_P3
  SITE 258: note = Tnp_P4
  SITE 270: note = Tnp_P5
MTEVSTIGLDLAKSVFQVHGADASGAVVFRKTLRRARVLEFFRDLPRCFVAMEACGGAHHWAREIGRLGHEVRLIPPIYVKPFVKRQKNDASDAEAICEAAQRPTMRFVAVKSESAQASAAIFRTRDLLVRQRTQLINAVRGQLTEYGLVAAKGTANLPRLLALVDEPGSDLPQATRAMLDVLIGMVMMLAEQISALDREIARRAKEEDMPSRLMTIPGVGPITATAIAALAPPVETFHKGRDFAAWLGLTPVQRSTGGRQKLGATSKMGERTIRRLLIIGAAALVRQTSRREPPPGSWLARMLARKPRMLVITALANKMARTVWALLAHNEVYRAPAVAAT

SEQ ID NO: 12988 - protein, 304 aa, unidentified
  source 1..304: note = protein_3138989
  REGION 4..147: note = RuvC_domain
  SITE 7: note = RuvC_P1
  SITE 50: note = RuvC_P2
  SITE 90: note = RuvC_P3
  SITE 92: note = RuvC_P4
  SITE 95: note = RuvC_P5
  REGION 182..266: note = Tnp_domain
  SITE 190: note = Tnp_P1
  SITE 219: note = Tnp_P2
  SITE 227: note = Tnp_P3
  SITE 228: note = Tnp_P4
  SITE 239: note = Tnp_P5
MNGIGIDVSKRQLDVGMTDGQILKVSNSAAGFAELDAWLRERPTSQIVLEATGGYEQCVLDFLHKAGHPVVRANAFRARKLAQGLGHIAKTDRLDAYALAKMAALVKLPPYQPLEPWQQKLREFVRARRQTMDALAVARQQQQMVTDRELRRLLQANITRLQTLVQRLGNQIAEQVAQQPQLAVLKSMKGVGTGLQAVLASYLPELGRINGKAIASLVGVAPMSHDSGTMRGKRSIHGGRAEIRQVLYMASMSALQHEPRLRDFYRSLRARGKEAKVAIVAVMRKMLVILNARVRDAQSGPIPA

SEQ ID NO: 12989 - protein, 342 aa, unidentified
  source 1..342: note = protein_cdc9086
  REGION 6..147: note = RuvC_domain
  SITE 9: note = RuvC_P1
  SITE 52: note = RuvC_P2
  SITE 87: note = RuvC_P3
  SITE 89: note = RuvC_P4
  SITE 92: note = RuvC_P5
  REGION 211..294: note = Tnp_domain
  SITE 219: note = Tnp_P1
  SITE 249: note = Tnp_P2
  SITE 257: note = Tnp_P3
  SITE 258: note = Tnp_P4
  SITE 270: note = Tnp_P5
MQIVVLGIDLGKNSCSVVGLDASGRVVLRRRLQREGVVKLAAGLPGCVMAMEACCGAHHLGRRLRDQGHQVRLMSPEYVRPYVKAQKNDDRDAEAIAEAATRPTMRFVELKSETQLDMQSLHRARDRLVGERTALINQLRAFLLERGIIVPQGRRKLELQLGTLLAGEEASLSPRTRLLIEDQWAEWRELDRRIEAFDEEFAREARADEAARLLLTIPGIGPLNATALVAAIGKAETFGRGRDLAAWLGLVPRQMTTGGKPKLLGISKRGNGYLRKMLIHGARAALPTLSKGETPLASWLRGLMGRAHVNTVVVALAAKLARTICAVLRTGQKFDLRSPMVS

SEQ ID NO: 12990 - protein, 399 aa, unidentified
  source 1..399: note = protein_ee84766
  REGION 19..167: note = RuvC_domain
  SITE 22: note = RuvC_P1
  SITE 68: note = RuvC_P2
  SITE 106: note = RuvC_P3
  SITE 108: note = RuvC_P4
  SITE 111: note = RuvC_P5
  REGION 234..320: note = Tnp_domain
  SITE 242: note = Tnp_P1
  SITE 272: note = Tnp_P2
  SITE 280: note = Tnp_P3
  SITE 281: note = Tnp_P4
  SITE 293: note = Tnp_P5
MPSTNLQNSIDFKGQKFYVGLDVHKNSWAVTIRSMGIEVGRFTQPPCAATLAAHLQKNYPGGRYFSAYEAGFCGTGIHEQLCKLGITNIIVHAADIPATDKQKKNKTDVHDSRSIADYLEKGKLTGIYVMTREQQELRSLFRLRESKVKDVTIVNNKLKSFLMFFSIELPDAILKKQHLSVKALQWLSNLEMASTAGAITLRQHIEELKYQRKQLYQITKLLREQIQATDPQTYRCLLSVPGIGGVTAMGLIAEIADFSRFDDPDQYSSFLGLYPWEDSSGDTIKTKGMQPRCNRHLRPLLVEASWMAIRKSPALFAYYSKHAVRNSKQAIVKVARRLAMIAKGVATTQQLYQADYLQNIRQKQQEQKQAQKNKRFSSGITQQHINKQPDNNILISLPG

SEQ ID NO: 12991 - protein, 312 aa, unidentified
  source 1..312: note = protein_ae2a0d1
  REGION 6..148: note = RuvC_domain
  SITE 9: note = RuvC_P1
  SITE 53: note = RuvC_P2
  SITE 93: note = RuvC_P3
  SITE 95: note = RuvC_P4
  SITE 98: note = RuvC_P5
  REGION 189..273: note = Tnp_domain
  SITE 197: note = Tnp_P1
  SITE 226: note = Tnp_P2
  SITE 234: note = Tnp_P3
  SITE 235: note = Tnp_P4
  SITE 246: note = Tnp_P5
MAKDTIGIDVSKDRLDAFWHSRDVALSLPNTADGFTQLSAWLSEENGVLVVFEATGAYHRGLERHLSLAGQPFIKVNPKQARRFAQAIGRLAKTDGVDAKMLARMGVVLDLAPQGIESEDVHDLRELLTARRALVKDQITAKTRLATANNPLVKDQLCRRIDDIDRDVRALDEVIAQIAKQRGTLDERIRRLMTIPGIGRLTATILMIDMPELGHLDSKKIAALAGLAPMTQRSGKWQGKERILGGRSSLRRAIYMPALVAIRFNHDLRDKYQQLVNAGKAKKVAITAVMRRIIVLANTLLREGRDWQPNRP

SEQ ID NO: 12992 - protein, 333 aa, unidentified
  source 1..333: note = protein_7e3cb0c
  REGION 23..170: note = RuvC_domain
  SITE 26: note = RuvC_P1
  SITE 70: note = RuvC_P2
  SITE 110: note = RuvC_P3
  SITE 112: note = RuvC_P4
  SITE 115: note = RuvC_P5
  REGION 206..291: note = Tnp_domain
  SITE 214: note = Tnp_P1
  SITE 243: note = Tnp_P2
  SITE 251: note = Tnp_P3
  SITE 252: note = Tnp_P4
  SITE 263: note = Tnp_P5
MGFEPEPSKEGSWMMAQNGLVVAGIDIAKDKADACIRALSQRRTFPSTAEGRRQLISWLRKHKATKAVMEASGGYEREWAKALREKEVEVRIVDPKRVRHFAQSAGRLAKNDTIDADTIAWFAETFGEAPGQAYDAEREKLAQIVNARRGLLETETMLANQGEHSVPDVVRKMQARLLKKIALEVAKLDAAIAAMIKATPHFAKLAEIIESVPGLGEGASAGLIAGMPELGQVSNKVAAALLGVAPYDDDSGKRRGERQIKGGRRRIRNLFYMPCMGAATRHNPVLKAFYDRLIAKGKLKKVAIVACMRKLIVILNIMIARGEKWDAKRYAVG

SEQ ID NO: 12993 - protein, 403 aa, unidentified
  source 1..403: note = protein_6bb92b0
  REGION 6..162: note = RuvC_domain
  SITE 9: note = RuvC_P1
  SITE 59: note = RuvC_P2
  SITE 99: note = RuvC_P3
  SITE 101: note = RuvC_P4
  SITE 104: note = RuvC_P5
  REGION 276..363: note = Tnp_domain
  SITE 284: note = Tnp_P1
  SITE 314: note = Tnp_P2
  SITE 322: note = Tnp_P3
  SITE 323: note = Tnp_P4
  SITE 336: note = Tnp_P5
MNMNAVGIDVSKGKSMVAILHPFGEIVSTPFEVKHTVSGIRSLIEHIKAIDGESRIVMEHTGRYYEPLVRELSQADLFVSAVNPKLIKDFGDNSLRKVKSDKADAVKIARYTLDSWTELRQYSLMDEIRNQLKTMNRQFSFYMKHKTAMKNNLIGILDQTYPGVNAYFDSPARSDGSQKWVDFASTYWHVDCVRKMSLNAFTCHYQNWCKRKKYNFSQSKAEEIYGKAKELVPVLPKDDLTKLIIRQAVDQLNSASTTVESLRTLMNETASKLPEYPIVMDMKGVGKSLGPQLMAEIGDVSRFTHKGAITAFAGVDPGVNESGSYEQKSVPTSKRGSGTLRKTLFQVMDALIKTKPQDDPVYLFMDKKRSQGKPYYVYMTAGANKFLRIYYGRVKEYLSSLPK

SEQ ID NO: 12994 - protein, 342 aa, unidentified
  source 1..342: note = protein_11cc11f
  REGION 5..152: note = RuvC_domain
  SITE 8: note = RuvC_P1
  SITE 53: note = RuvC_P2
  SITE 91: note = RuvC_P3
  SITE 93: note = RuvC_P4
  SITE 96: note = RuvC_P5
  REGION 211..297: note = Tnp_domain
  SITE 219: note = Tnp_P1
  SITE 249: note = Tnp_P2
  SITE 257: note = Tnp_P3
  SITE 258: note = Tnp_P4
  SITE 270: note = Tnp_P5
MDDFIGLDVSMKETAISIRRAGARVWRGKCASDPKLIAELVHKRAPDVKRVVFETGPLSVWFYHALRAEGLPAICIDARHAKAALDMAPNKTDANDADGLAHLAEVGFYREVRVKGFDSMLTRTLVGARARLVRMTTELSNQIRGLMKTFGIIVPAGKGNMFERHVQRLLADQEQLAPVILPLLKAWCSLRMRAADLARQLIVDARQSETCKILMSIPGVGVTVATSFAAAIEDPSNFKTSRSVGAWLGLTTRRYQSGEIDYDGHISRRGDPRLRTLLYEAATVMLTRSSAASCLRTWGLKLKERVGFKRAAVAVARKLAVTMLAMLKTSAYFDRQLGGVAA

SEQ ID NO: 12995 - protein, 343 aa, unidentified
  source 1..343: note = protein_be5ffdf
  REGION 7..149: note = RuvC_domain
  SITE 10: note = RuvC_P1
  SITE 53: note = RuvC_P2
  SITE 88: note = RuvC_P3
  SITE 90: note = RuvC_P4
  SITE 93: note = RuvC_P5
  REGION 211..295: note = Tnp_domain
  SITE 219: note = Tnp_P1
  SITE 249: note = Tnp_P2
  SITE 257: note = Tnp_P3
  SITE 258: note = Tnp_P4
  SITE 270: note = Tnp_P5
MTTATMIGIDLAKNVFQVHGTSMTGELKFRKKLSRIHFRSFMSGHPRAIVVMEACGSAHYWAREIAKYGHEVKLIAPQYVRPFVKRQKNDAADAEAIVIAAQRPEMRFITPKAEEQQARALLFRGRERLVRQRTELVNALRSVLYEFGHPTPQGIVHLARVEAIVEAENSDLPSLVREECRDLLLQICEKTQRIEARTKQIGALATQTDTARRLQTMPGVGPVSALAVEAFAPPMESFRRGRDFAAWLGLVPRQHSSGGKERLGRISKAGQADIRRLLIMGAMSRLNWLGRKKIPDGSWLSRMLARKPRMLVAIALANKMARGIWAMMTKKKDYEKPAQSAFA

SEQ ID NO: 12996 - protein, 347 aa, unidentified
  source 1..347: note = protein_a5f97f6
  REGION 7..149: note = RuvC_domain
  SITE 10: note = RuvC_P1
  SITE 53: note = RuvC_P2
  SITE 88: note = RuvC_P3
  SITE 90: note = RuvC_P4
  SITE 93: note = RuvC_P5
  REGION 214..302: note = Tnp_domain
  SITE 221: note = Tnp_P1
  SITE 251: note = Tnp_P2
  SITE 259: note = Tnp_P3
  SITE 260: note = Tnp_P4
  SITE 272: note = Tnp_P5
MSKIITIGLDIAKNSFAAHGFDEFGKTVLKKELKRGQVLAFFARNPGCLVGIEACASAHHWAREITGLGHDVRLIPAQRIKAFLPRQKNDAADAHAIARAVRDPEMRFVAVKSVEQQAALMLFKTRELLIRQRTQLSNALRGHFGEIGIVVPRGAHEVHALVERVMNEEKAQELPCAMRAALRPVVSMLFTLNEEISSLDRAIRQVHRADDTSLKLAEVPGIGPLIAMVLSASVGRPTYFSSGREFAAYLGLVPRQHSTGGKTRLEAISKMGNSDLRRLLVVGARAVLARMKSGKAKSALAEWARKLLEKKSFALVSVALATKMARIAWAIMAKGRRYDPSYIGKPA

SEQ ID NO: 12997 - protein, 341 aa, unidentified
  source 1..341: note = protein_8e210e6
  REGION 7..150: note = RuvC_domain
  SITE 10: note = RuvC_P1
  SITE 53: note = RuvC_P2
  SITE 89: note = RuvC_P3
  SITE 91: note = RuvC_P4
  SITE 94: note = RuvC_P5
  REGION 213..299: note = Tnp_domain
  SITE 221: note = Tnp_P1
  SITE 251: note = Tnp_P2
  SITE 259: note = Tnp_P3
  SITE 260: note = Tnp_P4
  SITE 272: note = Tnp_P5
MSELSMIGFDLAKSVFQVHGVDEAGEVVVKRQLRRAEVLKFFARLDPCVVGMEACASAHHWARELVKLGHDVRLLPPAYVKPYVKRGRKNDAVDAAAICEALQRRHIQAVPIKTEAQQAVLSLHRVRSLLMTQRTMLGNALRSHMAEFGIVGPQGDAGLGRLVAMALDTEDRALPQAAREAWAMLAAQWRETDAKIAVLDREILVSHRADADSRRVATIPGIGPLTASALVVTIGDPRRFENGRQFAAWLGLVPKQNSSGGKERLGGITKMGDRYLRSLLVLGATAMLRHRQKEQGTWLANLRARKSARQVTVALANKMARIAWAILAKGGVYQDRAAQAA

SEQ ID NO: 12998 - protein, 339 aa, unidentified
  source 1..339: note = protein_e72fa8a
  REGION 6..147: note = RuvC_domain
  SITE 9: note = RuvC_P1
  SITE 52: note = RuvC_P2
  SITE 87: note = RuvC_P3
  SITE 89: note = RuvC_P4
  SITE 92: note = RuvC_P5
  REGION 210..298: note = Tnp_domain
  SITE 218: note = Tnp_P1
  SITE 248: note = Tnp_P2
  SITE 256: note = Tnp_P3
  SITE 257: note = Tnp_P4
  SITE 269: note = Tnp_P5
MPLTTVGVDIAKNVIQLHYIDAETGEIINKPIKRAVFLEQFANRAPCLIGMEACGGSQHWARKLMAMGHEVKLMPAKFVKAFVMGNKNDAADARAIWMAVQQPGKSVAVKTETQQAVLALHRMRQQLVKFRTMQINSLRGLLTEYGEVMAKGRAALDKAVPGVLERLVDRLPAILIDTLREQWTGLTAIDKQIVVIERRLQAWMKEDEACRAIAAIPGVGLLTATAAVATMGNAKAFKSGREFASWLGLVPAQTGSGGKIQLLGISRRGDIYLRTLLIHGARSVLFLTKDPGPWLEQMRKRRPLNVTVVAQANKMARTIWAILAHEKQYNKKHVSVKPG

SEQ ID NO: 12999 - protein, 421 aa, unidentified
  source 1..421: note = protein_a9e8b76
  REGION 27..182: note = RuvC_domain
  SITE 30: note = RuvC_P1
  SITE 78: note = RuvC_P2
  SITE 118: note = RuvC_P3
  SITE 120: note = RuvC_P4
  SITE 123: note = RuvC_P5
  REGION 289..374: note = Tnp_domain
  SITE 297: note = Tnp_P1
  SITE 327: note = Tnp_P2
  SITE 335: note = Tnp_P3
  SITE 336: note = Tnp_P4
  SITE 348: note = Tnp_P5
MAFPQLFRQQVGEGALVAVPGQVDVWIGLDVGKQAHFADVLDNDGERLFAQAVANGQGDLEALLDRAAGHGTPGLVIDQPGSIAQLALAVAAGRGVPVAYVPGLVMRRAADLYPGEAKTDRRDAYVLADTGRTRRKQVHWLDAGSDELLASLRVLNGFDIDLAADQTRLANRLRDALTATSPALERALGERLHQPGVRDLLARYPTLTALRAASQSRIERTIKARSPRIAGKVTIAIAAVLAAQDVTVPAEATTGRVIAELAAELDRVCSRREALAAEIEETFLAHPSGELLASLPGIGPQTGARILAEIGDGSAYANGSKLAAYAGLAPVTRQSGTTLNAETRSRRGNHRLKNAMFLAAFASLRDPASKAFYDRKRAEGKRHNAALICLARRRCDVILAMLRTHQPYQPTRPASGLADAA

SEQ ID NO: 13000 - protein, 388 aa, unidentified
  source 1..388: note = protein_2e7c6ae
  REGION 6..159: note = RuvC_domain
  SITE 9: note = RuvC_P1
  SITE 57: note = RuvC_P2
  SITE 98: note = RuvC_P3
  SITE 100: note = RuvC_P4
  SITE 103: note = RuvC_P5
  REGION 221..306: note = Tnp_domain
  SITE 229: note = Tnp_P1
  SITE 259: note = Tnp_P2
  SITE 267: note = Tnp_P3
  SITE 268: note = Tnp_P4
  SITE 279: note = Tnp_P5
MAAVVIGMDPHKRSATIEVMAGDETVLDGGRFATDTDGYDAMLRLARRFAERTWAIEGCQGIGRHIANRLLADGESVVDVPPKLSARARVFATGQGRKTDATDAHSVALVGTRMSGLRPVINDQQLAVLRVLVDRRRSLGEDHTRMVSQLHLLLLELIPGGAKKDLSAAQAKALLSKVRPRDAAGKTRRRVAAELIADLERIYARKKAANKELKALVEATGTSLMDLEGIGPSGAARLLVEVGDVTRFPDKAHFASWNGTAPIDASSGDQVRHRLSRAGNRQINRVLHIMATVQLRHATEGRAYFDRRVAEAKTPMEAMRALKRRLSDIVYRHLIDDAITHTMTGPGGQPGHDSDSSATGSHPTAGSSDKSLPGPAASHPKPHLPAAS

SEQ ID NO: 13001 - protein, 406 aa, unidentified
  source 1..406: note = protein_50fb59a
  REGION 4..163: note = RuvC_domain
  SITE 7: note = RuvC_P1
  SITE 60: note = RuvC_P2
  SITE 100: note = RuvC_P3
  SITE 102: note = RuvC_P4
  SITE 105: note = RuvC_P5
  REGION 271..357: note = Tnp_domain
  SITE 279: note = Tnp_P1
  SITE 310: note = Tnp_P2
  SITE 318: note = Tnp_P3
  SITE 319: note = Tnp_P4
MLFVGDDWAEDHHDVEIQDETGRRLAKARLPEGISGIARLHGLVGRFLPEDGAAAQVKIGIETDRGPWVAALVTSGYQVYAINPLQSARAREGHGVSGAKSDAGDAHVLADLVRNHSHQLRTVAGDSEQASAVKVLTRMHQTLIWERTRQVLRLRSSLREFFPAALEAYEDLAYPDVLELLTKAPEPDSAARLTRAQIIVALTRARRRDREAKTTVIMGALRAAHLTQPPLIAAAYGATVRALAALITTANEQITALEGQVEAYFGQHPDAEIYLSQPGLGPVLGARVLAEFGDDSSRYAGARARKNYSGTSPITRASGKKKVVLARYVRNNRLADALHQQAFSALSGSPGARAYYDALRDRDISYNAALRQLGNRLVGILHGCLKTHTPYDEATAWNQHAQQAAA

SEQ ID NO: 13002 - protein, 407 aa, unidentified
  source 1..407: note = protein_a5c9391
  REGION 4..160: note = RuvC_domain
  SITE 7: note = RuvC_P1
  SITE 59: note = RuvC_P2
  SITE 97: note = RuvC_P3
  SITE 99: note = RuvC_P4
  SITE 102: note = RuvC_P5
  REGION 269..355: note = Tnp_domain
  SITE 277: note = Tnp_P1
  SITE 308: note = Tnp_P2
  SITE 316: note = Tnp_P3
  SITE 317: note = Tnp_P4
MIFAGVDWAEAHHDVHVQDESGKRLGGGRLPEGVEGIARFHELAARHAQEPGDVVIGIETDRGLFVTALVAAGYQVFAVNPMSVSRYRDRHSVSGAKSDPGDAKVLADLVRTDRHNHRPVAGDSDLAEAVKVLARAHQSMIWSRRRQANMLRSALREFYPAALAAFDDLTSGDAIEVLRAAPAPALGAALSRPKIAAALCRGGRQRRIDARATDIQATLRSPQLAGSPVVAAAMGASVSASVAVIAEMTTQITVLERQLAADFEQHPDAEVVRSLPGLGTVLGARVLGEFGDDPGRYATAKCRKNYGGTSPITRASGTRRVVLARHVRNKRLADAIYLWAFASITASPGARAYYDTRRAAGNTHDAALRALGNRLVGILHGCLTNHTVYSETTAWAHRTDTKLTQAA

SEQ ID NO: 13003 - protein, 398 aa, unidentified
  source 1..398: note = protein_1a83d9f
  REGION 10..164: note = RuvC_domain
  SITE 13: note = RuvC_P1
  SITE 61: note = RuvC_P2
  SITE 101: note = RuvC_P3
  SITE 103: note = RuvC_P4
  SITE 106: note = RuvC_P5
  REGION 271..356: note = Tnp_domain
  SITE 279: note = Tnp_P1
  SITE 309: note = Tnp_P2
  SITE 317: note = Tnp_P3
  SITE 318: note = Tnp_P4
  SITE 330: note = Tnp_P5
MDQDRFDVFVGLDVGKEHHHATALNSAGRRLHDKALPQDEAALREVFDKLTVHGSVLVIVDQPATIGALPVTVARAMGIEVAYLPGLAMRRIADLHPGNAKTDAREAFIIAEAGRTMPHALRRVGGGDDLIADLAVIVGFDDELASEVNRVSNRIRGMLTQIHPALERAIGANIGHPAVLALLAKFAGPTGLAAAGRRRLTTTTKPLAPRMHTRLVDAIIKALTEQTVVVPGTRAAELVLPQLAAQLQGLLAQRAAAAKQVEEALDAHPLSQLLMSMPGVGIRTAARLLLDVGDATAFPTAGHLAAYAGLAPVTRRSGSSIRGEHPSRAGNKHLKRALFLSAFAALHDPDSRAYYDRKRAAGKKHNAAIICLARRRVDVLHAMLRNGTYYQPRPAVAA

SEQ ID NO: 13004 - protein, 344 aa, unidentified
  source 1..344: note = protein_6393fc0
  REGION 6..146: note = RuvC_domain
  SITE 9: note = RuvC_P1
  SITE 52: note = RuvC_P2
  SITE 87: note = RuvC_P3
  SITE 89: note = RuvC_P4
  SITE 92: note = RuvC_P5
  REGION 211..298: note = Tnp_domain
  SITE 219: note = Tnp_P1
  SITE 249: note = Tnp_P2
  SITE 257: note = Tnp_P3
  SITE 258: note = Tnp_P4
  SITE 270: note = Tnp_P5
MNIASIGIDLGKTTFHLVALGERNKILLRRKFSRSQLLAYTANLPASLIGLEACAGSHFIGTVLREQGHQVRLIPAQFVKPYRKSNKNDFIDAEAIAEAVTKQNMRFVQIKTQEQLDWQAMHRVRDRLMQRRTALINEIRGFLLERGLTFAARPIYLRKNLPTVIEDAEQNLTPRLRWLLDRLWQEWKQTEIDIKTVTDELERISKEDARCQRLLQIPGFGPLVSTATVAAIGNGAAFRRGRDFAAWVGVVPRQYSTGGKQKLFGISKRGNIYLRRMLIHGARAVLLRVKYDTGGFGQWVHRLAQRAPRNKVVVAIANKLARMAWAVLSSGQQYRHQPLQLAAA

SEQ ID NO: 13005 - protein, 412 aa, unidentified
  source 1..412: note = protein_4dba94b
  REGION 4..160: note = RuvC_domain
  SITE 7: note = RuvC_P1
  SITE 57: note = RuvC_P2
  SITE 97: note = RuvC_P3
  SITE 99: note = RuvC_P4
  SITE 102: note = RuvC_P5
  REGION 274..361: note = Tnp_domain
  SITE 282: note = Tnp_P1
  SITE 312: note = Tnp_P2
  SITE 320: note = Tnp_P3
  SITE 321: note = Tnp_P4
  SITE 334: note = Tnp_P5
MNAVGIDVSKGKSMVSVIRPFGELVAKPYEVRHTSSELSELAKHLKSLEGETRVVMEHTGRYYEPVAQLLHDAGIFVSAVNPLLIKEYGNNSLRKVKTDRADALKIARYGLDNWTELREHTPMDTIRYQLKSMNRQYGLYTKNKTAMKNNLIALLDQTYPGVNALFESPTRADGSQKWVDFAASFWHVDCVRGLGQAAFAERYRKWCKRHGYNFNIGKAIEIHTEAKELISMLPKDALSKVMVQEAITQLNTVSKTVELFRAEMNRLAMELPEYDIVMGLYGTGKSLGPQLMAEIGDIRRFAHKGSLTAFAGVDPGANQSGTYEAKSTRSSKRGSPELRKTLFVLMTVLLQKAPPADPVFQFLDKKRAEGKPYHVYMTAGCNKFLRIYYGRVKEYMNTLDTPVDTDSTGLSR

SEQ ID NO: 13006 - protein, 345 aa, unidentified
  source 1..345: note = protein_4a9a3a5
  REGION 7..148: note = RuvC_domain
  SITE 10: note = RuvC_P1
  SITE 53: note = RuvC_P2
  SITE 88: note = RuvC_P3
  SITE 90: note = RuvC_P4
  SITE 93: note = RuvC_P5
  REGION 210..295: note = Tnp_domain
  SITE 218: note = Tnp_P1
  SITE 248: note = Tnp_P2
  SITE 256: note = Tnp_P3
  SITE 257: note = Tnp_P4
  SITE 269: note = Tnp_P5
MSEIIRIGMDASKYIFVLHGVDAEERTVLRKRLSRKAMLEFFAKLPPTLVAIEACGASHYWARELAKLGHEVRQIAPQLVKPYVARNKNDGRDAEGLCEAVSRPRMRFVPTKTAEQQAAVMLLGVREQLVTRRTQLANAIRGHATEFGLIAAQGLDKLASLLERIAQDEGLPELARGLFTMLGRQYEQVQVELKAIEAKLMAWHRADATCRRLAEIPGIGPVTAAALVMKAPDPHAFRSGRLFAAWLGLTPKDHSTAGKTRLGTITRAGDETLRSLLVVGATSVVKLAKGPKQRGPRWLIELLKRKSPKLAAVALANKMARIAWKLMTTGESYRARIDAAAPTPA

SEQ ID NO: 13007 - protein, 335 aa, unidentified
  source 1..335: note = protein_ec17c13
  REGION 1..93: note = RuvC_domain
  SITE 30: note = RuvC_P3
  SITE 32: note = RuvC_P4
  SITE 35: note = RuvC_P5
  REGION 200..287: note = Tnp_domain
  SITE 208: note = Tnp_P1
  SITE 239: note = Tnp_P2
  SITE 247: note = Tnp_P3
  SITE 248: note = Tnp_P4
  SITE 259: note = Tnp_P5
MIAGAGHPVWMVEPAAFKAARPRWGSAGAKSDLGDAFKLADYARTDGHQLRRVEPLERATRELAALVRARTALVEARTAASNQLWAILAEHWPGAAMVFQKLTSQIALAFLTDYPTPQAAALVGEGRMGQFCRRHSYRGGKSPAELVRRLRAAPASANPIAPKILEAIVRSSTAQIRLLNTEISRLEADIAHALAAHPKTPLLQTLPRVATVSLAALIAEIGPLLERCENPEQVAAMCGAAPVTRASGKSRTVSFRYTANKPARVAITGFADNSRHSSAWASDAYRRARARGARHPHAVRILARSWVRVIWTCWTTDTIYDPARHRTEQLITAAT

SEQ ID NO: 13008 - protein, 342 aa, unidentified
  source 1..342: note = protein_cd71266
  REGION 6..147: note = RuvC_domain
  SITE 9: note = RuvC_P1
  SITE 52: note = RuvC_P2
  SITE 87: note = RuvC_P3
  SITE 89: note = RuvC_P4
  SITE 92: note = RuvC_P5
  REGION 211..296: note = Tnp_domain
  SITE 219: note = Tnp_P1
  SITE 249: note = Tnp_P2
  SITE 257: note = Tnp_P3
  SITE 258: note = Tnp_P4
  SITE 270: note = Tnp_P5
MQISTIGIDIGKNSFHFVAFDARGGIVIRRQCSRTQLIRALANLPPCLVGMEACCGAHHLGRILVAQGHDVRLIPPQYVKPFVKSHKNDLLDAEAIGEAVQRPTMRFVPLKTMEQLDLQAIHRLRTRLVRRRTAVINQLRGFLLERGVTFPIGRRVLIERFPEVLDNPALGLSVRFCRLLQQLRDEWRLLDGSIQDVDQEILSLARDDEACERLMQVPGIGPLTATALVAAVGNGAAFAKGRDLAAWLGLVPRQHSTGGKTVLRGISKRGNAYLRCLFIHGARAVCRHHRQRPHRLGRWLANLEARAHPNVVVVALANKLVRTAWAVLQRNTHYDGRLLANA

SEQ ID NO: 13009 - protein, 406 aa, unidentified
  source 1..406: note = protein_cb60d9f
  REGION 4..162: note = RuvC_domain
  SITE 7: note = RuvC_P1
  SITE 60: note = RuvC_P2
  SITE 101: note = RuvC_P3
  SITE 103: note = RuvC_P4
  SITE 106: note = RuvC_P5
  REGION 268..355: note = Tnp_domain
  SITE 276: note = Tnp_P1
  SITE 306: note = Tnp_P2
  SITE 314: note = Tnp_P3
  SITE 315: note = Tnp_P4
  SITE 328: note = Tnp_P5
MICIGIDIAKRSHVASAVDEDGGTVVESFKFDNTANGFAKMLKRLRKADATPENSLVGMEATGRYWVALFDFLISHGYEAAVINPIQTDAFRGVWTVRKVKTDALDAAMIADLVRYKRYEPSALGDEATEELRNLARYRMSLVERSTALKNRATAILDRTFPELAGLFSNAYCPTRRELLQHCATPDQVLGTDVGTLERILREASRGRCGRAKAERLKALAEASVGVGFGSKTLAFEVRLLMEELDFVQGQIKEVEGELESLLERTRGKWLVTIPGIDVPLASVIAGEIGDPDGFDDPHRLMGYAGMDPTRSESGETVKSDGRMSKRGPGALRWALMQAADCARKNDPYFGDYYDRKKGEDKKHHYVALSGVARKLMGVALAVMKEGRPYEPAPPRNHRPGHLKEA

SEQ ID NO: 13010 - protein, 338 aa, unidentified
  source 1..338: note = protein_0cc9741
  REGION 6..152: note = RuvC_domain
  SITE 9: note = RuvC_P1
  SITE 53: note = RuvC_P2
  SITE 91: note = RuvC_P3
  SITE 93: note = RuvC_P4
  SITE 96: note = RuvC_P5
  REGION 211..298: note = Tnp_domain
  SITE 219: note = Tnp_P1
  SITE 249: note = Tnp_P2
  SITE 257: note = Tnp_P3
  SITE 258: note = Tnp_P4
  SITE 270: note = Tnp_P5
MAIVTLGIDLAKNVFAVHGVDATGKAVLMRPNVPRGRLLEVVASLPPCLVGMEACSGAHHWARLFQAHGHTVRLMAPKFVAPYRLSGKKGKNDAADAAAICEAVTRPSMRFVPPKSEQQQSELMVHRARQGFVQQRTATINRIRGLLSEFGIVLPLKAATVRREAMQQLEDLPGWANTVIGDLLSEVHRLDERIAQYDRHVEQIAKQSAAARQLMQLPGVGATTATALVATIGRGQEFRCGRQLSAWLGLVPGQYSSGGKQRLGRITKAGDPYLRMLLILGARSVLQTATDKTDPVSRWAVQLAARVGYWKAIVAIAAKNARMCWAVLHQGESFRLPA

SEQ ID NO: 13011 - protein, 398 aa, unidentified
  source 1..398: note = protein_5147214
  REGION 10..164: note = RuvC_domain
  SITE 13: note = RuvC_P1
  SITE 61: note = RuvC_P2
  SITE 101: note = RuvC_P3
  SITE 103: note = RuvC_P4
  SITE 106: note = RuvC_P5
  REGION 271..356: note = Tnp_domain
  SITE 279: note = Tnp_P1
  SITE 309: note = Tnp_P2
  SITE 317: note = Tnp_P3
  SITE 318: note = Tnp_P4
  SITE 330: note = Tnp_P5
MDQDRFDVFVGLDVGKEHHHATALNTAGKRMHDKALPQDESALREVFDKLAGYGSVLVIVDQPATIGALPVTVARALGIEVAYLPGLAMRRIADLHPGNAKTDARDAYIIAEAGRSMPHALRRVGGDDDLIADLAVIVGFDDDLAGEVTRVSNRIRGLLTQIHPALERAIGGDIGHPAVLALLTKFGGPTGLAAAGKRRLTTTAKPLAPRMHERLVQAIVKALTEQTVTVPGTRAAELVLPQLAAQLQGLLAQRAEAAKQVEEALDAHPLSQLLMSMPGVGIRTAARLLLDIGDGSAFATAGHLAAYAGLAPVTRRSGSSIRGEHPSRGGNKHLKRALFLSAFAALHDPDSRAYYDRKRAAGKKHNAALICLARRRVDVLHAMLRNGTYYQAKPAAAA

SEQ ID NO: 13012 - protein, 343 aa, unidentified
  source 1..343: note = protein_aca6af9
  REGION 7..149: note = RuvC_domain
  SITE 10: note = RuvC_P1
  SITE 53: note = RuvC_P2
  SITE 88: note = RuvC_P3
  SITE 90: note = RuvC_P4
  SITE 93: note = RuvC_P5
  REGION 213..303: note = Tnp_domain
  SITE 220: note = Tnp_P1
  SITE 250: note = Tnp_P2
  SITE 258: note = Tnp_P3
  SITE 259: note = Tnp_P4
  SITE 271: note = Tnp_P5
MTEVTTIGVDLAKNVFQIHGVDASGQPVIRRQLKRSQVLSFFKKQPPCLVGMEACASGHHWAREVSKLGHEVRLMPARYVKPYVKRNKNDAADAEAICEAVTRPTMRFVPIKTREQQSGLMQHRTRKLFVRQRTALINAMRAHLAEFGIVAGVGRNGVEKLVRLIDKGDDERVPSAARECLLALRDQLEAVKFRIHELDLRILAWHRSSELSLRLGEIPGVGPLIATALIASIPDPHAFRSGRDVSAWIGLVPKQNSTGGKERLGHISKAGDRYLRSLLMIGAFSLIKRAKQAGSTPRPWLAALLARRPTKVAAIALANKIARIAWAMMVRGTRYSEPAAQAA

SEQ ID NO: 13013 - protein, 348 aa, unidentified
  source 1..348: note = protein_f876e7b
  REGION 7..149: note = RuvC_domain
  SITE 10: note = RuvC_P1
  SITE 53: note = RuvC_P2
  SITE 88: note = RuvC_P3
  SITE 90: note = RuvC_P4
  SITE 93: note = RuvC_P5
  REGION 211..298: note = Tnp_domain
  SITE 219: note = Tnp_P1
  SITE 249: note = Tnp_P2
  SITE 257: note = Tnp_P3
  SITE 258: note = Tnp_P4
  SITE 270: note = Tnp_P5
MATVTLIGLDIGKHSFHLIGHDPRGNPVLKKQFNRNSLIEFLAKQPPCRIVMEACCGAHWLARKLTGFGHTVQLIAPQYIRPFVFGNKNDFIDAQAICEAATRPTMRYVAAKSAEQQALSALHRLRESRIAERIQTNNQIHALLLEFGIALPVGVRGITQLPTLLMDETNGLPVKARQILQRQLDHYRLLKTEIDELDHEIATEARQDDVARRLMTIPGIGAITASQLSADAGNAKGYGNARDFAASLGLVPRQYSTGGKSKLLGISKRGDKSLRRLLVQCARVIMQNAPRWKSAMAAWTVALMQRRHSNIVACALANKLARVVWALLAKGGEYRPQARALTEMQTAG

SEQ ID NO: 13014 - protein, 314 aa, unidentified
  source 1..314: note = protein_76aeb0d
  REGION 7..148: note = RuvC_domain
  SITE 10: note = RuvC_P1
  SITE 53: note = RuvC_P2
  SITE 93: note = RuvC_P3
  SITE 95: note = RuvC_P4
  SITE 98: note = RuvC_P5
  REGION 188..272: note = Tnp_domain
  SITE 196: note = Tnp_P1
  SITE 225: note = Tnp_P2
  SITE 233: note = Tnp_P3
  SITE 234: note = Tnp_P4
  SITE 245: note = Tnp_P5
MSSLVFVGIDVSQGCLDIAIRPGASFSLPHEESAIATLVEQLCALGPTLIVLEATGGMEIPLTSALATAGLPVVVVNPRQVRDFAKASGHLAKTDALDAQVLAQFAEVMRPQPRPLPDAEARALAALLTRRRQLVEMLTAEKNRLLSAPSPIRTRLRTHITWLERELQSTNTALAEAIRQSPVWREKDELLQSVPGVGPVLTSTLLASLPELGTLTHKQIAALVGVAPLNRDSGTLRGRRTVWGGRAQVRAVLYMGAIVAARFNPVIRVCYQRLQRAGKAKKVALTACMRKLLTILNAMLKHRTPWREVEAHHA

SEQ ID NO: 13015 - protein, 360 aa, unidentified
  source 1..360: note = protein_8070a48
  REGION 14..161: note = RuvC_domain
  SITE 17: note = RuvC_P1
  SITE 66: note = RuvC_P2
  SITE 102: note = RuvC_P3
  SITE 104: note = RuvC_P4
  SITE 107: note = RuvC_P5
  REGION 235..318: note = Tnp_domain
  SITE 271: note = Tnp_P2
  SITE 279: note = Tnp_P3
  SITE 280: note = Tnp_P4
  SITE 291: note = Tnp_P5
MKVGQEVLVCSVVGGVDTHKDLHVAAVVDERDHVVGSRCFATTRHGYKQMLAWMRSFGQLRRIGVEATGTYGAGLLRYMQNAGVEVLEVTTPDKHDRRKRGKNDDLDAQNAAHAAFTGKRTVTPKSRDGMIESLRVLKACRKTAVAARRVALQMIQNTIVCAPDELREALRKMTRMQLVRTLAAWRPDLTDYRNVVSAYRIALKSLGRRYLELHDEIADLDTMIIAITDELAPTLVARNSIGHGSAAQLLLTAGDNSERIHSEASFAALCGVSPVPASSGKTTRHRLNRGGDRAANSALHIIAIGRLRTDPRTKAYMAKRIAEGHSKLEVIRCLKRYIAREVFSLISQRRREINQAQVPA

SEQ ID NO: 13016 - protein, 405 aa, unidentified
  source 1..405: note = protein_397575f
  REGION 4..163: note = RuvC_domain
  SITE 7: note = RuvC_P1
  SITE 60: note = RuvC_P2
  SITE 100: note = RuvC_P3
  SITE 102: note = RuvC_P4
  SITE 105: note = RuvC_P5
  REGION 271..357: note = Tnp_domain
  SITE 279: note = Tnp_P1
  SITE 310: note = Tnp_P2
  SITE 318: note = Tnp_P3
  SITE 319: note = Tnp_P4
MLSAGDDWSEDHHDVEVQDASGRVLGRARLGEGVAGVTRFHELIGRFADPDAGPDQVMIGIETDRGPWVAALIAAGYVVYAVNPRQAARYRERQSTSGAKSDAGDAHMLADMVRTDSHQLRAVAGDSGEAQAVKVVARAHQALIWERTRHVLRLRSALREFFPAALEAFDDLTAPDALELLARAADPASAARLSTAQIIAALRRARRRNAAQKAAQIQAVLRGQQLGQPQVVAAAYAATVRAAVAVISVLNEQGAVMEAQVESHFGRHPDAEIIVSQPGLGMVLGARVLAEFGDDPDRYAGARARKNYAGTSPITRASGKKKAVLARYVRNRHLADALHQQAFCALTASPGARAYYDQIHARGTSHHAALRQLASRLVAILHGCLKTGTTYNEATAWQHRLDDAA

SEQ ID NO: 13017 - protein, 340 aa, unidentified
  source 1..340: note = protein_6eb8afe
  REGION 6..147: note = RuvC_domain
  SITE 9: note = RuvC_P1
  SITE 52: note = RuvC_P2
  SITE 87: note = RuvC_P3
  SITE 89: note = RuvC_P4
  SITE 92: note = RuvC_P5
  REGION 211..297: note = Tnp_domain
  SITE 219: note = Tnp_P1
  SITE 249: note = Tnp_P2
  SITE 257: note = Tnp_P3
  SITE 258: note = Tnp_P4
  SITE 270: note = Tnp_P5
MRITTIGLDLAKNIFQVHGVTEDGSIAFNKPLRRARVLPFFAKLEPCLIGIEACSSAHYWGRELTALGHQVKLMPPSYVKPYVKRGKSDAADAEAICEAVTRPTMRFVEIKSAEQQALLSQHRAREVMVGQRTQLSNTTRGLLGEFGVIIPKGLDHIRRFAEDVKRDIYPDLPDVALGVIQSLCQQLLSLNVRIIELGKAIADVAKADGRIKLLQTIPGIGPNNASAIVATIGSAHQFKSGRDLAAWIGLTPLNKSNGGKERLGKISRMGDRYLRQLVVVGMSSRVRMARSHPERVDPWTLSILERKPIRLATVAMANSTAHIIWAVLTKNQPYAPRTAA

SEQ ID NO: 13018 - protein, 306 aa, unidentified
  source 1..306: note = protein_d8d6c9c
  REGION 6..147: note = RuvC_domain
  SITE 9: note = RuvC_P1
  SITE 52: note = RuvC_P2
  SITE 87: note = RuvC_P3
  SITE 89: note = RuvC_P4
  SITE 92: note = RuvC_P5
  REGION 211..289: note = Tnp_domain
  SITE 219: note = Tnp_P1
  SITE 248: note = Tnp_P2
  SITE 256: note = Tnp_P3
  SITE 257: note = Tnp_P4
MQVTTVGLDLAKNIFHVHGVTETGEVAFNRPLRRAQVLAFFERLSPCLVGIEACASSHHWARELSKLGHTVRLMPPMYVKPYVKRGKSDAVDAEAICEAVTRPKMRFVEIKSEEQQALLSLHRARDFVVRQRTQLINMVRSLAAEFGITIARGVARALEFAKAVVDGKQSRLPDLAQDVLRVLSRQLMDLHNRLGWYEAMLRIQARLSRQAQLLQTIPGVGPVTASAVAATIGSGQQFRSGRQLIVVGMTSRVRQVATHPERADPWLTKLLQRKPARLATVAMANKTARVMWAVLTRDEPYKPHAI

SEQ ID NO: 13019 - protein, 346 aa, unidentified
  source 1..346: note = protein_b9c3bc2
  REGION 13..155: note = RuvC_domain
  SITE 16: note = RuvC_P1
  SITE 59: note = RuvC_P2
  SITE 94: note = RuvC_P3
  SITE 96: note = RuvC_P4
  SITE 99: note = RuvC_P5
  REGION 218..306: note = Tnp_domain
  SITE 226: note = Tnp_P1
  SITE 256: note = Tnp_P2
  SITE 264: note = Tnp_P3
  SITE 265: note = Tnp_P4
  SITE 277: note = Tnp_P5
MKYCKAKSEIKVLGIDLAKQSFQLHGVDKIGQTTLRKKLSRNKLAAFIANLPPCLIGLEACGGAHHWARTFTHFGHTVRMMAPQFVKPYVKSNKNDAVDAEAICEAVQRPNMRFVPAKCIEQQDIQSIHRIRSLLVSRRTAQANQIRGLLLEYGVVIPKGIAYIRARIPEILEDAENGLTPLFRQLLNALYEEMVHLDQRIGTLEQKLQAICLQSKDCQRLLTIPGIGLLTATAMVAAVSDIAAFKNGRELAAWMGLVPRQHSTGGVTTLMGISKRGDSYLRTLLIHGARAVVRIADKYQDKRNRWISKLEQRRGKNISAVGVANKNVRIAWALLSKKENYNGVAA

SEQ ID NO: 13020 - protein, 253 aa, unidentified
  source 1..253: note = protein_9ba5de8
  REGION 7..149: note = RuvC_domain
  SITE 10: note = RuvC_P1
  SITE 53: note = RuvC_P2
  SITE 88: note = RuvC_P3
  SITE 90: note = RuvC_P4
  SITE 93: note = RuvC_P5
  REGION 209..253: note = Tnp_domain
  SITE 217: note = Tnp_P1
  SITE 247: note = Tnp_P2
MQNVALIGIDLGKHSFHIHCQDKSGNALLRKKFTRTKLMQFLVTCPSSVVVMEACAGAHFMARRISDIGHDVKLISPQFVRPFVKSNKNDFIDAEAICEAASRPSMRFVQPRTETQQAMRALHRVRESLIRDKVKTTNQIHGFLLEFGISLPTGDAVIKRLSLVLAEHEIPEYLSRLLMKLHAHYLYLIEQITELESELNQSIKADATAQRIMTIPGVGPITASLLSSQLGDGKQFSCSRDFAASTGLVPPTI

SEQ ID NO: 13021 - protein, 277 aa, unidentified
  source 1..277: note = protein_6824804
  REGION 6..147: note = RuvC_domain
  SITE 9: note = RuvC_P1
  SITE 52: note = RuvC_P2
  SITE 87: note = RuvC_P3
  SITE 89: note = RuvC_P4
  SITE 92: note = RuvC_P5
  REGION 211..269: note = Tnp_domain
  SITE 219: note = Tnp_P1
  SITE 249: note = Tnp_P2
  SITE 257: note = Tnp_P3
  SITE 258: note = Tnp_P4
MDIVRIGLDLAKSVFEVCGVDMRDHVVLRKTLRRDAVPQFFAELPPCLIGMEACSSSHYWAKVLTDLGHQVRLIAPQFVTPYVKSNKNDRNDAEAICEAISRPSMRFVAPKPSEQLEIQAVHRIRQRLVSSRTRLVNQIRGLLAEHGVVIGRDISRLRRALSQIVEGSECNLGDLIQELASDIHQELAALDEHIASYDRRIRNLFRTNEMCQRIGKIEGIGPITATALVAAVGDQSCFKNGRQFAAWLGWFPNKDQAGASPDCLGSASAVTGTCARF

SEQ ID NO: 13022 - protein, 404 aa, unidentified
  source 1..404: note = protein_d0e04d7
  REGION 6..159: note = RuvC_domain
  SITE 9: note = RuvC_P1
  SITE 57: note = RuvC_P2
  SITE 98: note = RuvC_P3
  SITE 100: note = RuvC_P4
  SITE 103: note = RuvC_P5
  REGION 221..306: note = Tnp_domain
  SITE 229: note = Tnp_P1
  SITE 259: note = Tnp_P2
  SITE 267: note = Tnp_P3
  SITE 268: note = Tnp_P4
  SITE 279: note = Tnp_P5
MEHVIIGVDSHKLSATIEVVDQHEELLGSGRFTTDQAGYSAMRKYAKIWPDRVWAVEGANGVGRPLAQRLLEAGEDVVDVPAKLAARVRLFDTGHNRKTDARDAHSIAVVAVRTSNLRVLKVDGELEALRMLADRREALTRRRVQTVDRLQALLAELLPGQAKKDITPLQAKAMLAGVRPRDVAGKTRRRIAAEELAELVAVDSKIKKATAELKTMVLARDSRLMDLRGVGPVVAARILADVGDVTRFADRNRFASWTGTAPLDASSGEQNRHRLSRAGNRRMNHMIHIAAVTQLRLATEGRAYYRRKRADGKKPMEAMRCLKRRISDAIYRQLVADAQRAALTASTSAGPGGHSGATLTSSAVDLPPHIDTSDQPLPGPAKPTLQPAKGAGKTTAERSLSRAG

SEQ ID NO: 13023 - protein, 414 aa, unidentified
  source 1..414: note = protein_f8571db
  REGION 4..161: note = RuvC_domain
  SITE 7: note = RuvC_P1
  SITE 57: note = RuvC_P2
  SITE 98: note = RuvC_P3
  SITE 100: note = RuvC_P4
  SITE 103: note = RuvC_P5
  REGION 275..362: note = Tnp_domain
  SITE 283: note = Tnp_P1
  SITE 313: note = Tnp_P2
  SITE 321: note = Tnp_P3
  SITE 322: note = Tnp_P4
  SITE 335: note = Tnp_P5
MFAVGVDISNGRSTVAVLGTRRTIVVKPHEVPHTADGFAELAARLRALGGEVRIVMEHTGRYYESFAMSMHRAGFFVTAINPLAIKDYQEGITVRKVKTDKADALKIAQFAIDKWDILPQYTPMDTIRYELKTLHRQFQLSSKTKVALNNNLIALLEQSYPGANRYFGSPVRPDGSQKWVDFVDTFWHVDCVAGVSRNAFVERYRKWCKRHGYSFSEAKAVEIHEDARQKFPLVPKSDTCKLLVREAVAQLNAVSRTVETYRAEMDRLASQLPEYQTVMSMTGVGKSMGPQLMAEIGDLRRFAHQKSLVGFAGTDPIKDDSGDKISGSKPSSKRGSPYLRKTLFVIMTILLQLQPADDPVYQFLDKKRSEGKQYYVYMTAGMTKFLRIYYGKVRDCLKEKGLWEQPLSEEVNPG

SEQ ID NO: 13024 - protein, 343 aa, unidentified
  source 1..343: note = protein_27757df
  REGION 7..149: note = RuvC_domain
  SITE 10: note = RuvC_P1
  SITE 53: note = RuvC_P2
  SITE 88: note = RuvC_P3
  SITE 90: note = RuvC_P4
  SITE 93: note = RuvC_P5
  REGION 212..303: note = Tnp_domain
  SITE 220: note = Tnp_P1
  SITE 250: note = Tnp_P2
  SITE 258: note = Tnp_P3
  SITE 259: note = Tnp_P4
  SITE 271: note = Tnp_P5
MQTVTTIGFDIAKSVFQVHGVDAAGEVVIRRQLKRRQVLAFFEKLPPCLVGIEACASSHHWSRELQAIGHAVRLMPPAYVKPYVKRQKNDMADAEAICEAVARTNMRFVPTKTPEQQSCLMLHRTRHLFMRQQIAVINSIRAHLAEFGIVAPVGRKGVTELLRVIADPNDKRMSEVARVCLAALGSQLLGLKQQILEFDRMILAWHRSNQTSKRLHYIPGVGPMLATALVASVADPRTFRSGRNFSAWIGLVPKQHSSGGKERLGSISKQGDRYLRSLFVAGALAVIRYAKIHGTGHRPWLTALLARKPTKVAAIALANKIARMAWAMMARDERYKEPIALAR

SEQ ID NO: 13025 - protein, 341 aa, unidentified
  source 1..341: note = protein_7f5dd58
  REGION 6..164: note = RuvC_domain
  SITE 9: note = RuvC_P1
  SITE 67: note = RuvC_P2
  SITE 105: note = RuvC_P3
  SITE 107: note = RuvC_P4
  SITE 110: note = RuvC_P5
  REGION 210..296: note = Tnp_domain
  SITE 218: note = Tnp_P1
  SITE 248: note = Tnp_P2
  SITE 256: note = Tnp_P3
  SITE 257: note = Tnp_P4
  SITE 269: note = Tnp_P5
MLKFTIGADISKDKINFTLRFLNDYLLEKEVENATSALNKFIKEVQSLVKSIVKEKKAEYSVEFIMEHTGIYGNLLIECLAGQKMTMFVVAGLEIKNSTGISRGKNDKIDAKRIADYGVRFADKLKPYTLCDQTLSELKGLNTLRTQMVRIKAQLTQANDDIKKFQSKELQKKSDKLKKPVVNELDQAIEIIEAQMLELIKSDESIYENYKIAQSVPGVGKIVAVAFICATNNFTKFESAKALGSYCGVVPFGKESGRYKGKDKVSPIANKALKTLLHLGAVASIGGNNPFAVYYKRKVTEDKKNKMLALNNVRNKIVKTMFACIKNKTKYKADYSFPFAA

SEQ ID NO: 13026 - protein, 346 aa, unidentified
  source 1..346: note = protein_d22dfe5
  REGION 5..152: note = RuvC_domain
  SITE 8: note = RuvC_P1
  SITE 55: note = RuvC_P2
  SITE 92: note = RuvC_P3
  SITE 94: note = RuvC_P4
  SITE 97: note = RuvC_P5
  REGION 212..298: note = Tnp_domain
  SITE 220: note = Tnp_P1
  SITE 250: note = Tnp_P2
  SITE 258: note = Tnp_P3
  SITE 259: note = Tnp_P4
  SITE 271: note = Tnp_P5
MEHYAGIDVSLELSSVCVVDGRGKIVKEAKVASEPEVLGCFFKELGVPVNRIGLEAGPLSQWLHAGLTQAGFQTVLLETRHVKAALSAMTVKTDRKDACGLAQLLRMGWFQQVHAKSIGSQEIRALLVARKQLLGQLLDVELSIRGILRGFGLKVGQVTRKTFEARIRELVTGHTTLERIAEAMLLARATLKAQYEKLHKAVLAIVREDAVCRRLMTVPGVGPVVAVTFKSAVDDPSRIGKSKAVGALFGLTPKKYQSGEKDVTGGITRTGDEMVRTALYEAANVLLSRITRFSKLKRWGMDVAKRRGSKRAKVALARKIGVILHRMWIDGTTYRWAEANPIAVQG

SEQ ID NO: 13027 - protein, 269 aa, unidentified
  source 1..269: note = protein_f758f03
  REGION 7..149: note = RuvC_domain
  SITE 10: note = RuvC_P1
  SITE 53: note = RuvC_P2
  SITE 88: note = RuvC_P3
  SITE 90: note = RuvC_P4
  SITE 93: note = RuvC_P5
  REGION 212..269: note = Tnp_domain
  SITE 220: note = Tnp_P1
  SITE 250: note = Tnp_P2
  SITE 258: note = Tnp_P3
  SITE 259: note = Tnp_P4
MQTITTIGLDIAKSVFQVHGVDATGQVVIRRQLKRRSVLTFFQKLPPCLVGIEACASSHHWSRELQALGHIVRLMPPAYVKPYVKRQKNDMADAEAICEAVTRANMRFVPTKTPEQQSCLMLHRTRHLFIRQQTAVINSIRAHLAEFGIVAPVGRKGVTELLHVVADPSDKRVPEVARACLAALGTQLLSLKQQILEFDRMILAWHRSNETSKRLHYIPGVGPMLATALVASVADPRTFRSGRNFSAWIGLVPKQHSSGGKDRLGSISK

SEQ ID NO: 13028 - protein, 403 aa, unidentified
  source 1..403: note = protein_b0d6db3
  REGION 1..160: note = RuvC_domain
  SITE 4: note = RuvC_P1
  SITE 57: note = RuvC_P2
  SITE 97: note = RuvC_P3
  SITE 99: note = RuvC_P4
  SITE 102: note = RuvC_P5
  REGION 268..354: note = Tnp_domain
  SITE 276: note = Tnp_P1
  SITE 307: note = Tnp_P2
  SITE 315: note = Tnp_P3
  SITE 316: note = Tnp_P4
MGDDWAEDHHDVELQDQAGRRLGRARLPEGVVGITRLHELVAGQLGEDDGPDQVVVGIETDRGPWVQALVAAGYQVFPVNPRQVARYRERHGTSGAKSDATDAHALADMVRTDRHQLRAAAGDSDRAEAVKLLARAHQTLVWDRQRQVLRLRAALQEFFPAAVAAFPDLAAADALALLQAAPDPTSAARLSRTQVVAALERAGRRGVQAKAAGVQQALRAEQLTQPTTVVAAYAAVVRAAVAVIGTLNAEIQALGEQVEAQFGKHPDAEVYLSQPGLGGVLGARVLGEFGDDPGRYRDARARRNYAGTSPVTKQSGKKKVVLARFVRNDRLADPLHQQAFCALTASPGARAYYDELRARGAGHHAALRQLANRLVGILHGCLKTRTPYDEATAWSHRTTHAAA

SEQ ID NO: 13029 - protein, 353 aa, unidentified
  source 1..353: note = protein_d053035
  REGION 17..157: note = RuvC_domain
  SITE 64: note = RuvC_P2
  SITE 100: note = RuvC_P3
  SITE 102: note = RuvC_P4
  SITE 105: note = RuvC_P5
  REGION 231..316: note = Tnp_domain
  SITE 238: note = Tnp_P1
  SITE 269: note = Tnp_P2
  SITE 277: note = Tnp_P3
  SITE 278: note = Tnp_P4
  SITE 289: note = Tnp_P5
MTPITPQDTAIIEVAGGVDTHTAAVIDMVGRVLGSEQFPATAAGYQALLSWMQGFGHLVRVGVEGTGAYGAGLTRLLRERGVCVAEVDRPDRKARRFQGKSDPIDAIAAAKAALAGERTGTPKQRDGRIEALRNLRVARRSAIDQRAAVQRQIKALPVTAPEELRARLRGLPAAKLVAACAGLRPDLCDAAAPATAAQIALRSLARRHQQLTAEIAGLDELLQPLVAAINPRLVAASGVGTDVAGQLLVTAGENHDRLRSEAAFAMLCGAAPIPASSGKTTRHRLNRGGDRQANAALYRVVLCRLRWDPRTRAYMERRTKEGLSKKEIIRCLKRYIARELYRIITTGDHELAA

SEQ ID NO: 13030 - protein, 400 aa, unidentified
  source 1..400: note = protein_564820c
  REGION 9..163: note = RuvC_domain
  SITE 12: note = RuvC_P1
  SITE 61: note = RuvC_P2
  SITE 101: note = RuvC_P3
  SITE 103: note = RuvC_P4
  SITE 106: note = RuvC_P5
  REGION 269..355: note = Tnp_domain
  SITE 277: note = Tnp_P1
  SITE 307: note = Tnp_P2
  SITE 315: note = Tnp_P3
  SITE 316: note = Tnp_P4
  SITE 328: note = Tnp_P5
MTTRTTAWAGIDIGKTHHWICAVDAGGAAVVSVKVANVEADLMAALATVTDLADQVVWAVDIVGAPSALILALLARAGSPVFYASGRVVNTMSAAYTGEGKTDAKDAYVIAETVRLRRDLPMVDAVTDLIRELALLTAHRSDLIADRVRMINRLRDVMTSVFPTLEQQFDYSSHKGALILLTEYASPKRLRRLGETRLTQWLRRRQVRDAARVAARALAAARGQDIELPGQQVAEMIIAELAGSLLHLDQRIQGLDQQIAATFRRHHQAITIESMPGFGPILGAQLLVAAGDVRAYPSAGHLAAAAGLVPVPNDSGRRSGNLHKPRRYSRPLRHVFYLSAQTSMMRAGPNRAYYLKKRAGGHTHAQAVITIARRRIDVLWALLRDDRTFSIDPPTLAAAA

SEQ ID NO: 13031 - protein, 391 aa, unidentified
  source 1..391: note = protein_53b143c
  REGION 46..190: note = RuvC_domain
  SITE 84: note = RuvC_P2
  SITE 123: note = RuvC_P3
  SITE 125: note = RuvC_P4
  SITE 128: note = RuvC_P5
  REGION 246..348: note = Tnp_domain
  SITE 268: note = Tnp_P1
  SITE 297: note = Tnp_P2
  SITE 305: note = Tnp_P3
  SITE 306: note = Tnp_P4
  SITE 318: note = Tnp_P5
MESNPMQKLNDPSRSLTPLKPDGTLIAVIEMSLSSWLVAGIVPGIERQPLKKLEVDESTLLKLLNRWREEAQKSGHRIERIAVAFEAGRDGFWLARWLRARDIEAHIIHASSVAVSREHRRAKTDRLDTELLKRAFLGWLRGERDHCKMVAIPTIKDEDAKRPNRERESLVGEQSRIVNRMKAALVRLGIRGFNPKLKKAVERLDGLRTPEGEPIPPNTLAELRRDMARRRLVSDQIRQIEDTRLERLEQAPGDGPHAMVRLLARVIGVGIETADMLVQEVLSRNMRDRRAIARYAGLTGSPDESGRKRREKGLARSGNARVRRGMIQLAWRFLMFQKDSTLAQWFRARTENARSTRKTMIVALARKLLIGLWRLVREGVVPDGVVLRPVS

SEQ ID NO: 13032 - protein, 320 aa, unidentified
  source 1..320: note = protein_615ab86
  REGION 8..163: note = RuvC_domain
  SITE 11: note = RuvC_P1
  SITE 56: note = RuvC_P2
  SITE 96: note = RuvC_P3
  SITE 98: note = RuvC_P4
  SITE 101: note = RuvC_P5
  REGION 195..279: note = Tnp_domain
  SITE 203: note = Tnp_P1
  SITE 232: note = Tnp_P2
  SITE 240: note = Tnp_P3
  SITE 241: note = Tnp_P4
  SITE 252: note = Tnp_P5
MSNSPVMVGIDVASEHVDVAAIGAAMPRARYGNDPEGHSALAEALVAIEAALVVMEATGGYEAALACALQAAGLKVAVINPRQARDFARSMGRLAKTDRVDAQTLAELAATLARRPDAERFLRPLPDAVQQDLAALVTRRRQLLTMLLSERQRLRLAVAVVRPSVEAVIEMIRKQLDDIEAQMTDHVHRHYAELDTLLQSAGGIGPVASASLIADLPELGRLNRRQIAALVGVAPYAKDSGQHRGRRRIAGGRFELRRALYMATLTATRHNPAIRAFYERLLAAGKLKKVALIACMRKLLAILNAMAKTRTTFDPDHTHA

SEQ ID NO: 13033 - protein, 424 aa, unidentified
  source 1..424: note = protein_98c9783
  REGION 4..157: note = RuvC_domain
  SITE 7: note = RuvC_P1
  SITE 57: note = RuvC_P2
  SITE 94: note = RuvC_P3
  SITE 96: note = RuvC_P4
  SITE 99: note = RuvC_P5
  REGION 284..370: note = Tnp_domain
  SITE 292: note = Tnp_P1
  SITE 322: note = Tnp_P2
  SITE 330: note = Tnp_P3
  SITE 331: note = Tnp_P4
MLGVGIDWAEEFHLVALGRPGEGVFDIARVEHDPRSIDALIARIAKLEADPAEVRVVLETSYGMLVERLIDAGYTVVPVNPDLVARRRGPAKKKDDAEDARIACVIALDRFERLRVLVPHGEEAAELRSITRDDQRASRDERRLLNRLRADLIATFPAALVIAGDDMGAPTFLRLLERWPTANALAAASRPDLVAFARGCRHGWPDRFADRVESALTGDHFVARDWLVRAKTDTIRLAATQLLALGTQRRAWERRMGELLLGAPRTGRVKQPKDGERGPAVPGGEIYLSFPGLGDRLAARVAAEIGAITNFEGPNGLQCYAGKAPVTRRSGKHELVVANRLACNGHLRDAVQQWAFCSLRGSGWAREFYDAHRAKGNGHHAALRALGNRWLEILWHCLTRNVTYDEAVHVANRNQAMGITSKAA

SEQ ID NO: 13034 - protein, 348 aa, unidentified
  source 1..348: note = protein_82be1de
  REGION 5..153: note = RuvC_domain
  SITE 8: note = RuvC_P1
  SITE 55: note = RuvC_P2
  SITE 93: note = RuvC_P3
  SITE 95: note = RuvC_P4
  SITE 98: note = RuvC_P5
  REGION 213..301: note = Tnp_domain
  SITE 221: note = Tnp_P1
  SITE 251: note = Tnp_P2
  SITE 259: note = Tnp_P3
  SITE 260: note = Tnp_P4
  SITE 272: note = Tnp_P5
MKHYAGLDVSVKETSVCILDASGTICREKKVVSHPEDLVAILSDPAFSLERVGLEAGPMSQWLFEGLAKAGLPIFCIETRHTKAFLKASQTNKSDRNDARGIAQMMRVGLFKDVHVKTLTSQKRRALLTARSLLQEKAVAFENDMRGLLRNFGLKVGEVSGGRFEERIRELVEADPDLAEIMEPLLAGRRKLREEFAKLDKKVLREAKHDEVCKRLMTVPGVGPVVSLAYVSTIDIPSRFRNSRAVGAVLGLTPVLNQSGESKRVGHVSLCGDAMMRKLLYEAAQSMLTRVVKWCWLKAWAMNIARRHGKKKASVALARRLAVVMHRMWVDGSEFRWTREETTSTVGA

SEQ ID NO: 13035 - protein, 401 aa, unidentified
  source 1..401: note = protein_3b6d65f
  REGION 39..196: note = RuvC_domain
  SITE 42: note = RuvC_P1
  SITE 95: note = RuvC_P2
  SITE 135: note = RuvC_P3
  SITE 137: note = RuvC_P4
  SITE 140: note = RuvC_P5
  REGION 302..386: note = Tnp_domain
  SITE 309: note = Tnp_P1
  SITE 339: note = Tnp_P2
  SITE 347: note = Tnp_P3
  SITE 348: note = Tnp_P4
  SITE 361: note = Tnp_P5
MNELDVGSALPFSSNISQGCVPSLGRHSFCNSSQTMFFVGIDIAKNSHEAAVIDESGNVVVKPFKFPNSLGGFEKFLAAVKGVSEDLSQFEFGMEATGHYWLNLYTKLMDFNVVVHVINPVQSDALRGLYIRKTKNDAKDAFIIAELIRFGRYSETTLSDTDLFSLRELTRQRFYLVDCISDAKRKAISFIDKIFPEYQTLFSDIFGATSVELLQTYTSPDVIAELDTELFTRFLKSVSHGRFGKSKAEEIQDVAKNTFGSFLFADSATLAIRQFIQQIKLLEEQIAELEEFISEKFASFDCKLDTIVGVGTTLAASFLAEIGDITRFESPDKLAAFAGIDPSVKQSGEFSGTRNKMSKRGSPYLRRSFWLAAVSGIRSNPALIVFAILKSNEPYKIILPE

SEQ ID NO: 13036 - protein, 401 aa, unidentified
  source 1..401: note = protein_249839d
  REGION 10..164: note = RuvC_domain
  SITE 13: note = RuvC_P1
  SITE 62: note = RuvC_P2
  SITE 102: note = RuvC_P3
  SITE 104: note = RuvC_P4
  SITE 107: note = RuvC_P5
  REGION 270..356: note = Tnp_domain
  SITE 278: note = Tnp_P1
  SITE 308: note = Tnp_P2
  SITE 316: note = Tnp_P3
  SITE 317: note = Tnp_P4
  SITE 329: note = Tnp_P5
MAKQLTQIWVGIDAGKAHHWMTAVDDAGAAVWNQKVPNDESAILDALGSVLALADHVHWAIDIAGTASALLLALLASHCQEAVYVPGRTVNRMSGAYPGEAKTDARDAYVIAETARVRRDFTSIGVSAQLAADLALLTAHRSDLITDRVRMVNRLRDVLTGIFPALEAAFDYSDHKGALTLLTGYQTPTAIRRRGLTRLTTWLTRRNVRNPATVAHTAVQAADAQHTTLPGQQVAADIVADIAQQILDLDERLNRIDKQIRCTFRSHPQAAVIESLPGMGPILGAEFIVAAGDLTSYANEGHLASAAGLVPVPRDSGRRTGNLHRPQRYSRRLRRVFYLSAQTSIIREGPNRDYYLKKRAEGAQHVQAVIALARRRVAVLWALLRDNRPFTAMPPQAAATA

SEQ ID NO: 13037 - protein, 339 aa, unidentified
  source 1..339: note = protein_d06f506
  REGION 7..149: note = RuvC_domain
  SITE 10: note = RuvC_P1
  SITE 53: note = RuvC_P2
  SITE 88: note = RuvC_P3
  SITE 90: note = RuvC_P4
  SITE 93: note = RuvC_P5
  REGION 212..300: note = Tnp_domain
  SITE 220: note = Tnp_P1
  SITE 250: note = Tnp_P2
  SITE 258: note = Tnp_P3
  SITE 259: note = Tnp_P4
  SITE 271: note = Tnp_P5
MRKISTVGVDLAKGVFQVHAVDEQGTVVVRRALRRSKVLSWFKQLPPCLVGMEACATAHYWGRELRQLGHDVRLIPPAYAKAYVRRNKNDPADAAAICEAVGRPSMRFVAIKSEQQQAMAGIHRVRDLLMKQHTMLINQLRGLMAEFGIVTAKGVPHVAELLVILADPDDQRIPPPLHDGLSATTEILRAIDRKLEAIDRQIVAAGREDATYRHLITAPGYGPIVASAMAAMVVDPRAFRRADDFAASLGLVPRQDGTGGKVKLGPISKRGNGYLRRLLVSGAMAVLRGKRAKHDPWLARLLASKPRKVAAVALANKMARIGWALMMRQEDFRQPPATA

SEQ ID NO: 13038 - protein, 390 aa, unidentified
  source 1..390: note = protein_59d06ac
  REGION 4..162: note = RuvC_domain
  SITE 7: note = RuvC_P1
  SITE 60: note = RuvC_P2
  SITE 101: note = RuvC_P3
  SITE 103: note = RuvC_P4
  SITE 106: note = RuvC_P5
  REGION 265..352: note = Tnp_domain
  SITE 273: note = Tnp_P1
  SITE 303: note = Tnp_P2
  SITE 311: note = Tnp_P3
  SITE 312: note = Tnp_P4
  SITE 325: note = Tnp_P5
MIYVGIDVAKDKHDCIIVDSDGVIRFPTFTIPNNKQGFRELLTNLKTCGSDFAQIKVGLEATGHYSDNLLEFLIANDLPTTVINPLHTNLYRKGLSLRKTKTDTVDAHSIVTMLRTECLKPYSKTSYHVRELKSLTRYRFSLVQDCARLKSSYARLCVILFPELEKLVPSLHMASVYALLSEFPSARAISQCHLTRLSNLLTTASKGRYGKEKAMEIRNAARDSIGPYSDVKSLELQQTIQRIRMMEDQIKQVEAEINPIVDEFHSPLLTIPGISYRMAAILIAETENFSNFDSAEKVLAFAGLEPSVYQSGQLTSTHAKMVKRGSKYLRYALFNAAKYVCHWDGGFGQYLAKKRAEGKPYNVAVSHAAKKLTRVIFHLVKTNQTFISQA

SEQ ID NO: 13039 - protein, 411 aa, unidentified
  source 1..411: note = protein_6e30601
  REGION 5..164: note = RuvC_domain
  SITE 8: note = RuvC_P1
  SITE 61: note = RuvC_P2
  SITE 101: note = RuvC_P3
  SITE 103: note = RuvC_P4
  SITE 106: note = RuvC_P5
  REGION 272..358: note = Tnp_domain
  SITE 280: note = Tnp_P1
  SITE 311: note = Tnp_P2
  SITE 319: note = Tnp_P3
  SITE 320: note = Tnp_P4
MRLFVGDDWAEDHHDVEVMNEAGKVLAKRRLPEGVAGMARLHELIGERLGEDADGAEVVIGIGTDRGPWVAALVAAGYVVYAVNPLQASRYRERHGVSGAKSDSGDAHMLTDMVRTDSHQLRAVAGDSADAEGVKVLARTHKTLIWERTRQVQRLRHQLREYFAAALEAFEDLDAPDTLELLGKAPDPARAARLTRAQVSAALKRAHRRNITDKATAILAALRGEQLGQPPAVTAAYAVTVRALIAVITTLNEQVKTLQGQVEADFGRHPDAEIYLSQPGLGPILGARVLGEFGDDPDRYASGKARKNYAATSPITRASGKKKVVAARFIRNDRLTDALMAQAFAALTASPGARALYDAERDRGAEHNPALRKLANRLVGIPHGCLKTRTIYDEATAWPHEEKIPQSDLAA

SEQ ID NO: 13040 - protein, 315 aa, unidentified
  source 1..315: note = protein_cf94f78
  REGION 12..182: note = RuvC_domain
  SITE 15: note = RuvC_P1
  SITE 57: note = RuvC_P2
  SITE 97: note = RuvC_P3
  SITE 99: note = RuvC_P4
  SITE 102: note = RuvC_P5
  REGION 193..276: note = Tnp_domain
  SITE 200: note = Tnp_P1
  SITE 229: note = Tnp_P2
  SITE 237: note = Tnp_P3
  SITE 238: note = Tnp_P4
  SITE 250: note = Tnp_P5
MAMPVSVTKPIVGVDVAKNELVIYHAELDLLEEIPNNKTAIKQWLKALSGSVAVAIESTNIYHLEFADLAYEAGCVIYMVGGYELSHYRKGVNIRAKTDALDARLLARYLKNEGDDLHPWTPPSPLYRQLLSLFRRRAALVQARVGLVQSWASEPLLKSAFAEQVKSMQKLEALVEKTINDRLKEAGLLGQLKRCLKVEGIGFLTGARLLTTFQRGEFRSADAFIAFLGMDLRVSKSGQKDGRRSLTKRGDPEARRLLHNAAMSASRTPAWKGFYEEQRARGFSTTQALVILARKLARIVFALLKGQSEYQPKAS

SEQ ID NO: 13041 - protein, 279 aa, unidentified
  source 1..279: note = protein_a70ddb3
  REGION 3..85: note = RuvC_domain
  SITE 24: note = RuvC_P3
  SITE 26: note = RuvC_P4
  SITE 29: note = RuvC_P5
  REGION 147..234: note = Tnp_domain
  SITE 155: note = Tnp_P1
  SITE 185: note = Tnp_P2
  SITE 193: note = Tnp_P3
  SITE 194: note = Tnp_P4
  SITE 206: note = Tnp_P5
MTALGHEVKLIAPQYVRPFVNRHKNDRADAEAIVIAARQPEMRFVEPKTTEQQAKAVLFRSGERLVHQRTELVNALRAVLYEYGHVIPKGIGKLGNVRDIVEEPNSDLPELVREECRDLLEQIAEKSSWIDKKATKAKVLATETDMARRLQTMPGVGPLTTLAIEAFAPAMESFKCGRDFAAWLGLVPRQHSSGGKDRLGRVSKAGQADIRRLLIIGAMSRLNWIGRKPVQPESWLARMLDRKPRMLVAIVLANKMARAIWAMLTRKQDYQVPAPAMTA

SEQ ID NO: 13042 - protein, 349 aa, unidentified
  source 1..349: note = protein_43271de
  REGION 6..147: note = RuvC_domain
  SITE 9: note = RuvC_P1
  SITE 52: note = RuvC_P2
  SITE 87: note = RuvC_P3
  SITE 89: note = RuvC_P4
  SITE 92: note = RuvC_P5
  REGION 211..299: note = Tnp_domain
  SITE 219: note = Tnp_P1
  SITE 249: note = Tnp_P2
  SITE 257: note = Tnp_P3
  SITE 258: note = Tnp_P4
  SITE 270: note = Tnp_P5
MDRTTYGLDIAKNVMQLHWVEAETGEIGRKKLARAKLAAYFAELQPVRIVMEACGSAHHWARVLGGLGHQVELLPAAQVRAFVRSHKDDAADARAIWLAAQQSDIRRVPQKSVEQQGVLALHRARSHWVSVRTATVNSLRGLLYEFGVVLRGGRRAGLKALAEQRASIDEQIPATMRALVDGQLNTLTQIGERIDALEREIAALQEQIKGARELDRVPGIGVLGSTALAATLGDAKAWRSGREFSASLGLVPAHTGTGGKVRMGHLSKRGDPYLRTLLIHGARAVIQHAKHKPKWLEQLLARRPLNVAVVALANKMARTAWALIAHGRAYQRDWKSAKPGSGAAQAAAA

SEQ ID NO: 13043 - protein, 345 aa, unidentified
  source 1..345: note = protein_80a093a
  REGION 7..150: note = RuvC_domain
  SITE 10: note = RuvC_P1
  SITE 53: note = RuvC_P2
  SITE 89: note = RuvC_P3
  SITE 91: note = RuvC_P4
  SITE 94: note = RuvC_P5
  REGION 213..296: note = Tnp_domain
  SITE 221: note = Tnp_P1
  SITE 251: note = Tnp_P2
  SITE 259: note = Tnp_P3
  SITE 260: note = Tnp_P4
  SITE 272: note = Tnp_P5
MVEIITIGLDIAKNVFQVHGVDGGGEVALRRQLRRAEVVSFFGKLPPCLVGMEACGSAHYWARQIAALGHEVRLLPPAHVKPYVKRGKKNDAADAAAICEAVGRPHMRFVPIKSAECQGALLLHRTRDLLVRQRTMLICALRSHLAEFGVVAGQGKGNFAKLVTRLEAVEDEALPELARAALRPIATQIDDANAKIEALEKAIVARHRGEEASRRLASIPGIGPIIASAIAATVPDASVFKSGRQFAAWLGLVPKQNSTGGKDRLGGITKAGDRYIRRLLVIGATGLIRYKHKNVPGGLDWLTGLLARKPVRLVTVALANKIARIVWAVLCRREVYREAAMVQAV

SEQ ID NO: 13044 - protein, 409 aa, unidentified
  source 1..409: note = protein_8ec3c3e
  REGION 5..166: note = RuvC_domain
  SITE 8: note = RuvC_P1
  SITE 63: note = RuvC_P2
  SITE 103: note = RuvC_P3
  SITE 105: note = RuvC_P4
  SITE 108: note = RuvC_P5
  REGION 274..360: note = Tnp_domain
  SITE 282: note = Tnp_P1
  SITE 313: note = Tnp_P2
  SITE 321: note = Tnp_P3
  SITE 322: note = Tnp_P4
MRLFIGDDWAEDHHDVELMNERGKRLAKARIPEGVAGIAKLHKLVAEQLGEAAESDDTEVVVGIETDRGPWVMALLAAGYTVLAVNPLVAARYRERLAVSGAKSDAADAHMLADMVRADGHQLRPVAGDTDLAEAIKVVTRAHKTLIWERTRHTQRLRHALRDFFPAALAAFEDLDAPEALELLAKAPDPASAARLSTSQITAALKRARRRDVETKADRIQAALRAPHLGQPPLTTAAYAASVRALTAVLAVVDTQATALQQEVEAHFGQHPAARIVVSQPGLGPILGARVLAEFGDDPARYADAKARRNYAATSPITRASGKKRIVAARYVHNDRLIDALMFQASKAIVCSPGARAYYDKQRERGAGYNAALRQVANRLVGILHGCLKTGSLYDETTAWANQPKPATA

SEQ ID NO: 13045 - protein, 340 aa, unidentified
  source 1..340: note = protein_b3fb068
  REGION 7..149: note = RuvC_domain
  SITE 10: note = RuvC_P1
  SITE 53: note = RuvC_P2
  SITE 88: note = RuvC_P3
  SITE 90: note = RuvC_P4
  SITE 93: note = RuvC_P5
  REGION 209..295: note = Tnp_domain
  SITE 217: note = Tnp_P1
  SITE 247: note = Tnp_P2
  SITE 255: note = Tnp_P3
  SITE 256: note = Tnp_P4
  SITE 268: note = Tnp_P5
MKEYIRIGVDLAKNCFQIHALESEGGRVTTRKLSRSAMRTFFAGIKPCLVGMEACGSAHYWARELRAMGHDVRLMPPAYVKPYVQRGKNDPVDAAACCEAVSRPMMRFVPVKSEEQQAMLMAHKTRDLLIKQRTMGVNALRGHLAEFGIIAAKGIGHVEELIEKAADAGLPEMARAALSVLVGQLAALDGAIADVTRQIARVHARDPISRLVASVPGVGALAASAITASAPDPSAFRSGRDFAAWLGLTPKQHSTGGKEKLGAITKQGNRSLRRLLVLGAVSLLRVAAKRKGSVRDWLVALRARKPGKVAAVALANKLARIVWAVMSTGEAFRTHTFGRA

SEQ ID NO: 13046 - protein, 340 aa, unidentified
  source 1..340: note = protein_f1e8b8a
  REGION 6..148: note = RuvC_domain
  SITE 9: note = RuvC_P1
  SITE 52: note = RuvC_P2
  SITE 87: note = RuvC_P3
  SITE 89: note = RuvC_P4
  SITE 92: note = RuvC_P5
  REGION 210..296: note = Tnp_domain
  SITE 218: note = Tnp_P1
  SITE 248: note = Tnp_P2
  SITE 256: note = Tnp_P3
  SITE 257: note = Tnp_P4
  SITE 269: note = Tnp_P5
MTIITMGLDLAKSVFQAHGVDEHGATVLVKRLHRKQMLPFFSKLPPCLIGVEACGTAHHWARTLAAMGHDVRLIPPSYVKAYVKRGKSDALDAEAICEAVQRPTMRFVPVKTVEQQGILMTHRARSLLVRQRTMLANALRAHLAELGFVANPGIANLAKLAEQVIADKNALPSYAQAALKILIRQIMTISGEIAELDQQLITWHAQNEASRRLAAIPGLGVITATAIAATVTNPDQFRSGRQFAAWVGLTPQQHSTGGKTRLGGISKQGDRYLRRLLVVGATAVMRHTKDKSTPMADWIRKLLEKKPFRLVSVALANKLARIAWVVLTRKEDYRPYELAT

SEQ ID NO: 13047 - protein, 307 aa, unidentified
  source 1..307: note = protein_943e0ad
  REGION 4..150: note = RuvC_domain
  SITE 7: note = RuvC_P1
  SITE 50: note = RuvC_P2
  SITE 90: note = RuvC_P3
  SITE 92: note = RuvC_P4
  SITE 95: note = RuvC_P5
  REGION 182..266: note = Tnp_domain
  SITE 190: note = Tnp_P1
  SITE 219: note = Tnp_P2
  SITE 227: note = Tnp_P3
  SITE 228: note = Tnp_P4
  SITE 239: note = Tnp_P5
MNGIGIDVCKAMLDVAVHCGPFARFHNTPAGHRKLLSWLARQEAGQVALEASGGYEQRVLDALFDAGHRVVRANAQRCHAFATAIGLPAKTDRLDAINLACMAATLELRAYQPMESWRRKLREFVRARQQLVDLATSAQNQLEQVTDTSLCRVLQANIAQMKKTCVILEKHIAEQVGQQPQLEALRAFKGVGAILQAVIASYLPELGRLDGKAIAKLVGLAPIAHDSGKMRGLRQIRGGRIEVRNVLYMACLSAIQHEPRIREFYRSLRVRGKPGKVAVVAAMRKMLVILNARARDALAGESQAIPA

SEQ ID NO: 13048 - protein, 309 aa, unidentified
  source 1..309: note = protein_215da85
  REGION 7..168: note = RuvC_domain
  SITE 10: note = RuvC_P1
  SITE 54: note = RuvC_P2
  SITE 94: note = RuvC_P3
  SITE 96: note = RuvC_P4
  SITE 99: note = RuvC_P5
  REGION 183..268: note = Tnp_domain
  SITE 191: note = Tnp_P1
  SITE 220: note = Tnp_P2
  SITE 228: note = Tnp_P3
  SITE 229: note = Tnp_P4
  SITE 240: note = Tnp_P5
MSMQRFVGIDVAKAELAMHVLPDGLAWTQANTPKEHACLAERLAQMGCERIVLEASGGYEQAVLQTLRQAGLPAVRMPAHRPRALAQALGLKAKTDALDARLLAIAAQCIHAQPTAVLPAPLQALRELLHLRSTLVAQRDAQRRCLEHVTCEAVRDQWRQVIALLQQRIGELSRQIAQAGAACSDLPKLPGLGPILRATLAARLPELGTVPARKIVALVGLAPFNRDSGRWRGLRRIQGGRADVRRVLYMATWASIRTGSPLAHTYARLTAAGKPAKVAIVACMHKYLRWLNAIARDRAPYAPPAIAAA

SEQ ID NO: 13049 - protein, 345 aa, unidentified
  source 1..345: note = protein_14f8d4c
  REGION 6..148: note = RuvC_domain
  SITE 9: note = RuvC_P1
  SITE 52: note = RuvC_P2
  SITE 87: note = RuvC_P3
  SITE 89: note = RuvC_P4
  SITE 92: note = RuvC_P5
  REGION 211..301: note = Tnp_domain
  SITE 219: note = Tnp_P1
  SITE 249: note = Tnp_P2
  SITE 257: note = Tnp_P3
  SITE 258: note = Tnp_P4
  SITE 270: note = Tnp_P5
MKIATIGLDLAKNVIQVHGIDERGKAVLKKQLKRGQVLAFFVKLEPCLIGMEACASAHYWARKLTAFGHTVKLMAPQFVKPYVKTNKNDAADAEAICEAVRRPNMRFVPVKNSEQQAILSLHRARQGFVKARTAQANQIRGLLLEFGIVIPQGIGHIATRLPEILEDGENDLPGRFRQLLRRLGEHLKDMDRQVAELEREITLWHRENEASRKLAQMPGIGPITASALSASVGDAKCFKNGRQMAAWLGLVPRHQSTGGKTMLLGISKRGDSYLRMLLVHGARSMIRHVEGKTDQTSTWMARLLARRNKNITAVAIANKNARIAWALLAHDREFRTDYAPAGAVV

SEQ ID NO: 13050 - protein, 342 aa, unidentified
  source 1..342: note = protein_38a51c7
  REGION 7..149: note = RuvC_domain
  SITE 10: note = RuvC_P1
  SITE 53: note = RuvC_P2
  SITE 88: note = RuvC_P3
  SITE 90: note = RuvC_P4
  SITE 93: note = RuvC_P5
  REGION 211..297: note = Tnp_domain
  SITE 219: note = Tnp_P1
  SITE 249: note = Tnp_P2
  SITE 257: note = Tnp_P3
  SITE 258: note = Tnp_P4
  SITE 270: note = Tnp_P5
MVKISTIGIDIAKNVFQVHATGPDGGIVLCRRLRRDNVAEFFASIPPCLVGIEACGTSHHWAREIAAFGHDVRLMPPRYVRPYVKRSKNDAADAEAICEAVRRPNMRFVPVKTAKQQAVLIEHAVRDLLVHQRTQLVNTLRGHLAEFGIVAPQGLHRVRELTAIVDGSDVRLPDAARAALRFVLDELAGVDARIAAIEAGIAKSVKADQTAKRLMTIPGIGPIIASRLVATVADPGVFRSGRDLAAFIGLVPRQHSTGGRARLGRITKQGNGALRRLFVNGAMAAMRQSKALSADPWLLRLRGRKPPLVVAVALANKMARAAWAVMTREEDWRSRPGEAATA

SEQ ID NO: 13051 - protein, 350 aa, unidentified
  source 1..350: note = protein_60350e9
  REGION 6..147: note = RuvC_domain
  SITE 9: note = RuvC_P1
  SITE 52: note = RuvC_P2
  SITE 87: note = RuvC_P3
  SITE 89: note = RuvC_P4
  SITE 92: note = RuvC_P5
  REGION 211..299: note = Tnp_domain
  SITE 219: note = Tnp_P1
  SITE 249: note = Tnp_P2
  SITE 257: note = Tnp_P3
  SITE 258: note = Tnp_P4
  SITE 270: note = Tnp_P5
MKLHVIGIDLGKTVFHLVGLSQSGGAVVRKKFSRTQLLRFTANVEVDLMGMVACAGSHSLGKALCDQGHEVRLMPAQYVKPFVKTNKNDFIDAEAIAEAVTRPSMRFVPIKTDEQLDMQSLHRVRERWIMRRTAVVNQIRGLLLERGITVRTGRCHLDAALPHILEDNSTSLSGALRFLLVELKQELEQLAVQIEQAKTLIQRAAQQSEACQRLDAIPGIGPLTATALIAAIGNGGAFRKGREFAAWLGLVPCEHSTGGKQKLPGISKRDNCYLRKLFVQGARAVLQFRDKQSPGLRKWLQELFARTHYNVAGVALANKLARMAWAVLASGDIYRPPVLAETTGLQMAAV

SEQ ID NO: 13052 - protein, 343 aa, unidentified
  source 1..343: note = protein_db51134
  REGION 8..148: note = RuvC_domain
  SITE 11: note = RuvC_P1
  SITE 54: note = RuvC_P2
  SITE 89: note = RuvC_P3
  SITE 91: note = RuvC_P4
  SITE 94: note = RuvC_P5
  REGION 211..300: note = Tnp_domain
  SITE 219: note = Tnp_P1
  SITE 249: note = Tnp_P2
  SITE 257: note = Tnp_P3
  SITE 258: note = Tnp_P4
  SITE 270: note = Tnp_P5
MKNPPVRIGMDTSKSVFQLHGVDDNEEVVVRRQFRRAEMIRYFERLPPVLVAIESCGSSHYWARLLQSFGHKVRLIPPQYVKPYVKRGKNDATDAEALCEAVTRPSMRFVPVKSEERQAACMLMTVRERLVSVKLQLSNAFRSYAAEFGIIAPAGRQNINALMKRVIEDDTLPKLAQDLFRLQAREYAAVEARLEEIEAKLMKWHREDDVSRRIATIPGVGPIGSTMLSMKAPPPETFRSGRDFAAWIGLTPRDHSTGGRQRHGGITKAGDSALRSTLIVGATALLRHIRSGRHKPTAWLAALLERKPPKLVAVALANKFARIAWRLMISGGIYNRPAAAMPT

SEQ ID NO: 13053 - protein, 385 aa, unidentified
  source 1..385: note = protein_851f081
  REGION 41..184: note = RuvC_domain
  SITE 79: note = RuvC_P2
  SITE 118: note = RuvC_P3
  SITE 120: note = RuvC_P4
  SITE 123: note = RuvC_P5
  REGION 255..342: note = Tnp_domain
  SITE 263: note = Tnp_P1
  SITE 292: note = Tnp_P2
  SITE 300: note = Tnp_P3
  SITE 301: note = Tnp_P4
  SITE 313: note = Tnp_P5
MQKLNDLSRSRSPLDPDGTLIAVIELSLSSWLVAGIVPGVERQPLKKLAVDESALLKLLHRWREEAAKAGHRIKRIAVAFEAGRDGFWLARWLRARGIEAYVIHASSVAVSREHRRAKTDRLDTELLKRSFLGWLRGERDHCKMVAIPTTQDEDAKRPNREHESLVGEQSRIVNRMKATLIRFGIRGFNPKLKKAAERLDGLRTPEGEPIPPNTLAELRRDMVRRRLISDQIRQIEDARLERLKQAPNDGPHAMVRLLARVIGVGVETADMLVQEVLSRSMRDRRAVARYAGLTGSPDESGRRRREKGLTRSGNARVRRGMIQLAWRFLMFQKDSTLAQWFRARTESARGTRKTMIVALARKLLIALWRLVREGVVPDGVVLRPA

SEQ ID NO: 13054 - protein, 345 aa, unidentified
  source 1..345: note = protein_1f20002
  REGION 5..153: note = RuvC_domain
  SITE 8: note = RuvC_P1
  SITE 55: note = RuvC_P2
  SITE 92: note = RuvC_P3
  SITE 94: note = RuvC_P4
  SITE 97: note = RuvC_P5
  REGION 212..300: note = Tnp_domain
  SITE 220: note = Tnp_P1
  SITE 250: note = Tnp_P2
  SITE 258: note = Tnp_P3
  SITE 259: note = Tnp_P4
  SITE 271: note = Tnp_P5
MEHYAGIDVSVKESSVCIVDATGKLVREVKVASEPEVLLRYFGTLGLPVTRIGLEAGPLSQWLHAALVAAGHEVVLLETRHVKAALSAMTVKTDRKDARGIAQLLRMGWYRPVHAKSSAAQDTRALLVGRKLLQSKLLDVELSIRGILRGYGLKVGEVSRGRFEARIQDLIAGHAALSVVIGAMLAARTALWNEFTKLHREMLRIARADKICQRLMSTPGVGALVSLTYRSAVDDPTRFAKSSTVGAYFGLTPKKYQSGETDRDGGVTKVGDAMVRTALFEAAHIMLTRATRFSRLKRWALEVAQRRGMKRAKVALARKLGVVLHRMWLDATDFRWSTAPASVVA

SEQ ID NO: 13055 - protein, 334 aa, unidentified
  source 1..334: note = protein_fc89a8f
  REGION 6..147: note = RuvC_domain
  SITE 9: note = RuvC_P1
  SITE 51: note = RuvC_P2
  SITE 86: note = RuvC_P3
  SITE 88: note = RuvC_P4
  SITE 91: note = RuvC_P5
  REGION 208..296: note = Tnp_domain
  SITE 216: note = Tnp_P1
  SITE 246: note = Tnp_P2
  SITE 254: note = Tnp_P3
  SITE 255: note = Tnp_P4
  SITE 267: note = Tnp_P5
MTMEILAIDLGKQSFHLHGIDADGVVISRKVSRAKLENAVTELDPAIVAMEACASAHHWGRRFSASGRQVRLVNPRFVKAFVRGSKNDAIDAEAIFDAASRPTMRFVPVKTTEQQDLQSLHRVRERLVVQRTSLINHARGLLAEYGVVLPKGPWRFRQQVPAAVAEADLSNLARELFTELMDQLTDVEARLAKLDAKLVSICREHEACRRLAALPGVGPVIATALVAAVDDGRHFRSGRELAAWIGLVPRQYTTGGKPRLGGIGRRANHYLRRQLIHGARAVISRLAAKDDGRSVWLKGIVARAGFNKALVALANKTARLAWVLLARKEDYLPA

SEQ ID NO: 13056 - protein, 341 aa, unidentified
  source 1..341: note = protein_3b5883a
  REGION 7..149: note = RuvC_domain
  SITE 10: note = RuvC_P1
  SITE 53: note = RuvC_P2
  SITE 88: note = RuvC_P3
  SITE 90: note = RuvC_P4
  SITE 93: note = RuvC_P5
  REGION 211..296: note = Tnp_domain
  SITE 219: note = Tnp_P1
  SITE 249: note = Tnp_P2
  SITE 257: note = Tnp_P3
  SITE 258: note = Tnp_P4
  SITE 270: note = Tnp_P5
MEQATTIGLDIAKHVFQAHGADAAGHVLFRKRLTRAKLLGFFASHPPCFVAMEACAGSHYWGREIGKLGHTVRLIPPAYVKPFVKRQKNDAADAEAICEAAQRPSMRFVPVKDEEQQANGVVFRARDLLVHQRTQCVNALRGHLSEYGYVFPQGITHAPALIAHVEDPSASLPDSARAILKILIDTFTALEAQIRELDVEINRRSKADPVARRLMTIPGVGPITATAITALVPAAENFRAGRDFAAWLGLTPLQKSTGGKQKLGAVSKRGERTIRRLLILGASAVIRQACIRGAPAGSWLAQMLSRKPKMLVTVALANKMARVVWALLVKGGVYGTPATAA

SEQ ID NO: 13057 - protein, 347 aa, unidentified
  source 1..347: note = protein_f522b5c
  REGION 7..149: note = RuvC_domain
  SITE 10: note = RuvC_P1
  SITE 53: note = RuvC_P2
  SITE 88: note = RuvC_P3
  SITE 90: note = RuvC_P4
  SITE 93: note = RuvC_P5
  REGION 212..298: note = Tnp_domain
  SITE 220: note = Tnp_P1
  SITE 250: note = Tnp_P2
  SITE 258: note = Tnp_P3
  SITE 259: note = Tnp_P4
  SITE 271: note = Tnp_P5
MTQINTIGLDLAKQVFQVHGADAEGAPLFNRRLRRAEVLRFFEKQPTCLVGLEACGGAHYWAREIAALGHDVRLIPPAYVKPFVKRGKTDAADAEAISEAVTRKTMRFVPIKSAEQQAAAMVLRTRALLLRQRTQVINALRAHMSELGIIAAAGPAKVAALAAIVRDPTDARLPAAARFALTALVDQLDTLSEQVERLEREIVTEAKHDEDMRRLTTIPGVGAITAATVKALVPDPDGFRSGRHLAAWLGLTPRSHSSGGKELLGGISKMGNTELRSLLVNGATSVLRHARNNDRALPWLTALLARRPFKVVAIALANKIARIIWALLTKGGTYRKPGGMAVRAANA

SEQ ID NO: 13058 - protein, 353 aa, unidentified
  source 1..353: note = protein_bb10a9f
  REGION 6..148: note = RuvC_domain
  SITE 9: note = RuvC_P1
  SITE 50: note = RuvC_P2
  SITE 87: note = RuvC_P3
  SITE 89: note = RuvC_P4
  SITE 92: note = RuvC_P5
  REGION 210..302: note = Tnp_domain
  SITE 218: note = Tnp_P1
  SITE 248: note = Tnp_P2
  SITE 256: note = Tnp_P3
  SITE 257: note = Tnp_P4
  SITE 269: note = Tnp_P5
MSIPMIGLDLAKTIFHVHGIDASGTVVLRRSLRRGQVERFFAALSPCVVEMEGVWRIAPLGRLLQRLGHAVRMMPAHYVKPSVKRNKTDGRDAEAICEAASRPTMRFVAIKSEDAQTVLALHRNRALLVRQRTMTANAMRAGLAEFGIVAAQGKAGLDALLKELAAGPQGLPEAARAALSLLAVQWETVDALVRKLEAQIARLARADAAARRLMEIPGVGPITASMVVAKVPDAGLFDGARDFAAWIGLTPRQDSTGGKQRSVGISKQGDRTLRQLLVLGATSQLRQARAKGIRDPWLRDLLARRPAKVVAVALAAKTARIIWALLETGERYRAKDLPENLPEGRHQSLPAAA

SEQ ID NO: 13059 - protein, 407 aa, unidentified
  source 1..407: note = protein_9100bd7
  REGION 4..160: note = RuvC_domain
  SITE 7: note = RuvC_P1
  SITE 57: note = RuvC_P2
  SITE 97: note = RuvC_P3
  SITE 99: note = RuvC_P4
  SITE 102: note = RuvC_P5
  REGION 269..355: note = Tnp_domain
  SITE 277: note = Tnp_P1
  SITE 308: note = Tnp_P2
  SITE 316: note = Tnp_P3
  SITE 317: note = Tnp_P4
MIFIGVDWAEAHHDVHVQDENGKRLGGGRLPEGVEGIARFHELAARHAPEPAEVVIGIETDRGLFAAALVAAGYQVFAVNPMSASRYRDRYSVSGAKSDPGDAKVLADMVRTDRHNHRPAAGDSDLAEAVKVLARAHQSMIWSRRRQANMLRSQLREFYPAALAAFDDLTSGDAVEVLRAAPAPALGTALSRAKIAAALRRGGRQRRIDARAGQIQAALRTPQLAPAPVIAAAMGATVSASVSVIAEMTTQIRALERQLAADFEAHPDAEVVRSLPGLGTILGARVLGEFGDDPDRYATAKCRKNYAGTSPITRASGTRRAVLARHVRNQRLADALYLWAFAALTTSPGARAYYDTHRAAGDTHHAALRALGNRLVGILHGCLAHHTPYSETTAWAHRTSTNLTQAA

SEQ ID NO: 13060 - protein, 389 aa, unidentified
  source 1..389: note = protein_c8a428c
  REGION 1..146: note = RuvC_domain
  SITE 43: note = RuvC_P2
  SITE 83: note = RuvC_P3
  SITE 85: note = RuvC_P4
  SITE 88: note = RuvC_P5
  REGION 254..340: note = Tnp_domain
  SITE 262: note = Tnp_P1
  SITE 293: note = Tnp_P2
  SITE 301: note = Tnp_P3
  SITE 302: note = Tnp_P4
MDTSGRRLGRARLPEGVAGVARLHALVGEHAGDDPDDVEVLVGIETDRGPWVQALVAAGYTVFAINPLQASRYRSRHAVSGAKSDAGDAHVLADMVRTDAHQLRPVAGDTAIVEAVKVVTRTHKTMIWERTRHSQRLRHALRDYFPAALVAFEDLDAADTLELLAKAPTPTAAARLTLSQISAALRRARRRDVAAKAVAVQAALRTEHLGQPDVVTGAYAASVRALIAVLTVLNEQVKELQGQVEEHFGRHPAAEIVLSQPGLGPVLGARVLAEFGDDPDRYATAKARKNYAGTSPITRASGRKKTVAARFVHNDRLVDALMTQAFSSLRASPGARAYYDRQRERGASHNTALRQLANRLVGILHGCLKTATPYDEATAWPPGAEQIAA

SEQ ID NO: 13061 - protein, 328 aa, unidentified
  source 1..328: note = protein_b5ce635
  REGION 4..155: note = RuvC_domain
  SITE 7: note = RuvC_P1
  SITE 60: note = RuvC_P2
  SITE 100: note = RuvC_P3
  SITE 102: note = RuvC_P4
  SITE 105: note = RuvC_P5
  REGION 200..286: note = Tnp_domain
  SITE 208: note = Tnp_P1
  SITE 237: note = Tnp_P2
  SITE 245: note = Tnp_P3
  SITE 246: note = Tnp_P4
  SITE 259: note = Tnp_P5
MFFIGIDVSKAKLDCCLLLDVASNKRRAKVVANSKTGIADLLAWCIKQQAPVHELHAIMEGTGVYHEQAALALSDAGAAVSIVNPAQVKDFGRSLGVRTKTDGVDSFVLARYGALLKPKPWTPPAQEARTLQALLSRREAIAQDLQRERNRLEKADATDTPLLIRQSIEDSIDFLEKQLAKLQQDIDDHINKHPNLKDDRDLLISIPAVGPQVGNHLLSAMHNHEFQSAEQLAAYLGLVPVERQSGTSLLGRPRLSKAGPARIRAVLYMAAIVATQHNPHLKALYQRLQERGKTKMSALGAVMRKLVHLCFGVLKTRQPYQPDYGSTA

SEQ ID NO: 13062 - protein, 400 aa, unidentified
  source 1..400: note = protein_a5ed2a8
  REGION 5..159: note = RuvC_domain
  SITE 8: note = RuvC_P1
  SITE 60: note = RuvC_P2
  SITE 100: note = RuvC_P3
  SITE 102: note = RuvC_P4
  SITE 105: note = RuvC_P5
  REGION 266..356: note = Tnp_domain
  SITE 274: note = Tnp_P1
  SITE 304: note = Tnp_P2
  SITE 312: note = Tnp_P3
  SITE 313: note = Tnp_P4
  SITE 329: note = Tnp_P5
MSLAVGIDVGAYKCAVAVCREGEREAERKVLNITTQRGGFSDLDAWMVQQAAPIDVVVMESSGHYWFNLASHLRRQGYPVAVVNPLQAKYFAKSRMQRSKSDPADARTLAALGTHDQPRISEPLVGAELKEAARFAMRLVREQAQVCQRIQRLVDIGFPELREVWDDPTCVSALAVLRHAPTAAAVTRMHQDRIARLKRPGVGGRVIGPMKAAQLKQLAQTSVAAPELEQQVRFEMRLLIAQHDLFDQQIASADARVASLLDGEVSQRLLSIPGVGPSTAATLMAEIGDIWRFSDVDQLLACAGVHPKEQSSGQKGANPETSWTMAKTGNTYLRAAAYRMAVVGVQHNPILRAHYARKRAAGKSAMNALGHCMSKSLAIVWGVWRGGKDFDPAHASAGSA

SEQ ID NO: 13063 - protein, 327 aa, unidentified
  source 1..327: note = protein_3f90abc
  REGION 4..154: note = RuvC_domain
  SITE 7: note = RuvC_P1
  SITE 59: note = RuvC_P2
  SITE 99: note = RuvC_P3
  SITE 101: note = RuvC_P4
  SITE 104: note = RuvC_P5
  REGION 199..285: note = Tnp_domain
  SITE 207: note = Tnp_P1
  SITE 236: note = Tnp_P2
  SITE 244: note = Tnp_P3
  SITE 245: note = Tnp_P4
  SITE 258: note = Tnp_P5
MRYLGMDVAKAKLDCLLLNEDGDKGKSKSVANSRTGIADFLAWIGKQHISVNELHVVMDATGVYHEQAALALADAGVTVSIVNPAQVKDFGRGLAVRTKTDGMDSYVLARYGALLKPAAWTPPAPEARILQALIARREAIAQDLQRERNRQEKADATDTPTLIRRSLSDSIEFLSKQLVQLQQDIDQHIDRHPGLKNDLALLQSIPAVGPQVGNNMLAVMHAHNFGSAEQLAAYLGLVPVERQSGSSVLGRAKLSKAGPAKVRAVLYMAAVVATRCNPHVKTLYERLLARGKSKMSALGAAMRKLVHLCFGVLKTRQPYQRDYAKIG

SEQ ID NO: 13064 - protein, 322 aa, unidentified
  source 1..322: note = protein_d88cdd9
  REGION 9..156: note = RuvC_domain
  SITE 12: note = RuvC_P1
  SITE 56: note = RuvC_P2
  SITE 96: note = RuvC_P3
  SITE 98: note = RuvC_P4
  SITE 101: note = RuvC_P5
  REGION 191..276: note = Tnp_domain
  SITE 199: note = Tnp_P1
  SITE 228: note = Tnp_P2
  SITE 236: note = Tnp_P3
  SITE 237: note = Tnp_P4
  SITE 248: note = Tnp_P5
MAKRTTICAGIDTGKRKLDIALDGSLEQLQVDNTPEGYKVLSDWLRRHRVKRIGIEASGGYEQAVVAELRRQRFVVVVFQPAQVRAYAKFQLQRAKNDKIDAALIAACTAAVKKIHGPPDARLLPFAEHLTMIDQIGEDVARLKNRLETCRNQRFRQHWKEDIARLEKRKKIELKALVAAIREHRDLAERLDLIYSVGGTGMPTAVAILVRMPEIGQLTREQAAALAGLAPYDDDSGDHTGVRHIEGGRERLRRALYTAALPASFRWNPQLIALYKRLIAAGKEHKRALIACARKLLIFVNTVVARGTPWQNQPPPLAAITC

SEQ ID NO: 13065 - protein, 403 aa, unidentified
  source 1..403: note = protein_5bd8a04
  REGION 9..163: note = RuvC_domain
  SITE 12: note = RuvC_P1
  SITE 61: note = RuvC_P2
  SITE 101: note = RuvC_P3
  SITE 103: note = RuvC_P4
  SITE 106: note = RuvC_P5
  REGION 270..357: note = Tnp_domain
  SITE 278: note = Tnp_P1
  SITE 309: note = Tnp_P2
  SITE 317: note = Tnp_P3
  SITE 318: note = Tnp_P4
  SITE 330: note = Tnp_P5
MADRPLVWVGVDVGKAAHHACAMDAAGKVVFSRKVANDQGAIEQLVARAGQAAGEVRWAIDLTSSAGALLIAVLVASGQQVVYVPGRVVNRMAGVFRGETKSDAKDARVIAETARMRDDLTPVTATDDLVVELTRLTGHREDLMADWVRGVNRLRDLLTSIFPALERAFDYSTRSALVLLTGFQTPEAIRTAGQDGVATHLREHGAWPKGIPAMAAAALAAAEAQTVRLPGEATTAVLVARLARQLLDLDRQIKDTDKLITSRFRTHPQAEIIESLPGLGPILGAEFVVVTGGSLAAFATPGRLASYAGLVPVAQDSGRITGNLRRPKRYNRRLRRVFYMAALSSIRTTGPSRTFYDRKRGERLIHTQALLALARRLVDVLWALLRDGRKFTPTAPQPAITAA

SEQ ID NO: 13066 - protein, 302 aa, unidentified
  source 1..302: note = protein_1cc1400
  REGION 2..107: note = RuvC_domain
  SITE 12: note = RuvC_P2
  SITE 47: note = RuvC_P3
  SITE 49: note = RuvC_P4
  SITE 52: note = RuvC_P5
  REGION 170..254: note = Tnp_domain
  SITE 178: note = Tnp_P1
  SITE 208: note = Tnp_P2
  SITE 216: note = Tnp_P3
  SITE 217: note = Tnp_P4
  SITE 229: note = Tnp_P5
MASQPAALVIMEACGSAHYWARELVNAGHEVKLIAPQYVRPFVKRQKNDAADAEAIVIAARQPEMRFVTPKAEDQQARTVLYRCRDRLVHQRTELVNALRSTLYEFGLVVPKGMTYLKRLEEMVDDESVRLPTLVRQECRDLLEQIDAQSRKIAEKTRAMVRLSQESGVAQRLETMPGVGPLTALAVEAFAPAMETFRCGRDFAAWLGLVPKQFSSGGKERLGRVSKAGQADIRRLLIIGAMSRVGWAGRKPPVPGSWLARMMACKPRMLVAIALANKMARTIWAMLTKHENYRDPVLTAAR

SEQ ID NO: 13067 - protein, 346 aa, unidentified
  source 1..346: note = protein_f36a092
  REGION 5..152: note = RuvC_domain
  SITE 8: note = RuvC_P1
  SITE 55: note = RuvC_P2
  SITE 92: note = RuvC_P3
  SITE 94: note = RuvC_P4
  SITE 97: note = RuvC_P5
  REGION 212..299: note = Tnp_domain
  SITE 220: note = Tnp_P1
  SITE 250: note = Tnp_P2
  SITE 258: note = Tnp_P3
  SITE 259: note = Tnp_P4
  SITE 271: note = Tnp_P5
MKHYAGLDISVKETSVCIVDETGKICREVKVPSHPDDLIAVLKDPAWNFERIGLEAGPLSQWLFEGLARAGLPVICIETRHVKAFLKAQPNKTDRNDARGIAQMMRVNLFRPVHVKTLTSQKRRALLTARKLLQEKAIAIENDIRGLLRNFGLKVGKVKAVKFEARIRELIEGMPELAEVIEPLLDARSKLRQHFDALHRKVLAIVRNDKVCHRLMTIPGVGPVVALAYTATIDIPARFRNSKAVGPILGLTPVLNESGENRRVGRISLCGDTIMRTLLYEAAQALLNNVKKWSWLRAWAMNVAKRRGRQKAIVALARRLAVIMHRIWSDGTQFRWTRKEIMPVAA

SEQ ID NO: 13068 - protein, 342 aa, unidentified
  source 1..342: note = protein_0080dc3
  REGION 6..148: note = RuvC_domain
  SITE 9: note = RuvC_P1
  SITE 52: note = RuvC_P2
  SITE 87: note = RuvC_P3
  SITE 89: note = RuvC_P4
  SITE 92: note = RuvC_P5
  REGION 210..295: note = Tnp_domain
  SITE 218: note = Tnp_P1
  SITE 248: note = Tnp_P2
  SITE 256: note = Tnp_P3
  SITE 257: note = Tnp_P4
  SITE 269: note = Tnp_P5
MGDLMIGVDLAKSVFQIHGASLTGHVKFRKKITRTQFRKFMSEQPACLVVFEACGSANYWTREMALLGHEVKLIAPQYVRPFVKRQKNDMADAEAIVIAARQPEMRFVTPKTEEQQVRAMLFRGRERLVRQRTDLVNALRSVLYEYGHVFPVGLVHLKRIATLLEDPGCGLPGQVVTECEDLLKQIAEMTESITGRTAALKALAAQTETARRLQTMPGAGPMTALAVEAFAPDMAEFKCGRDFAAWLGLVPCQHSSGGKARLGRISKAGQSDIRRLLIIGAMSRIVGRAGRKVPAESWLGRMLAREPKMLVGIALANKMARQIWAMLTKEEDYRDPGLAVAA

SEQ ID NO: 13069 - protein, 317 aa, unidentified
  source 1..317: note = protein_7d78ae3
  REGION 9..150: note = RuvC_domain
  SITE 12: note = RuvC_P1
  SITE 56: note = RuvC_P2
  SITE 96: note = RuvC_P3
  SITE 98: note = RuvC_P4
  SITE 101: note = RuvC_P5
  REGION 191..276: note = Tnp_domain
  SITE 199: note = Tnp_P1
  SITE 228: note = Tnp_P2
  SITE 236: note = Tnp_P3
  SITE 237: note = Tnp_P4
  SITE 248: note = Tnp_P5
MTQAITTTAGIDTSKLKLDIALHGRAERWQVPNALPGWRQLAANLARAGATRVGIEASGGYERGVVEHLRAVGFTVLVLQPIQVKAYARMHLRRAKNDALDAALIAACAAAVEQPRIAPDPRLVELAGHMTFLEQIEEDIARFKIRLEHIDEPRLRRLVTNDIVRLKARRAAQMLLIERQLRAHHDLARRLDLVLSIPGLAVRTVLAIIIRMPELGQVSREQVAALAGLAPFDDDSGKSKRQRHIAGGRARLRRSLYAAALPAAFRWNKALIGLYARLTASGKSHKVALVACARKLLIYANTVVQRGTPWIERTVAT

SEQ ID NO: 13070 - protein, 342 aa, unidentified
  source 1..342: note = protein_e43a538
  REGION 5..151: note = RuvC_domain
  SITE 8: note = RuvC_P1
  SITE 53: note = RuvC_P2
  SITE 90: note = RuvC_P3
  SITE 92: note = RuvC_P4
  SITE 95: note = RuvC_P5
  REGION 213..300: note = Tnp_domain
  SITE 221: note = Tnp_P1
  SITE 251: note = Tnp_P2
  SITE 259: note = Tnp_P3
  SITE 260: note = Tnp_P4
  SITE 272: note = Tnp_P5
MKHYAGLDVSQQTTSICIVDEDGRIVAERKAVTCPQAIATAIEPFHVARAGLETGPLSVWLWNGLNAAGVPVICMDARHANAALSMMPAKTDRNDAAGLAQIVRTGWCKRVHVKSAPSHEARALLAARSQLVQIRCDLENEIRGVLRTFGIIFGKRIGGFSKRAEEIVAGELDASPTIRIVLEALMKARVDILAQVAILDGKVRSLSRGNGIVRHLMTVPGVGAITALGFVATIDDPARFRRSASAGAYLGLTPKIYASGETMKVGRISRRGDDFLRRSLYEAANALLTRVARPSALKAWGLRIAKRGGFKRAKVAVARKLAVVLHAMWTTGEEFRWSTSTS

SEQ ID NO: 13071 - protein, 334 aa, unidentified
  source 1..334: note = protein_8ffb8b7
  REGION 7..148: note = RuvC_domain
  SITE 10: note = RuvC_P1
  SITE 53: note = RuvC_P2
  SITE 88: note = RuvC_P3
  SITE 90: note = RuvC_P4
  SITE 93: note = RuvC_P5
  REGION 209..296: note = Tnp_domain
  SITE 217: note = Tnp_P1
  SITE 247: note = Tnp_P2
  SITE 255: note = Tnp_P3
  SITE 256: note = Tnp_P4
  SITE 268: note = Tnp_P5
MQNVTLIGIDLGKHSFHIHCQDKFGKTMLRKQFTRPKLMEFLAGCTSTTVVMEACAGAHFMARRIADLGHDAKLISPQFVRPFVKSNKNDFVDAEAICEAASRPSMRFVQPRTETQQAMRALHCVRESLIKDKVKTTNQMHAFLLAFGISLPKGEAVIKRLSLVLAEHDVPDYLSRLLMKLHAHYLYLVEQITPLELELKQSIKADDATQRMMTIPGVGPITASLLSSQLGDGKQFSCSRDFAASMGLVPRQYSTGEKQTLLGISKRGNKNLRRLLVQCARAFMMRLEHQHGRLAEWVQAQLSKKHSNVVACALANKLARIAWAITTRQNEYQA

SEQ ID NO: 13072 - protein, 340 aa, unidentified
  source 1..340: note = protein_32321b3
  REGION 5..151: note = RuvC_domain
  SITE 8: note = RuvC_P1
  SITE 53: note = RuvC_P2
  SITE 91: note = RuvC_P3
  SITE 93: note = RuvC_P4
  SITE 96: note = RuvC_P5
  REGION 211..297: note = Tnp_domain
  SITE 219: note = Tnp_P1
  SITE 249: note = Tnp_P2
  SITE 257: note = Tnp_P3
  SITE 258: note = Tnp_P4
  SITE 270: note = Tnp_P5
MCEYIGLDVSLKETAVSIRRGGKRVWRGKCLSDPAAIAALIRKHAPAAERVVFETGPLSVWFYHALSAEGLPAICIDARHAKAALDMAANKTDANDADGLAHLAEVGFFREVRVKGFDSMLSRTLIAARTKLVRATLDIAGQIRGLMKTFGLIVPRGIGAKFEANVRALLADHAELARIILSLLEAWRSLRIQATELGRQLLAEARKSQPCQLLMSIPGVGAITATAYLTAVEDPANFSRSRSVGAWLGLTTRRYQSGEVDYDGHISRRGDTHVRSLLYEAAVVILTRSHADSDLRSWGMKLREKVGFKRAAVAVARKLAVIMHAMLRSGELFTRTAAAA

SEQ ID NO: 13073 - protein, 345 aa, unidentified
  source 1..345: note = protein_32d80e8
  REGION 7..147: note = RuvC_domain
  SITE 10: note = RuvC_P1
  SITE 53: note = RuvC_P2
  SITE 88: note = RuvC_P3
  SITE 90: note = RuvC_P4
  SITE 93: note = RuvC_P5
  REGION 210..294: note = Tnp_domain
  SITE 218: note = Tnp_P1
  SITE 248: note = Tnp_P2
  SITE 256: note = Tnp_P3
  SITE 257: note = Tnp_P4
  SITE 269: note = Tnp_P5
MREIIRIGVDTSKYIFQLHGVDAAEQPVLRKRLSRRQMLEFFAKLPATKVGMEACGAAHHWARELGKLGHEVKLMAPQHVKPYVKRNKNDGRDAEGLCEAMSRPTMRFVPVKTAEQQAALMLTGMREQMVARRTQLSNMIRGYAAEFGITAAKGLDKIEPLLAEIAQDESVPVLARELLAQQGHQYAQLQAELKAIEARLRAWHRANPDSRRLAEIPGIGPVGAPELIMKTPDPGAFTSARHFAAWIGLTPKDHSTAGKTRLGKITRAGDERLRSVLVAGATAVIKQARRGRGHPSPWLVALLKRKPPKLAAVALANKNARIAWKLMMTGERYNGARMQAASAAA

SEQ ID NO: 13074 - protein, 342 aa, unidentified
  source 1..342: note = protein_799ed3e
  REGION 6..148: note = RuvC_domain
  SITE 9: note = RuvC_P1
  SITE 52: note = RuvC_P2
  SITE 87: note = RuvC_P3
  SITE 89: note = RuvC_P4
  SITE 92: note = RuvC_P5
  REGION 212..297: note = Tnp_domain
  SITE 219: note = Tnp_P1
  SITE 249: note = Tnp_P2
  SITE 257: note = Tnp_P3
  SITE 258: note = Tnp_P4
  SITE 270: note = Tnp_P5
MKITTIGIDLAKNVFQIHGVDAHSKTVIRKQLKRDQVAPFFANLPTCLIGMEACGSAHHWARKLQAMGHTVRLMAPQYVKPYVKTNKNDVADAEAICEAATRPTMRFVAIKTIDQQAVLALHRARQAFVQARTAQANQIRGMLAEYGLALPLGIHHIPQRVPELIEDGSIELPGQFRLLIQRLVEHFKELNRQVLELEAQIKAWHRANPASCKLEKIPGIGPITASALVASIGDARHFANGRQVAAWLGLVPRQNSTGGKAMLLGISKRGDTYLRTLLIHGARSVLAHAWRRADQCSWLHRLVQRRNANVAAVALANKNARVIWALLAHDREFRADYVSVAP

SEQ ID NO: 13075 - protein, 329 aa, unidentified
  source 1..329: note = protein_5388e58
  REGION 6..147: note = RuvC_domain
  SITE 9: note = RuvC_P1
  SITE 52: note = RuvC_P2
  SITE 87: note = RuvC_P3
  SITE 89: note = RuvC_P4
  SITE 92: note = RuvC_P5
  REGION 201..278: note = Tnp_domain
  SITE 229: note = Tnp_P2
  SITE 237: note = Tnp_P3
  SITE 238: note = Tnp_P4
  SITE 250: note = Tnp_P5
MEIDTIGIDLGKTVFHLVGLNRAGEVVVRRKCSRLQLLRFTSNLRVRLIGMESCGGSNFLGRALREQGHEVRLMPAQYVKPYVKTNKNDYIDAEAIAEAVGRANMRFVPIKSDEQLDMQSLHRVRDRWVARRTSVINQIRGLLLERGITFRKGRRHAEASLPAVLEDADNGLSGLLRMLLMQLRDGLRQNRAVVSWPSWRRPLTATAVVASIGNGGEFRKGRSFAAWLGLVPKQQSTGGKQKLLSISKRGNHYLRRLFVRGARAVLQCRDTQSSGLSAWLSQLASRMHSNVATVALANKMARIAWAVLAKSEAYRPPLLVVSTKALACN

SEQ ID NO: 13076 - protein, 356 aa, unidentified
  source 1..356: note = protein_6612327
  REGION 12..152: note = RuvC_domain
  SITE 15: note = RuvC_P1
  SITE 58: note = RuvC_P2
  SITE 93: note = RuvC_P3
  SITE 95: note = RuvC_P4
  SITE 98: note = RuvC_P5
  REGION 217..304: note = Tnp_domain
  SITE 225: note = Tnp_P1
  SITE 255: note = Tnp_P2
  SITE 263: note = Tnp_P3
  SITE 264: note = Tnp_P4
  SITE 276: note = Tnp_P5
MSQQSNCAIAVIGIDIGKNSFHVVGQDQRGAIVLRQKWSRGQVEARLANQPPCLIGMEACVGAHHLSRKLQLLGHNARLMPAKYVRPYSKGQKNDFRDAEAIAEAVQRPTMKFVATKTADQLDLQALHRVRERLVSQRTGIINQIRAFLLERGVAVRQGPRFLRLELPGIVATRTDVLSPRMSRVIEELAGDWRHLDVRIEGLSSEIETLAHQDQHCERLMTVPGIGPIISSAMVAAIGTGDVFPKGRDFGAWLGLVPKQISTGDRTILGSISRRGNRYLRALFVQAAWVVLVKLGPKQWERYGLKSWIEAAKKRLHHNVLAIALANKLARIAWAVLNKGRTFTCVKTDAIASRPA

SEQ ID NO: 13077 - protein, 316 aa, unidentified
  source 1..316: note = protein_da48cbe
  REGION 8..152: note = RuvC_domain
  SITE 11: note = RuvC_P1
  SITE 55: note = RuvC_P2
  SITE 95: note = RuvC_P3
  SITE 97: note = RuvC_P4
  SITE 100: note = RuvC_P5
  REGION 190..274: note = Tnp_domain
  SITE 198: note = Tnp_P1
  SITE 227: note = Tnp_P2
  SITE 235: note = Tnp_P3
  SITE 236: note = Tnp_P4
  SITE 247: note = Tnp_P5
MEVSLIFVGIDVSKAQLDVAIRPSDERQSFANDKVGIKALVKKLAKIKPTLIVLESTGGLERQVMGALISAELPAVMVNPRQVRDFAKATGQLAKTDNIDAAVLAHYAEAVRPPLRPLPDALTVELRALTARRRQIIEMIVAEKNRLATASQAVRKHILAHISWLEHDLDRADQDIEHFIEQSPIWKQNEELLRSAPSVGPVTSRTLLAELPELGTLDRKQISALTGIAPFNRDSGTLKGHRSIWGGRAAVRSALYMATLVATQRNPVIRDFYRRLKAKGKASKVALVACMRKLLTILNSMLKHKTRWSDTFLQTN

SEQ ID NO: 13078 - protein, 317 aa, unidentified
  source 1..317: note = protein_650fc1b
  REGION 10..180: note = RuvC_domain
  SITE 13: note = RuvC_P1
  SITE 55: note = RuvC_P2
  SITE 95: note = RuvC_P3
  SITE 97: note = RuvC_P4
  SITE 100: note = RuvC_P5
  REGION 190..274: note = Tnp_domain
  SITE 198: note = Tnp_P1
  SITE 227: note = Tnp_P2
  SITE 235: note = Tnp_P3
  SITE 236: note = Tnp_P4
  SITE 248: note = Tnp_P5
MAMQVDRLIVGVDVAKAELVIHHDDRDEIIKIKNAKPEIKKWLKQQAAHTAIAVEATNVYHLDLVELAHGMGFQVYVVDGFQLNNYRKGVGGRVKTDPSDARLLSRFLRNEGNELRPWSPPPAVYGKLQSLLRRRAALVTARTAMTQSWANENLLRAAFETFVKSIDRLDQLIQKKLKEVLREAGLQEQVARCQAVEGIGFLTATALVMAFVRGEFKSSDSYIAFLGMDLRVSDSGQKNGRRRLTKRGCSEIRRLLHNAAMAASRSAAWKELYEKQRTAGKATTQALVILARKLARVAFALMRNQDEYVTRKGKLAC

SEQ ID NO: 13079 - protein, 342 aa, unidentified
  source 1..342: note = protein_c6b85dd
  REGION 7..149: note = RuvC_domain
  SITE 10: note = RuvC_P1
  SITE 53: note = RuvC_P2
  SITE 88: note = RuvC_P3
  SITE 90: note = RuvC_P4
  SITE 93: note = RuvC_P5
  REGION 212..300: note = Tnp_domain
  SITE 220: note = Tnp_P1
  SITE 250: note = Tnp_P2
  SITE 258: note = Tnp_P3
  SITE 259: note = Tnp_P4
  SITE 271: note = Tnp_P5
MAQPVTVGLDIAKNVFHAHGVDAHGQKVLSRKLRRGQVEAFFAKLDPCLVGIEACATAHHWARTIARFGHQVRLMPPAYVKPYVKTQKNDAADAEAICEAVTRPNMRFADTKTIEQQSVLVLHRTRAMLIRHRTRVGNTIRAHLAEFGITESIGRVGLSRLVDIITSGEDDRIPDVTRGALMCLVDQYCLLQGQILELDRQVMAWHKSNEASKRLATIPGIGPLAASALVASIGDASTFKNGRSFAAFIGLVPKQSSSGGKERLGKISKRGDHYLRWLLVVGGLAVIRYAQRHGTRRPWLLKLLQRRTTKIAAVAMANKMARIAWVLMARGGAYHEPVPQAA

SEQ ID NO: 13080 - protein, 402 aa, unidentified
  source 1..402: note = protein_f905765
  REGION 4..160: note = RuvC_domain
  SITE 7: note = RuvC_P1
  SITE 57: note = RuvC_P2
  SITE 97: note = RuvC_P3
  SITE 99: note = RuvC_P4
  SITE 102: note = RuvC_P5
  REGION 275..359: note = Tnp_domain
  SITE 283: note = Tnp_P1
  SITE 313: note = Tnp_P2
  SITE 321: note = Tnp_P3
  SITE 322: note = Tnp_P4
  SITE 335: note = Tnp_P5
MISVGIDVSKEKSTICAMKPYGEIIMSPKDFKHTKEDMEHLTDKISSLGEDVKCVLEATGKYHLPICQYLKSHHLFVSVINPLEMKRYRCQGLRNAKTDKIDSKIIAQYGIDHWYQLSEPQEIEQDRYELRLLGRQYAQTMKIRVKRCQALSDLLDMTMPGICGLLNDFNRYNGKDKLCDFVREYWHYDNITKSSEKVFIKKYQTWSKKNGYRRNEDEARQLYALAMNSILTLDSGSEPVRLMIQNSVDILKEVDASLYTILNQMRELAKTMPEYDTVLSMGGIGETLAPCLIAEIGDIRQYHSGSALVAYAGIDVPPYESGKFVGTKRHISKRGSPLLRLLGYQIIDCLNKHGPRMVNDTSVYNYFMKKRAEGKPYKVAGMAAFNKFLRIYHSRVTTITTN

SEQ ID NO: 13081 - protein, 452 aa, unidentified
  source 1..452: note = protein_ac84b7d
  REGION 10..163: note = RuvC_domain
  SITE 13: note = RuvC_P1
  SITE 61: note = RuvC_P2
  SITE 102: note = RuvC_P3
  SITE 104: note = RuvC_P4
  SITE 107: note = RuvC_P5
  REGION 225..310: note = Tnp_domain
  SITE 233: note = Tnp_P1
  SITE 263: note = Tnp_P2
  SITE 271: note = Tnp_P3
  SITE 272: note = Tnp_P4
  SITE 283: note = Tnp_P5
MDRVLDRVLIGVDPHKESVTIEARDSREVLRARGRFETSSVGYRGLMRFTRQWPERVWAVEGANGIGRPFALRLVADGERVLDVPAKLAARARVFDTGQGRKTDATDAHAIVLVALRDKSLRELSVDPDLQVLRLLCDRRDELSRAHAQGLNRMHRLFLELMPGGAPVKQSVDQYKRLLATVRPRDQVGKARRRMAAEELADLVRLDAKLKLMKGELRAAVEAIGSHLMDINGIGPAGAARILADVGDVARFPDRNHFASWTGTAPIDASSGEHVRHRLSRAGNRRLNHVLYMAQLVQLRNDTEGRAYYRRKLSQGKTSMEAMRCLRRRLSDVVYRQLVADAKARTLSDRAELARAASDRADPGGHSGTTLQSSVTDLTPDIGSSDKPLPGPAPVRLPVPKPAENHRDPGAAAHPRRRAGGVNVERPTGRTTLTPTSAGAPSKAPRTKPLTT

SEQ ID NO: 13082 - protein, 409 aa, unidentified
  source 1..409: note = protein_14f74b2
  REGION 5..166: note = RuvC_domain
  SITE 8: note = RuvC_P1
  SITE 63: note = RuvC_P2
  SITE 103: note = RuvC_P3
  SITE 105: note = RuvC_P4
  SITE 108: note = RuvC_P5
  REGION 275..361: note = Tnp_domain
  SITE 283: note = Tnp_P1
  SITE 314: note = Tnp_P2
  SITE 322: note = Tnp_P3
  SITE 323: note = Tnp_P4
MRLFVGDDWAEDHHDVEVMDEAGRVLAKRRLPEGAVGMALLHGLVGGCLDADEDPDEAQVLVGIETDRGPWVAALVAAGYLVFPVNPLQSARFRARHQVSGAKSDAGDAHVLADMVRTDAHQLRPAAGDSPGAAGIKVLARTHKTLIWERSRQVQRLRHQLREYFPAALEAFGDDLDASEALELIAKFPEPARAAKLTRAQVSAALKRAGRRDITGRATAILAALRSGQLGQPPVLTLAYAATVRSLIAVITTVNEQVKILQGEVEAHFGRHPDAEIILSQPGLGPVLGARVLAEFGDDPARCADGKARRNYAGTSPLTRASGKKKTVTARFVHNDRLVDALNAQAFSALSASPGARAFYDQQRANGHTHNDALRRLANRLVGILHGCLKTRTRYNEDTAWAHRHQQAA

SEQ ID NO: 13083 - protein, 341 aa, unidentified
  source 1..341: note = protein_2c4be1b
  REGION 6..147: note = RuvC_domain
  SITE 9: note = RuvC_P1
  SITE 52: note = RuvC_P2
  SITE 87: note = RuvC_P3
  SITE 89: note = RuvC_P4
  SITE 92: note = RuvC_P5
  REGION 211..295: note = Tnp_domain
  SITE 219: note = Tnp_P1
  SITE 249: note = Tnp_P2
  SITE 257: note = Tnp_P3
  SITE 258: note = Tnp_P4
  SITE 270: note = Tnp_P5
MSIMILGIDLGKNSCSLVGFDEAGAVVMRRRVRRENLIAFTAKLPSCVIAMEACCGAHHAGRTMQEQGHDIRLMSPEYVRPYVKAQKNDDRDAEAIAEAATRPTMRFVALKSEEQLDVQTLHRVRDRLVGDRTSLTNQIRSLLLERGHVVAQGHAKLRLALADLLEGETDRLGARMRFLLADMRRRWDELDGRVAAFDAEFAAMARNDERAKRLTTIPGIGPLNATALVAAVGDAATFSRGRDLAAWLGLVPRQVTTGGKPKLLGITKRGSKYLRKMLIQGARAAMPTLRGMDTVVGAWLRGLLTRAHPNTVVVALAAKMARIVWALLRNACSYEVRPQTV

SEQ ID NO: 13084 - protein, 342 aa, unidentified
  source 1..342: note = protein_9e9d6f5
  REGION 7..149: note = RuvC_domain
  SITE 10: note = RuvC_P1
  SITE 53: note = RuvC_P2
  SITE 88: note = RuvC_P3
  SITE 90: note = RuvC_P4
  SITE 93: note = RuvC_P5
  REGION 211..295: note = Tnp_domain
  SITE 219: note = Tnp_P1
  SITE 249: note = Tnp_P2
  SITE 257: note = Tnp_P3
  SITE 258: note = Tnp_P4
  SITE 270: note = Tnp_P5
MSEVTTIGLDIAKNVFHAHGSDTRGRGVFSKRLSRAKVLDFFAAQPRCTVAMEACGGAHHWGRELMALGHDVRLIPPAYVKPFVKRQKNDTVDAEAICEAAQRPTMRFVAVKSEEQQASALVFRTRDLLVRQRTQLVNAIRGHLTEYGWVAPKGVSYVSMLGDMLEEEMAALPATAVAMFRVMLDLLAELDERIANLDREIARRAREDETARRLMTIPGIGPITATALTALAPTAETFAKGRDFAAWLGLTPLQRSTGGKQKLGATSKMGERTLRRLLIIGASAVVKQAAHRGVPKGSWLERMLARKPRMLVTVALANKMARIVWALLAKGGSYRAPAAVAV

SEQ ID NO: 13085 - protein, 408 aa, unidentified
  source 1..408: note = protein_4e2aa95
  REGION 4..163: note = RuvC_domain
  SITE 7: note = RuvC_P1
  SITE 60: note = RuvC_P2
  SITE 100: note = RuvC_P3
  SITE 102: note = RuvC_P4
  SITE 105: note = RuvC_P5
  REGION 273..359: note = Tnp_domain
  SITE 281: note = Tnp_P1
  SITE 312: note = Tnp_P2
  SITE 320: note = Tnp_P3
  SITE 321: note = Tnp_P4
MLFVGDDWAEDHHDVEVQDQHGRALRTARLPEGVDGIARFHELVARFLPEDADPSQVLVCIETDKGPWVRALVSAGYQVYGVNPKQAARHRELVSLSGAKSDKADAHALADMARTRRHQLRQIAADSDIAEAVKVVARAHQTLIWERTRHTLRLRTALREYFPAALQAYQPLTLTGADTLELLAKAPTPAAAAKLTLAQISAALKKARRRGIPDKATAIQQALRAEHLGQAEVVTGAYAATVRATVAILQTLNAEIRTMEGQVEAHFGQHPDADVYLSQPGIGVILGARVLAEFGDAPGRYADAKSRKNYAGTAPITRQSGKSKTVHARFIHNDRLVDALHMQAGAAILHDPSVRAYYDELRAREVSHNAALRQVGNRLVGILHGCLKTNNPYSETTAWSHRAQPAAA

SEQ ID NO: 13086 - protein, 412 aa, unidentified
  source 1..412: note = protein_47b5154
  REGION 9..158: note = RuvC_domain
  SITE 12: note = RuvC_P1
  SITE 64: note = RuvC_P2
  SITE 98: note = RuvC_P3
  SITE 100: note = RuvC_P4
  SITE 103: note = RuvC_P5
  REGION 253..340: note = Tnp_domain
  SITE 261: note = Tnp_P1
  SITE 292: note = Tnp_P2
  SITE 300: note = Tnp_P3
  SITE 301: note = Tnp_P4
  SITE 312: note = Tnp_P5
MDIVNERAAGMDISKRDAKVCVRIPGARAGTYTSKVTTWGATTHQILELREFLEREHVTVVVMEATSDYWKPFFYLLEETLPVMLVNAKAARNIPGRKTDVSDAAWLAQLAAHGLLRASFVPPEPIRELRDLTRARAIATRDRAREILRLEKFLESSGIKLSSVVSDLTGVSSRDMLEALINGERNPEVLAGMARGMLRSKIPALVDALTGRFKPHHAFMARLHLDQIDAHTRTIDTLTTRIEEAMEPFRDAREALATIPGVSHRVAEVIIAETGADMAVFQTPGRLASWAGVCPSANESAGHIKSSHIMPGNKYLKAALGTAAMSATRSKNTYLAAKYRRITTRAGRNKALVAVEHSILTAAWHMLSTGEIYNDPGADHYTRINPTKAKNRAIKQLNNLGYDVTITPVTAA

SEQ ID NO: 13087 - protein, 311 aa, unidentified
  source 1..311: note = protein_f3cb623
  REGION 6..154: note = RuvC_domain
  SITE 9: note = RuvC_P1
  SITE 52: note = RuvC_P2
  SITE 92: note = RuvC_P3
  SITE 94: note = RuvC_P4
  SITE 97: note = RuvC_P5
  REGION 188..272: note = Tnp_domain
  SITE 196: note = Tnp_P1
  SITE 225: note = Tnp_P2
  SITE 233: note = Tnp_P3
  SITE 234: note = Tnp_P4
  SITE 245: note = Tnp_P5
MTHDTIGVDISKDHLDAYRMSDGASRRFTNDRAGHTALLSWLGASHPRVIYEPTGPYHRTFERRLADAGFALVKVNPRQARRFAEATGKLAKTDRLDAAMLARMGALLELEARPACSPILSDLKDLHMAREALVKDRTAAKNRATTLTLAILKRQNGEQLRQIARQIAAIEAEIMTHIKADPELAHRFAILVSIPGVSTITAFALLIDMPELGLLNNGQAASLAGLAPIARQSGTWTGRAFIRGGRANVRRALYMPALVAIRFNRDLKAKYDQLKTAGKAFKVAITAIMRKMIILANALLRDGRKWAQSVT

SEQ ID NO: 13088 - protein, 345 aa, unidentified
  source 1..345: note = protein_2b5cfbd
  REGION 5..152: note = RuvC_domain
  SITE 8: note = RuvC_P1
  SITE 55: note = RuvC_P2
  SITE 92: note = RuvC_P3
  SITE 94: note = RuvC_P4
  SITE 97: note = RuvC_P5
  REGION 212..300: note = Tnp_domain
  SITE 220: note = Tnp_P1
  SITE 250: note = Tnp_P2
  SITE 258: note = Tnp_P3
  SITE 259: note = Tnp_P4
  SITE 271: note = Tnp_P5
MKYYAGLDVSVKETSVCIVDEVGKIYRETKVVSHPDDLSAVLRGAGLRLERIGLEAGPLSQWLFEGLARAGLPTICIETRHAKAFLKAQVNKTDRNDARGIAQMMRVNLFRPVHIKTLTSQKRRALLTARKLLQDKAIAIENDIRGLLRNFGLKVGVVGTLRFDARIRELVEGAPDLAEIMGPLLSARQKLRDEFTRLHRKVLTIAKDDAVCNRLMTIPGVGPVTSLAFISTVDIPARFRNSRAVGPALGLTPVLNQSGESQRVGRVSLCGDARMRALLYEAAQVMLTRVKKWSWLKAWAMNLAKRGGARKAIVALARRIAVIMHRIWMDGSEFRWSRETAPIHI

SEQ ID NO: 13089 - protein, 333 aa, unidentified
  source 1..333: note = protein_c17749c
  REGION 25..168: note = RuvC_domain
  SITE 28: note = RuvC_P1
  SITE 72: note = RuvC_P2
  SITE 112: note = RuvC_P3
  SITE 114: note = RuvC_P4
  SITE 117: note = RuvC_P5
  REGION 207..292: note = Tnp_domain
  SITE 215: note = Tnp_P1
  SITE 244: note = Tnp_P2
  SITE 252: note = Tnp_P3
  SITE 253: note = Tnp_P4
  SITE 264: note = Tnp_P5
MVEGTEGSHHKEGMTKMAKLSMVCAGIDIGKLKLDATINGTNEYLQVDNSPDGYIALAAWLRRHHVKRVGMEASGGYEQPVMAALRRAGFVVVCLQPMQVRAYATFKLQRAKNDRIDAALIATCTAAVAEVRPPPDPRFAALACRLTMIEQLTEDVARLKTRCEACRDPHGLEFWRAEIARLKGCIRTELKQLVADIRIHPDLAARLDLITSVDGVGLRTAVAVLIRMPEIGNVSREQAAALAGLAPYDDDSGSRTGQRHIAFGRQRLRTSLYAAALPAAFKWNQQLVALYRRLTGQGKPHKVALVACARKLIIFLNTVVARGTPWIAKSAAI

SEQ ID NO: 13090 - protein, 342 aa, unidentified
  source 1..342: note = protein_e00977d
  REGION 7..149: note = RuvC_domain
  SITE 10: note = RuvC_P1
  SITE 53: note = RuvC_P2
  SITE 88: note = RuvC_P3
  SITE 90: note = RuvC_P4
  SITE 93: note = RuvC_P5
  REGION 212..304: note = Tnp_domain
  SITE 219: note = Tnp_P1
  SITE 249: note = Tnp_P2
  SITE 257: note = Tnp_P3
  SITE 258: note = Tnp_P4
  SITE 270: note = Tnp_P5
MEEVSIIGVDLAKNVFQLHGAAADGVVVFRKKLSRLQFARFMTDHPACDVAMEACPSAHHWARELSAYGHSVRLIAPHYVKPFIKRQKNDAADAEAIVEAAMRPTMRFVEPKTEAQQARAVAFRAREQIVKQRTEAINALRAHLYEFGHVAPEGVGYIPRLAKVVEDPGSGLPDLARDICRMVLEQIELLTSRLTAVSAKLAAASRAAAMPRQLQTMPGVGPITALAVETFAPPMDQFRRGRDFAAWLGLVPRQHSSGGKQRLGKTSKMGQRDIRRLLVTGAMAVVRWALRRGAPQNPWLERMLERKPPMVAAFALANKMARGIWAMLTRGEDYRDPVMATA

SEQ ID NO: 13091 - protein, 401 aa, unidentified
  source 1..401: note = protein_7a45ba6
  REGION 14..168: note = RuvC_domain
  SITE 17: note = RuvC_P1
  SITE 65: note = RuvC_P2
  SITE 105: note = RuvC_P3
  SITE 107: note = RuvC_P4
  SITE 110: note = RuvC_P5
  REGION 275..359: note = Tnp_domain
  SITE 283: note = Tnp_P1
  SITE 312: note = Tnp_P2
  SITE 320: note = Tnp_P3
  SITE 321: note = Tnp_P4
  SITE 333: note = Tnp_P5
MQEPLQHNSIDVFVGVDVGKGQHHAVALDRSGKRLYNKALPNDEAKLRALINELKAHGQLLFVVDQPATIGALPVAVARDEGVLVAYLPGLAMRRIADLHAGEAKTDARDAAIIAEAARSMPHTLRSLRLADEPLAELTMLCGFDDDLAAQVTQTSNRIRGLLTQIHPALERVLGPRLDHPAVLDLLERYPSPAALAATTEKTLANRLTKLAPRMGKRLAAEIVQALGEQTVVVPGTQAATVVMPRLAKQLAALLQQRDEVASEVERLVHAHPLYSVLTSMPGVGVRTAARLLTEVAHKTFASAAHLAAYAGLAPVTRRSGSSIRGEHPSRRGNKVLKRTLFLSAFAALRDPISRAYYSRKIQQGKRHNQALIALARRRCDVMFAMLRDGTFYQPQTTPNA

SEQ ID NO: 13092 - protein, 400 aa, unidentified
  source 1..400: note = protein_4b2f5ae
  REGION 6..162: note = RuvC_domain
  SITE 9: note = RuvC_P1
  SITE 58: note = RuvC_P2
  SITE 99: note = RuvC_P3
  SITE 101: note = RuvC_P4
  SITE 104: note = RuvC_P5
  REGION 268..354: note = Tnp_domain
  SITE 276: note = Tnp_P1
  SITE 306: note = Tnp_P2
  SITE 314: note = Tnp_P3
  SITE 315: note = Tnp_P4
  SITE 327: note = Tnp_P5
MSQLWAGVDVGKEHHWVVVVDDTGAVKLSRKLVNDEQPIRALVAEIGAMAEQVSWAVDLTTVYASLLLTVLADAGKSVRYLAGRAVWQASGTYRGGEAKTDAKDARVIADQSRMRGTDLPVLHPHDDLVTELRMLTAHRADLVADRTRTINRLRQQLVAVCPALERAAQLTQDRGWVVLLSRYQRPKAIRQSGLSRITKTLTEAGVRNASTIAETAVTAAKTQTVRLPGEEVAAALVAELAQGVISLDDRIKATDADIEGRFRRHPLAEVITSMPGIGFRLGAEFLAAVGDPALIGSADQLASWAGLAPVPRDSGKRTGRLHTPQRYSRRLRRVMYMSALTAIRCDPHSQTYYQRKRDEGKRPIQATMCLARRRTNVLYALIRDNRTWQPHSPQITESAA

SEQ ID NO: 13093 - protein, 341 aa, unidentified
  source 1..341: note = protein_2d47fef
  REGION 6..152: note = RuvC_domain
  SITE 9: note = RuvC_P1
  SITE 53: note = RuvC_P2
  SITE 91: note = RuvC_P3
  SITE 93: note = RuvC_P4
  SITE 96: note = RuvC_P5
  REGION 211..298: note = Tnp_domain
  SITE 219: note = Tnp_P1
  SITE 249: note = Tnp_P2
  SITE 257: note = Tnp_P3
  SITE 258: note = Tnp_P4
  SITE 270: note = Tnp_P5
MSIVTIGIDLAKNVFAVHGVDEAGKAVLIKPRVSRDQLVTLIAQLPPCLIGMEACSGAHHWARMFQQYGHTVKLMAPKLVAPYRMSGKRGKNDAADAAAICEAVTRPSMRFVPLKDEHQQATLCLHRTRQGFIEERTAIYNRIRGLLSEFGVVLPQSPVRLRREITAHLDVLPGWARRCIDDLLEHAGLLEDRLIEYDRAISEIARADERSTRLMQLRGIGPTTASALLASLGAGHDFRNGRQVAAWIGLTPGQHSSGGKQRLGSITKAGDAYLRSLLVLGARSIIANLGEKQDRFSRWVRNLVERRGYWRASVAIAAKNARMAWASLKYGDDFKYEPTAA

SEQ ID NO: 13094 - protein, 403 aa, unidentified
  source 1..403: note = protein_89c1bb8
  REGION 3..161: note = RuvC_domain
  SITE 6: note = RuvC_P1
  SITE 58: note = RuvC_P2
  SITE 98: note = RuvC_P3
  SITE 100: note = RuvC_P4
  SITE 103: note = RuvC_P5
  REGION 268..355: note = Tnp_domain
  SITE 276: note = Tnp_P1
  SITE 307: note = Tnp_P2
  SITE 315: note = Tnp_P3
  SITE 316: note = Tnp_P4
  SITE 327: note = Tnp_P5
MFCGWDWGSTVHGVCLIDDQGAVVKRWMVQHTGNQLMNVFCELAQLVEGGDVAQVPIAIERGEGLVVGLIAGAGHPVWMVEPSAFKAARPRWGAAGAKSDLSDAFMLADYARTDGHRLRRVEPVGQATRELAALVRARIALVEARTAASNQLWAILAEHWPGAAVVFQKLTSQIALAFLTDYPTPQAAAQLGEGRMAQFCRRHSYRGGKSPAELVGRLRAAPASANPIAPTILASIVQGSTAHLQLLNTEITRLERDLAKVLAAHPKTPLLQTLPRIATVSLAALIAEIGPLLERCENPEQVAAMCGAAPVTRASGKSRTVAFRYTANKPARVAITSFADNSRHSSDWASDAYRRARARGARHPHAVRILARGWVRVIWACWTTDTIYDPSRHRGQQLLAAVS

SEQ ID NO: 13095 - protein, 382 aa, unidentified
  source 1..382: note = protein_b54815e
  REGION 38..181: note = RuvC_domain
  SITE 41: note = RuvC_P1
  SITE 86: note = RuvC_P2
  SITE 121: note = RuvC_P3
  SITE 123: note = RuvC_P4
  SITE 126: note = RuvC_P5
  REGION 245..333: note = Tnp_domain
  SITE 253: note = Tnp_P1
  SITE 283: note = Tnp_P2
  SITE 291: note = Tnp_P3
  SITE 292: note = Tnp_P4
  SITE 304: note = Tnp_P5
MRHGGILLEANDSEGESMKKNTTTNQYVPTDVLKCTVIAVDLAKRVFQVAGQDAAGLTVYEERINSRESFHAFLRKLPTSITVLVETGPGAQAWAQLLKTQGNPVRILPAQHVANHRSGPKNDRNDALAILRAGRDTSISSVPVKSAAALAMQALHRVRQGYVRRRTAMSNQMRGLLLEHGLAMAQGDSAFSQGIPRILEDATQPLPDMLRELIDELLGEWSQLGERINVLTGRLETAAKNDETAKRLMTVRGIGPIISTAVIAKQTEPERFANARLFAAYFGLVPKQNSSGEKVRLGKMSKHGDAYLRSLAIQGAHAVLRQVKANSEDPDDRRLQRWVSRLGRKEAAVRLANRNLRIIWVLLQNDQTYRRQVNNDLEKAMS

SEQ ID NO: 13096 - protein, 374 aa, unidentified
  source 1..374: note = protein_a104ba6
  REGION 7..154: note = RuvC_domain
  SITE 10: note = RuvC_P1
  SITE 58: note = RuvC_P2
  SITE 94: note = RuvC_P3
  SITE 96: note = RuvC_P4
  SITE 99: note = RuvC_P5
  REGION 222..307: note = Tnp_domain
  SITE 230: note = Tnp_P1
  SITE 260: note = Tnp_P2
  SITE 268: note = Tnp_P3
  SITE 269: note = Tnp_P4
  SITE 281: note = Tnp_P5
MHKYIWVGLDVHKVTIAVAVAKGEEVPHSLGTIPNDPDAIAKLMRKLGPSARLRVCYEAGPCGYVLYRQLTAMGIDCAVVAPTLVPVRAGDRVKTDRRDALKLARLLRSGELTAVAVPDEAHEALRDLVRAREAAHKDLRRARHRLQKFLLRQGHRCPLRTKAWGVRYLAWVSGLHFAHAPQSVVHREYLAEVERLAERRTRLDRELEVALAQAPAAIQTVVRALQVLRGVAFVTAVTAVAEVGQFRRFTRARQLMAYSGLVPRESSSGDTVWRGAITKTGNAHLRRVLIEAAWQYRHQPRAGITIRQRRKGQAAALCAIAEKADHRLHLRYRRLLARGKSKGKVVTAIARELLGFLWAVAVHAENGSTMPAAA

SEQ ID NO: 13097 - protein, 312 aa, unidentified
  source 1..312: note = protein_a5bf426
  REGION 7..149: note = RuvC_domain
  SITE 10: note = RuvC_P1
  SITE 53: note = RuvC_P2
  SITE 88: note = RuvC_P3
  SITE 90: note = RuvC_P4
  SITE 93: note = RuvC_P5
  REGION 206..273: note = Tnp_domain
  SITE 225: note = Tnp_P2
  SITE 233: note = Tnp_P3
  SITE 234: note = Tnp_P4
  SITE 246: note = Tnp_P5
MENIALIGIDLDKNSFHIHCQDRRGKAVYRKKFTRPKLIEFLATCPATTIAMEACGGSHFIARKSEELGHFPKLISPQFVRPFVKSNKNDFVDAEAICEAASRPSMRFVQPRTESQQAMRALHRVRESLVQDKVKTTNQMHAFLLEFGISVPRGSAVISRLSTLLEDNSLPLYLSQLLLKLQQHYHYLVEQIKDLESQLKRKVDEDEIGDGKQYASGRDFAAATGLVPRQYSTGGRTTLLGISKRGNKKIRTLLVQCARVFIQKQEHQSGKLADWVRDLLCRKSNFVVTCALANKLARIAWALTARQQTYVA

SEQ ID NO: 13098 - protein, 403 aa, unidentified
  source 1..403: note = protein_fc91aac
  REGION 2..145: note = RuvC_domain
  SITE 43: note = RuvC_P2
  SITE 84: note = RuvC_P3
  SITE 86: note = RuvC_P4
  SITE 89: note = RuvC_P5
  REGION 207..292: note = Tnp_domain
  SITE 215: note = Tnp_P1
  SITE 245: note = Tnp_P2
  SITE 253: note = Tnp_P3
  SITE 254: note = Tnp_P4
  SITE 265: note = Tnp_P5
MTFEARDSREILRATGRFGTDVRGYRLLLAHARQWPERVWAVEGANGIGRPLAQRLLASGERVLDVPAKLAARARVFGTGQGRKTDPADAHVIVMVALRDKGLRELTTDPDLTVLRLLCDRRDELSRARAQALNRLHRLFLELVPGGAPVKKSTAQYQALLATVRPRDLAGKTRRRMAAEELADLGRLDAKLKAMKAELKAAVLATGSHLMDIHGIGPAGAARILADVGDVARFPNRHHFASWTGTAPIDASSGQHIRHRLSRAGNRRLNHVLYMAGIVQLRNDTPGRAYYRRKVAAGKTPMEAMRCLRRRLSDVVYRRSPPTYGHKHQSRQAREGTPGRLYCPARPTFPRASALRTSHFPDPHPRRYPRHQRRPRPPRPPQAPPRDGAPEVSTWSAPPDERR

SEQ ID NO: 13099 - protein, 276 aa, unidentified
  source 1..276: note = protein_2208727
  REGION 2..77: note = RuvC_domain
  SITE 17: note = RuvC_P3
  SITE 19: note = RuvC_P4
  SITE 22: note = RuvC_P5
  REGION 139..226: note = Tnp_domain
  SITE 147: note = Tnp_P1
  SITE 177: note = Tnp_P2
  SITE 185: note = Tnp_P3
  SITE 186: note = Tnp_P4
  SITE 198: note = Tnp_P5
MKLLPAQYVKAYVKRGKNDAADAEALCEAMSRKTMRFVPAKSAEQQAGLMLMGARDRLVRNRTQLTNAIRGYATEFGLTAAKGMAHVMPLLDRIAADETLPALARDLFALQRDELVRIEAEIDALDAKLKTWHRSDECSRRLAEIPTVGPIVASLLRLKTPAPELFSSGRDFAAWIGLTPRDHSTAGKNRLGVITRAGDEALRSALVVGATAVIQHARTGHSKHASPWLLDLLKRKSPKLAAIALANKTARIAWKLMVTGERYRPRSAASPIGHAA

SEQ ID NO: 13100 - protein, 343 aa, unidentified
  source 1..343: note = protein_3d162cd
  REGION 6..148: note = RuvC_domain
  SITE 9: note = RuvC_P1
  SITE 52: note = RuvC_P2
  SITE 87: note = RuvC_P3
  SITE 89: note = RuvC_P4
  SITE 92: note = RuvC_P5
  REGION 211..316: note = Tnp_domain
  SITE 219: note = Tnp_P1
  SITE 249: note = Tnp_P2
  SITE 257: note = Tnp_P3
  SITE 258: note = Tnp_P4
  SITE 270: note = Tnp_P5
MEIKRIGLDLAKYVFEVHAVDGDEQVVLRKTLRREAVAQFFAELEPCLVGMEACCGSHYWARVLTDLGHDVRLISPQFVKPYVKSNKNDRNDAEAICEAVGRPSMRFVPPKSSEQLEIQAVHRIRQRVVANRTRLVNQVRGLLGEHGIVVARDINRIRRALGEIADRQSGDLGGLFLEMVGDMRDELAELDARLATYNRRIRNLFRSNEMCQRIGRIEGIGPITATALVAAIGDRSSFKNGRQFAAWLGLVPKQRSSGGKARLFGISKRGDRYLRTMLIHGARAVLGRSSGKTDARSQWVNRMRERRHPNVVAVALANKNARIVWSLLSREQSYCPDHVVSFG

SEQ ID NO: 13101 - protein, 293 aa, unidentified
  source 1..293: note = protein_1a3c8b0
  REGION 12..101: note = RuvC_domain
  SITE 41: note = RuvC_P3
  SITE 43: note = RuvC_P4
  SITE 46: note = RuvC_P5
  REGION 164..252: note = Tnp_domain
  SITE 172: note = Tnp_P1
  SITE 202: note = Tnp_P2
  SITE 210: note = Tnp_P3
  SITE 211: note = Tnp_P4
  SITE 223: note = Tnp_P5
MPDWYGGLWRFSALGTELTKLGHKVRLLQARFVKAFVMGNKNDVMDARAIWMAVQQPGKEIAVKTEEQQSVLVLHRTRMQLVKFRTAQINALHGTLLEFGETIHKGRAAMERELPEALERMKERLPPYLIMVLENQYNRLNELDSLIEDIEKQLTSVARQNETCKRLLDIPGVGPLIATAAVATMGEASAFKSGREFAAYVGLVPKQTGSGGKVRLLGISKRGDTYLRTLFIHGARAVALVAKEPGPWITELKKRRPASVAIVAMANKLARTVWAITAHDRKYDRNHVSIRPY

SEQ ID NO: 13102 - protein, 394 aa, unidentified
  source 1..394: note = protein_fea8fbe
  REGION 9..162: note = RuvC_domain
  SITE 12: note = RuvC_P1
  SITE 60: note = RuvC_P2
  SITE 101: note = RuvC_P3
  SITE 103: note = RuvC_P4
  SITE 106: note = RuvC_P5
  REGION 224..309: note = Tnp_domain
  SITE 232: note = Tnp_P1
  SITE 262: note = Tnp_P2
  SITE 270: note = Tnp_P3
  SITE 271: note = Tnp_P4
  SITE 282: note = Tnp_P5
MVQSGRVVIGMDPHKRSVTIEVMAGDETILGGGRFATDPDGFTTLREYVRAWPDRVWAIEGCNGIGHHVALRLLAEAQEVVDVPPKMSARARVFATGQGRKTDATDAHSIALVGTRMAGLRPVIDDEQLAVLRTLADRRRALGQEHTRMVAQLHHLLLELVPGGAKKFLSAAQAKEILSKVRPRDAAGKVRRRVAAELVGDLERTYKRKKAADKELTELVRATGTSLLDLTGIGPSGAARLLVEVGDITRFPDRAHFASWTGTAPIDASSGDHVRHRLSRGGNRQINRVLHIMATVQLRSPGIGRDYYDRKKADGKTSMEAMRALKRRLSDVAYRAMLDDAVAHTTDARTGPGGHRGTSLTSSATGSHPHTGTSDQSLPGPVTHDPRTALPAAS

SEQ ID NO: 13103 - protein, 340 aa, unidentified
  source 1..340: note = protein_9ed16f8
  REGION 6..148: note = RuvC_domain
  SITE 9: note = RuvC_P1
  SITE 52: note = RuvC_P2
  SITE 87: note = RuvC_P3
  SITE 89: note = RuvC_P4
  SITE 92: note = RuvC_P5
  REGION 210..301: note = Tnp_domain
  SITE 218: note = Tnp_P1
  SITE 248: note = Tnp_P2
  SITE 256: note = Tnp_P3
  SITE 257: note = Tnp_P4
  SITE 269: note = Tnp_P5
MTITTIGLDLAKSVFQAHGVDGTGATVLVKKLHRKQMLPFFSKLAPCLIGVEACGTAHYWARTLAAMGHEVRLIPPSYVKAYVKRGKSDALDAEAICEAVQRPTMRFVPVKTVEQQAILMTHRARSLLVRQRTMLANALRAHLAELGFVANPGLANLAKLAEQVMADKDALPSYAQSALEILIRQIMTISGEISALDQQLKAWHTKSEASRRLAAIPGIGVITATALAATVTDPDQFRSGRQFAAWLGLTPRQHSTGGKTKLGGISKQGDRYLRRLLVVGATAVMRHVKDKPTPMANWIRKLSEKKPFRLVSVALANKLARIAWAVLTRKEAYRPYAHLT

SEQ ID NO: 13104 - protein, 393 aa, unidentified
  source 1..393: note = protein_8c497f3
  REGION 5..159: note = RuvC_domain
  SITE 8: note = RuvC_P1
  SITE 59: note = RuvC_P2
  SITE 98: note = RuvC_P3
  SITE 100: note = RuvC_P4
  SITE 103: note = RuvC_P5
  REGION 268..360: note = Tnp_domain
  SITE 275: note = Tnp_P1
  SITE 305: note = Tnp_P2
  SITE 313: note = Tnp_P3
  SITE 314: note = Tnp_P4
  SITE 327: note = Tnp_P5
MQNVLAVDVAKGKSMISLISSCGEVLIEPYEVNHSIIDFSNLLNRINKLKLDNISVIMESTGIYHRPIERFFLENNFKVFVINDLYSKMYKRNLRKTKTDKLDCISLSELFFNTDFREYIKPDDIYLNMNALSRQYHALDELCVNLKNRYKNLVYLCFPEYELIFKNKTFYSELALSFIEKYPHADIISNTRIDALQNFFKKNGFRHWKKKPMIIKEYAINSYPSVSKDDEITSSLSQLARLINTYQNEIETIKYKIIFLGKKTKYFESINSIFGIGEFTTSLIIAELGDINRFKNIKELTAYCGLDPSIKQSGKSINIKGPISKSGNKYLRKILFVSILNILSLTRLCHTENDIENYYRKKRNEGKHHYVATIACTTKLLRKIFVLCKKLDK

SEQ ID NO: 13105 - protein, 398 aa, unidentified
  source 1..398: note = protein_9767d23
  REGION 13..167: note = RuvC_domain
  SITE 16: note = RuvC_P1
  SITE 64: note = RuvC_P2
  SITE 104: note = RuvC_P3
  SITE 106: note = RuvC_P4
  SITE 109: note = RuvC_P5
  REGION 274..358: note = Tnp_domain
  SITE 282: note = Tnp_P1
  SITE 311: note = Tnp_P2
  SITE 319: note = Tnp_P3
  SITE 320: note = Tnp_P4
  SITE 332: note = Tnp_P5
MDIEGYNSVEVFIGVDVGKGAHHAVALDREGRRLLDCALPNDEAQLRALIAGLRKHGQLLLVVDQPATIGALPVAVARAEGVFVGYLPGLAMRRIADLHAGEAKTDARDAFIIAEAARGMPHTLRSLKLADSQLAELTVLCGFDDDLAGQITQTSNRIRGLLTQVHPALERVLGPHLDHPAVLDLLERYPSPAQLAAATEKQLANRLTKLAPRMGKGLAAQIVQALSEQTVVVLGTNATSIVLPRLARQLAALRRQRDEVAQEVERIVHAHPLYPVLTSMPGVGVRTAARLLTEVTGGAFASAAHLAAYDGLAPVTRRSGSSIRGEHPSRRGNKNLKRAMFLSAFAALRDPVSRAYYTRKIGQGKRHNQALIALARRRCDVLFAMLRDGTLYSPKLPA

SEQ ID NO: 13106 - protein, 315 aa, unidentified
  source 1..315: note = protein_90c1832
  REGION 11..155: note = RuvC_domain
  SITE 14: note = RuvC_P1
  SITE 58: note = RuvC_P2
  SITE 98: note = RuvC_P3
  SITE 100: note = RuvC_P4
  SITE 103: note = RuvC_P5
  REGION 193..277: note = Tnp_domain
  SITE 201: note = Tnp_P1
  SITE 230: note = Tnp_P2
  SITE 238: note = Tnp_P3
  SITE 239: note = Tnp_P4
  SITE 250: note = Tnp_P5
MERGEPSTKIGGIDVGKRLLDVAVHGANEPFQAANDAAGWDELAAWLKARGVGRVGLEATAGYERGVRARLEASGFEVVVHQPLEVRLFARLKRRRAKTDRLDAALIAAATAQVDTVRAAQDPRLTELAERLTAYEQISDQAAQLKTCMEQVTLPDLAASLGEQIESLSALKMRLQQEIMAQIKAFDDLAARWRLLQSLPGVGPVVAASLVIRMPELGALKRGQPASLIGVVPFDRQSGQWRGQSFIGGGRSRPRRMLYLAAVSAKRFDPGFKAFADRLLDAGKPTKLAIVAVMRKLIEAANLVLARQQPWLPRP

SEQ ID NO: 13107 - protein, 254 aa, unidentified
  source 1..254: note = protein_ed609dc
  REGION 4..163: note = RuvC_domain
  SITE 7: note = RuvC_P1
  SITE 60: note = RuvC_P2
  SITE 101: note = RuvC_P3
  SITE 103: note = RuvC_P4
  SITE 106: note = RuvC_P5
  REGION 196..254: note = Tnp_domain
  SITE 204: note = Tnp_P1
  SITE 234: note = Tnp_P2
  SITE 242: note = Tnp_P3
  SITE 243: note = Tnp_P4
MIYVGIDVVKDRHGCFITNSDGEVLFDAFTISNNLDVFNILYQKIISVMKDVTKAKVRLEANRHYNYNLLGYLIDKGLLAYVINPLHTNLYRKSLCLRKAKTDKVDARAIASVLMSDVNLKSYSDISHHNKELKSLTRYYFDKVRERAKLKSSARTSIDSNVPAKSLELKHAIKLFQKLISEIDEIKNEIIMDEINSPILSIPGINYRMRAMIIAEISVFNCSDSPDKILAYVRFSPSTYQSGQLNGAYSHMEK

SEQ ID NO: 13108 - protein, 401 aa, unidentified
  source 1..401: note = protein_1353ebf
  REGION 10..165: note = RuvC_domain
  SITE 13: note = RuvC_P1
  SITE 62: note = RuvC_P2
  SITE 102: note = RuvC_P3
  SITE 104: note = RuvC_P4
  SITE 107: note = RuvC_P5
  REGION 271..357: note = Tnp_domain
  SITE 279: note = Tnp_P1
  SITE 309: note = Tnp_P2
  SITE 317: note = Tnp_P3
  SITE 318: note = Tnp_P4
  SITE 330: note = Tnp_P5
MSTSDNRIWVGVDAGKGHHWAAGVDGEGETLFSTKVINDESQILSLIKAARERAGEIRWAVDISGRASTLLLALLIAHGQHVVYVPGRTVNRMSGAYRGEGKTDAKDAHVIADQARMRPKGFVRLDTPPELVTTLRVLTNYRADLIADRVRLINRLRDLLVGICPALERAFDYSAAKGPVVMLTEYQTPAALRRIGVKRLTTWLERRKVRGADAVAAKAVEAAQSQMIELPGEKRAAKLVSDLAHQLLALDERIKENDREIRETFRTDERAEIIESMPGMGPILGAELVAIVGDLSGYLDAGRLASHAGLAPVPRDSGRRTGNYHRPKRYNRRLRHIFYLAAQTAMMRPGPSRDYYLKKRGEGLLHTQALLALARRRVDVLWAMLRDKRLFTSAPPVTQAA

SEQ ID NO: 13109 - protein, 330 aa, unidentified
  source 1..330: note = protein_59175f7
  REGION 4..152: note = RuvC_domain
  SITE 7: note = RuvC_P1
  SITE 54: note = RuvC_P2
  SITE 94: note = RuvC_P3
  SITE 96: note = RuvC_P4
  SITE 99: note = RuvC_P5
  REGION 195..282: note = Tnp_domain
  SITE 203: note = Tnp_P1
  SITE 233: note = Tnp_P2
  SITE 241: note = Tnp_P3
  SITE 242: note = Tnp_P4
  SITE 255: note = Tnp_P5
MTVVGIDISAQSFDLVSRRDGRNAKAQRFEQSPQGHARAISHLKGLKPECIVMEATGVYYLDLAVALHEADLPVCVINPRSFRHFAEIHLTGTKTDAIDAALLAEYGERMTPRRWTPPPKHCLGLRDIGRQINRLIHARTQAKNRLHALSAKTSTPELLIEDEQDGIAQLDRRIERLKQAALELIAQSETLSSHFEHISTARGMGQASSVAVLAELCTLPSDLKAAQVSRHAGLDVRLTQSGSSVNSPGRLSKAGNAYLRAALYMPAMVAIRHEPRAKAFYEALVARGKKKIQALCAVMRKYLTGLWACIKTRTPFDAAALFSDQHLNKA

SEQ ID NO: 13110 - protein, 389 aa, unidentified
  source 1..389: note = protein_74dfb36
  REGION 7..160: note = RuvC_domain
  SITE 10: note = RuvC_P1
  SITE 58: note = RuvC_P2
  SITE 99: note = RuvC_P3
  SITE 101: note = RuvC_P4
  SITE 104: note = RuvC_P5
  REGION 222..307: note = Tnp_domain
  SITE 230: note = Tnp_P1
  SITE 260: note = Tnp_P2
  SITE 268: note = Tnp_P3
  SITE 269: note = Tnp_P4
  SITE 280: note = Tnp_P5
MSEPIVLGMDPHKRSVTVEAMDGAERVLGGGRYATSVGGYAQMLAWARQYPQRVWAIEGCNGIGRHVAERLLGDGETVVDVPPKLSARMRVYATGQGRKTDATDAHSVALVGVRITGLRPVVNDVQRGELRVLVDRRRALGEDHVRMTCQLHALLLELIPGGAKKDLSAAQAKKLLATVRPRDAAGKARRRVAAELIGDLERVYRRQKAADKELKALVEATGSSLMRLPGIGPQGAARLIVEVGDVTRFPTAAHFASWTGTAPIDASSGDQVRHRLSRGGNRQINRVLHVMAIVQLRNPREGRNYFDRKKNDGKTSMEALRCVKRRLSDIVYRTMLDDALRHERTGPVGHSGTSLSSSAADSNPVIDASDQSLPGPVPTETTPPLKTAS

SEQ ID NO: 13111 - protein, 328 aa, unidentified
  source 1..328: note = protein_05ae041
  REGION 5..159: note = RuvC_domain
  SITE 8: note = RuvC_P1
  SITE 62: note = RuvC_P2
  SITE 102: note = RuvC_P3
  SITE 104: note = RuvC_P4
  SITE 107: note = RuvC_P5
  REGION 204..289: note = Tnp_domain
  SITE 212: note = Tnp_P1
  SITE 241: note = Tnp_P2
  SITE 249: note = Tnp_P3
  SITE 250: note = Tnp_P4
  SITE 262: note = Tnp_P5
MKAFIGIDVGKEKLDVSWLRDVVKNKQKTKVLKNTIQGYQELVDWVLKNTGLEAQNIVITTEPTGIYSEPLMYFLYEQGFTLLHVNPGKAKQYANSLGLVHKTDKSDATMLARYGHDQQHSLSSWQPEPIEARELKAMVRRLEALEQDLQREKNRYEAAGFSGASARVTQSLKDMIAVLKAEIDKLKNEIDEHINRHPQLKKNRQLLESINGVGEVTSRIMVCLLACKRFKSAKQLTSYLGLIPKHNESGKRTGKTTLSKEGPGYIRAKLYMAAIVAGQHNTDIKAQKTRLLKQGKTKMQALGAAMRKLSQICFGVVKNQTEYQPQVS

SEQ ID NO: 13112 - protein, 311 aa, unidentified
  source 1..311: note = protein_96fb744
  REGION 6..126: note = RuvC_domain
  SITE 30: note = RuvC_P2
  SITE 65: note = RuvC_P3
  SITE 67: note = RuvC_P4
  SITE 70: note = RuvC_P5
  REGION 186..276: note = Tnp_domain
  SITE 194: note = Tnp_P1
  SITE 224: note = Tnp_P2
  SITE 232: note = Tnp_P3
  SITE 233: note = Tnp_P4
  SITE 245: note = Tnp_P5
MGRPFTVKKFTRPKLIEFLATCPATTIAMEACGGSHFMARKLEELGHFPKLISPQFVRPFVKSNKNDFVDAEAICEAASRPSMRFVQPRTESQQAMRALHRVRESLVQDKVKTTNQMHAFLLEFGISVPRGAAVISRLSTLLEDSSLPLYLSQLLLKLQQHYHYLVEQIKDLESQLKRKLDEDEVGQRLLSIPCVGTLTASTISTEIGDGKQYASSRDFAAATGLVPRQYSTGGRTTLLGISKRGNKKIRTLLVQCARVFIQKLEHQSGKLADWVRELLCRKSNFVVTCALANKLARIAWALTARQQTYEA

SEQ ID NO: 13113 - protein, 341 aa, unidentified
  source 1..341: note = protein_2f11435
  REGION 6..148: note = RuvC_domain
  SITE 9: note = RuvC_P1
  SITE 52: note = RuvC_P2
  SITE 87: note = RuvC_P3
  SITE 89: note = RuvC_P4
  SITE 92: note = RuvC_P5
  REGION 211..295: note = Tnp_domain
  SITE 219: note = Tnp_P1
  SITE 249: note = Tnp_P2
  SITE 257: note = Tnp_P3
  SITE 258: note = Tnp_P4
  SITE 270: note = Tnp_P5
MKAKTIGIDLAKEVFQVHGVDEHGKRLFNKQLKRSQMTIFFANLPPCLIGMEACASAHFWASTLISLGHTVKLMAPQFVKPYVKTNKHDAADAEAICEAVTRPNMRFVPIKTPEQQAVLALHRIRQGFIKQRTAQANQIRGLLSEFGIIVPQGIHHLRQCLPGVLEDADNRLPSLFREQLSLLQNHMEYLFDIVATFDKQIEQCHQQNELCQRIGKIPGIGPITASALVATIGNANNFENGRQLAAWLGLVPRQHSSGGKQVLLGISKRGDTYLRTLLIHGARAVLQSVKRKQDGLSSWACRLLDRRNNNIAAVALANKNARIVWALLAKNQEYCARPINA

SEQ ID NO: 13114 - protein, 338 aa, unidentified
  source 1..338: note = protein_17f81c0
  REGION 6..147: note = RuvC_domain
  SITE 9: note = RuvC_P1
  SITE 52: note = RuvC_P2
  SITE 87: note = RuvC_P3
  SITE 89: note = RuvC_P4
  SITE 92: note = RuvC_P5
  REGION 209..295: note = Tnp_domain
  SITE 217: note = Tnp_P1
  SITE 246: note = Tnp_P2
  SITE 254: note = Tnp_P3
  SITE 255: note = Tnp_P4
  SITE 267: note = Tnp_P5
MEFKRISIDISKHIFTLHGIDEQDRVVLRRELRRGQVEAFFTRLPPAEVALEVCAGAHHWGRTFGAMGHRVKLIPPQYVKPFVKRSKNDRNDAEAISEAASRPSMRIVPVKTVAEQAGTVIVKHREMLVGQRTQAINALRGHAAEFGVIAAKGTSNIDGLVAALKDNPAIPEAAQEMFEQMGRHVADLDLKIQAVNRQLLEQHKTNVVSQRLGVIPGIGPITAVTMALSVNPANFKSGRHFAAWLGLTPREHSTGGKHRLGRISKAGNERLRQLLVVGAMAVVRHAKAGSKSASAWLLQLLERRPRKVAAIALANKIARIIWAMMARGEVYRRQPAAA

SEQ ID NO: 13115 - protein, 349 aa, unidentified
  source 1..349: note = protein_28fd7d4
  REGION 5..151: note = RuvC_domain
  SITE 8: note = RuvC_P1
  SITE 53: note = RuvC_P2
  SITE 90: note = RuvC_P3
  SITE 92: note = RuvC_P4
  SITE 95: note = RuvC_P5
  REGION 213..299: note = Tnp_domain
  SITE 221: note = Tnp_P1
  SITE 251: note = Tnp_P2
  SITE 259: note = Tnp_P3
  SITE 260: note = Tnp_P4
  SITE 272: note = Tnp_P5
MKYYAGLDVSQQTTSICIVDEEGKTVAERKVASCPEAISEALEPFAVTRAGLETGPLSVWLWNGLKERGVPIVCMDARHANAALKMMPAKTDRNDAIGLAQIVRTGWCKSVHVKSTASHEARALLATRSQFVRTRCDLENQIRGVLRTFGILFGKRVGGFAKRAEEIIDGELDASPTIQAVVEALMRARANILEQIRHLEAKVRLIARQNKVVRRLMSVPGVGVITALGFAATIDDPTRFKRSSSAGAYLGLTPRIYASGETMRSGRVSKRGDDFLRRSLYEAANALLTRIPRFSALKSWGLRIARRGGYRKAKVAVARKLAVILHAMWISGEPFRWSSQEPGDLASLQ

SEQ ID NO: 13116 - protein, 379 aa, unidentified
  source 1..379: note = protein_6f5ad9a
  REGION 8..150: note = RuvC_domain
  SITE 11: note = RuvC_P1
  SITE 55: note = RuvC_P2
  SITE 95: note = RuvC_P3
  SITE 97: note = RuvC_P4
  SITE 100: note = RuvC_P5
  REGION 195..282: note = Tnp_domain
  SITE 203: note = Tnp_P1
  SITE 233: note = Tnp_P2
  SITE 241: note = Tnp_P3
  SITE 242: note = Tnp_P4
  SITE 255: note = Tnp_P5
MQSIKTWAGVDVSARMLAAHRLREGKQEGREFANDAAGHRDLLKWLGKRARVGVEATGVYHLQLALTLQAAGVELMVVNPRVAKDFARALSNRSKTDKVDAWTLLEYVQRMAFTAWQGPRPSVLELRELARRLSELVHAAVDEKNRLHARNVAAISSTVVGDVKAHVAQIERRIIQIEKAAITVIDDDDDLRKQFQILSGITGIGRRSAILLLGELAVLDPAMTVKQLVAHAGLDPRVYESGTSVEKPARISKVGNARLRAILYMNALSAVRHDRGARLFFAQLVARGKKPMQALVAVMRKLLHGIWIVLQRRVGFDSSVLFAASLAKAESFDSAAAANQPEPSQDHPQGRSEAEELREQLDPGSAEATRSRKRRSKAA

SEQ ID NO: 13117 - protein, 407 aa, unidentified
  source 1..407: note = protein_e71744d
  REGION 14..170: note = RuvC_domain
  SITE 17: note = RuvC_P1
  SITE 68: note = RuvC_P2
  SITE 108: note = RuvC_P3
  SITE 110: note = RuvC_P4
  SITE 113: note = RuvC_P5
  REGION 276..363: note = Tnp_domain
  SITE 284: note = Tnp_P1
  SITE 315: note = Tnp_P2
  SITE 323: note = Tnp_P3
  SITE 324: note = Tnp_P4
  SITE 336: note = Tnp_P5
MTRTEVVVAQQLWAGVDAGKSDHHCVVIDAEGSRLLSQRVANDEAALLALIKAVAALADGGELTWAIDLNGGGAALLICLLMAAEQRLLYIPGRTIYHASASYRGDGKTDAKDAAIIADQARMRRDLQPLRAGDDIAVELRILTSRRADLVADRTRAINRLRAQLLDYFPALERAFDYSNSKAALLLLSSYQTPDGLRRAGAARLAAWLRKRKARNVDAVVATALAAANAQHTIMPGQQLAATVVARLAKEVMALDIEIGDTDTMIEERFRRHRHAEILLSMPGFGVTLAAEFLAATGGDMSAFDSVDRLAGVSGLAPVPRDSGRITGNLKRPRRYDRRLLRSCYLSAQIAIRTDPASRTYYDRKRAEGKTHTQAVLALARRRLNVLWAMLRDHTPYQPTATTAAAA

SEQ ID NO: 13118 - protein, 346 aa, unidentified
  source 1..346: note = protein_53b2983
  REGION 5..152: note = RuvC_domain
  SITE 8: note = RuvC_P1
  SITE 55: note = RuvC_P2
  SITE 92: note = RuvC_P3
  SITE 94: note = RuvC_P4
  SITE 97: note = RuvC_P5
  REGION 212..296: note = Tnp_domain
  SITE 220: note = Tnp_P1
  SITE 250: note = Tnp_P2
  SITE 258: note = Tnp_P3
  SITE 259: note = Tnp_P4
  SITE 271: note = Tnp_P5
MENYAGIDVSLELSSVCVVDSQGKILKKAKVASEPDALVEFFETLGFAVNRIGLEAGPLSQWLHAGLQRAGFETVLLETRHVKAALSAMTVKTDRKDARGIAQLIRMGWFRAVHAKSIGAQEIRALLVARKQLLGRLIDVELSIRGILRGFGLKVGPVTRKNFEARIRELVAGQATLERIAIAMLSARSALKAEYGRLHKAVLATVRDDAVCRRLMTVPGVGPLVAITYKSAIDDPHRIVKSKAAGALFGLTPKKYQSGEKDVTGGITLAGDEIVVRCCMRPPTFCYRASRDSQNLSAGGWTSPSGEARSAQKSPASSQNSSAGGWTSPSGEARSAQKSPWHASSQ

SEQ ID NO: 13119 - protein, 402 aa, unidentified
  source 1..402: note = protein_27baf8f
  REGION 4..160: note = RuvC_domain
  SITE 7: note = RuvC_P1
  SITE 57: note = RuvC_P2
  SITE 97: note = RuvC_P3
  SITE 99: note = RuvC_P4
  SITE 102: note = RuvC_P5
  REGION 274..361: note = Tnp_domain
  SITE 282: note = Tnp_P1
  SITE 312: note = Tnp_P2
  SITE 320: note = Tnp_P3
  SITE 321: note = Tnp_P4
  SITE 334: note = Tnp_P5
MNAVGIDVSKGKSMIAVMRPGKETVIEPFEVSHTDSELIDLAKVIQSLDGETRVVMEATGNYHLPVAWMLHDAGIYVSVVNAMLIRNYGNNSIRKGKTDKKDAQKIANYAIDNWTELPQYFPEEDLRLMLKSCYRQYEHFSKIRTMMKNNLIALLDVTFPDANNLFSSPRRADGREKWLDFIETFWHCQCVCSLTTTAFSRKYQKWCKKHGYNFSEDKALDIYASACDHVCVMPKTDVAEFMVKQAVTQLQAVSRTLAALQQQMQSLAEKLPEYPVVMQMFGVGPILGPQLMAEIGDVRRFHSKKALVAFAGIDAPPYQSGTMDVRSRNISKRGSSSLRRTIFLVMSVILKQKPLDEPIYQYMDKKRAEGKPYKVYMMASANKFLRIYYATVKAYLDTLDTE

SEQ ID NO: 13120 - protein, 399 aa, unidentified
  source 1..399: note = protein_aa07dac
  REGION 12..166: note = RuvC_domain
  SITE 15: note = RuvC_P1
  SITE 63: note = RuvC_P2
  SITE 103: note = RuvC_P3
  SITE 105: note = RuvC_P4
  SITE 108: note = RuvC_P5
  REGION 273..357: note = Tnp_domain
  SITE 281: note = Tnp_P1
  SITE 310: note = Tnp_P2
  SITE 318: note = Tnp_P3
  SITE 319: note = Tnp_P4
  SITE 331: note = Tnp_P5
MIRNHETVDVFIGLDVGKGEHHAVALDRAGKKLLDRALPNDEARIREILAEFQGHGQALLVVDQPATIGALPVAVAQAAGMPVGYLPGLAMRRIADLHPGEAKTDARDAFIIADAARTMPHALRSVQLADTQLAELSMLCGFDDDLAKQITATSNRIRGLLTQIHPALERVLGPRLDHPAVLDLLRTWPTPEALRHAGRRRIGNRLGKLAPRMGERLADEIIEALGKQTVVVVGTNAATIVLPQLAGMLAAFHEARATVYAQVEALVEAHPLHHVLTSLPAVGVRTAARILTEVVGKDFASAAHLASYAGLTPVTWRSGTSIRADRASRKGNKVLKRALYLSAFAALKDPLSRAYYDRKRAEGKRHNQALIALARRRCDTLYAMLRDGTLYQARTPTAA

SEQ ID NO: 13121 - protein, 412 aa, unidentified
  source 1..412: note = protein_59e6d82
  REGION 5..165: note = RuvC_domain
  SITE 8: note = RuvC_P1
  SITE 62: note = RuvC_P2
  SITE 102: note = RuvC_P3
  SITE 104: note = RuvC_P4
  SITE 107: note = RuvC_P5
  REGION 273..359: note = Tnp_domain
  SITE 281: note = Tnp_P1
  SITE 312: note = Tnp_P2
  SITE 320: note = Tnp_P3
  SITE 321: note = Tnp_P4
MRLFAGDDWAGDHHDVEVMDGSGKKLAARRLPGGAAGMAQFHALVGRFVPEDDMDSAEVVIGIEADRGPRAAALAAAGYPVYPVNPLQASRYRERHGVSGAKSDAGDARMLAGLVRTGSHQLRAAAGDSPEAAGTKVPARTHKTVTWERARAVQRLRHQLRGYFPAAPEAFDDLDAAGTLELLGKAPDPARAAKLTRAQVSAALKRARRRNIPDKATAILAALRGEQLGQPPVLTDACAATARSLLAVITVLNEQVKALQGQVEDHFGRHPDAEVYLSRPGMGKILGARVLGEFGDDPDRYRDGKARKNYAATSPLTRASGKKKVVAARFIHNDRLVDALNAQASAALGASPGARAYYDELRARDIEHNDALRPVANRLAGILHGCLKTGTLYDETTAWGHRENLPQSSLAA

SEQ ID NO: 13122 - protein, 343 aa, unidentified
  source 1..343: note = protein_05ddd62
  REGION 5..151: note = RuvC_domain
  SITE 8: note = RuvC_P1
  SITE 53: note = RuvC_P2
  SITE 91: note = RuvC_P3
  SITE 93: note = RuvC_P4
  SITE 96: note = RuvC_P5
  REGION 211..296: note = Tnp_domain
  SITE 219: note = Tnp_P1
  SITE 249: note = Tnp_P2
  SITE 257: note = Tnp_P3
  SITE 258: note = Tnp_P4
  SITE 270: note = Tnp_P5
MDQYIGLDVSLKDTAVSIRENRKRIWRGKCPSDPKVLSQIIRKHAPHAKLVVFETGPLSTWFYHALTAEGIPAICIEARHAQKVLSETLNKTDANDADGLEQLAEAGFYKVVRVKTFDNMLTRTLVAARSQLVSISKQLSNQIRGLLKTFGLIVPKGEGRVFDANVRELLNGNSGLAVVILPLLEAWRDIRKRAANLDHQLLAASRQSRATKLLMTIPGVGAVTAVSYIAAIEDPENFPTSRSVGAWLGLTTRRYQSGEIDYDGHISRRGDGRLRGLLYEAATVLLTRTGARTECSLKTWGLKLRERLGFKRAAVAVAPKLAVIMHSMLKTGEAFNPLAGATA

SEQ ID NO: 13123 - protein, 339 aa, unidentified
  source 1..339: note = protein_defbb3c
  REGION 6..147: note = RuvC_domain
  SITE 9: note = RuvC_P1
  SITE 52: note = RuvC_P2
  SITE 87: note = RuvC_P3
  SITE 89: note = RuvC_P4
  SITE 92: note = RuvC_P5
  REGION 210..298: note = Tnp_domain
  SITE 218: note = Tnp_P1
  SITE 248: note = Tnp_P2
  SITE 256: note = Tnp_P3
  SITE 257: note = Tnp_P4
  SITE 269: note = Tnp_P5
MNYTTVGVDISKNVFQLHWVDAETGEIVSKQLKRAVFLEHFANRGACLVGMEACGGAQHWARRLIDMGHQVKLMPGKFVKAFATGNKNDSADARAIWMATQMPSKAVAVKTEAQQAILALHRIRQQKVKFRTMQMNSLRGLLTEYGEVVAKSRTALDKAIPSVLAKLVERLPAMLIESLRELWSDLEKLDKQIADIERRLQMWLKEDKACKAIAAIPGVGLLTATAAVATMGDPKSFKSGREFAAWLGLVPAQTGTGGKVKLLGISKRGDTYLRTLLVHGARSVLFLAKEPGPWIENTKQRRPANVIVVALANKMARMIWAVLAHDRPYRKDHVSIRQV

SEQ ID NO: 13124 - protein, 311 aa, unidentified
  source 1..311: note = protein_521bfab
  REGION 6..154: note = RuvC_domain
  SITE 9: note = RuvC_P1
  SITE 53: note = RuvC_P2
  SITE 92: note = RuvC_P3
  SITE 94: note = RuvC_P4
  SITE 97: note = RuvC_P5
  REGION 188..272: note = Tnp_domain
  SITE 196: note = Tnp_P1
  SITE 225: note = Tnp_P2
  SITE 233: note = Tnp_P3
  SITE 234: note = Tnp_P4
  SITE 245: note = Tnp_P5
MNHDTIGIDISKDKLDVHRLLDGRFAQFPNTKPGFKALQKWVGAILPACVVYEPTGAYHGAFEAALADHLPLVKVNPKHARRFAESRGAGAKTDRADARSLAQMGAAHGLAPDTPAAKDRPVLRELQSARTALVKDKVRLRNQLDKQGHALTRKLSSRRLRLVEAQIAELDQAIRAQIETCPVRKRALTLMESIKGIGAVAATTILIELPEIGSLRKKAVAAIAGVAPITRQSGRWRGQAFIQGGRKPLRDALYMPALVAIRFNPDLKAQYDKMKAAGKPPKVAIIAVMRKLLILANTLVREDREWSEIKA

SEQ ID NO: 13125 - protein, 304 aa, unidentified
  source 1..304: note = protein_0620c2e
  REGION 4..148: note = RuvC_domain
  SITE 7: note = RuvC_P1
  SITE 50: note = RuvC_P2
  SITE 90: note = RuvC_P3
  SITE 92: note = RuvC_P4
  SITE 95: note = RuvC_P5
  REGION 183..266: note = Tnp_domain
  SITE 190: note = Tnp_P1
  SITE 219: note = Tnp_P2
  SITE 227: note = Tnp_P3
  SITE 228: note = Tnp_P4
  SITE 239: note = Tnp_P5
MFGIGIDVSKGTLDVAVHEDQFRQFSNDKRGFSSLIRWLKKWPIKQIVLEASGGYERAALDALHAAGLPMVRINPARSRRFAQGTGQAAKTDRLDAKVLAEMAHLLKLTRYVPPAPWQQRLAEFSQCRRQLVQMRVSETQRLRRLADPDLIAMKQRHIAQLSEDLKKLDRAIAEQVEGQPSWKDIGSLKGVGPVLVSTLACELPELGSLGSKAIASLVGVAPMNRESGTWHGQRRISGGRAVVREALYMAALTAIRYEPRLRDFYAGLKAKGKVSKVALVAVMRKMLVILNARKRDAELALGRP

SEQ ID NO: 13126 - protein, 320 aa, unidentified
  source 1..320: note = protein_93bc1d7
  REGION 9..146: note = RuvC_domain
  SITE 12: note = RuvC_P1
  SITE 56: note = RuvC_P2
  SITE 96: note = RuvC_P3
  SITE 98: note = RuvC_P4
  SITE 101: note = RuvC_P5
  REGION 191..277: note = Tnp_domain
  SITE 199: note = Tnp_P1
  SITE 228: note = Tnp_P2
  SITE 236: note = Tnp_P3
  SITE 237: note = Tnp_P4
  SITE 248: note = Tnp_P5
MNETSTRTAGIDTSKKSLDVATYPTSDRLRVANARDGHQELVAWLSARKIKRIGIEASGGYERAVVEYLREQGFEVALLQPRQVHAFAIYKLRRAKNDRIDAALIAECAANLGDLHEPPDTRLAAFAEHLLFIEQLEYDIAHLKTRREHFTTKRILNQLKRDVQRLQRRREAELLLLQVVVCKHDDLARRLELIASVDGIGIRTALTLVILLPELGKVSREQISALVGVAPYDDDSGERTGERHIAGGRSRVRRALFNAALPASQRWNTALVALYGRLTNNGKAHRKAIIACVRKLLIFANAVVERGTPWSEAPPANHAA

SEQ ID NO: 13127 - protein, 341 aa, unidentified
  source 1..341: note = protein_5e9fcf3
  REGION 7..149: note = RuvC_domain
  SITE 10: note = RuvC_P1
  SITE 53: note = RuvC_P2
  SITE 88: note = RuvC_P3
  SITE 90: note = RuvC_P4
  SITE 93: note = RuvC_P5
  REGION 212..299: note = Tnp_domain
  SITE 220: note = Tnp_P1
  SITE 250: note = Tnp_P2
  SITE 258: note = Tnp_P3
  SITE 259: note = Tnp_P4
  SITE 271: note = Tnp_P5
MSTIHILGIDLGKHCFHAVAHNYAGKEVLRKKYNRSQLLKFLSNLETTTIAFEACGGAHWLARKCADLGHQVQLIPPQYVKPYVKGNKNDFIDAAAIAEAASRPSMRFVAVKSEEAQVIAVIHRIRDGFIKERTACMSRIGAILLEFGLSLPTGHAKMKMLFQWIADQKYQTLPQSLMYELSLIHTHYLYLNEQIKIQDTKLKQLAEHHELAKLLKTVPGIGDLTATLCVADVSAASNFSNGRNMAAWLGLVPRQYSTGGKTKLLGVSKRGNKHLRALFIHGARSVLSRIETTGKVFGQWLVDLRASKPFNVVVVALANKLARIAWAVLYHRQAFKTASQS

SEQ ID NO: 13128 - protein, 327 aa, unidentified
  source 1..327: note = protein_38d8539
  REGION 4..154: note = RuvC_domain
  SITE 7: note = RuvC_P1
  SITE 59: note = RuvC_P2
  SITE 99: note = RuvC_P3
  SITE 101: note = RuvC_P4
  SITE 104: note = RuvC_P5
  REGION 199..285: note = Tnp_domain
  SITE 207: note = Tnp_P1
  SITE 236: note = Tnp_P2
  SITE 244: note = Tnp_P3
  SITE 245: note = Tnp_P4
  SITE 258: note = Tnp_P5
MFFLGIDVSKAKLNCALIGAEGDKRKTKVVPNTVAGIQALLGWCAKQGAQPEQLHVVLEPSGPYHEQAGTALHDAGARVSMINPAQARDFAGALAVRTKTDEIDSYVLARYGQALRPPLWQPAPLHARQLRALLARHEALAKDLQRELNRQEKAQFGQSPEPVTGSIDQGVAFLTEQIKRLERAINDHIDRHPDLKEDRDLLTSIPAVGPQTGNALLSIMHNRRIESPQSLAAYLGLAPVQRQSGTSLNGRSRLSKTGPARVRATLYMAAVVAVRHNPHIQALYARLLAAGNSKMAALGAAMRKLVHLCFGVLKNRTPYRSDYALAT

SEQ ID NO: 13129 - protein, 399 aa, unidentified
  source 1..399: note = protein_2e581ea
  REGION 10..164: note = RuvC_domain
  SITE 13: note = RuvC_P1
  SITE 61: note = RuvC_P2
  SITE 101: note = RuvC_P3
  SITE 103: note = RuvC_P4
  SITE 106: note = RuvC_P5
  REGION 271..356: note = Tnp_domain
  SITE 279: note = Tnp_P1
  SITE 308: note = Tnp_P2
  SITE 316: note = Tnp_P3
  SITE 317: note = Tnp_P4
  SITE 329: note = Tnp_P5
MTTAKPRIYLGLDVDKTDHWACALTEDGQVLWNKTLPNNEAKIIDIYTKLATQGQVLVIVNQPATIGALATAVAQHMGIDVAYLPGLTMRRIADLYPGEAKTDEKDAFIIADTARTLPHTLRSLTTTDKDEASLAMLTGFDLDLSRQVTQVTNRIRGLYTQIHPELEKVIGSRLDHDAILQVLATWPTAQALKKAGKARVDAKLKKHGARRHATWTTELFHALSRQTVTVTGTEAAELVIPHLARQLISLHAQRAGVATQVETIVATHPLYPVLRSMPGIGLRTAAVIIAELSGKTFTSAAALASSAGLAPTTRQSGSSIRSERVSHSGNKRLKRALFLSAFAIIRTDHTSRAYYDRKRAQGKRHNQAIIALAHRRLNVLYAMLRDGTLYDSPETLLAA

SEQ ID NO: 13130 - protein, 417 aa, unidentified
  source 1..417: note = protein_7c12115
  REGION 18..170: note = RuvC_domain
  SITE 21: note = RuvC_P1
  SITE 69: note = RuvC_P2
  SITE 107: note = RuvC_P3
  SITE 109: note = RuvC_P4
  SITE 112: note = RuvC_P5
  REGION 277..363: note = Tnp_domain
  SITE 285: note = Tnp_P1
  SITE 316: note = Tnp_P2
  SITE 324: note = Tnp_P3
  SITE 325: note = Tnp_P4
  SITE 336: note = Tnp_P5
MEYPPDTLPAVPPGGVTCGIDWANDDHAVCVVDLAGKIVQRFIAEHTGKGLAGLVRQLRRAGVGEVAIERPDGTVVDTLLEAGLTVVVISPNQLKNLRGRYGSAGNKDDRFDSFVLADTLRTDRARLRPLLPDSPATVTLRQACRARKDLVGHRVAVCNQLRAHLKLAFPGAVGLFRDLDSPISLAFLARFDCQDRAGWLTPRRLAAWLKSQGYPGRKDPAALHARLAAAPRGAVGDDGAAKAHITRALLAVLASLVQQIKALDAQIAEQLALHADAPIFTSLPRAGTIRAARLLAEIGDCRARFPTPEALICLAGVAPSTRKSGKTTYVDFRWAADKQLRDAVCDFAGDSRHASPWAARLYDDAIARGKDHPHATRILARAWLYVIWHCWQNRTAYDPARHKALQRILTGQKPAAA

SEQ ID NO: 13131 - protein, 348 aa, unidentified
  source 1..348: note = protein_63a9469
  REGION 9..151: note = RuvC_domain
  SITE 12: note = RuvC_P1
  SITE 55: note = RuvC_P2
  SITE 90: note = RuvC_P3
  SITE 92: note = RuvC_P4
  SITE 95: note = RuvC_P5
  REGION 214..303: note = Tnp_domain
  SITE 222: note = Tnp_P1
  SITE 252: note = Tnp_P2
  SITE 260: note = Tnp_P3
  SITE 261: note = Tnp_P4
  SITE 273: note = Tnp_P5
MNATRKTVVGVDTAKNVFQVYTVERETGEVINKQLKRAQFLQWFANRAPCLIGMEACGGSQHWARKLQELGHEVKLMSGKMVKAFVCGNKNDAADARGIYMAAQQPEVKAVAVKSEGQQAVLAMHRIRQQLVKMRTAQRNELRGLLGEYGEVFGTGRKAFEVGLKAALERLAERLPTPLIDTLRDQWNELARLDERIARIEKSLLAWLRQDRAAKAIAAIPGVGLLTATAAVATMGDAKAFRSGREFAAFVGLIPSQTGSGGKVRLLGISKRGDTYLRTLLIHGARAVLQHAKTPGPWLKQISARRPPNVVIVALANKIARTIWAVLAHERAYDRDHVSLQPLAAAAT

SEQ ID NO: 13132 - protein, 341 aa, unidentified
  source 1..341: note = protein_8a20bde
  REGION 7..149: note = RuvC_domain
  SITE 10: note = RuvC_P1
  SITE 53: note = RuvC_P2
  SITE 88: note = RuvC_P3
  SITE 90: note = RuvC_P4
  SITE 93: note = RuvC_P5
  REGION 211..294: note = Tnp_domain
  SITE 219: note = Tnp_P1
  SITE 249: note = Tnp_P2
  SITE 257: note = Tnp_P3
  SITE 258: note = Tnp_P4
  SITE 270: note = Tnp_P5
MAEVSTIGLDLAKHVFQAHGASAAGAVLFRKKLRREQVLSFFAGQPRCRVALEACASAHHWARAIGELGHEVKLIPPAYVKPFVKRQKNDAADAEAICEAAQRPTMRFVAVKSEAKQAAAVIFRARDLLVGQRTQIINALRGHLGEYGLIAPQGPSNIERLIVQVEDPTSGIPAAARACLVRLVAVLRHLQDEIAELDKAVAARAKADAAARRLMTVPGIGPLIATAIEALAPPAETFRSGRDFAAWVGLTPIQRSTGGKERLGRTSRMGERTLQRLLIFAASAVVRWAKRKGVPAGSWLGRMLARKPPMLVIVALANKNARVAWALLAKGGTYRAPAVAA

SEQ ID NO: 13133 - protein, 400 aa, unidentified
  source 1..400: note = protein_4ddcc93
  REGION 31..182: note = RuvC_domain
  SITE 34: note = RuvC_P1
  SITE 85: note = RuvC_P2
  SITE 122: note = RuvC_P3
  SITE 124: note = RuvC_P4
  SITE 127: note = RuvC_P5
  REGION 247..336: note = Tnp_domain
  SITE 255: note = Tnp_P1
  SITE 285: note = Tnp_P2
  SITE 293: note = Tnp_P3
  SITE 294: note = Tnp_P4
  SITE 306: note = Tnp_P5
MKQSNATQRAVVDRTVTERINAASYVHAAYIGLDVHKASISVAVAEAGRQTPEFRGEIPNEPKAIDKLIRQMSERFDGQPLLFSYEAGPCGYGVYHQVQASGHDCEVVAPTLIPRRAGDRVKTDRRDAQMLARLSRSGELTPVWVPTPEQEAIRDLTRAREDMKAIELKARQRLNAFLLRHGKAYPGKSKWIPAHFRWLETVRFDTPVQQIVLQEYIEAVREAQRRVAGLERQMEAALPDWSLAPVVEAIQAMRGVSLITAMTVMAELGDISRFDSPCQLMAYLGLVPSEHSSGGSRRQGGITKTGNGHVRRVLVEAAWSYRFPARKTRIIEQRAERTSPTVQAIAWAAQKRLCGRYRRLAATGKAKQQVVTAVARELTGFLWAIACEAMGKPHGSRATA

SEQ ID NO: 13134 - protein, 406 aa, unidentified
  source 1..406: note = protein_8db69fe
  REGION 4..163: note = RuvC_domain
  SITE 7: note = RuvC_P1
  SITE 60: note = RuvC_P2
  SITE 100: note = RuvC_P3
  SITE 102: note = RuvC_P4
  SITE 105: note = RuvC_P5
  REGION 271..357: note = Tnp_domain
  SITE 279: note = Tnp_P1
  SITE 310: note = Tnp_P2
  SITE 318: note = Tnp_P3
  SITE 319: note = Tnp_P4
MLFIGDDWAEDHHDVEVQDEHGRVLRRGRLPEGIAGISGFGQLVGRFVTDDMEPSDVLVCIETDRGPWVKALIAAGYTVFGVDPKQAARHREILSSSGAKSDKSDAHALADMVRTRRHQLRQVAADSDIAAGVKVVARTHQTMIWERTRHMLRLRVALREYFPAALEAYAGFELTSRAVLALLAKAPTPAAAAKLTPRQIAVALKGCRDIDAKAAAIQQVLRSEHLGQPEPVTAAYAATVRSLVAVLTTLNTEIASLEKEVKAHFGQHPDAEILLSQPGLGVVLAARVLAEFGDAPDRYASAKARKNYAGTSPITRQSGKMRVVAARFVHNDRLVDALHMQASCALLHDEQARAYYDQIRGRDVSHNAALRQLGNRLVGILHGCLKTHTTYDQATAWSHRQHTAAA

SEQ ID NO: 13135 - protein, 341 aa, unidentified
  source 1..341: note = protein_a2c58a2
  REGION 5..151: note = RuvC_domain
  SITE 8: note = RuvC_P1
  SITE 54: note = RuvC_P2
  SITE 91: note = RuvC_P3
  SITE 93: note = RuvC_P4
  SITE 96: note = RuvC_P5
  REGION 211..297: note = Tnp_domain
  SITE 219: note = Tnp_P1
  SITE 249: note = Tnp_P2
  SITE 257: note = Tnp_P3
  SITE 258: note = Tnp_P4
  SITE 270: note = Tnp_P5
MEEHIGLDVSMKETAVSIRRGGQRVWRGKCVTDPAAIVTLIRKRAPGMRRVVFETGPLSVWLYDAISARGLPAICIDARHAKAALDMAQNKTDANDADGLAHLAEVGFFRAVRVKGFDSMLTRTLVGARNQLTRITTQLSNPIRGVMKTFGLLVPAGKGSKFERNVRNLLVGRTELAAIVLPLLEAWRSIRSQVADLGTQLVATARQNPDSRLLMSIPGIGAVTAKSFVAAIEDPANFRNSRSVGAWVGLTTRRYQSGEVDYDGHISRRGDRHLRWLLYEAAAIILTRVRAESSLRTWGLGLRERLGFKRAAVAVARKQAVIMHAMLKTGAIFDPQAGAAT

SEQ ID NO: 13136 - protein, 464 aa, unidentified
  source 1..464: note = protein_ce6c8a3
  REGION 5..161: note = RuvC_domain
  SITE 8: note = RuvC_P1
  SITE 59: note = RuvC_P2
  SITE 99: note = RuvC_P3
  SITE 101: note = RuvC_P4
  SITE 104: note = RuvC_P5
  REGION 272..358: note = Tnp_domain
  SITE 280: note = Tnp_P1
  SITE 310: note = Tnp_P2
  SITE 318: note = Tnp_P3
  SITE 319: note = Tnp_P4
  SITE 331: note = Tnp_P5
MTLTLGIDVAVRAAHQATLARDGVTLWRGRKFSTRPRDLERLWSDLELADPNDVTVVVEPTRNAWIVLAEWFRRRGARVVMVPTTQSADLRKYYSKHTKNDRIDSELLARLPLLHPEGLREYSGQGPADPLRRLVKQRSTMVKRRVAVYARLDALVELLGPAWYAVLGSNYGIAALEFLARYADPNAVIRLGQGRLSRFLIARSRGAWRDDHAASLIVAAKETLALWGPDGMNFAELADDIAHEAEQALFLTRQVKQIDERVANLYADADPDGIVASAPGVGPVISAVIAGRIGDPHRFTSLAAIRAYTGLVPKVSQSGLSKVESSITKAGDPLLREMLCTAADQARKVDPQIAAKYQRLMAGDRHHDSAICHLATLLVTRIASCMRNGQPYALRDVGGTPITEAQGRMIVTQRYQIEPRRRDNIRHQRMRDRRKQAAGQESQESPSAPTSQPAKPKPTSRHVA

SEQ ID NO: 13137 - protein, 304 aa, unidentified
  source 1..304: note = protein_6b2cd95
  REGION 4..145: note = RuvC_domain
  SITE 7: note = RuvC_P1
  SITE 50: note = RuvC_P2
  SITE 90: note = RuvC_P3
  SITE 92: note = RuvC_P4
  SITE 95: note = RuvC_P5
  REGION 183..266: note = Tnp_domain
  SITE 190: note = Tnp_P1
  SITE 219: note = Tnp_P2
  SITE 227: note = Tnp_P3
  SITE 228: note = Tnp_P4
  SITE 239: note = Tnp_P5
MFGIGIDVSKDTLDVAVHEQQFRQFSNDKRGVQRLIQWLKQWPTKQVVLEASGGYEVAALDALHAAGLPMVRINPARARRFAQGTGRAAKTDRLDAEVLAQMAHLLSLTRYTPPAPWQRRLAEFAQCRRQLVQMRVSEIQRLRQLGEPTLIAMKQRHIDELSKDIKELDSAINEQLSAQPAWKNIGTLKGVGPVLATTLACELPELGTLNGKAIAALVGIAPMNRESGTWKGQRRISGGRAVVREALYMAALTAIRYEPRLRDFYATLKSKGKASKVALVAVMRKMLVILNARKRDAEALMASD

SEQ ID NO: 13138 - protein, 341 aa, unidentified
  source 1..341: note = protein_74a55bb
  REGION 7..148: note = RuvC_domain
  SITE 10: note = RuvC_P1
  SITE 53: note = RuvC_P2
  SITE 88: note = RuvC_P3
  SITE 90: note = RuvC_P4
  SITE 93: note = RuvC_P5
  REGION 212..297: note = Tnp_domain
  SITE 220: note = Tnp_P1
  SITE 249: note = Tnp_P2
  SITE 257: note = Tnp_P3
  SITE 258: note = Tnp_P4
  SITE 270: note = Tnp_P5
MTDLTRIGVDTSKSVFTLHGVDAAGCCVLRRNLRRREFEAFFQKLPPVEVVLEACGGSHHWGRWLMKLGHRVRLIPPQYIKPFVKRGKNDRNDAEAICVAAAQPSIGDVPVKAVETQAGAMLLSTRELLVRQRTQLVNALRGHATELGLVAPQGDKGLTQLQGEIATADDEVVPPAAKEALALLGKQVDRGQARLAEIDAKLKKQLAADPLSQRLAHIPGVGPIIALNLALRVNPAQFKSGRHFAAWLGLVPRERSTGGKQRLGGISRAGDERLRQLLVVGATAVIRHATSGRAGASPWLLELLKRRPRKLVAVAWANKMARIVWAMMTSGEAYRPAKAAA

SEQ ID NO: 13139 - protein, 346 aa, unidentified
  source 1..346: note = protein_9ee2560
  REGION 13..155: note = RuvC_domain
  SITE 16: note = RuvC_P1
  SITE 59: note = RuvC_P2
  SITE 94: note = RuvC_P3
  SITE 96: note = RuvC_P4
  SITE 99: note = RuvC_P5
  REGION 218..305: note = Tnp_domain
  SITE 226: note = Tnp_P1
  SITE 256: note = Tnp_P2
  SITE 264: note = Tnp_P3
  SITE 265: note = Tnp_P4
  SITE 277: note = Tnp_P5
MDNHVAKTEIVVLGIDLAKQSFQLHGVDIKGKEVIKKTLNRKKLSQFIAQLPPCTIGIEACGGANYWLRIFESFGHTVHMIAPQFVKPYVKSNKSDAADAEAICEAVQRPSMRFVPAKSIEQQDMQSLHRIRSQAVARRTAQANQIRGLLMEYGIILPRGISYVRKSIPLILEDSGNELTALFRELLAGLYHELVHLDERIETLKIKLETLCTQNEDCQRLLSIPGVGLLSATAMVAAIGDIKAFKSGRELAAWLGLVPRQHSTGGKPTLLGISKRGDTYLRTLLIHGGRTVVRVADKHQDQRNKWITELNTRRGKNISAVAVANKNARIAWALLNNKSMYKARAA

SEQ ID NO: 13140 - protein, 320 aa, unidentified
  source 1..320: note = protein_22a7618
  REGION 7..146: note = RuvC_domain
  SITE 10: note = RuvC_P1
  SITE 52: note = RuvC_P2
  SITE 92: note = RuvC_P3
  SITE 94: note = RuvC_P4
  SITE 97: note = RuvC_P5
  REGION 187..271: note = Tnp_domain
  SITE 195: note = Tnp_P1
  SITE 224: note = Tnp_P2
  SITE 232: note = Tnp_P3
  SITE 233: note = Tnp_P4
  SITE 245: note = Tnp_P5
MSDRLAVGIDADSKTLVVACHGTKGSIRIVNSASAIDKWLSGLPARSRIGVEATNRYHECVVQAAQKAGHEVFVLNPRDIKHYAKGVACRGKTDSGDAQVIARYIAKEADNLHEHVARSPAQERLHVLLQQRDSVVRNKAMLNLSLGPGAAESAIFGRIFSSLKEAIALLDQQIQQLCRSGEQGDLYRRIMTIPGIGPTVAAVVTHHITRWPLTSSDAWIACTGLDPRPNESGARIGRRRLSKRGNASLRQILYMAAMGLTRSKGGKPLYTAIRERGHSSTASFNILARKLARIAWGVFKSGREFDPTMLKVGQACFQQA

SEQ ID NO: 13141 - protein, 332 aa, unidentified
  source 1..332: note = protein_eb75fa1
  REGION 5..153: note = RuvC_domain
  SITE 8: note = RuvC_P1
  SITE 55: note = RuvC_P2
  SITE 92: note = RuvC_P3
  SITE 94: note = RuvC_P4
  SITE 97: note = RuvC_P5
  REGION 212..300: note = Tnp_domain
  SITE 220: note = Tnp_P1
  SITE 250: note = Tnp_P2
  SITE 258: note = Tnp_P3
  SITE 259: note = Tnp_P4
  SITE 271: note = Tnp_P5
MDYYAGIDVSLEASSVCLVDSAGKIIRETKVASDPDALIDHFASLGFALKRIGLEAGPLSQCLHEGLTNAGFDVVLLETRHVKAALSAMIIKTDRKDARGIAQLLRMGWYRAVHSKSPGCQDVRALLTGRKLLQAKLRDVELSIRGILRGYGLKVGEVSRGRFEARILELVEGHPVLKTVIGAMLQARHALWTEFTKMHREMLKIVRQDRVCRRLMTTPGVGALVAITYRSAVDDPGRFAKSQTVGAYFGLTPKKYQSGETDLDGGISRVGDTMVRTALYEAAHIMLTRATRFSALKRWAVDVAKRRGMKRAKVALARKLATILHRMWMDES

SEQ ID NO: 13142 - protein, 344 aa, unidentified
  source 1..344: note = protein_3fa6cbd
  REGION 4..157: note = RuvC_domain
  SITE 7: note = RuvC_P1
  SITE 55: note = RuvC_P2
  SITE 96: note = RuvC_P3
  SITE 98: note = RuvC_P4
  SITE 101: note = RuvC_P5
  REGION 219..304: note = Tnp_domain
  SITE 227: note = Tnp_P1
  SITE 257: note = Tnp_P2
  SITE 265: note = Tnp_P3
  SITE 266: note = Tnp_P4
  SITE 277: note = Tnp_P5
MITIGIDPHKSSLTAVAVDPVGRELSSIRLSVTGTMGQQLLAWAAPWPTRTWAVEGAHGLGHGVSQLLAAGGEHVDDVPAKLAARARLLGGGSARKTDHTDAASVAAVAQRYERLLAVAAEGDDVLLRLLSDRRDDLVGERTRHLNRLHVLLRDLHPGGAKRDLSTAQAGKLLSGIRPVTAADAQRKALSRDILADIRRLDAKIKANTAELTRALAEHGSTLTDIHGVGPVLAAKIVAHTGDVRRFPSRHHFASYCGTAPIEASSGDLRRHRLSRGGNRQLNTAVHVVALCQARDPGPGQSHYRRKLAERKTPAEARRSLKRQLSNIIYKRLLTDAQRRLPPAT

SEQ ID NO: 13143 - protein, 340 aa, unidentified
  source 1..340: note = protein_8477b93
  REGION 6..148: note = RuvC_domain
  SITE 9: note = RuvC_P1
  SITE 52: note = RuvC_P2
  SITE 87: note = RuvC_P3
  SITE 89: note = RuvC_P4
  SITE 92: note = RuvC_P5
  REGION 212..298: note = Tnp_domain
  SITE 220: note = Tnp_P1
  SITE 250: note = Tnp_P2
  SITE 258: note = Tnp_P3
  SITE 259: note = Tnp_P4
  SITE 271: note = Tnp_P5
MKITTAGLDIAKNKFHFYGVNQVGKKVKKRVLTRSEVLPFFSTLEPTLVVIESCGSANHWGRKLIELGHEVKLIAPQYVVPYRRKNKNDFNDAEAIAEAAQRSNMTFVPIKSIEQQDIQMLLRIRDRHVQNRVQLGNQIRGLLAEYGLIIPSLGKAALRKALPEFLEDAENELTASSRVLFSELYEELLQLDEVIKAYDKKVEGVSKLNETCSRAQTVVGIGPITAAALYGAIGDGHNFANGRHFSAWCGLVPKQNSTGGKSVLLGITKRGNPYLRTLLNHGARTVLKNCEGKNDRLSLWAQKLKKEKHYNQACIAVANKLARIVWAVISKDEDYQANYI

SEQ ID NO: 13144 - protein, 400 aa, unidentified
  source 1..400: note = protein_2da15f6
  REGION 10..164: note = RuvC_domain
  SITE 13: note = RuvC_P1
  SITE 62: note = RuvC_P2
  SITE 102: note = RuvC_P3
  SITE 104: note = RuvC_P4
  SITE 107: note = RuvC_P5
  REGION 270..356: note = Tnp_domain
  SITE 278: note = Tnp_P1
  SITE 308: note = Tnp_P2
  SITE 316: note = Tnp_P3
  SITE 317: note = Tnp_P4
  SITE 329: note = Tnp_P5
MSERQAQVWAGIDAGKGHHWATVVDETGATLWSKKVDNDESAILTALGEILGLADEVHWAVDISGTSSALLLALLAAHGQQAVYVPGRTVNRMSGAYRGEAKTDARDAYVIAETARQRRDFATIDVPAQLAADLALLTAHRSDLIADRVRMINRLRDVLTGIFPALERAFDYSAHKGALVLLTGYQTPTALRRRGRARLTAWLASRSVRGADAVAATALEAAQAQQTALPGEDVAAQIVAGLAVQILALDDRLKRIDKQVATTFRSHPQAGIIESLPGMGPILGAEFVVAAGDLAAYNDAGHLASAAGLVPVPRDSGRRTGNLHRPKRYSRRLRRVFYMSAQTSIIREGPNRDFYLKKRNEGLKHIQAVIALARRRASVLWALLRDNRVFTPELPVTQAA

SEQ ID NO: 13145 - protein, 376 aa, unidentified
  source 1..376: note = protein_23e3f87
  REGION 1..132: note = RuvC_domain
  SITE 31: note = RuvC_P2
  SITE 69: note = RuvC_P3
  SITE 71: note = RuvC_P4
  SITE 74: note = RuvC_P5
  REGION 239..322: note = Tnp_domain
  SITE 247: note = Tnp_P1
  SITE 275: note = Tnp_P2
  SITE 283: note = Tnp_P3
  SITE 284: note = Tnp_P4
  SITE 295: note = Tnp_P5
MGRFAVTHTAAGLGTLVRRLLAAGVAEVGIERGDGSVVEALLQAELTVLVISPNQVKNLRSRYGSAGNKDDRFDAYLLADVVRTDRRRLTPLTRSAPATVTLRSSVPARRDLVEHRVAAANQLRAHLQVVFPAAEGLFAALDSAVSLSFLERFPTQAKADWLSPKRLADWVSKVSYSGRVAPEVLHHRLLAAPRGTTGADAQAHAATTLAFVAVLRTLGTQIDQLEDNIAGQLDIHPDRHIMTSLPRSGMLRAARLLAEIGDARGRFPTPDSLAGVAPSTRQSGKVKAVTFRWPADHQLRDALCDFAGDSRHANPWAADLYNRARARGHDHPHAVRILGRAWANIIWRCWQDHTSYQPDQHRALQRVLNRATEQAA

SEQ ID NO: 13146 - protein, 341 aa, unidentified
  source 1..341: note = protein_c32a27b
  REGION 7..149: note = RuvC_domain
  SITE 10: note = RuvC_P1
  SITE 53: note = RuvC_P2
  SITE 88: note = RuvC_P3
  SITE 90: note = RuvC_P4
  SITE 93: note = RuvC_P5
  REGION 209..294: note = Tnp_domain
  SITE 217: note = Tnp_P1
  SITE 247: note = Tnp_P2
  SITE 255: note = Tnp_P3
  SITE 256: note = Tnp_P4
  SITE 268: note = Tnp_P5
MNKVAIAAIDLGKHSFHLHAQDDRGHELYRKKFTRVTLAQHLANLEPCTVVMEACGGAHFMAQEVAKLGHTPKLIAPHLVRPYVKSNKNDFADAEAICEAATRPTMRFVPPKNQAQQALAMLNSTRDSFIKDRTATANRIHAALLEVGISLAPGFKSIKELPARLEASSLSERFKKILMKLHEHFNHLDEQVKTLDKDVESQAAEDDLAARLMTMPCVGPITSSALAAELGDGKQFKCGRNYAASIGLVPKQHSTGDKTVLLGISKRGDRNQRRLLIQCARVYLMQLERQRGWLADWVRQLLAHHHSNHVVCALANKMARIAWAIAAHHTEFDAGPAAMNT

SEQ ID NO: 13147 - protein, 368 aa, unidentified
  source 1..368: note = protein_5918153
  REGION 18..180: note = RuvC_domain
  SITE 21: note = RuvC_P1
  SITE 70: note = RuvC_P2
  SITE 106: note = RuvC_P3
  SITE 108: note = RuvC_P4
  SITE 111: note = RuvC_P5
  REGION 236..322: note = Tnp_domain
  SITE 244: note = Tnp_P1
  SITE 275: note = Tnp_P2
  SITE 283: note = Tnp_P3
  SITE 284: note = Tnp_P4
  SITE 295: note = Tnp_P5
MTRMPDKADLDQDREVFAGVDTHKELHVAAVIDTDDNVLGTRSFPTTRNGYRTMLTWIGEYGNLIRIGIEGTGSYGAGLTRHLAKAGVTVLEVDRPDRSDRRRKGKNDDLDAINAARAAKTNRRTTTPKSKDGAVESLRVLRVTRAHSVRERRSALQLLRMTIISAPDELREQVRDLTRMQLIRLLAAWRPDVSNATDPVTAYRVSLKSLARRYLELTDEIADLDELINPIVKALAPQLLERVGIGIEVAGQMLVTAGDNSDRMKSEAAFAMLCGVAPLPASSGMTQRHRLNRGGDRQANRALHLAVIGRIRLDPKTQAYVEKKTSEGHSKLETIRCLKRYLAREVYYLLNPGPQTITPNTRHHRKAA

SEQ ID NO: 13148 - protein, 260 aa, unidentified
  source 1..260: note = protein_6dd0c78
  REGION 2..81: note = RuvC_domain
  SITE 21: note = RuvC_P3
  SITE 23: note = RuvC_P4
  SITE 26: note = RuvC_P5
  REGION 142..220: note = Tnp_domain
  SITE 169: note = Tnp_P2
  SITE 177: note = Tnp_P3
  SITE 178: note = Tnp_P4
  SITE 190: note = Tnp_P5
MGHQVRLIPAEFAKAFNIRNKNDAADARAIWLAVQQPGRPVAIKSEAQQAVLALHRMRQQLVKFRTMQINSLRGLLTEYGEVMGKNRSALDKAIPAVLARVAERLPAVLIDTLREQWNGLTKLDEQIAEIERRLRQWMKEDQAVNAITAILGVGVLTATAAVKFAAWIGLVQKQTGSGGKVNLLGISKRGDTYLRMLLIHGARSVLHHAKEPGPWVEQITKRRPVNVVIVALANKMARMIWAILAHDRQYQKGYVSVKPA

SEQ ID NO: 13149 - protein, 347 aa, unidentified
  source 1..347: note = protein_bd5dcc9
  REGION 7..147: note = RuvC_domain
  SITE 10: note = RuvC_P1
  SITE 53: note = RuvC_P2
  SITE 88: note = RuvC_P3
  SITE 90: note = RuvC_P4
  SITE 93: note = RuvC_P5
  REGION 210..299: note = Tnp_domain
  SITE 218: note = Tnp_P1
  SITE 248: note = Tnp_P2
  SITE 256: note = Tnp_P3
  SITE 257: note = Tnp_P4
  SITE 269: note = Tnp_P5
MEQIIRIGMDTSKHIFQLHGVNAAEAPVLRKKLPRKAMVAFFEKLEPTVIAIEACGASHHWARLLQSFGHTVKLIPPQLAKPYVKRGKNDAADAEALCEAMSRPTMRFVPVKSAERQAALMLVGVRDRLIRTRTQLANAIRGYAAEFGLTAARGMAHLVPLLERLQADESLPGLARELFAIQAKEYARLQEGIAAVEAKLMTWHRADERSRRLAKIPGVGPIGAMLLTMKTPEPALFRSGRQFAAWIGLTPKNHSTAGKVRLGVITRAGDEALRSTLVAGATSIIRQLRNGHGRHASPWLIELVKRKPPKLAAVALANKIARIAWKMMVSGEVYRVKAMPPTLARVA

SEQ ID NO: 13150 - protein, 307 aa, unidentified
  source 1..307: note = protein_ab69cfd
  REGION 5..152: note = RuvC_domain
  SITE 8: note = RuvC_P1
  SITE 52: note = RuvC_P2
  SITE 92: note = RuvC_P3
  SITE 94: note = RuvC_P4
  SITE 97: note = RuvC_P5
  REGION 181..266: note = Tnp_domain
  SITE 189: note = Tnp_P1
  SITE 218: note = Tnp_P2
  SITE 226: note = Tnp_P3
  SITE 227: note = Tnp_P4
  SITE 238: note = Tnp_P5
MRRFVGIDVSKAELVIHVLPDQVAWTQSNTPQGRHELVQRLSTLACERIVLEASGGYETAVLRALRQADLPAVRMSAQRPRALANALGLHAKTDALDARLLAIAAEHIPTTPTTVLPEHLQQLREWLDLRTTLVGQRAAHRRRLDHITSSHVRHQCEQVIALLNEQIRALDRQVTQQTKTCSTLPKVPGVGAILRATLAARLPELGTLPPRKLAALVGLAPFNRDSGGWKGQRRITGGRADVRRVLYMATWASIRAGSPLANTYARLKAAGKPSKVAIVACMHKFLRWLNAIARDQTSYAPPVIAAA

SEQ ID NO: 13151 - protein, 405 aa, unidentified
  source 1..405: note = protein_e102003
  REGION 6..159: note = RuvC_domain
  SITE 9: note = RuvC_P1
  SITE 57: note = RuvC_P2
  SITE 98: note = RuvC_P3
  SITE 100: note = RuvC_P4
  SITE 103: note = RuvC_P5
  REGION 221..307: note = Tnp_domain
  SITE 229: note = Tnp_P1
  SITE 259: note = Tnp_P2
  SITE 267: note = Tnp_P3
  SITE 268: note = Tnp_P4
  SITE 279: note = Tnp_P5
MTAVMIGVDPHKGSHTAVVISPAEEPLGELRVRASGAQAQKLVAWAAAWPERTWAVEGAGGLGHLLAQQLVAAGERVLDVQPKLASRVRLLQAGDTNKNDPNDALSVAVAALRSKVSREVTADDYQAVLKVWAKRHRDLARARNQVACRLHAVLCDLVPGGHQKEITAAQATRILEQAAPSGAVELARAELAAEFLADLRHLDDQLRDTRKKLAAAVRASGTSLTEVFGVGPVIAGTVIGDAGDAARFPGRDHFASYNGTAPAGVSSGNRKIHRLSLRGNRRINHAIHMAAITQIRHKHSDGRAYYDKKIAEGKTHKEALRSLKRKISDAIFARLRADARQSAKARANGPGGQPGNGSDSSAAGSHPERQLFGQATPGPATTLRPATRTRTTPQPPASKKIRATT

SEQ ID NO: 13152 - protein, 314 aa, unidentified
  source 1..314: note = protein_903eda7
  REGION 8..153: note = RuvC_domain
  SITE 11: note = RuvC_P1
  SITE 54: note = RuvC_P2
  SITE 94: note = RuvC_P3
  SITE 96: note = RuvC_P4
  SITE 99: note = RuvC_P5
  REGION 190..274: note = Tnp_domain
  SITE 198: note = Tnp_P1
  SITE 227: note = Tnp_P2
  SITE 235: note = Tnp_P3
  SITE 236: note = Tnp_P4
  SITE 247: note = Tnp_P5
MILALRYVGIDVSKHMLDIFDDAVGDAQSIANAPQPIAEQVARWQCGNVFVVFEATGIYDRELTSQLHEAGIRFARVNPARARDFARASGRLAKTDAIDARMLAAFARTMAPAADPAADPARNSLALLAKRRDQLVHMRAQEKNRRSESADHTTIESITRLLDFLTEEIKAIELKIKTLISKTPQIAEQARLMRSAPGIGPVACMQLIAQMPELGRLAPKQLAALAGLAPFNVDSGKHRGKRLIGGGRKRVRDALYMAALNAVRRNGILKTFYQRLRTAGKPAKLALIAVARKLLTILNAMLRDRKIYLPAPHS

SEQ ID NO: 13153 - protein, 356 aa, unidentified
  source 1..356: note = protein_e738be4
  REGION 22..164: note = RuvC_domain
  SITE 25: note = RuvC_P1
  SITE 68: note = RuvC_P2
  SITE 103: note = RuvC_P3
  SITE 105: note = RuvC_P4
  SITE 108: note = RuvC_P5
  REGION 226..311: note = Tnp_domain
  SITE 234: note = Tnp_P1
  SITE 264: note = Tnp_P2
  SITE 272: note = Tnp_P3
  SITE 273: note = Tnp_P4
  SITE 285: note = Tnp_P5
MCQGDGVELPPKEAPVEQVSTIGLDIAKHVFQLHGADGAGHVLFRKRITRAKLLSFLAAQTRCVVAMEACAGAHYWAREIAKLGHHVRLIAPTYVKPFIKRQKNDAADAEAICEAAQRPSMRFVPVKAEEQQANGIVFRARDLLVRQRTQCVNALRGHLSEYGYVFPKGITHVEALVAVVEDLQSSLSDSVRAILKLLVDTFTALEAQIAVLDAEINQRSKSDPTARRLMTIPGVGPITATAITALVPAAEGFPAGRDFAAWLGLTPLQKSTGGKPKLGAVSKRGERTIRRLLIIGASAVVQQASRRGAPKGSWLAQMLARKPKMLVTVALANKIARIIWALLVKGGNYKTPTAAA

SEQ ID NO: 13154 - protein, 326 aa, unidentified
  source 1..326: note = protein_24873a9
  REGION 11..161: note = RuvC_domain
  SITE 14: note = RuvC_P1
  SITE 64: note = RuvC_P2
  SITE 104: note = RuvC_P3
  SITE 106: note = RuvC_P4
  SITE 109: note = RuvC_P5
  REGION 199..284: note = Tnp_domain
  SITE 207: note = Tnp_P1
  SITE 236: note = Tnp_P2
  SITE 244: note = Tnp_P3
  SITE 245: note = Tnp_P4
  SITE 256: note = Tnp_P5
MEPMTTAQLYAGVDVSKDRLDVCLRWSEHERRDGDVFFVTHDDAGIDTLISGLLEEHPVLVILEATGGFERAVVGALAAEGLPVAVVNPRQVRDFARATGQLAKTDTLDARVLARFAEAVRPAPKPLPDEEIRALQEILARRRQLLGMLTAENNRLHSASKPVAKRIAAHVGWLEKELERTNRDLDGAIKGSPTLRENEALLRSVPGVGPVLARTLLAEVPELGTLTHKRLAALVGVAPLNRDSGTLRGRRSVWGGRAEVRAALYMGALVAARRNPAINWEFYERLLAAGKPKKVALVACMRKLLSILNAVLKHRTPWRSPHYIPS

SEQ ID NO: 13155 - protein, 320 aa, unidentified
  source 1..320: note = protein_edf014a
  REGION 1..133: note = RuvC_domain
  SITE 31: note = RuvC_P2
  SITE 72: note = RuvC_P3
  SITE 74: note = RuvC_P4
  SITE 77: note = RuvC_P5
  REGION 195..280: note = Tnp_domain
  SITE 203: note = Tnp_P1
  SITE 233: note = Tnp_P2
  SITE 241: note = Tnp_P3
  SITE 242: note = Tnp_P4
  SITE 253: note = Tnp_P5
MAQRRFVVNAGTFRQLMGWCEQWPDRRFAIEGAGGLGRSLAQQLAAAGENVVDVPSTLSARARLLATGGDRKTDAKDALHVAQVALFRPDLRPVTREDQTTILRLLTERRDDLVHERTRVLNRLHAVLRDLLPGGAPTALSADKAAALMKGIRPLTATDNCRRDIARDLLADLRRLDRQVKDNEAEMREAVAATRTTLTALPGLGTVLAAKVIGHIGDISRFPTEHHFASYTGSAPLDASSGNNVRHRLNTGGNRALNSVLHTIAVCQIRGGGRGQDYYLRKISEGKTPSEARRALKRRLSNVVYRIMKRDHRNHLAQAA

SEQ ID NO: 13156 - protein, 408 aa, unidentified
  source 1..408: note = protein_29469e9
  REGION 4..163: note = RuvC_domain
  SITE 7: note = RuvC_P1
  SITE 60: note = RuvC_P2
  SITE 100: note = RuvC_P3
  SITE 102: note = RuvC_P4
  SITE 105: note = RuvC_P5
  REGION 271..357: note = Tnp_domain
  SITE 279: note = Tnp_P1
  SITE 310: note = Tnp_P2
  SITE 318: note = Tnp_P3
  SITE 319: note = Tnp_P4
MLFVGDDWAEEHHDVELQSEDGQVLARAKLPEGVAGIARLHAMIGRYLGDEDDDATVVVGIETERGPWVQALIAAGYQIYAINPLQVARYRERHSVSGAKSDTGDAHVLADMVRTDRHQLRPVAGDSVQAEAVKVLTRAHKTLIWERTRHLLRLRHALREFFPAALVAFDDLTATDTLELLRAAPDPASAAALTIEQITAALTRARRRNRPAKAEAIAAALRAEYLGQPAVVTAAYASTVRAQTAILTVLGTEIKAMEEQVEAHFGQHPDVEVYLSQPGLGAVLGARVLAEFGDDNNRYADARARKNYAGTSPITRQSGKRKTVLARYVHNDRLVDALGLQAFAALRASPGARAYYDQLRGRGIGHRAALRQLGNRLVGILHGCLKTGTNYDEGKAWTPTQQDQRIAA

SEQ ID NO: 13157 - protein, 340 aa, unidentified
  source 1..340: note = protein_e831723
  REGION 7..148: note = RuvC_domain
  SITE 10: note = RuvC_P1
  SITE 53: note = RuvC_P2
  SITE 88: note = RuvC_P3
  SITE 90: note = RuvC_P4
  SITE 93: note = RuvC_P5
  REGION 211..296: note = Tnp_domain
  SITE 219: note = Tnp_P1
  SITE 249: note = Tnp_P2
  SITE 257: note = Tnp_P3
  SITE 258: note = Tnp_P4
  SITE 270: note = Tnp_P5
MGEVSTVGIDLAKSVFQVHGADASGGVVFRKKLRRDQVLPFFSTLPRCVVAMEACASAHYWARELAAVGHDTKLISPAYVKPFVKRQKNDMADAEAICEAAQRPTMRFVQGKSAQAQASAVVFRTRDLLVRQRTQLINALRGHLNEFGYIVRQGVGHVSKLVEIVADPTSDVPAEARPVLTVIAQGLQALQEQIALLDREIASRAKADPVAKRLMTVPGVGPVTATALVALAPAASTFRRGRDFAAWLGLVPRQHSSGGKERLGRTTRMGERSLRRLLILGASSATKVAARDPDKAGAWLAGMLARKPRMLVTVAFANKMARIVWALMAHGGSYRAPAAA

SEQ ID NO: 13158 - protein, 351 aa, unidentified
  source 1..351: note = protein_c3be8e4
  REGION 10..158: note = RuvC_domain
  SITE 13: note = RuvC_P1
  SITE 62: note = RuvC_P2
  SITE 98: note = RuvC_P3
  SITE 100: note = RuvC_P4
  SITE 103: note = RuvC_P5
  REGION 228..314: note = Tnp_domain
  SITE 236: note = Tnp_P1
  SITE 267: note = Tnp_P2
  SITE 275: note = Tnp_P3
  SITE 276: note = Tnp_P4
  SITE 287: note = Tnp_P5
MTAKKRQITGGIDTHGRTHHAAVVDQTGRVLNDQQFPATAAGYHDLLAWLRSHGRVTKVGIEGTGAYGAGLARYLTSQNITLVEVDRPDRKTRRTKGKSDPIDAIAAARAALSGQANGTPKTRTGPVEAIRTLRVARSGAVKARTAALNQLHGLIASAPEELRANLTGLHGQALITACTTLTTDDTPTSDPIQATRAALHSIATRVQTLTTEITQLEHRLHPIVATTAPRLNALLGVGPDVAGQLLATAGDNPDRLHSEAALAHLCGAAPIPASSGRTNRHRLNRGGDRAANKALYTIALCRLRHDPRTRAYTERRTTQGLSKKEIIRCLKRYIIREVHTALLADLAALTT

SEQ ID NO: 13159 - protein, 350 aa, unidentified
  source 1..350: note = protein_c1ebc7e
  REGION 12..153: note = RuvC_domain
  SITE 15: note = RuvC_P1
  SITE 58: note = RuvC_P2
  SITE 93: note = RuvC_P3
  SITE 95: note = RuvC_P4
  SITE 98: note = RuvC_P5
  REGION 217..304: note = Tnp_domain
  SITE 225: note = Tnp_P1
  SITE 255: note = Tnp_P2
  SITE 263: note = Tnp_P3
  SITE 264: note = Tnp_P4
  SITE 276: note = Tnp_P5
MSQTLKTSVAVIGIDIGKNSFHLVGQDRRGAIVLRQKWSRGQLEGRLANVPPCLIGMEACVGAHHLSRKLQMLGHDARLMPAKYVRPYSKGQKNDFRDAEAIAEAVQRPTMKFVATKTADQLDLQALHRVRERLVSQRTGIINQIRAFLLERGIAVRQGLRFLRAELPDILATRNDVLSPRMVRIIEELAADWRHFDERIEGLSSEIERLARQDKGCERLMTVPGIGPIISSAMVAAIGTGDAFSKGRDFGSWLGLVPKQISTGDRTILGSISRRGNRYLRSLFVQAAWVVLVKIGPKRWDRYGLKSWIETARKRLHHNVLAIALANKLARIAWAVLHKGRAFECVRTDR

SEQ ID NO: 13160 - protein, 352 aa, unidentified
  source 1..352: note = protein_63161ae
  REGION 14..154: note = RuvC_domain
  SITE 17: note = RuvC_P1
  SITE 60: note = RuvC_P2
  SITE 95: note = RuvC_P3
  SITE 97: note = RuvC_P4
  SITE 100: note = RuvC_P5
  REGION 219..306: note = Tnp_domain
  SITE 227: note = Tnp_P1
  SITE 257: note = Tnp_P2
  SITE 265: note = Tnp_P3
  SITE 266: note = Tnp_P4
  SITE 278: note = Tnp_P5
MSHKSAPYAAVSTIGIDLGKNSFHLIGLDQRGAIVLQLKCSRAQLERRLANIPCCLIGMEACSGAHYIARQLSALGHDVRLIPAQYVKPFLKGHKNDYRDAEAIAEAVQRPTMHFVAIKTPEQMDLLALHRVRSRLVSQRTGVTNQIRGFLIERGIIVRQGVVPLRKAMADILSSNTHALSPRIVNLIADLVQDWRRLDERIAAVSAEIESLAEQDEACQRVMTVPGIGPIISSAVVAAIGNGAGFTQGRDFGAWLGLVPRQESTGDRTILGKISKRGNKYLRTLFVQAAHVVLARRPKAAMRSLWPWIEQAARRLHRNMLAIALANKLARIVWAVLARGRSYQPRIVADVA

SEQ ID NO: 13161 - protein, 338 aa, unidentified
  source 1..338: note = protein_5b43397
  REGION 6..149: note = RuvC_domain
  SITE 9: note = RuvC_P1
  SITE 52: note = RuvC_P2
  SITE 87: note = RuvC_P3
  SITE 89: note = RuvC_P4
  SITE 92: note = RuvC_P5
  REGION 211..297: note = Tnp_domain
  SITE 219: note = Tnp_P1
  SITE 249: note = Tnp_P2
  SITE 257: note = Tnp_P3
  SITE 258: note = Tnp_P4
  SITE 270: note = Tnp_P5
MSIIRIGLDTSKHVFQVHGVDENEQPVLRRQLRRQDVVKFFAKLAPTRIGMEACGASHHWARVLRSLGHEVVLIPPQYVRAYVQRGKNDKIDAEAICEAMSRPKVQPRFVPIKTVQQQAALTMLGVRDLLVKQRTMLINAIRGHAAEFGVTAPKGPEQVAELLRRLVSDAGVPALAQEMIGELTGQLAALDAKLTAVQARLTAWHRHNQTSQLLATIPGVGPISGVSFALKVPDPKVFRSGRHFAAWVGITPRENSTAGRQQLGRISKQGDEDLRRLLVLGATAVIQQAKPGRASPWLVDLLARKPKKLVALAVANKMARIIWAMMISGEIYRRPQAA

SEQ ID NO: 13162 - protein, 349 aa, unidentified
  source 1..349: note = protein_f55df5d
  REGION 6..147: note = RuvC_domain
  SITE 9: note = RuvC_P1
  SITE 52: note = RuvC_P2
  SITE 87: note = RuvC_P3
  SITE 89: note = RuvC_P4
  SITE 92: note = RuvC_P5
  REGION 211..297: note = Tnp_domain
  SITE 219: note = Tnp_P1
  SITE 249: note = Tnp_P2
  SITE 257: note = Tnp_P3
  SITE 258: note = Tnp_P4
  SITE 270: note = Tnp_P5
MEIDTIGIDLGKTVFHLVGLNVAGEVVVRRKFSRLQLLRFTANLRVRLIGMESCGGSHFLGRSLREQGHEVRLMPAQYVKPYVKTNKNDYIDAEAIAEAVGRANMRFVPIKSDEQLDMQSLHRVRDRWVARRTSVINQIRGLLLERGITFRKGRRHAAASLPAALEDADNRLSGLLRMLLAQLQGELRQLQSQIDDSDALIAKAAGEHEPCRRLMAIPGIGPLTATAVAASIGNGSEFRKGRSFAAWLGLVPKQESTGGKQKLLGISKRGNHYLRRLFVSGARAVLQCRDKQSAGLSAWLGQLASRVHTNVAAVALANKMARVAWAVLAKSEAYRPPLSAISAEALACN

SEQ ID NO: 13163 - protein, 336 aa, unidentified
  source 1..336: note = protein_5598175
  REGION 7..148: note = RuvC_domain
  SITE 10: note = RuvC_P1
  SITE 53: note = RuvC_P2
  SITE 88: note = RuvC_P3
  SITE 90: note = RuvC_P4
  SITE 93: note = RuvC_P5
  REGION 209..295: note = Tnp_domain
  SITE 217: note = Tnp_P1
  SITE 247: note = Tnp_P2
  SITE 255: note = Tnp_P3
  SITE 256: note = Tnp_P4
  SITE 268: note = Tnp_P5
MEEISAIGLDLAKSVFQVHAVDAAGRVVLRRQIKRAQLLAFFAALSPCLVGMEACSGAHFWSRELGKLGHDTRLMPPSYVKPYVKRGKTDAADAEAICEAVTRPNMRFVPVKTEEQQAILMMHRARDFLVRQLTQVSNALRAHLGEFGLVVPKGVQNIERLVTLAEATGLPANALNSVWLLAEQFRNTKVKIEDVTSEISSASDTDSIARRLKTIPGIGPITSSVLAATLPDASGFKTARDLAAWLGLTPKPHSSGGKERLGKISKMGNRYIRRLLYLGAMGVIAARRRRPAGDDWLWQLLERKPVKLVAIALASRNARMVWALLKSGESYQVARA

SEQ ID NO: 13164 - protein, 321 aa, unidentified
  source 1..321: note = protein_2e94eb4
  REGION 9..131: note = RuvC_domain
  SITE 33: note = RuvC_P2
  SITE 71: note = RuvC_P3
  SITE 73: note = RuvC_P4
  SITE 76: note = RuvC_P5
  REGION 191..277: note = Tnp_domain
  SITE 199: note = Tnp_P1
  SITE 229: note = Tnp_P2
  SITE 237: note = Tnp_P3
  SITE 238: note = Tnp_P4
  SITE 250: note = Tnp_P5
MASGFGAGSARSDPKVLADLVRKRAPHAKRVVFETGPLSVWFFHALKAEGVPAICIDARHAKAALDMAPNKTDANDADGLAHLAEVGFFREVRVKGFESMLSRTRMAARNRLVRISVELSNQIRGLMKTFGLIVPSAKGGKFDEHVCRLLDERGDLPRIMMPMLEAWRSIRVRAAELGRQVLADARQSETCQLLMSIPGVGAITATAFTSAIEDPANFKKSRSVGAWIGLTTRRYQSGEVDYDGHISRRGDAHLRGLLYEAATVIMTRSAADSDLRTWGIKLREKIGFKRAAVAVARKLAVIMHAMLVSGEFFERKTTNTV

SEQ ID NO: 13165 - protein, 257 aa, unidentified
  source 1..257: note = protein_bec7a17
  REGION 1..88: note = RuvC_domain
  SITE 31: note = RuvC_P3
  SITE 33: note = RuvC_P4
  SITE 36: note = RuvC_P5
  REGION 133..217: note = Tnp_domain
  SITE 141: note = Tnp_P1
  SITE 170: note = Tnp_P2
  SITE 178: note = Tnp_P3
  SITE 179: note = Tnp_P4
  SITE 191: note = Tnp_P5
MYFLHEQGFNIILANPGKAKKYADALNIIHKTDKSDATMLAHYGCAKHAVVSYWQPDALEVRELKALIRRLDALESNRQREANRLEASEFSNVSARVCQSIKVTIAFLDDEIKQLKSDIDNHIDNEPDLKRNRKLLESIPGIGPVLSRELTYLFAAKKFNKAKEAAAYCGLIPRHNESGKLKGRTSISKLGPARIRCKLYMAAIVAGQWNKTIKRHKLTLINNGKTPMQAVCANMRKLIHICFGVIKNQEAFKLQES

SEQ ID NO: 13166 - protein, 346 aa, unidentified
  source 1..346: note = protein_47be464
  REGION 6..147: note = RuvC_domain
  SITE 9: note = RuvC_P1
  SITE 51: note = RuvC_P2
  SITE 86: note = RuvC_P3
  SITE 88: note = RuvC_P4
  SITE 91: note = RuvC_P5
  REGION 210..301: note = Tnp_domain
  SITE 218: note = Tnp_P1
  SITE 250: note = Tnp_P2
  SITE 258: note = Tnp_P3
  SITE 259: note = Tnp_P4
  SITE 272: note = Tnp_P5
MENTIVGVDLAKKVIQVCKTTNRTVRSNEEMTPHEFTLFLVNSKPMTVVFEACSTSSYWKQQALRNGHDAKLVSTKLVASVRQSQKTDKNDALAIVQAALLPDVNFILGKSIEQQQLQSTMRLRELCSKQKTALSNQLIALLAEFNVSSSNRNGGLRGAIESTLEDANNDFSGEFRKALNEAWKLYLTVSESLVIYDECLEASIEVHPECKKLLKLEGVGPINAINLYIALGCAELGSFTKGKDASACIGLTPLQHSSGGKNKIGSIGKHVKNTTIRSQLITGAAASVRHVIRRDAKTYKEKWIQDLVARRGIKCAAVALANKTVRTAFAMLTQGTEYKAKMILTC

SEQ ID NO: 13167 - protein, 341 aa, unidentified
  source 1..341: note = protein_322f31b
  REGION 7..149: note = RuvC_domain
  SITE 10: note = RuvC_P1
  SITE 53: note = RuvC_P2
  SITE 88: note = RuvC_P3
  SITE 90: note = RuvC_P4
  SITE 93: note = RuvC_P5
  REGION 210..296: note = Tnp_domain
  SITE 218: note = Tnp_P1
  SITE 248: note = Tnp_P2
  SITE 256: note = Tnp_P3
  SITE 257: note = Tnp_P4
  SITE 269: note = Tnp_P5
MKKFIRTAIDLGKTYFQVHGLESEGGQSISRKMKRSKMREFYEQIEPCRVGMEACGSGHYWARELVAMGHEVMLIPPAYIKPYIKRGKNDAVDAAAICEAMSRPGMRFVPIKSADQQAVLMLHKTREMFVKQRTMSVNALRGHLAEFGIIVAKGIGRVDELLALAQSDAELPQIAKSAVAGLAQHLEGLDQSIEAVGDEIARAHKQNPTSRLLDEIPGIGVLIASVIASSVPDPSVFKTGRDFAAWLGLTPRQNSSGGKEKLGSITKQGNRYIRKMLVVGATSVMRVAGKRKGALADWINALQAKKPKRVAAVALANKLARICWAIMTTGEGFRVDTYVKA

SEQ ID NO: 13168 - protein, 340 aa, unidentified
  source 1..340: note = protein_8da08bc
  REGION 7..148: note = RuvC_domain
  SITE 10: note = RuvC_P1
  SITE 53: note = RuvC_P2
  SITE 88: note = RuvC_P3
  SITE 90: note = RuvC_P4
  SITE 93: note = RuvC_P5
  REGION 210..283: note = Tnp_domain
  SITE 218: note = Tnp_P1
  SITE 247: note = Tnp_P2
  SITE 255: note = Tnp_P3
  SITE 256: note = Tnp_P4
  SITE 268: note = Tnp_P5
MTELTRIAIDTSKSVFTLHGTDADGRAVLRRNLRRQDMVPFFARRPPMEVVLEACGGSHHWGRVLAGLGHTVRLIPPQYVKPFVKRGKNDRNDAEAISEAAARPEMREVAVKSARQQANAMLLSVRELLVRQRTQLVNALRGHAAEFGHVGRLGRQGVAKLLADVAEDAELPTPAKDALALLGAEIGRLDARLAEVDARLVAQHKQTPTSQMLAEVPGIGPIGALSLVLRVDFSQFKSGRHFASWLGLTPREHSTGGKTRLGGISRAGDERLRQLLVLGSNRGDQAGQAGKSLGLAHRFAGKAAAQARGGRPGQQDGAHRLGDDDEWRGVSPAGHRLTTL

SEQ ID NO: 13169 - protein, 346 aa, unidentified
  source 1..346: note = protein_29b3ca5
  REGION 7..148: note = RuvC_domain
  SITE 10: note = RuvC_P1
  SITE 53: note = RuvC_P2
  SITE 88: note = RuvC_P3
  SITE 90: note = RuvC_P4
  SITE 93: note = RuvC_P5
  REGION 211..297: note = Tnp_domain
  SITE 219: note = Tnp_P1
  SITE 249: note = Tnp_P2
  SITE 257: note = Tnp_P3
  SITE 258: note = Tnp_P4
  SITE 270: note = Tnp_P5
MDKISVVGLDLAKNVFQVHGANAQGKKVLSRRFKRAEVLEFFASLPACRVGMEACGGAHEWARRIKALGHAVKLMAPQYVKAYVQGNKTDARDAAAICEAASRDCVPAVAIRSRDSQQVQALHRVREGWMKQRTATANQVRGLVAEFGQALTPGMRRLRSEVSAWQDKARADLGLLCGLIDDLLAHLTQLEERIAQVDKQLMQVHRDNAACQLIESIPGIGVMTATAVVGSFGRADMFADGRKFACALGLTPREHSSGGKQILLGISKHGNGYVRKLLVHGARAVLKARMGKPAYADDWVVKLAARRGHNVAVCALAAKNARRIWAMLQSGEVFRADYAQTNGVCA

SEQ ID NO: 13170 - protein, 343 aa, unidentified
  source 1..343: note = protein_f352640
  REGION 6..148: note = RuvC_domain
  SITE 9: note = RuvC_P1
  SITE 52: note = RuvC_P2
  SITE 87: note = RuvC_P3
  SITE 89: note = RuvC_P4
  SITE 92: note = RuvC_P5
  REGION 211..300: note = Tnp_domain
  SITE 219: note = Tnp_P1
  SITE 249: note = Tnp_P2
  SITE 257: note = Tnp_P3
  SITE 258: note = Tnp_P4
  SITE 270: note = Tnp_P5
MQNTIYGMDLAKRVMQLHWVDWETGEIHRKQVRRGKLLEFFVNREPGIIAMEACGSAHYWARELRKLGHEVRLIAAQFVRPFVKTNKTDAADAAAIWETVQRPDMRFVTVKSEEQQSVLALHRMREQLVKIRTMQVNEIRGLLYEFGIDLPQGREKGLKEFPEALATLEGRLSDLALETFRRQRKRLEEFDKDIADIEKRLTLWKKNQEAVARLMAIPGVGLLTATAIVATVGDMKSFRSGREFASFLGLVPRQSGTGGKVRLLGISKRGDTYLRTLLAHGARAVVNCQTRNRNPWIDELRSRRPHNVVVVAQANKMARTIWALLAKNRQFDPNYKSTAVATA

SEQ ID NO: 13171 - protein, 294 aa, unidentified
  source 1..294: note = protein_4d7e79c
  REGION 8..155: note = RuvC_domain
  SITE 11: note = RuvC_P1
  SITE 60: note = RuvC_P2
  SITE 100: note = RuvC_P3
  SITE 102: note = RuvC_P4
  SITE 105: note = RuvC_P5
  REGION 195..282: note = Tnp_domain
  SITE 203: note = Tnp_P1
  SITE 233: note = Tnp_P2
  SITE 241: note = Tnp_P3
  SITE 242: note = Tnp_P4
  SITE 255: note = Tnp_P5
MEHELHYIGIDTAKEKLDVDVLRPDGRHRTKKFANTTKGHDELVSWLKGHKIDHAHICIEATGTYMEPVAECLYDAGYIVSVINPALGKAFAQSEGLRNKTDTVDARMLAEFCRQKRPAAWEAPHPLERALRALVVRHQALTDMHTQELNRTETAREVQRPSIDAHLLWLEAELKRLEKQIKDLTDDDPDMKHRRKLLESIPGIGEKTSAVLLAYIGLKDRFAHARQFAAFAGLTPRRYESGSSVRGASRMSKAGHVSLRRALYMPAMVATSKTEWGRAFRDRLAANGKKGKVI

SEQ ID NO: 13172 - protein, 346 aa, unidentified
  source 1..346: note = protein_ae0c75b
  REGION 5..152: note = RuvC_domain
  SITE 8: note = RuvC_P1
  SITE 55: note = RuvC_P2
  SITE 92: note = RuvC_P3
  SITE 94: note = RuvC_P4
  SITE 97: note = RuvC_P5
  REGION 212..300: note = Tnp_domain
  SITE 220: note = Tnp_P1
  SITE 250: note = Tnp_P2
  SITE 258: note = Tnp_P3
  SITE 259: note = Tnp_P4
  SITE 271: note = Tnp_P5
MKHYVGLDVSVKETSVCIVDETGRICRDRKVVTHPDDLIALLRDTQWHFERIGLEAGPLSQWLYEGLARAGFPVICIETRHAKAFLKAQPNKTDRNDAGGIAQMMRVHLFRPVHVKTLTSQKRRALLTARMLLQGKAIAIENDIRGLLRNFGLKVGMVGAVKYEERICELVEGVSDLAEIVEPLLAARRKLREEFARLDHKARTEAKIDPVCRRLMTVPGVGPIVSLAYMATIDIPARFRTSRGVGAVLGLTPIVKQSGESNRIGRVSLCGDGMLRSYLYEAAQTLLTRVTKWSWLRAWAMNVAKRRGAQKAIIALARRLAVILHRVWSDGSEFRWTREASTAIAA

SEQ ID NO: 13173 - protein, 341 aa, unidentified
  source 1..341: note = protein_5bdc853
  REGION 6..147: note = RuvC_domain
  SITE 9: note = RuvC_P1
  SITE 52: note = RuvC_P2
  SITE 87: note = RuvC_P3
  SITE 89: note = RuvC_P4
  SITE 92: note = RuvC_P5
  REGION 211..296: note = Tnp_domain
  SITE 219: note = Tnp_P1
  SITE 249: note = Tnp_P2
  SITE 257: note = Tnp_P3
  SITE 258: note = Tnp_P4
  SITE 270: note = Tnp_P5
MDVSVLGIDLGKNSCSVVGLDATGKVVVRRRMRRDTVITYAAGLPACVVAMEACCGAHHMGRALARQGHAVRLMSPEYVRPYVKAQKNDDRDAEAIAEAATRPTMRFVELKTEEQLDMQTLHHIRDQLVGDRTSLMNQIRSLLLERGYIVPQGRAKLAVRLGEMLDGDEPVLGSRIHRLVSDMRLRWIALDDRIADLNAEFTEAARSDERTRRLLTIPGIGALNATALVAAVGDARTFGRGRDLAAWLGLVPRQATTGGKPRLLGITKRGSRYLRKNLIQGARASLPTMSKSDTRLGAWLRGLLSRSHHNTVVVALAAKMARIVWALLRHERTYDPAAQAA

SEQ ID NO: 13174 - protein, 345 aa, unidentified
  source 1..345: note = protein_d5659e4
  REGION 6..147: note = RuvC_domain
  SITE 9: note = RuvC_P1
  SITE 52: note = RuvC_P2
  SITE 87: note = RuvC_P3
  SITE 89: note = RuvC_P4
  SITE 92: note = RuvC_P5
  REGION 211..296: note = Tnp_domain
  SITE 219: note = Tnp_P1
  SITE 249: note = Tnp_P2
  SITE 257: note = Tnp_P3
  SITE 258: note = Tnp_P4
  SITE 270: note = Tnp_P5
MHLHTIGIDLGKTVFHLVGLNFRGEVEVRRKFSRSQLLRFTANLRVELIGMEACGGAHFLGRLLQEQGHEVRLMPAQYVKPYVKTNKNDYIDAEAIAEAVGRPTMRFVPIKTDEQLDMQSLHRVRERWVMRRTAVINQIRSLLLERGIPLQKGRKNLGHALPGLLEDATTKLSGSLRMLLMQLKVELDQLAQRIDEADALIGKTAKTNDACRRLVDIPGVGPIIATALIAAIGNGDAFRKGREFAAWIGVVPREYSTGGKQKLLGISKRGNAYLRKLFIQGARAVLQHSKNLSSSLGSWLSQLTLRAHPNVVAVALANKLARIAWAVLAKGQQYHPSICTNTAIA

SEQ ID NO: 13175 - protein, 320 aa, unidentified
  source 1..320: note = protein_13f04ea
  REGION 12..160: note = RuvC_domain
  SITE 15: note = RuvC_P1
  SITE 59: note = RuvC_P2
  SITE 99: note = RuvC_P3
  SITE 101: note = RuvC_P4
  SITE 104: note = RuvC_P5
  REGION 195..279: note = Tnp_domain
  SITE 203: note = Tnp_P1
  SITE 232: note = Tnp_P2
  SITE 240: note = Tnp_P3
  SITE 241: note = Tnp_P4
  SITE 252: note = Tnp_P5
MVKMRQYIPTFAGIDVSKAHLDVYLHPNGSDRRLSNDKTGWRALRDWLSEADLQGVVYEATGSYHKGVERYLGMHGFPIARLDARRARRFAEALGVNAKTDPVDARILAQFGAFLKPATKPLPDPTLEHLKELVAARRGLVKQGTRVANKSKTVTSPLLKRQLRQSAKQAKRQIKQIDAQCHEIVMSDPASAQHLAILMSIPAIGEVTAMTLLAEMPELGNLSDKQAASLMGVAPMARDSGAFRGKRHIRGGRAQVRQAVYMAALVATRFNADMKRKYETLVKNGKPPKVALTAVMRKLIILANALIRDNRTWTEMKPCL

SEQ ID NO: 13176 - protein, 346 aa, unidentified
  source 1..346: note = protein_b7a3c3e
  REGION 7..149: note = RuvC_domain
  SITE 10: note = RuvC_P1
  SITE 53: note = RuvC_P2
  SITE 88: note = RuvC_P3
  SITE 90: note = RuvC_P4
  SITE 93: note = RuvC_P5
  REGION 212..300: note = Tnp_domain
  SITE 220: note = Tnp_P1
  SITE 250: note = Tnp_P2
  SITE 258: note = Tnp_P3
  SITE 259: note = Tnp_P4
  SITE 271: note = Tnp_P5
MEQITTIGLDLAKQVFQVHAADAGGVPIFNRKLRRAEVLQFFEKTPACLVGMEACGSAHYWAREISALGHDVRLIPPVYVKPFVKRGKTDAADAEAISEAVTRKTMRFVPVKSAVQQAAAVVLKTRALLVNQRTQVINALRAHLSEFGIIAAAGTTKVAGLISIVRDETDLRLPKAARHALMEVASQIEALKAQIEKLEKVIVATVKRDDDARRLVTIPGVGAITAASVRALVPDPGGFESGRHFAAWLGLTPKPHSSGGKERLGRISKMGNPALRSLLVVGATAVLRHARGNPNASRWITALLARRPYKVVAVALANKMARIVWALLVKGGRYQENGARNQMAAA

SEQ ID NO: 13177 - protein, 315 aa, unidentified
  source 1..315: note = protein_f2ffdce
  REGION 9..160: note = RuvC_domain
  SITE 12: note = RuvC_P1
  SITE 56: note = RuvC_P2
  SITE 96: note = RuvC_P3
  SITE 98: note = RuvC_P4
  SITE 101: note = RuvC_P5
  REGION 192..276: note = Tnp_domain
  SITE 200: note = Tnp_P1
  SITE 229: note = Tnp_P2
  SITE 237: note = Tnp_P3
  SITE 238: note = Tnp_P4
  SITE 249: note = Tnp_P5
MPESVPQNVGIDISKDALDVCLYPEAASARFGNDKKGFTALMKWLGTRTIARLVFEPTGAYHRAFEARFLQAGFTLAKVNPRQARRFAEAIGTNAKTDAVDAAMLARFGAMLEPRALPPHSEILSEMKDLLVARRALIKDRTAMQNRAHQRSLALLKAQAADRLKQVERQIAAIDAAMRERLDAGPALKARYNILVSIPGLGEITALALLIDMPELGALENKCAASLAGLAPIARDSGQSRGKRFIRGGRAELRQALFMPALVAMRFNADLKAVYERLIGAGKAPKVALVAVMRKLVILANAMLKKGARWEPKLA

SEQ ID NO: 13178 - protein, 339 aa, unidentified
  source 1..339: note = protein_0361d5b
  REGION 6..148: note = RuvC_domain
  SITE 9: note = RuvC_P1
  SITE 52: note = RuvC_P2
  SITE 87: note = RuvC_P3
  SITE 89: note = RuvC_P4
  SITE 92: note = RuvC_P5
  REGION 208..296: note = Tnp_domain
  SITE 216: note = Tnp_P1
  SITE 246: note = Tnp_P2
  SITE 254: note = Tnp_P3
  SITE 255: note = Tnp_P4
  SITE 267: note = Tnp_P5
MQASTIGLDIAKNVFQLHGVDAAGKTVITKQLRRGQVISFFEKLPPCLIGMEACATAHHWARELTKLGHTVRLMPASYVKAYVKRSKNDAADAAAICEAVTRPSMRFVAVKTIDQQAALTLHRCRDLLIRQRTQLINALRAHLAELGMVAATGKAGVDHVVAIVTGTQLPAPMKQALQALVKQLAALQEQIGELERSIHAQHRASDRSRRLETIPGIGVIGATAIDATVIDPSAFKSGRELAAWIGLVPRQNSTGGKERLGGISKQGDRYLRRLLVAGGMSVIRHARTHPDKHPWVIKLLAKKPAKVVAVALANKMARIAWAVLAKGESYRAPALVAAA

SEQ ID NO: 13179 - protein, 264 aa, unidentified
  source 1..264: note = protein_266d028
  REGION 5..153: note = RuvC_domain
  SITE 8: note = RuvC_P1
  SITE 55: note = RuvC_P2
  SITE 92: note = RuvC_P3
  SITE 94: note = RuvC_P4
  SITE 97: note = RuvC_P5
  REGION 212..264: note = Tnp_domain
  SITE 220: note = Tnp_P1
  SITE 250: note = Tnp_P2
  SITE 258: note = Tnp_P3
  SITE 259: note = Tnp_P4
MEYYAGIDVSLKESSVCIVDAKGKIVREVKVASEPETLVRYFDELELPVCRIGLEAGPLSHWLHAGLVAAGRDVVLLETRHVKAALSAMTVKTDRKDARGIAQLLRMGWYRPVHAKSVASQDTRAVLVGRKLLQGKLLDVELSIRGILRGYGLKVGEVSRGRFEARIQELIVGHATLETVIGGMLAARTTLWSEFTRLHREMLRIARADKICHRLMSTPGVGALVALTYRSAVDDPTRFGKSSTVGAYFGLTPKKYQSGETDRD

SEQ ID NO: 13180 - protein, 389 aa, unidentified
  source 1..389: note = protein_e4f367d
  REGION 41..185: note = RuvC_domain
  SITE 83: note = RuvC_P2
  SITE 121: note = RuvC_P3
  SITE 123: note = RuvC_P4
  SITE 126: note = RuvC_P5
  REGION 258..343: note = Tnp_domain
  SITE 266: note = Tnp_P1
  SITE 295: note = Tnp_P2
  SITE 303: note = Tnp_P3
  SITE 304: note = Tnp_P4
  SITE 316: note = Tnp_P5
MPTVADRAEAPTAIQTNLAAIFTSLELSRSIWLITSLSPGCGEKMSKHSVPAGDIAALLARFSELKQKALARTGKSFPIVAVQEAGLDGFWLHRVLEKEGIESHVVDPASIATSRRRRRAKTDRIDGETLLRALLAYKRGEPRVCAMVRTPTPEEEDRRRLCRERKVLIAERVEHVNRIKGLLFAQGISGYEPLRRNRRQRLDELMTGDGRPLPTHLKTQISRELDRLELLLDQIKAAEAERDALLAAQQAAAPAPVGKMLLEFKGIGAEFAANLWLEALFRHFDNRRQLASYAGLAPTPWQSGSVDREQGVSKAGNPRLRATLVELAWLWLRHQPQSALALWFKERVSRNGGRMKKTFIVALARKLLVALWKYVTAGVVIEGAVMKAA

SEQ ID NO: 13181 - protein, 339 aa, unidentified
  source 1..339: note = protein_f7cc895
  REGION 6..147: note = RuvC_domain
  SITE 9: note = RuvC_P1
  SITE 52: note = RuvC_P2
  SITE 87: note = RuvC_P3
  SITE 89: note = RuvC_P4
  SITE 92: note = RuvC_P5
  REGION 210..299: note = Tnp_domain
  SITE 218: note = Tnp_P1
  SITE 248: note = Tnp_P2
  SITE 256: note = Tnp_P3
  SITE 257: note = Tnp_P4
  SITE 269: note = Tnp_P5
MKYIPVGVDIAKHLIQVHFVDEHTGEVVDKQVRRQDLLTFFSNRKPCLIGMESCGGSQHWARELTKQGHQVRLMQGRFVKAFVMGNKNDVMDARAIWIAVQQPGKAIAVKTEEQQSVLVLHHSRRQLVKFRTAQINALHGTLLEFGETIHKGRAAMDKELPAALERMKMRLPPYLISLLEEQYNRLNELDSLIDGIEKQLISVARQSETCKRLMEIPGVGPLIATAAVASMGEARAFKSGREFAAYVGLVPKQTGSGGKVRLLGISKRGDTYLRTLFIHGARSASLLVKDPNPWITELKKRRPAAVAIVAMANKLARMVWAITANNRQYDKNYVSVRPY

SEQ ID NO: 13182 - protein, 406 aa, unidentified
  source 1..406: note = protein_dd17a09
  REGION 14..168: note = RuvC_domain
  SITE 17: note = RuvC_P1
  SITE 66: note = RuvC_P2
  SITE 106: note = RuvC_P3
  SITE 108: note = RuvC_P4
  SITE 111: note = RuvC_P5
  REGION 274..360: note = Tnp_domain
  SITE 282: note = Tnp_P1
  SITE 312: note = Tnp_P2
  SITE 320: note = Tnp_P3
  SITE 321: note = Tnp_P4
  SITE 333: note = Tnp_P5
MAAELEAAGPRLWAGIDAGKGHHWVCVVDGAGETVWSGKVINDETVILDTLGAVVALGGEITWGIDITGTASGLLLTLLAAHAQTVRYVPGRTVNRMSGAYRGEAKTDARDAYVIAETVRHRSDLAPVEVPAEIVAELRLLVALRADLVADRVRLINRLRDTLTGYFPGLERAFDFGRRKGAIVLLTRYQTPDGLRRAGRVRVASWLAKRKVRSAAEIADTALDAADAQHTTVPGQKIAAQIVAEHARALLALDARITTIDAQVDDTFHAHPQAAIIESMPGIGPILGAELIVAAGDLSAYADAGRLASAAGLVPVPRDSGRRTGNMHRPKRYNRTLRRVFYLSAQTAIVRDGPNRDFYLKKRAEGSKHVSALLALARRRVDVLYALLRDNRTFTIEDPAKTATAA

SEQ ID NO: 13183 - protein, 342 aa, unidentified
  source 1..342: note = protein_fb138ea
  REGION 6..148: note = RuvC_domain
  SITE 9: note = RuvC_P1
  SITE 52: note = RuvC_P2
  SITE 87: note = RuvC_P3
  SITE 89: note = RuvC_P4
  SITE 92: note = RuvC_P5
  REGION 211..297: note = Tnp_domain
  SITE 219: note = Tnp_P1
  SITE 249: note = Tnp_P2
  SITE 257: note = Tnp_P3
  SITE 258: note = Tnp_P4
  SITE 270: note = Tnp_P5
MNITTVGIDLAKNVLQIHGINQHGKKVFNKQLQRKQVLKYFTQLPPCLIGMEACGSAHFWARKLQALGHTVKLMAPQFVKPYVKTNKNDAADAEAICEAVTRPTMRFVPIKNSEQQAILSLHRARQGFVKARTAQANQIRGLLMEYGITIPQGISHITKKIPELTEDEDSELPGVFQQLLQRLCEHLKELDRQTVELETQIQTWHRENESSKKLACIPGIGPLTASALIASIGDARSFKNGRQLAAWLGLVPRQHSSGGKQILQGISKRGDTYLRTLLIHGARSVIRVATGKTTPTHCWAVNLVERRNKNVAAVALANKNARIVWALLTQNRHYQSNYSLVV

SEQ ID NO: 13184 - protein, 343 aa, unidentified
  source 1..343: note = protein_0b9ed85
  REGION 6..148: note = RuvC_domain
  SITE 9: note = RuvC_P1
  SITE 52: note = RuvC_P2
  SITE 87: note = RuvC_P3
  SITE 89: note = RuvC_P4
  SITE 92: note = RuvC_P5
  REGION 210..298: note = Tnp_domain
  SITE 218: note = Tnp_P1
  SITE 248: note = Tnp_P2
  SITE 256: note = Tnp_P3
  SITE 257: note = Tnp_P4
  SITE 269: note = Tnp_P5
MQITTIGLDLAKHWFQVHGVDANGQVVVRRRLWRSGVIAYFRSLEPCLVGIEACATAHHWRRELIALGHTVKLMPPAYVKAYVKRNKNDAADAEAICEAVTRPSMRFVPIKDAEQQSVLMLHRARSLLVRQRTMLVNALRAHMAEFGIVAPQGLRHVEMLTKTITHQQERLPELARSILQTIADQLNGTMARIQEIEGRLVRWHRQSRVSRLVATVPGVGIMGASAIAATVPNPSLFRSGREFAAWLGMTPRQNSSGGKERLGRTSKRGNKYIRSLLTAGAVAVLRHARNRPTRDGAWVRALLARKPTKVAAVALANKTARIVWAVMVREAGYQPHEVFRQPA

SEQ ID NO: 13185 - protein, 391 aa, unidentified
  source 1..391: note = protein_a4b842e
  REGION 4..163: note = RuvC_domain
  SITE 7: note = RuvC_P1
  SITE 60: note = RuvC_P2
  SITE 101: note = RuvC_P3
  SITE 103: note = RuvC_P4
  SITE 106: note = RuvC_P5
  REGION 266..353: note = Tnp_domain
  SITE 274: note = Tnp_P1
  SITE 304: note = Tnp_P2
  SITE 312: note = Tnp_P3
  SITE 313: note = Tnp_P4
  SITE 326: note = Tnp_P5
MISVGIDVAKDKHDCFIINSEGEVLADVFTIPNNMDGFQRLLQRIRDCSSPQDKIKVGLEATGHYSYNILGFLLNNGLPTYVLNPLHTNLYRKSLSLRKMKTDRVDARTIAAMLLSDVSLKLYTDTAYHNEELKSLTRYRFDKVKERGRLKQSIARLVCILFPELEKLVPTLHMVSVYALLDEFPGAKQIANANLTHLKSALYSASKGRYGRDKAVEIRESARTSIGSVMPAKSLELRHTIRLIRELDEEIDEIEAEIQQIMDELHSPITTIPGIGCRMAAMILAEVGDFSRFDSPDKLLAYAGLSPSTYQSGQLKNCYAHMEKRGSRYLRYAIFNAAKYVCLWDPTFSAYLAKKRAEGKHYNVAISHAAKKLVRLIFALEKSGESYRLSA

SEQ ID NO: 13186 - protein, 405 aa, unidentified
  source 1..405: note = protein_dbeebb8
  REGION 3..158: note = RuvC_domain
  SITE 6: note = RuvC_P1
  SITE 55: note = RuvC_P2
  SITE 95: note = RuvC_P3
  SITE 97: note = RuvC_P4
  SITE 100: note = RuvC_P5
  REGION 266..352: note = Tnp_domain
  SITE 274: note = Tnp_P1
  SITE 305: note = Tnp_P2
  SITE 313: note = Tnp_P3
  SITE 314: note = Tnp_P4
MFCGIDWASERHAVCVLDDAGHQATAFEIAHTAEGFDQLLARLRRYRDPATLPVAIERPDGRLVDRLLEAGHPVVAVQPNAIKAWRDAEVLSGAKNDPGDAALIADYLRLRQHRLRVLQPFSAETRALRAVVRTRDDLVDQRTTASNQLGACLDAFWPGAKGVFADLASPITLDFLARYPTPESAASLSERRMAAFLTKHGYCGRRPAAELLARLRAAPPGLCGTVEVEARRDAVLAMVRVLRALVAAIKDLDRAVVAHLGEHPDAEIFTSLPRSGRINAAQVLAEWGDCRPAYVDAEAVACLAGATPVTKQSGKHTAVSFRWACNKRFRQAICTFADNSRHGSPWAAKVYAEALARGHDHPHAIRVLARAWIRVIWRCWIDQVPYDPAKHGAAHKLTEMATSAA

SEQ ID NO: 13187 - protein, 343 aa, unidentified
  source 1..343: note = protein_b93784e
  REGION 7..149: note = RuvC_domain
  SITE 10: note = RuvC_P1
  SITE 53: note = RuvC_P2
  SITE 88: note = RuvC_P3
  SITE 90: note = RuvC_P4
  SITE 93: note = RuvC_P5
  REGION 212..303: note = Tnp_domain
  SITE 220: note = Tnp_P1
  SITE 250: note = Tnp_P2
  SITE 258: note = Tnp_P3
  SITE 259: note = Tnp_P4
  SITE 271: note = Tnp_P5
MQAITTIGLDIAKSVFQVHAVDAAGQVIIRRQLKRRSVLAFFQNLPPCLVGIEACASSHHWSREIKALGHTVRLMPPAYVKPYVKRQKNDATDAEAICEAVARANMRFVPTKTPEQQSCLMLHRTRHLFIRQQTAVINAIRAHLAELGIIAPVGRKGVEELLDVVADRSDKRVPEVARACIAALGAQLRRLKEQILEFDRMILAWHRSNETSRRLDAIPGVGPMLATALVAGVADPKAFRSGRNFSAWIGLVPKQHSSGGKDKLGSISKQGDRYLRGLFVAGALAVIRYAKIHGTKHRPWLTALLARRPVKVAAIALANKIARMAWAMMARGERYRQPVALAA

SEQ ID NO: 13188 - protein, 283 aa, unidentified
  source 1..283: note = protein_48eca66
  REGION 1..39: note = RuvC_domain
  REGION 145..232: note = Tnp_domain
  SITE 153: note = Tnp_P1
  SITE 183: note = Tnp_P2
  SITE 191: note = Tnp_P3
  SITE 192: note = Tnp_P4
  SITE 205: note = Tnp_P5
MANPDVEQLRELARFRSFLVEQATQLKNKAIRVLDQAFPEYGKLFSNTFGEASKALLKQCPTPEEVLATDIRTLTRILKENSGGNCGRAKAEAVKDAARSSIGAKFGARALSFEIKLLVKRLSFTQVQIEELEDEISELLHRSDGHWLTTIPGIGDSLAASIAGEIGDPDRFETPKKLIAYAGMDASKYQSGANQDTNGHMSKRGSSELRRALMLAADKVRIYDPYFGEYYDSMKARGKHHYVALSGVARKLAGVCLSLMREQRPYESEPPEHHLPGHLQRQA

SEQ ID NO: 13189 - protein, 319 aa, unidentified
  source 1..319: note = protein_2ca9ee0
  REGION 14..159: note = RuvC_domain
  SITE 17: note = RuvC_P1
  SITE 60: note = RuvC_P2
  SITE 100: note = RuvC_P3
  SITE 102: note = RuvC_P4
  SITE 105: note = RuvC_P5
  REGION 196..280: note = Tnp_domain
  SITE 204: note = Tnp_P1
  SITE 233: note = Tnp_P2
  SITE 241: note = Tnp_P3
  SITE 242: note = Tnp_P4
  SITE 253: note = Tnp_P5
MTSRGTEKMTDHTIGIDISKDHLDAHRLIDGKSRRFVNDRSGHKALIAWIGCDAVRIVYEPTGPYHRKLEQALAAADLPLVKVNPRQARRFFEGAGQLAKTDRLDAAMLATMGSLLAIAPRLARSPLLHELKDLHMARTALVKDRTAAKNRAKSLSMPLLKRHNGERLTQIERQMEAIEAEIMHRIKADPDLARSFAILTSIPGVSDITAFLLIIDMPELGRLEATEAAALAGLAPITRQSGTWRGRASIRGGRANLRQALYMPALVASRFNPDLSAKYQQLLTAGKPPKVALTALMRKLIVLANALLKANRKWTSKPA

SEQ ID NO: 13190 - protein, 344 aa, unidentified
  source 1..344: note = protein_a2fad1e
  REGION 6..148: note = RuvC_domain
  SITE 9: note = RuvC_P1
  SITE 52: note = RuvC_P2
  SITE 87: note = RuvC_P3
  SITE 89: note = RuvC_P4
  SITE 92: note = RuvC_P5
  REGION 211..298: note = Tnp_domain
  SITE 219: note = Tnp_P1
  SITE 249: note = Tnp_P2
  SITE 257: note = Tnp_P3
  SITE 258: note = Tnp_P4
  SITE 270: note = Tnp_P5
MKITTIGLDLAKSIFQVHGVDAIGEVVVRKSLRRAQMLPFFAKLPSCLVGIEACGTSHHWARELIKLGHEVRLMPPAYVKPYVKRGKSDAADAEAVCEAVRRPTMRFVPVKSPKQQAALSMHRTRDLLVKQRTQIVNMIRGMLAEFGIDIAKGLGRALLMARRIVDGEAPDVPIEAAKMVGMLSQQALDIDARLCQIDRDLLVWQRGNDVARRLMTIPGIGPVGATALAASVTDPHQFRSGWQFAAWLGLTPLQKSSGGKERLGRITKMGDKYLRKLLIVGMTSLVRRAKSSPEKIDPRLANLLARKPVRVATVAMANKTARTIWAIMTRGEIYRAGHRPVLAA

SEQ ID NO: 13191 - protein, 404 aa, unidentified
  source 1..404: note = protein_43c8be5
  REGION 4..159: note = RuvC_domain
  SITE 7: note = RuvC_P1
  SITE 59: note = RuvC_P2
  SITE 96: note = RuvC_P3
  SITE 98: note = RuvC_P4
  SITE 101: note = RuvC_P5
  REGION 267..353: note = Tnp_domain
  SITE 275: note = Tnp_P1
  SITE 306: note = Tnp_P2
  SITE 314: note = Tnp_P3
  SITE 315: note = Tnp_P4
MWYAGIDWANDHHDALVIDETGRQVGTLRVDHSPQGMSKLNTFLEQIIGQESKEQMACIIETTHGLLIAHLLEAGWAVYPVNPRTVDRRRAASGAKTDTIDAYLLAKTGRADLADLHRLTPDSQQITELKLLTRDQDALIRMQTRLVNQLTACLKAYYPVALELFTKLQQKSTLLFLQTYPTPQAAMAASAEQIKEVLRRAKHSNPIPVAAEIVERLHQPHLQADVITTRTKSRLMLVLVSQLLPLIEQIAQYDKEIATLFLTHEDHEIFASLPRAGKRLAPRLLAEIGDDRERYQDASSLQALGGTSPVLFQSGMYSKAHRRLGCIKPLRNALHQFAWQTTQSEPWAKQYYQRKRAEGKSHTVAVRALANVWVRIIFALWVNHTCYETAIFEAAQRHHVRKVA

SEQ ID NO: 13192 - protein, 399 aa, unidentified
  source 1..399: note = protein_5ad39af
  REGION 9..163: note = RuvC_domain
  SITE 12: note = RuvC_P1
  SITE 60: note = RuvC_P2
  SITE 100: note = RuvC_P3
  SITE 102: note = RuvC_P4
  SITE 105: note = RuvC_P5
  REGION 271..357: note = Tnp_domain
  SITE 279: note = Tnp_P1
  SITE 309: note = Tnp_P2
  SITE 317: note = Tnp_P3
  SITE 318: note = Tnp_P4
  SITE 330: note = Tnp_P5
MDQGFDVYCGLDVGKSEHHATALNRAGERLFDRPLPQDEARLRELFTTLQHHGNVLIVVDQPNTIGALSVAVARDCGCEVAYLPGLAMRKAADLYPGNSKTDARDAFIIAETARAMPHTLRAVDRDSEVLSALKVLSGFDTDLTHECTRAINRLRSLMLQIFPALERAFPGTILTRSLVLELLINYAGPTGLRAAGRGNVLRWARNHSRKDPAALIDTVFAALGEQTVTVAGTEAVELVIPRVAAQIKELKHQRTIVAEEVEKLLDDFPLSKVLMSMPGVGIKTAATILLAVGDGSSFRTSGHLAAYAGIAPVTRRSGTSIRGEFPARSGNKELKNALFRSARIASCHDPLSKAYYERKRAEGKKHNAAIICLARRRCDVIYAMLKNGTLYQEKAPQAA

SEQ ID NO: 13193 - protein, 422 aa, unidentified
  source 1..422: note = protein_a77576e
  REGION 31..185: note = RuvC_domain
  SITE 34: note = RuvC_P1
  SITE 83: note = RuvC_P2
  SITE 123: note = RuvC_P3
  SITE 125: note = RuvC_P4
  SITE 128: note = RuvC_P5
  REGION 291..377: note = Tnp_domain
  SITE 299: note = Tnp_P1
  SITE 329: note = Tnp_P2
  SITE 337: note = Tnp_P3
  SITE 338: note = Tnp_P4
  SITE 350: note = Tnp_P5
MRQRGVHESLSAVLERGRDVRVAPLRERSWVGVDIGKTHHWVCALDDDGTTLLSVKIMNDEAEILALIATVGELAGQAVWAVDIIGAPSALILALLARADQSVRYASGRVVAAMSSAYTGEGKTDVKDAYVIAETARIRRDLAVIDHDTDLVRNLAVLTGHRADLIADRVRMINRLRDLMTSVFPSLEREFDYASCKGALVLLTGYASPHRIRRIGQTRLTAWLRQRKVRNAAGVAARAVTAARAQVTVLPGQDLTESIIAELATNILALDERLKSLDAQIAEHFEQHPQAAVIQSMPGFGPFLGASLLVGAGDLRAFPSAGHLAAAAGLVPVPNDSGRRSGNLHRPKRYSRPLRHVFYLSAQTSMMRAGPNRDYYLKKREHGRTHSQAVIALARRRVDVLWALLRDNRTWTPAAPTLAQAA

SEQ ID NO: 13194 - protein, 402 aa, unidentified
  source 1..402: note = protein_18020d6
  REGION 8..164: note = RuvC_domain
  SITE 11: note = RuvC_P1
  SITE 60: note = RuvC_P2
  SITE 101: note = RuvC_P3
  SITE 103: note = RuvC_P4
  SITE 106: note = RuvC_P5
  REGION 270..356: note = Tnp_domain
  SITE 278: note = Tnp_P1
  SITE 308: note = Tnp_P2
  SITE 316: note = Tnp_P3
  SITE 317: note = Tnp_P4
  SITE 329: note = Tnp_P5
MTAGQLWAGVDVGKEHHWVAVVDDTGAVVLSRKLVNDEQPIRTLVAEVDGLAERVSWTVDLTTVYASLLLTVLADAGKPVRYLAGRAVWQASTTYRGGEAKTDAKDARVIADQSRMRGTDLPVLHPDDDLITELRMLTAHRADLVADRTRTINRLRQQLVAVCPALERAAQLTQDRGWVVLLGRYQRPKAIRQSGVTRLTRILADAGVRNAATIAAAAVAAAKTQTVRLPGEEVAAGLVAQLAQGVIALDERIKTTDADIEGRFRRHPLAEVIISMPGMGFRLGAEFLAAVGDPALIGSADQLAAWAGLAPVSRDSGKRTGRLHTPRRYSRRLRRVMYMSALTAIRCDPHSRAYYQRKRDQGKRPIPATICLARRRTNVLYALIRDSRTWQPDSPPITTTAA

SEQ ID NO: 13195 - protein, 408 aa, unidentified
  source 1..408: note = protein_2e45d2e
  REGION 18..175: note = RuvC_domain
  SITE 21: note = RuvC_P1
  SITE 73: note = RuvC_P2
  SITE 114: note = RuvC_P3
  SITE 116: note = RuvC_P4
  SITE 119: note = RuvC_P5
  REGION 238..322: note = Tnp_domain
  SITE 245: note = Tnp_P1
  SITE 275: note = Tnp_P2
  SITE 283: note = Tnp_P3
  SITE 284: note = Tnp_P4
  SITE 295: note = Tnp_P5
MQQQPGQQAEPHAGRVVIGMDPHKRSATIEVVTADETILGTGRFGTDEAGFTAMRRYVKEIRPVVGDRVWAVEGCKGIGHHIASRLLAESEHVVDVPPKLSARMRVFATGQGRKTDATDAHSVALVGTRMAGLRPVVDDEQLAVIGILADRRRALGEDHTRMVSHLHHLLLELIPGGAKRDLSAAQAKALLAKVRPRDAAGQARRRVAAELIGDLERIYTRRKAADKELRELVAATGTGLLDLNGIGPSGAARLLVDVGDITRFPDRAHFASWNGTAPIDASSGDVVRHRLSRAGNRQINRTLHIMATVQLRNPGIGRDYYDRKKADGKSSMEAMRCLKRRLSDLVYRTMLDDTVAATITAGRTGPGGQRGNDSDSSAAGSHPHTSSSDKSLPGPATTNPRTPLPAAS

SEQ ID NO: 13196 - protein, 344 aa, unidentified
  source 1..344: note = protein_ca77d20
  REGION 4..157: note = RuvC_domain
  SITE 7: note = RuvC_P1
  SITE 55: note = RuvC_P2
  SITE 96: note = RuvC_P3
  SITE 98: note = RuvC_P4
  SITE 101: note = RuvC_P5
  REGION 219..304: note = Tnp_domain
  SITE 227: note = Tnp_P1
  SITE 257: note = Tnp_P2
  SITE 265: note = Tnp_P3
  SITE 266: note = Tnp_P4
  SITE 277: note = Tnp_P5
MILIGIDPHKSTHTAVAIDSSGKKIAQRRLPVNAGTFRQLISWCQHWPQRRFAVEGAAGLGRGIAQQLAAAGEHVVDVPSTLSARARMLATGGNRKTDAADALHVAHVALFRPDLRRVCSEDQTTILRLLTERRDDLVSERTRLLNRLHVLLRDLVPGGAPTALSTDKAADILKWIRPMTATDCCRRDLVRDLVADLRRFDRLIKGSETQMRDALNATGTTLTELPGMGIVLAAKVLGHVGNIDRFPTEHHFASYTGSAPLEASSGNTVRHRLNTGGNRALNSVLHIIATCQIRDPGIGQNYYRRKIAEGKTPAEARRALKRRLSNAVYRTLKRDQRKLLPEAA

SEQ ID NO: 13197 - protein, 343 aa, unidentified
  source 1..343: note = protein_419865c
  REGION 7..149: note = RuvC_domain
  SITE 10: note = RuvC_P1
  SITE 53: note = RuvC_P2
  SITE 88: note = RuvC_P3
  SITE 90: note = RuvC_P4
  SITE 93: note = RuvC_P5
  REGION 212..303: note = Tnp_domain
  SITE 220: note = Tnp_P1
  SITE 250: note = Tnp_P2
  SITE 258: note = Tnp_P3
  SITE 259: note = Tnp_P4
  SITE 271: note = Tnp_P5
MQTITTIGLDIAKTVFQVHGVDGTGQVVIRRQLKRRYVLAFFQKLSPCLIGIEACASSHHWSRELKALGHTVRLMPPAYVKPYVKRQKNDAADAEAICEAVTRANMRFVEIKTAEQQSCLMLHRTRHLFIRQQTAVTNVIRAHLAEFGIVAPVGRKGVEELLRVVADPADKRIPEIARACLAALGTQLHRLKEQLLEFDRMIMVWHRSDETSMRLDEAPGIGPMLATAVVATVADPKAFRSGRNFSAWVGLVPRQHSSGGKDRLGHISKQGDRYLRGLFVAGALAVIRYAKIYGTKHRPWLTALLARRPTKVAAIALANKIARMVWAMMVKGERYKEPVALAA

SEQ ID NO: 13198 - protein, 343 aa, unidentified
  source 1..343: note = protein_eaf760b
  REGION 6..149: note = RuvC_domain
  SITE 9: note = RuvC_P1
  SITE 54: note = RuvC_P2
  SITE 89: note = RuvC_P3
  SITE 91: note = RuvC_P4
  SITE 94: note = RuvC_P5
  REGION 213..299: note = Tnp_domain
  SITE 221: note = Tnp_P1
  SITE 251: note = Tnp_P2
  SITE 259: note = Tnp_P3
  SITE 260: note = Tnp_P4
  SITE 272: note = Tnp_P5
MDMIRVGIDLAKNVFQVHGIDRSEKAVWRRKLSRSEWLEVLQQTVPLHAEIGMEACGSAHHWARRLQALGYTVKLIAPQFVKPYVKSNKNDANDAEAICEAMSRPAMRFVAVKTIEQQDVQAVHRVRSGLMEQRNAKANQIRGLTSEYGVVAPREIAQLRRAVPVWLEDINCGLSDRFRRLLVGLWEDLRSLDDRIHELDREIMEIAASDPVARRLQQLRGVGPMVATALIATVGNAKQFANGRQMAASLGLTPKQNSSGGKERLLGISKRGDAYVRCLLIHGARAMIQMARRRTDALSVWVMCIAGKRHPNVAAVALANKTARIAWAMITRGTDYQPEPSAC

SEQ ID NO: 13199 - protein, 342 aa, unidentified
  source 1..342: note = protein_2ce7409
  REGION 7..149: note = RuvC_domain
  SITE 10: note = RuvC_P1
  SITE 53: note = RuvC_P2
  SITE 88: note = RuvC_P3
  SITE 90: note = RuvC_P4
  SITE 93: note = RuvC_P5
  REGION 212..297: note = Tnp_domain
  SITE 219: note = Tnp_P1
  SITE 249: note = Tnp_P2
  SITE 257: note = Tnp_P3
  SITE 258: note = Tnp_P4
  SITE 270: note = Tnp_P5
MNDVTIIGIDLAKRVFHAHGAFADGSVAFRKKLSRPQVLPFLAQQHRCIVAMEACATAHEWGRAIQELGHDVRLISPAYVKPFVKRQKNDTADAEAIAEAAARPTMRFVVVKTEEQQARSMVFRTRDLLVRQRTQLINALRGHLAEHGIIAPHGPAHVKVLAAAISDASRSLPELVRDIGAIYLDQIALLDGKIAELEKVLRREAQSGTETCRLQTMPGIGPITAMAIEAFAPPMTIFKRGRGFAAWLGLVPVQHSTGGKQRLGRTSKMGQRDIRRLLIIGAMAVIRWASRRGARAGSWLQRMIERKPLMLVALALANKMARAIWAMLTKQEDYRDPGAATV

SEQ ID NO: 13200 - protein, 281 aa, unidentified
  source 1..281: note = protein_0243f85
  REGION 6..148: note = RuvC_domain
  SITE 9: note = RuvC_P1
  SITE 52: note = RuvC_P2
  SITE 87: note = RuvC_P3
  SITE 89: note = RuvC_P4
  SITE 92: note = RuvC_P5
  REGION 211..273: note = Tnp_domain
  SITE 219: note = Tnp_P1
  SITE 249: note = Tnp_P2
  SITE 257: note = Tnp_P3
  SITE 258: note = Tnp_P4
MEITTIGLDLAKNVYQVHAINGSGEVAVRKALRRAQVLRFFERLAPCLVGIEACGTSHHWAREIRRLGHEVRLMPPAYVKPYVKRGKTDASDSEAICEAVSRPTMRYVAIKSCEQQAALTVHRTRDLFVKQRTQLVNMIRGLLAEFGIEIRRGITHALSLAERIVAGEMLGIPALAAKMIASLAGQILDLQARLREIERELLAWHRSSDIARRLATIPGVGTICATAFAASVTDPHQFRSGRQFAAWPGLTPLQHSSGGKERLGGSRRWATNICAGCWSSA

SEQ ID NO: 13201 - protein, 254 aa, unidentified
  source 1..254: note = protein_df10517
  REGION 17..151: note = RuvC_domain
  SITE 20: note = RuvC_P1
  SITE 63: note = RuvC_P2
  SITE 98: note = RuvC_P3
  SITE 100: note = RuvC_P4
  SITE 103: note = RuvC_P5
  REGION 134..209: note = Tnp_domain
  SITE 160: note = Tnp_P2
  SITE 168: note = Tnp_P3
  SITE 169: note = Tnp_P4
  SITE 181: note = Tnp_P5
MNHLNEEGESEMNPTTIGLDIAKNVFQAHGVDRNGKVVLRKRLSRGKVLEFCVNLPPCLIGLEACPGAHYWARELLKLGHAVKLMPAQYVKAYLKGNKNDGNDAEAICEAVSRPGMRFVAMNTEAQQDIQMLHRIRSRLVAAVNDGKQFQNGRRMAANLGLTPREHSSGGKQRLLGISKRGNTYLRTLLIHGARTVLRHATGKTDRLSRWAVAIQARRGANVAAVALANKLARIAWAVLARDRSYRADGAEQSV

SEQ ID NO: 13202 - protein, 346 aa, unidentified
  source 1..346: note = protein_c864b13
  REGION 7..147: note = RuvC_domain
  SITE 10: note = RuvC_P1
  SITE 53: note = RuvC_P2
  SITE 88: note = RuvC_P3
  SITE 90: note = RuvC_P4
  SITE 93: note = RuvC_P5
  REGION 210..296: note = Tnp_domain
  SITE 218: note = Tnp_P1
  SITE 248: note = Tnp_P2
  SITE 256: note = Tnp_P3
  SITE 257: note = Tnp_P4
  SITE 269: note = Tnp_P5
MEQIIRIGMDTSKHFFQLHGVDAAEKPVLRKKLRRKEMLAFFAKLPPTPIGIEACGAAHYLARELGKLGHVVKLLAPQHVKPYVKRNKNDGRDAEALCEAMSRPTMEFVPVKTAEQQAALMLMGLRQQLIARRTQLSNAIRGYAAEFGLISPRGLDKIEPLLLRIAQDDTVPTLARELFALQGQDYARLQNELKVIDAKLLAWHRADACSRRLAQIPGVGPIGASALVMKTPVPQTFASARAFAAWLGLTPKDHSTAGKLRLGTITRAGDELLRSLLVAGATAVIQQVRRGRGRASPWLLALLARKPPKLAAVALANKIARIAWKLMLTGENYDGARMLNASPHAA

SEQ ID NO: 13203 - protein, 307 aa, unidentified
  source 1..307: note = protein_43f855c
  REGION 4..149: note = RuvC_domain
  SITE 7: note = RuvC_P1
  SITE 50: note = RuvC_P2
  SITE 90: note = RuvC_P3
  SITE 92: note = RuvC_P4
  SITE 95: note = RuvC_P5
  REGION 182..266: note = Tnp_domain
  SITE 190: note = Tnp_P1
  SITE 219: note = Tnp_P2
  SITE 227: note = Tnp_P3
  SITE 228: note = Tnp_P4
  SITE 239: note = Tnp_P5
MNGIGIDVCKAMLDVAVHHGACMRFHNTPAGCRKLVAWLTTQQAGQIVLEASGGYEQRVLDALFDAGHRVVRADARRCHAFAAATGLPAKTDRLDAINLACMAEKLELRPYQPMEPWRRRLREFVRARQQLVELTTSAHNQLEQVTDTRLRRVLQANIAQMKKTCVRLEQQIAEQVRQQPQLEAMRSFKGVGATLQAVIASYLPELGTFEGKAIAKLVGVAPIAHDSGQMRGLRRIRGGRIEVRNVLYMACLSAIQHEPRIREFYRSLRARGKPGKVAVVAAMRKMLVILNARARDAQAADVQTVPT

SEQ ID NO: 13204 - protein, 337 aa, unidentified
  source 1..337: note = protein_7ed910d
  REGION 6..148: note = RuvC_domain
  SITE 9: note = RuvC_P1
  SITE 52: note = RuvC_P2
  SITE 87: note = RuvC_P3
  SITE 89: note = RuvC_P4
  SITE 92: note = RuvC_P5
  REGION 208..294: note = Tnp_domain
  SITE 216: note = Tnp_P1
  SITE 246: note = Tnp_P2
  SITE 254: note = Tnp_P3
  SITE 255: note = Tnp_P4
  SITE 267: note = Tnp_P5
MQIRIVGLDIAKHVFQVHAADAEGRAVAQVRLRRAQLVEYFQKLPPCLVGMEACATAHHWARELIALGHEVRLMPPTYVKPYVKRNKTDAADAEAIAEAVTRPTMRFVAVKSADQQAALMLHRARELLVRQRTMLATGLRAHLAEFGIIAPQGIHRVEKLAAEVHNPAVPPLAREVLMLLVAELASVWRRVETIEARLIALHRTNDVSRRLASIPGVGPITAMAIANTVPDPAMFKSGREFAAWLGLTPKSHSSGGKDKLGRISKRGDRYIRHLLYVGAGNAVRFAKARAATGQAWIEGLQQRRPPKVVIIAVANKMARIAWALMMRGGTFQSPATA

SEQ ID NO: 13205 - protein, 310 aa, unidentified
  source 1..310: note = protein_51f269d
  REGION 8..162: note = RuvC_domain
  SITE 11: note = RuvC_P1
  SITE 51: note = RuvC_P2
  SITE 91: note = RuvC_P3
  SITE 93: note = RuvC_P4
  SITE 96: note = RuvC_P5
  REGION 186..270: note = Tnp_domain
  SITE 194: note = Tnp_P1
  SITE 223: note = Tnp_P2
  SITE 231: note = Tnp_P3
  SITE 232: note = Tnp_P4
  SITE 244: note = Tnp_P5
MQVARSIVGIDVAKAELVIHFQGRTLTIENTPQAIKRWLKSLPCSCEIAIEATGTYHMAVIELAHAKGHHIYVIDASRLSSYRKGTGGRAKTDASDAQLLARHLQREKEDLRRWSPPPKAYRTLQTLLRRRAALIKARTMIQQSLSGEKVLKANLTKLISQINSLDTLIQKHLRNTVREAGLCDQVKRCKGLEGVGDLTAYALVMAFLRGDFRNSDAFVAFLGMDVHVKDSGTRTGKRKLTKKGDSETRRLLYCAAMAACKSARWMGVYQGYLDRGLAKTQALVILARKLVRIAFALMKNRSDYVSSPAS

SEQ ID NO: 13206 - protein, 357 aa, unidentified
  source 1..357: note = protein_ef5d2ed
  REGION 6..115: note = RuvC_domain
  SITE 9: note = RuvC_P1
  SITE 51: note = RuvC_P2
  SITE 86: note = RuvC_P3
  SITE 88: note = RuvC_P4
  SITE 91: note = RuvC_P5
  REGION 227..313: note = Tnp_domain
  SITE 235: note = Tnp_P1
  SITE 265: note = Tnp_P2
  SITE 273: note = Tnp_P3
  SITE 274: note = Tnp_P4
  SITE 286: note = Tnp_P5
MNIATIGLDLAKSVFQAHGVDEAGKTVLVKKLHRKQMLPFFSKLPCLIGVEACATAHHWARTLIAMGHDVRIIPPSYVKGYVKRGKSDALDTEAISEAVARPSSRWSAPADGTIWGIVPRRRTRFVPVKTVEQQSILMAHRTRSLLVRQRTMSANALRAHLAENGLVANPGIANLVKLADRAFADEALPAYAHRALEILIRRIAELTEEIGTLDQDLKAWHAGNEASRRLAAIPGVGVITATALAATVTDPDQFRSGRQFAAWLGLTPQQHSTGGKTRLGGISKQGDRYLRRLLVVGATAVMRHAKRNPTPMTDWVNGLLEKKPFRIVSAALANKLARIAWVLLTRGETYRPYGRPV

SEQ ID NO: 13207 - protein, 344 aa, unidentified
  source 1..344: note = protein_e64c3da
  REGION 7..149: note = RuvC_domain
  SITE 10: note = RuvC_P1
  SITE 53: note = RuvC_P2
  SITE 88: note = RuvC_P3
  SITE 90: note = RuvC_P4
  SITE 93: note = RuvC_P5
  REGION 211..297: note = Tnp_domain
  SITE 219: note = Tnp_P1
  SITE 249: note = Tnp_P2
  SITE 257: note = Tnp_P3
  SITE 258: note = Tnp_P4
  SITE 270: note = Tnp_P5
MSTIKVLGIDLGKSCFHIIGRDFSDNQVIRKKLSRSALLNYLHQLTPCIIAFEACGGAHWLGRQCKSMGHTVRLIPPQYVKPFVKSNKNDFIDAEAICEASTRPNMRFVSVKSEEAQVISAIHKARHGYIKDRTACMSRIGALLLEFGVALPTGHSVMKQLFNWLAQQKQSIPGLLVQELTELHEYYLLLNENIDRQDKKLKQLVETNPIGELLKTIPGIGDMTASLCIANISSATDFKSGRNMAAWLGLVPAQYSTGGNPKLLGISKRGNKELRTLFIHAARAVMSRPDKTGKIYGEWLINLRATKPFNVVTVALANKLARIAWAVMKTKQAFNSNALAPSLQ

SEQ ID NO: 13208 - protein, 406 aa, unidentified
  source 1..406: note = protein_cd725fd
  REGION 5..161: note = RuvC_domain
  SITE 8: note = RuvC_P1
  SITE 58: note = RuvC_P2
  SITE 98: note = RuvC_P3
  SITE 100: note = RuvC_P4
  SITE 103: note = RuvC_P5
  REGION 270..356: note = Tnp_domain
  SITE 278: note = Tnp_P1
  SITE 309: note = Tnp_P2
  SITE 317: note = Tnp_P3
  SITE 318: note = Tnp_P4
MTLFIGDDWAEDHHDIHLMDAEGTRLASRRLPEGLAGIRGFHELVAAHAQDPTEVVIGIETDRGLWVEALAAAGYEVFAVNPLAVARYRDRHQVSGAKSDAADAKLLADLVRTDRHNHRPIAGDTPEVEAIKVLARAHQNLIWSRNRNTNALRSALREYYPAALEAFASLSDRDALAILGRAPTPTDAARLSVSKIRSALKAAGRQRNLDAKALEIQTALRSDQLAAAPAVTAAFGATTRAAVAIITELNHHIADLEAELAAHFETHPDADIYLSLPGLGVILGARVLGEFGDDPNRYTTAKSRKNYAGTSPLTIASGKKRAVLARHVRNRRLYDAIDQWAFCALTNSPGARTFYDQHRAAGDLHHQALRALGNRLVGILHGCLRHHTPYSEHKAWAHRQTDTRAA

SEQ ID NO: 13209 - protein, 347 aa, unidentified
  source 1..347: note = protein_76a2c81
  REGION 6..147: note = RuvC_domain
  SITE 9: note = RuvC_P1
  SITE 52: note = RuvC_P2
  SITE 87: note = RuvC_P3
  SITE 89: note = RuvC_P4
  SITE 92: note = RuvC_P5
  REGION 211..297: note = Tnp_domain
  SITE 219: note = Tnp_P1
  SITE 249: note = Tnp_P2
  SITE 257: note = Tnp_P3
  SITE 258: note = Tnp_P4
  SITE 270: note = Tnp_P5
MNITQVGIDLAKVVFQVHGIDARGKVGLRKQLRRSQVIAFFAQLPSCLIGMEACAGAHFWARKLTELGHTVKLIAPQFVKPYVKSNKNDAADAEAICEAVGRPNMRFVPIKNTAQQALLGLHRARQGFVIARTAQANQIRGLLAELGLVMPVGIRSIGRKLPEILEDAENGLSGMSRALFARLFEHFRALDRQVDELEREINAWHREDTASQRLQTIPGIGPLTASALVASVGDAKVFKNGRQFAAWLGLVPRQNSSGGKTNLLSISKRGDTYLRTLLIHGARSVLLHLKRRPDLVEGWLARVAARRNSNIAAVALANKNARTVWALLAHGREYQTGYRSANAIAAA

SEQ ID NO: 13210 - protein, 297 aa, unidentified
  source 1..297: note = protein_3238276
  REGION 2..106: note = RuvC_domain
  SITE 45: note = RuvC_P3
  SITE 47: note = RuvC_P4
  SITE 50: note = RuvC_P5
  REGION 166..253: note = Tnp_domain
  SITE 174: note = Tnp_P1
  SITE 204: note = Tnp_P2
  SITE 212: note = Tnp_P3
  SITE 213: note = Tnp_P4
  SITE 225: note = Tnp_P5
MFQVCTVVMEACAGAHYMARKLGGFGHNIKLISPQFVRPFVKTNKNDFVDAEAICEAASRPSMRFVSPKTEAQQALSALHRVRESFIRDRTKTINQIHGLLLEFGISLPVGRTAITRLPAASADHSLPRQFVTIIEGLHAHFKYLETQITDIEKEIARQLAADDLGQRLLSIPGVGPVTASVLASEMGDGKQYACSRDFAASVGLVPRQFSTGGRSNLLGISKRGDRNLRRLLVQCARAYMLRLEKRTGPLAEWVRAMLTRRHTNVVACALANKLARTAWALATRHTTFDDGAAKAA

SEQ ID NO: 13211 - protein, 344 aa, unidentified
  source 1..344: note = protein_c262bcc
  REGION 6..149: note = RuvC_domain
  SITE 9: note = RuvC_P1
  SITE 53: note = RuvC_P2
  SITE 88: note = RuvC_P3
  SITE 90: note = RuvC_P4
  SITE 93: note = RuvC_P5
  REGION 212..299: note = Tnp_domain
  SITE 220: note = Tnp_P1
  SITE 250: note = Tnp_P2
  SITE 258: note = Tnp_P3
  SITE 259: note = Tnp_P4
  SITE 271: note = Tnp_P5
MSIKVVGIDLAKTLFQVCVLSTDGKIVSNRKVKRDKLLDTIRQLPDKTALAMESCATSHHWGRAFQQLGFSVTLIPAQHVKPFVGRQKNDANDARAICEAFSRPDIHFVPVKSVEQQDLKALRSVRKRLVEQRTALANQIRGLVAEYGIIFPQSIKVLRSQLPLAIEDAENELSYVMRGLLQTLYSEFIDISGKIDEFTQKITALGQLHPRYSAIKSIPGFGPILTAALISEIGSGKQFKNGRQFSAWCGLVPKQNSTGGKSSLGAISKNGNRDLRTLFIHGARAVVRCGTDKENAMGYWLRGLIARRGKAKTIVALANKLGRIAWHVLAKNTEYDINQAFNPV

SEQ ID NO: 13212 - protein, 315 aa, unidentified
  source 1..315: note = protein_1403abf
  REGION 9..154: note = RuvC_domain
  SITE 12: note = RuvC_P1
  SITE 56: note = RuvC_P2
  SITE 96: note = RuvC_P3
  SITE 98: note = RuvC_P4
  SITE 101: note = RuvC_P5
  REGION 192..276: note = Tnp_domain
  SITE 200: note = Tnp_P1
  SITE 229: note = Tnp_P2
  SITE 237: note = Tnp_P3
  SITE 238: note = Tnp_P4
  SITE 249: note = Tnp_P5
MTATIALTLGIDISKDRLDVHLLPEGTEGQYANDANGLRELIRWLAPLAPARIVYEATGAYHRLLERTLGAKGLPLVKMNPQRTRAFAKAAGRLSKTDRIDAAMLAHFGALMAPQIRPIRSDALDALCELVAARRALIKDRTATLNRQKSLTIPLLKRQAEQRLKQIAAQITAIDTECRTHITSEPGLRRRFDILTSIPGLGEASAFAIVADMPELGALENKQAASLAGLAPVDRQSGQWKGKSFIQGGRQMLRQALYMPALVAIRFNQPLKAKYESLRAGGKPAKVAITAIMRKLVVLANVLIRDDRKWAPDIP

SEQ ID NO: 13213 - protein, 340 aa, unidentified
  source 1..340: note = protein_133bb8f
  REGION 78..155: note = RuvC_domain
  SITE 94: note = RuvC_P3
  SITE 96: note = RuvC_P4
  SITE 99: note = RuvC_P5
  REGION 217..297: note = Tnp_domain
  SITE 225: note = Tnp_P1
  SITE 255: note = Tnp_P2
  SITE 263: note = Tnp_P3
  SITE 264: note = Tnp_P4
MVVVRATEGAPSTGKSITDLSSVTTVGLDLAKHVFQVRGVDASGRVVVAKAIRRTSCREAGGSAHHWARELITLGDEARMMPPAYVKPYIRRQKNDASDAAAICEAVTRPSMRFVGVRSRENQAALMRHKAREMLVTQRRQLLNGLRGHLTEVGVIAPKGLRSARELAELIEACDETIPFEVCEALAPLLVQLRNLDEAIARLDRILAKLAQKDETARRLMSIPGFGPITASAMAATIQDTSSFAGPREFAAFLGLTPKQNSSGGKPKLGRNRYLRKLLVVGAHAVLFHRKPHTDPLRMWAKKLIEKKPFKLVAVALANKMARIAFALLRGKTVYREVPA

SEQ ID NO: 13214 - protein, 340 aa, unidentified
  source 1..340: note = protein_065de92
  REGION 6..146: note = RuvC_domain
  SITE 9: note = RuvC_P1
  SITE 52: note = RuvC_P2
  SITE 87: note = RuvC_P3
  SITE 89: note = RuvC_P4
  SITE 92: note = RuvC_P5
  REGION 211..298: note = Tnp_domain
  SITE 219: note = Tnp_P1
  SITE 249: note = Tnp_P2
  SITE 257: note = Tnp_P3
  SITE 258: note = Tnp_P4
  SITE 270: note = Tnp_P5
MSIVFLGIDLAKNIFQLCGLNQAGKPVYTKRTGRKELLRTVANIPACLIGVEASTGAFYWQREFEKLGHKVKVISPQYVKPFVRGQKNDGNDAQAIAVALMQPTMQFVPPKSPEQQDIQALHRARQRIVNHRTATVCQIRGLLLDRGITIGAAVSRVRRAVPLILEDAENGLSVRMRRTIAELYDLFNDLGRRINFFDKEIDVVFRQSEACQRIAKVKGIGPKTATAVVAAIGRGTEFKNGRHFAAWLGLVPRQHSSGDKQVLMNMTKKGDKHLRTLFIHGARAIVRVATNNNDGCLHQWVNQLKERRGFNKTTVAVANKNARIIWSMLRNDTEYQAVGS

SEQ ID NO: 13215 - protein, 328 aa, unidentified
  source 1..328: note = protein_e6295c9
  REGION 6..146: note = RuvC_domain
  SITE 9: note = RuvC_P1
  SITE 52: note = RuvC_P2
  SITE 87: note = RuvC_P3
  SITE 89: note = RuvC_P4
  SITE 92: note = RuvC_P5
  REGION 211..282: note = Tnp_domain
  SITE 219: note = Tnp_P1
  SITE 249: note = Tnp_P2
  SITE 257: note = Tnp_P3
  SITE 258: note = Tnp_P4
  SITE 270: note = Tnp_P5
MSIVFLGIDLAKNIFQLCGLNQAGKPVYTKRTGRKELLQTVANIPACLIGVEASTGAFYWQREFEKLGHKVKVISPQYVKPFVRGQKNDGNDAQAIAVALMQPTMQFVPPKSPEQQDIQALHRARQRIVNHRTATVCQIRGLLLDRGITIGAAVSRVRRAVPLILEDAENGLSVRMRRTIAELYDLFNDLGRRINFFDKEIDVVFRQSEACQRIAKVKGIGPKTATAVVAAIGRGTEFKNGRHFAAWLGLVPRQHSSGDKHLRTLFIHGARAVVRVATNNNDGCLYQWVNQLKERRGFNKTTVAVANKNARIIWSMLRNDTEYQSVGS

SEQ ID NO: 13216 - protein, 347 aa, unidentified
  source 1..347: note = protein_5d8a99a
  REGION 13..164: note = RuvC_domain
  SITE 16: note = RuvC_P1
  SITE 65: note = RuvC_P2
  SITE 106: note = RuvC_P3
  SITE 108: note = RuvC_P4
  SITE 111: note = RuvC_P5
  REGION 207..294: note = Tnp_domain
  SITE 215: note = Tnp_P1
  SITE 245: note = Tnp_P2
  SITE 253: note = Tnp_P3
  SITE 254: note = Tnp_P4
  SITE 267: note = Tnp_P5
MEKASQAEVQVFAGIDVSARELSVAVQCGIKEGIAITTFPNKAAGHKALLAYLLRAKGRARVCLEASGNYSLDLALTLQAHPQVEISVVNPRRARRFAESLGERSKTDPVDARVLCEYALRMPWVPWVPPSLAALRLRSITRAIEDLVAMQAQEKNRQHALLASDALPALLIRELEQHLRYLKLRITRLRREALRLIARNPELNRRFHLMLTTPGLGETSSLQILGELVVLPETLDARQWVAFSGLDPKQFSSGTSVEKKPRISRGGNRHLRRALYMPALVATRHEPFLRDFYQRLLRRGKAPLQGVVAVMRKLLHALFAMFRRDEAYDGSKLCPAEFARHTAVVCV

SEQ ID NO: 13217 - protein, 329 aa, unidentified
  source 1..329: note = protein_ae30d1b
  REGION 4..161: note = RuvC_domain
  SITE 7: note = RuvC_P1
  SITE 60: note = RuvC_P2
  SITE 100: note = RuvC_P3
  SITE 102: note = RuvC_P4
  SITE 105: note = RuvC_P5
  REGION 200..286: note = Tnp_domain
  SITE 208: note = Tnp_P1
  SITE 237: note = Tnp_P2
  SITE 245: note = Tnp_P3
  SITE 246: note = Tnp_P4
  SITE 259: note = Tnp_P5
MYYVGIDISKRFIDVCLLVDGIKGKRKTKVLPNDPNSAQALAQWLILQKCDPSQAHIIMEATGVYHEHLAYGLHVAGILVSVANPHRVREFAKGMGILTKTDRVDAYVLASYGCLKQPDSWVPPSQEIKKLRALLQHRDSLLNDKQRVENRLGTLKSTTPPEEVVTSLESMVQHLKDELEHIEHLIKVHIEKHLGLKKDLALLKSIDGVGEQIGWNMLAIIRGNHFRSAEQVAAYLGVIPVERRSGTSVHGRASLSKIGPPGIRAKLYMGAIAAISHNRHVKAQYTRLLLKGKVKMLAIGAAMRKLVHLCYGVLHTQQPYDKNYGVVTD

SEQ ID NO: 13218 - protein, 344 aa, unidentified
  source 1..344: note = protein_fe45d10
  REGION 19..167: note = RuvC_domain
  SITE 22: note = RuvC_P1
  SITE 69: note = RuvC_P2
  SITE 109: note = RuvC_P3
  SITE 111: note = RuvC_P4
  SITE 114: note = RuvC_P5
  REGION 211..297: note = Tnp_domain
  SITE 218: note = Tnp_P1
  SITE 248: note = Tnp_P2
  SITE 256: note = Tnp_P3
  SITE 257: note = Tnp_P4
  SITE 270: note = Tnp_P5
MADQQINSASLDTQTRIFAGVDVGSKELVLVVRKNGKPFNPQKFSNTPADHARMAKKLNKLSGIIVCMEATGSYHFDLAVALHDAGVKVMVINPKVSHNFAKVLMNNSKTDDVDTNTLAVYAERMDFVPWSRPSNEKIALRCFSRRINALTDQKTAAKNQLHALSATVETPKAVLKDAQAAIDQLDKRIDQLTAGALALIEKHPELSRALVLFTTIKGIANTSAIALMGELLILPADMSHREWVKFAGLDPRAFDSGTSVHKKTRISKAGNSQIRAALYMPVWSAVQHDRHIKAYYQHLLDMGKLPLQACCAVMRKLLHAIHGMLKHDKPFDNTRFYAIPSIAE

SEQ ID NO: 13219 - protein, 412 aa, unidentified
  source 1..412: note = protein_744b582
  REGION 4..170: note = RuvC_domain
  SITE 7: note = RuvC_P1
  SITE 69: note = RuvC_P2
  SITE 107: note = RuvC_P3
  SITE 109: note = RuvC_P4
  SITE 112: note = RuvC_P5
  REGION 278..364: note = Tnp_domain
  SITE 286: note = Tnp_P1
  SITE 317: note = Tnp_P2
  SITE 325: note = Tnp_P3
  SITE 326: note = Tnp_P4
MLFVGDDWAEDHHDVEIVDEDGRRLARRRLPEGLAGISQLHAMIAGHMPEEWADLPPGEAAGRVKIGIETERGPWVAALVAAGYEVFPVNPMSVARYRERHSTSGAKSDAAEAHLLAEMVRLDRAHHRPVAGDSPQAEAIKLAARAHQSLIWDRSRHVLRLRAALREFFPAALQVFADLDAPDALELLGRAPDPDRAAALSRAKIAAALARANRRGAAAKAQQIQGILRAPQLRQPPAVQDAYATIVSGQIRLITALNAQIAELGEVVAAHFGRHRDADIYASQPGLGVILSARVLAEFGDDPHRFADAKARKNYAGTSPITRASGTRKIVLARYARNRRLADALHQWAFCSMRGSPGARAYYQALRARGIGHQAALRQLGNRLVGILHGCLKTQTPYDETTAWAHHTPAAA

SEQ ID NO: 13220 - protein, 333 aa, unidentified
  source 1..333: note = protein_be4a55b
  REGION 25..171: note = RuvC_domain
  SITE 28: note = RuvC_P1
  SITE 72: note = RuvC_P2
  SITE 112: note = RuvC_P3
  SITE 114: note = RuvC_P4
  SITE 117: note = RuvC_P5
  REGION 207..292: note = Tnp_domain
  SITE 215: note = Tnp_P1
  SITE 244: note = Tnp_P2
  SITE 252: note = Tnp_P3
  SITE 253: note = Tnp_P4
  SITE 264: note = Tnp_P5
MVEGTEGSHHKEGTTKMSKHSMVCAGIDTGKHKLDVALDGHPEQMQVDNTPDGHRVLSTWLRKHRAQRIGIEASGGYEQAVVATLRRNGFVVIVFQPAQVRAYAKFHLQRAKNDKIDAALIALCSAATKTVHAPPDPRLVPFAASLTMIEQITEDIARLKTRRESCRDQRLRRFWNEEIGRLKSLMRGELKQLIAAIRQHPDFAEQLDLIASVEGIGHRTAVAILVRMPEIGSLTREEAAALAGLAPYDDDSGKRLGERHIAGGRERLRTSLYAASLPAAFNWNPQIIALYRRLTAAGKSHKAALVACARKLLIFANTVVARGTPWVSKTATS

SEQ ID NO: 13221 - protein, 310 aa, unidentified
  source 1..310: note = protein_b1988eb
  REGION 5..150: note = RuvC_domain
  SITE 51: note = RuvC_P2
  SITE 91: note = RuvC_P3
  SITE 93: note = RuvC_P4
  SITE 96: note = RuvC_P5
  REGION 187..271: note = Tnp_domain
  SITE 195: note = Tnp_P1
  SITE 224: note = Tnp_P2
  SITE 232: note = Tnp_P3
  SITE 233: note = Tnp_P4
  SITE 244: note = Tnp_P5
MRIICGVDASKAWLDAGIAPDRYQRFANAPEGIAALADFCRAHGAAMVVMEASGGVEQEAFLALWRQGLPCAIVNPAAVRHFAKAMGYLEKTDRIDAAMIAGFAEAKRIEPTPPPSQDQRKLTALATRMRQVSADLGVQKQRLASTRDEAARDSLREAIAFFTRQARILAAEIAALVQTDPLWRELDRTLRSVKGVADRTVAVLLADLPEIGTLSNKAIAKITGLAPIANDSGKRQGKRPVRGGRASVRSILYLVADLARKFDQSLADFRQRLLDQGKPKMVVRVALAHKLLVRLNAKARDARANLASAV

SEQ ID NO: 13222 - protein, 350 aa, unidentified
  source 1..350: note = protein_48d8946
  REGION 4..156: note = RuvC_domain
  SITE 7: note = RuvC_P1
  SITE 57: note = RuvC_P2
  SITE 97: note = RuvC_P3
  SITE 99: note = RuvC_P4
  SITE 102: note = RuvC_P5
  REGION 220..306: note = Tnp_domain
  SITE 228: note = Tnp_P1
  SITE 258: note = Tnp_P2
  SITE 266: note = Tnp_P3
  SITE 267: note = Tnp_P4
  SITE 279: note = Tnp_P5
MVVVGADVHKRTHTFVAVDEVGRKLGEKTVKALTGGHTEAVMWAREHFGTDVIWAIEDCRHLSARLERDLFALGQKVVRVPPKLMAQTRASARTRGKSDPIDALAVARGFLREPDLPVAAHDEVSRELKLLVDRREDLVAQRTATINRLLWRVHELDPAHAPKARSLNLAKHRRLLGDWLHTQTGIVAELARDELADISRLTETIDGLAKRIGARVRQVAPVLLAMPGCGELTAAKLVGETAGVTRFKSEAAFARHAGVAPVPVWSGNTRGRVRMTRSGNRQLNTALHRIAVTQIRLQGLGQTYYRHRITNGDSTPEALRCLKRRLARVVYGHLHTDHNNRQKPCQAAAA

SEQ ID NO: 13223 - protein, 401 aa, unidentified
  source 1..401: note = protein_a18cc87
  REGION 4..156: note = RuvC_domain
  SITE 7: note = RuvC_P1
  SITE 56: note = RuvC_P2
  SITE 93: note = RuvC_P3
  SITE 95: note = RuvC_P4
  SITE 98: note = RuvC_P5
  REGION 264..350: note = Tnp_domain
  SITE 272: note = Tnp_P1
  SITE 303: note = Tnp_P2
  SITE 311: note = Tnp_P3
  SITE 312: note = Tnp_P4
MWYAGLDWADSHHDVVVIDDAGRQVASRRVAHSAEGLAELTAFLRQIAPLDQIACIVETNQGLLISTLLEAGCTLYPVNPKTIDRRRNASGAKTDLIDAYLLAKTGRSDLPDLRKLTPDSASIQELKALTRDQESLVQSQTRVVNQLTACLKAYYPVALQLFSKLQQRSTLLFLQTYPTLEGARQASVEEITRVLKEAGHPTASKVAPKICSVLHQPQLHADGITTRTKSRLMLALVAQLLPLIEQIAAYDKEITDLFLTHEDNEVFSSLPGAGKRLAPRMLAEWGDDRTRYTASTSVQALAGTAPVAFQSGNYAKAHKRYACLKPMRNVLHQFAWQSTRQEAWALAYYKRKRGEGKSHSMAVRALANVWVRIIYAMWHERKSYETTTFEQAQHRHASRAA

SEQ ID NO: 13224 - protein, 286 aa, unidentified
  source 1..286: note = protein_658856b
  REGION 17..144: note = RuvC_domain
  SITE 49: note = RuvC_P2
  SITE 84: note = RuvC_P3
  SITE 86: note = RuvC_P4
  SITE 89: note = RuvC_P5
  REGION 205..267: note = Tnp_domain
  SITE 213: note = Tnp_P1
  SITE 243: note = Tnp_P2
  SITE 251: note = Tnp_P3
  SITE 252: note = Tnp_P4
MRLLVSIWVKTLSTSIVRIATEKRFSVKNSPGQEFEYLATCQATTVVMEACGGAHFMVRKLLELGHTPKLISPQFVRPFVKSNKNDFVDAEAICEAAARPSMRFVQPRTESQQAMHALHRVRESLVRDKVKTTNQMHAFLLEFGVSAPKGPTLMRRFAEILDTNPLPPYLIRLLQKLREHYEYLIEQIKELESQLKRSLDEDTTGRQLLTIPCVGPLIASLLSTQLGDGKQYESSRDFAASTGLVPRQHSTGGRTTLLGISNISANTGVSSRPTCRLGQGAVTTQK

SEQ ID NO: 13225 - protein, 321 aa, unidentified
  source 1..321: note = protein_0cbcae3
  REGION 10..153: note = RuvC_domain
  SITE 13: note = RuvC_P1
  SITE 56: note = RuvC_P2
  SITE 96: note = RuvC_P3
  SITE 98: note = RuvC_P4
  SITE 101: note = RuvC_P5
  REGION 191..278: note = Tnp_domain
  SITE 199: note = Tnp_P1
  SITE 228: note = Tnp_P2
  SITE 236: note = Tnp_P3
  SITE 237: note = Tnp_P4
  SITE 249: note = Tnp_P5
MTSQPAPIYIGIDVSKASLDIALGEHGPVQRIDNTPLAIRAWLRTLPSGPLHIGCEATGTYHLALRDAVIKAGHPLYLIDGYRLSRYRGATSVRAKTDPIDARLIARYVAKEGTHLRPYTLPPEATQRVQQLLRRRATLVRTAVILRQSLSDLPGFKREVRALLARADRLAQQIQAQIVEKLKASDWIDDHRRCQGIEGVGPLTAAALCATFHRGAFTRADAFIAYLGLDVCVRQSGNQHARGTLSKKGDPELRRLLHNAAMAASPSDTWKPTYQAFIARGFSRTQALVALARKIARVAFSLMKTGTQYQPGGLKNTCAQT

SEQ ID NO: 13226 - protein, 396 aa, unidentified
  source 1..396: note = protein_bbdddfb
  REGION 6..160: note = RuvC_domain
  SITE 9: note = RuvC_P1
  SITE 58: note = RuvC_P2
  SITE 98: note = RuvC_P3
  SITE 100: note = RuvC_P4
  SITE 103: note = RuvC_P5
  REGION 265..352: note = Tnp_domain
  SITE 273: note = Tnp_P1
  SITE 304: note = Tnp_P2
  SITE 312: note = Tnp_P3
  SITE 313: note = Tnp_P4
  SITE 325: note = Tnp_P5
MPDIWAGVDIGKEHHHCVVIDAQGKRLLSRRVLNDESELLHLVAGVLELSRDVLWAVDINHGGAALLLGLLVSHDQHVAYLTGLAVHRASAGYRSQAKTDAKDAFVIADQARMRTDLGVLRPGDEISVDLRTLVTRRTDLVCDRTRQINRLRAQLLEIFPALERALDLTKKGPVMLLTGYQTPASIRRAGASRITTWLKNRKIYGSAALAKAVVEAAEAQITALPGEQLAAVMVARLAKGVMALDEEIAELEALIEARFREHPSAEVIQSLPGMGALLGAEFLAATGGDMDTFGTADRLAGYAGLAPVPRDSGRVSGNLHRPRRYHRGLLRAFYLSAFASLRSCPASKRFYERKRAEGKGHKQALLALARRRANVLWAMIRDGACYQATPPVTAAA

SEQ ID NO: 13227 - protein, 339 aa, unidentified
  source 1..339: note = protein_67aa0b1
  REGION 6..147: note = RuvC_domain
  SITE 9: note = RuvC_P1
  SITE 52: note = RuvC_P2
  SITE 87: note = RuvC_P3
  SITE 89: note = RuvC_P4
  SITE 92: note = RuvC_P5
  REGION 210..296: note = Tnp_domain
  SITE 218: note = Tnp_P1
  SITE 248: note = Tnp_P2
  SITE 256: note = Tnp_P3
  SITE 257: note = Tnp_P4
  SITE 269: note = Tnp_P5
MKCTPVGVDIAKHLIQVHFINEHTGEVVDKQLRSRDFLAFFSNREPCLIGMEACGGSQHWARELKKLGHEVRLMQARFVKAFVMGNKNDVMDARAIWMAVQQPGKAISVKTEEQQSVLVLHHTRRQLVKFRTAQINSLHGTLLEFGETIHKSRAALERELPAALERMKIRLPPYLISVLEDQYNRLSELDSLIDGLEKQLNSVARQNETCKRLMEISGVGPLIATAAVATMGEASAFKSGRAFAAYVGLVPKQTGSGGKVRLLGISKRGDTYLRTLFIHGARAASLRAKEPGSWITELRKRRPTSVAIVAMANKLARTVWAIAAHERKYDKNYVSVRPY

SEQ ID NO: 13228 - protein, 339 aa, unidentified
  source 1..339: note = protein_046d868
  REGION 7..153: note = RuvC_domain
  SITE 10: note = RuvC_P1
  SITE 54: note = RuvC_P2
  SITE 92: note = RuvC_P3
  SITE 94: note = RuvC_P4
  SITE 97: note = RuvC_P5
  REGION 212..298: note = Tnp_domain
  SITE 220: note = Tnp_P1
  SITE 250: note = Tnp_P2
  SITE 258: note = Tnp_P3
  SITE 259: note = Tnp_P4
  SITE 271: note = Tnp_P5
MSAIVTIGIDLAKNVFAVHGVDATGKSALVRPSVPRGKLLELIASLPPCLIGVEACSGAHHWAREFEKFGHTVRLMAPKFVIPYRLSGRRGKNDAADAAAICEAVTRPNMRFVPIKSIDQQGQLMVHRARQGFVEQRTATFNRIRGLLSELGIVLALKAAVVRREAMARLEDLPGWANTVIGDLLSEVSHLDERITQYDHHIELMARHSTEAKRLMQLSGVGPTTATALLSTIGNGHDFKCRRQLCAWLGLVPGQYSSGGKQRLGRITKAGDPYLRSLLVLGARAVLAAAKTKSDPISRWAVSLEQRRGYWKAIVAIAAKNARMCWAVLSRGEAFRLPA

SEQ ID NO: 13229 - protein, 343 aa, unidentified
  source 1..343: note = protein_68e3f2a
  REGION 7..149: note = RuvC_domain
  SITE 10: note = RuvC_P1
  SITE 53: note = RuvC_P2
  SITE 88: note = RuvC_P3
  SITE 90: note = RuvC_P4
  SITE 93: note = RuvC_P5
  REGION 212..303: note = Tnp_domain
  SITE 220: note = Tnp_P1
  SITE 250: note = Tnp_P2
  SITE 258: note = Tnp_P3
  SITE 259: note = Tnp_P4
  SITE 271: note = Tnp_P5
MEAVTTIGLDIAKSVFQVHGVDSIGNVVIRRQLRRRFVLAFFQKLPLCVVGIEACATSHHWSRELRALGHTVRLMPPAYVKPYVKRQKNDAADAEAICEAVIRPNMRFVETKTPEQQSCLMLHRTRHLFIRQQTSVINAIRAHLAEFGIVARVGRNGVEELLDVVADTDDKRVPEVARGCLVALGVQLRMLKAQILEFDRRIMAWHRSNETSKRLDEIPGVGPALATALVASVADPKAFRSARHFSAWVGLVPKQHSSGGKDRLGSISKQGDRYLRSLFTAGALAVIRYAKIHGTEHRPWLTALLARRPTKVAAIALANKIARMAWAMMAKGERYKEPAALAA

SEQ ID NO: 13230 - protein, 339 aa, unidentified
  source 1..339: note = protein_0a0255b
  REGION 5..151: note = RuvC_domain
  SITE 8: note = RuvC_P1
  SITE 54: note = RuvC_P2
  SITE 90: note = RuvC_P3
  SITE 92: note = RuvC_P4
  SITE 95: note = RuvC_P5
  REGION 211..297: note = Tnp_domain
  SITE 219: note = Tnp_P1
  SITE 249: note = Tnp_P2
  SITE 257: note = Tnp_P3
  SITE 258: note = Tnp_P4
  SITE 270: note = Tnp_P5
MQTHIGVDLHQRFCYLTAVDASGKRLKQSQVANEGAALRAWLRQLPGPRQVVVEASGFWPAFARAVAPEADKLVMVHPQRVKAIASARLKNDKVDSETLAHLSRADLLPEAWMANQRTQQTRLLTRLRITLGQQRAKAKNQLQAVLHQEGFLKPVSEVFGKKGREWLAGLALSEAGRVVVEVWLKVVDQMDAAILEQETALRKMAEADARARWLQTVPGIGAYSAMVILGEVGEIERFGTKRALASYAGLTPSVRESAGKRKRGGIGHHGSGTLRWIMLQVAQVACRHSPAARAWYLRLKQRKPAQVALIALARKLLTGVWALLRHGVCFDESIFAQRG

SEQ ID NO: 13231 - protein, 338 aa, unidentified
  source 1..338: note = protein_596d7fc
  REGION 6..147: note = RuvC_domain
  SITE 9: note = RuvC_P1
  SITE 52: note = RuvC_P2
  SITE 87: note = RuvC_P3
  SITE 89: note = RuvC_P4
  SITE 92: note = RuvC_P5
  REGION 211..303: note = Tnp_domain
  SITE 219: note = Tnp_P1
  SITE 249: note = Tnp_P2
  SITE 257: note = Tnp_P3
  SITE 258: note = Tnp_P4
  SITE 270: note = Tnp_P5
MNIVILGIDLGKTTCSVVGLDADGKVVVRRRLRRDGVVAFAAKLAPCAMAMEACCGAHHMGRALAALGHDVRLMSPEYVRPYVKAQKNDDRDAEAIAEAATRPTMRFVELKSEEQLDVQTLHRVRDRLVGERTSLTNQIRSLLLERGHTVAQGHARLRGLLCELLDADTDALNPRMAFLLRDMRTRWEELDRRIAAFDTEFAAMARTDERARRLTAIPGIGALNATALVAAVGNAATFSKGRDLAAWLGLVPRQVTTGGKPKLLGITKRGSRYLRKMLIQGARAAMPVVSRKDTATGKWLRALLARAHPNVAVVALAAKMARIVWALLHHGRSFRVVF

SEQ ID NO: 13232 - protein, 323 aa, unidentified
  source 1..323: note = protein_08c58bc
  REGION 5..154: note = RuvC_domain
  SITE 8: note = RuvC_P1
  SITE 58: note = RuvC_P2
  SITE 98: note = RuvC_P3
  SITE 100: note = RuvC_P4
  SITE 103: note = RuvC_P5
  REGION 195..281: note = Tnp_domain
  SITE 203: note = Tnp_P1
  SITE 233: note = Tnp_P2
  SITE 241: note = Tnp_P3
  SITE 242: note = Tnp_P4
  SITE 254: note = Tnp_P5
MSGFVGVDIAKNTFDIATHLPNGKHKTKAKLANDPKGFKEFEAWLEKNAERSALIVMEATSVYHLELAEFVYNKGFRVCVVNPATTKAYADSELRRIKTDKSDAKLIADFAREKDQKLHPWAPEPLKYRQLKAMVRRLDDLQEMEQMELNRLDVSDEKVKDSINSVLRHIEKEIVETHKAIKKHIDDDPDMRQMRNLIVTIDGIGQKTLERLLAELGDLRKYSDPRQLVAAAGLNPKLQESGKLKGHTLISRVGSARLRAGLYMPGMVALKHNKAIKAMKERLEANGKAPKQIICAAMRKLLHFVYGVLKSGLPYDPKLALAR

SEQ ID NO: 13233 - protein, 343 aa, unidentified
  source 1..343: note = protein_93338d0
  REGION 7..148: note = RuvC_domain
  SITE 10: note = RuvC_P1
  SITE 53: note = RuvC_P2
  SITE 88: note = RuvC_P3
  SITE 90: note = RuvC_P4
  SITE 93: note = RuvC_P5
  REGION 212..302: note = Tnp_domain
  SITE 220: note = Tnp_P1
  SITE 250: note = Tnp_P2
  SITE 258: note = Tnp_P3
  SITE 259: note = Tnp_P4
  SITE 271: note = Tnp_P5
MKEVSIIGIDLSKNSYQFHGAHADGSVAFRVKRSRGRVIPFLSSQSACTVAMEACGGAHYWGREIGKLGHEVRLIPPIYVKPYVKRQKNDAADAEAICEAASRPTMRFVAVKSEESQARAMQLGVRMLLVRQRTQTINALRGHLAEFGLVAPKGPAHVARLAWALEGEEGAALPALVREMGALLVERIAELDRKVAEFDRVLRAAAREDEEAARAMTVPGVGPITALALQALAPPLETFRKGRDFAAWLGLTPRQRTTAGKPRLGKISKMGQKDLRRLLVVGAMSVIQNAIRRGKTDDPWLARLLVKKPRKRKLVAVALANRMARVLWALAMKKETYRAPAVA

SEQ ID NO: 13234 - protein, 338 aa, unidentified
  source 1..338: note = protein_b786b30
  REGION 7..149: note = RuvC_domain
  SITE 10: note = RuvC_P1
  SITE 53: note = RuvC_P2
  SITE 88: note = RuvC_P3
  SITE 90: note = RuvC_P4
  SITE 93: note = RuvC_P5
  REGION 212..299: note = Tnp_domain
  SITE 220: note = Tnp_P1
  SITE 250: note = Tnp_P2
  SITE 258: note = Tnp_P3
  SITE 259: note = Tnp_P4
  SITE 271: note = Tnp_P5
MAKITTIGLDLAKNVFHMVCCDRHGKIIKRKMLRRSGLLTWFANLPACLIGMESCASAHHWARALQAQGHRVKLIPAQHVKPFVRGNKNDYNDALAIAEAVTRPEMRFVSIKTPQQQDIQALHRLRERRLRDRTALCNQLRGLIGEYGIVFSRGVNVLRKRIPEILEDSENGLSDLFRSLLSQGYQQLTELDAHIDAYTEALDAHSKRDDACVRLQKIPGYGPIISSAFYSAVGNGEAYRRGRDVSASLGLVPRQHSSGDKQVLLGISKRGDRYLRSLLIHGARSVVIQAANKEDALSRWINKTRAARGFNKAVVALANKLARIGWAVLANNTVYQAR

SEQ ID NO: 13235 - protein, 341 aa, unidentified
  source 1..341: note = protein_b9edd7d
  REGION 7..149: note = RuvC_domain
  SITE 10: note = RuvC_P1
  SITE 53: note = RuvC_P2
  SITE 88: note = RuvC_P3
  SITE 90: note = RuvC_P4
  SITE 93: note = RuvC_P5
  REGION 209..296: note = Tnp_domain
  SITE 217: note = Tnp_P1
  SITE 247: note = Tnp_P2
  SITE 255: note = Tnp_P3
  SITE 256: note = Tnp_P4
  SITE 268: note = Tnp_P5
MENVMLIGIDLGKHSFHVHGQDRQGKTLLRKKFSRPQLIAFLATFHPCTIVMEACAGAHCIARQLASFGHEAKLISPQFVRPFVKSNKNDFIDAEAICEAASRPAMRFVTPKNEAQQTLSALHRVRESLVRERVKASNQIHGFLLEFGISLPVGHAAIKRLPSVLAEQRLPARLVQVLERLHAHFKYLDQQIAEIEKDLTRQVTEDDLGQRLMTVPGIGPITASVLAAEVGDGKHYRCGRDFAAAVGLVPRQYSTGGKNKLLGISKRGDKNLRRLLVQCARAYMQRLERQRGQLAQWVRSMLTRRHSNVVACALANKLARMAWAIAAHHTEFEIKEAPMTT

SEQ ID NO: 13236 - protein, 333 aa, unidentified
  source 1..333: note = protein_aeddc59
  REGION 25..171: note = RuvC_domain
  SITE 28: note = RuvC_P1
  SITE 72: note = RuvC_P2
  SITE 112: note = RuvC_P3
  SITE 114: note = RuvC_P4
  SITE 117: note = RuvC_P5
  REGION 207..292: note = Tnp_domain
  SITE 215: note = Tnp_P1
  SITE 244: note = Tnp_P2
  SITE 252: note = Tnp_P3
  SITE 253: note = Tnp_P4
  SITE 264: note = Tnp_P5
MVEGTKGSHHKEGSKKMSKNSTVCAGIDTGKYKLDVAIDESADQLQVDNSPAGYRCLSAWLRQREVERIGIEASGGYEQAVVSFLRADGFVVIVFQPVQVRAYAKFVLQHAKNDNIDAVLIARCTAAATDIHEPPDARLAPLAQRLTMIEQLTEDVAQLKTRREACRDTRIRAFWKQEIDRLKRLLQGELKQLVAAIREHRDLADRLDLIASVDGVGPRTAVAILVRMPEIGRVSREQAAAIAGLAPYDDDSSQRRGLRHIKGGRQRLRQSLYAAALPAVFYWNAQLKALYKRLIAAGKTHKLVLVACARKLLIFVNTVVARGTPWTSAPATT

SEQ ID NO: 13237 - protein, 334 aa, unidentified
  source 1..334: note = protein_b6fed16
  REGION 7..148: note = RuvC_domain
  SITE 10: note = RuvC_P1
  SITE 53: note = RuvC_P2
  SITE 88: note = RuvC_P3
  SITE 90: note = RuvC_P4
  SITE 93: note = RuvC_P5
  REGION 209..292: note = Tnp_domain
  SITE 217: note = Tnp_P1
  SITE 247: note = Tnp_P2
  SITE 255: note = Tnp_P3
  SITE 256: note = Tnp_P4
  SITE 268: note = Tnp_P5
MKQITTVGLDLAKNVFQIHAVDAAGAVLVRRQIRRAQVLLFFSRLPPCLIGMEACAGAHHWGRELVKLGHEVRLIPPSYVKPFVKRGKTDAADAEAICTAVTQPTMRFVPIKTEAQQAVLMQHRTRDFLVRQLTQIANAIRAHLGEFGLIVPKGVHNMNRLVTEAQAADLPTEARMPLDLLVGQFTDTKTRIDAVTADLRRTAEADETARRLQTMPGIGPITASVLAATLPDVSAFRSARDLSAWLGLTPKPHSSGGKGRLGSISKMGNRYIRRLLYLGAMGVISTRKRTDPGDDWLGGQIKTKPLKVVAIALANRMARAIWAMLRTGEAWRGA

SEQ ID NO: 13238 - protein, 317 aa, unidentified
  source 1..317: note = protein_01f19ee
  REGION 3..122: note = RuvC_domain
  SITE 26: note = RuvC_P2
  SITE 61: note = RuvC_P3
  SITE 63: note = RuvC_P4
  SITE 66: note = RuvC_P5
  REGION 184..269: note = Tnp_domain
  SITE 192: note = Tnp_P1
  SITE 222: note = Tnp_P2
  SITE 230: note = Tnp_P3
  SITE 231: note = Tnp_P4
  SITE 243: note = Tnp_P5
MVAKAVRRNKLLEFLASLPRCLVGLEACGSAHHWARELIKLGHDVRIMPPAYVKPYIRRQKNDAADAAAICEAVTRPSMRFVGVRSLENQAALMRHKAREMLVSQRTQLLNGLRGHLTEVGVIAAQGPRHARELAELIEACDETIPFEVCEALAPLVVQLRTLDEAIARLDRAITKLAQRDETARRLMSIPGFGPITASAMAATIQDTSSFAGPREFAAFLGLTPKQNSSGGKQKLGRISKMGNRNLRKLLVVGAHAVLFHRKPHTDPLRMWAKKLIEKKPFKLVAVALANKMARIAFAIMRGETVYREISGVRSAD

SEQ ID NO: 13239 - protein, 283 aa, unidentified
  source 1..283: note = protein_4acc85e
  REGION 16..98: note = RuvC_domain
  SITE 37: note = RuvC_P3
  SITE 39: note = RuvC_P4
  SITE 42: note = RuvC_P5
  REGION 158..245: note = Tnp_domain
  SITE 166: note = Tnp_P1
  SITE 196: note = Tnp_P2
  SITE 204: note = Tnp_P3
  SITE 205: note = Tnp_P4
  SITE 217: note = Tnp_P5
MEACAGAHFMARRISDIGHEAKLISPQFVRPFVKSNKNDFIDAEAICEAASRPSMRFVQPRTETQQAMRALHRVRESLIRDKVKTTNQIHGFLLEFGISLPTGDAAIKRLSLVLAEHELPEYLSRLLMKLHAHYLYLIEQITELESELNQSIKADATAQRIMTIPGVGPMTASLLSSQLGDGKQFSCSRDFAASTGLVPRQYSTGGKSTLLGISKRGNKNLRRLLVQCARSFMMRLEHQQGRLAEWVRKQLDNKHSNIVACALANKLARIAWAITALQKEYQA

SEQ ID NO: 13240 - protein, 340 aa, unidentified
  source 1..340: note = protein_7d49f5e
  REGION 7..149: note = RuvC_domain
  SITE 10: note = RuvC_P1
  SITE 53: note = RuvC_P2
  SITE 88: note = RuvC_P3
  SITE 90: note = RuvC_P4
  SITE 93: note = RuvC_P5
  REGION 211..296: note = Tnp_domain
  SITE 219: note = Tnp_P1
  SITE 249: note = Tnp_P2
  SITE 257: note = Tnp_P3
  SITE 258: note = Tnp_P4
  SITE 270: note = Tnp_P5
MKQVFIIGIDLAKNTFQVHGATKAGNRIFNKKVTRAKLISFLTEIPNCIVAMEACASSHYWGRRIEALGHTIKLIPPAYVKPYVKRQKNDANDAEAIAEAASRPTMRFVAVKSVEKQASGMALRTRDLLIRQKTQTINALRGHLAEYGIIAPCGTVYLNRLQEAVNDPETELPDAVIANAQILLDHIASLAGQISQLEKDIREAARQDERARKLMSVPGIGPITAVALTALAPDPASFRKGRDFAAWTGLTPKQYSSGGKERIGHTSKMGQRDLRRLLIIGAASVVRWAIRRGSDQGGWLGQMLARKPRMLVTVALANKMARVAWALMSKNEKYKDPAMV

SEQ ID NO: 13241 - protein, 408 aa, unidentified
  source 1..408: note = protein_de9178e
  REGION 6..162: note = RuvC_domain
  SITE 9: note = RuvC_P1
  SITE 59: note = RuvC_P2
  SITE 99: note = RuvC_P3
  SITE 101: note = RuvC_P4
  SITE 104: note = RuvC_P5
  REGION 269..356: note = Tnp_domain
  SITE 277: note = Tnp_P1
  SITE 309: note = Tnp_P2
  SITE 317: note = Tnp_P3
  SITE 318: note = Tnp_P4
  SITE 329: note = Tnp_P5
MKRYYLGVDWSDEFHQVWAIDPEGNKVIEKKVLENVGGLAEFGRWLDETRAKGIELWAAIEKPAGRIVDFLLDHGVVVYPVNPKALDRVRDRFRMSQSKSDSFDAYVLAEFLRTDHVHLRALEPSSEQAQELKMLTRDHHRLMRHKTRLINQIEVTLKEYYPRPLEVFSNLESKIALDFITQYPTPRALSDLTRRKWNRFAKREHHLGEARCKELWEKLDQPQLGIPEHVVRAKAQLLLVLVAQLKALAQAVESYSEKVQSFFVSMPVAKLAQTLPGGKSGTTVAMLWAELGDATSRWQSFRHLQAEAGGVPVTKASGKSRVVQFRFACNKLLRYASYWLSFNSLNRCEWANKYYRDQRAKGHHHPQALRALAAKWLKIIFTMWRDDKPYDENYHLANIARQTIRQAA

SEQ ID NO: 13242 - protein, 406 aa, unidentified
  source 1..406: note = protein_580294d
  REGION 4..162: note = RuvC_domain
  SITE 7: note = RuvC_P1
  SITE 60: note = RuvC_P2
  SITE 101: note = RuvC_P3
  SITE 103: note = RuvC_P4
  SITE 106: note = RuvC_P5
  REGION 268..355: note = Tnp_domain
  SITE 276: note = Tnp_P1
  SITE 306: note = Tnp_P2
  SITE 314: note = Tnp_P3
  SITE 315: note = Tnp_P4
  SITE 328: note = Tnp_P5
MIYIGIDIVKRGHVASAVGEDGKAVVESFRFNNTAGGFSKFLAKLKKAGADAERSLIGMEATGHYWIALFDFLGAHGYDAAVINPIQTDAFRDVWTVRKVKTDAIDAAMIADLVRYKRYSPSALGDEATEELRSLARYRMSLVDRSTALKNRATAVLDRVFPELAGLFGDAYCPTHRELLQHCATPDQVLATDVRTLARILREASRGKCGREKAEELKKAAKESVGVSFGSRALALEVRLLMEELDFVKDQIKEVEAELAVLLDRTSGKWLLTIPGIDVALASVIAGEIGDPDRFDGPHKLMGYAGMDPTRSESGDTVSSDGHMSKRGPGTLRWALMMAADCARKRDPYFGDYYSAKKGTGKKHHYVALSGVARKLMGVCLAVMKEGRPYEPTPPKNHRPGHLKDA

SEQ ID NO: 13243 - protein, 320 aa, unidentified
  source 1..320: note = protein_6acc002
  REGION 8..163: note = RuvC_domain
  SITE 11: note = RuvC_P1
  SITE 56: note = RuvC_P2
  SITE 96: note = RuvC_P3
  SITE 98: note = RuvC_P4
  SITE 101: note = RuvC_P5
  REGION 195..279: note = Tnp_domain
  SITE 203: note = Tnp_P1
  SITE 232: note = Tnp_P2
  SITE 240: note = Tnp_P3
  SITE 241: note = Tnp_P4
  SITE 252: note = Tnp_P5
MSALSVTVGIDVAKAHVDVCVLGTHSDFQRFANDVDGHCALAAALQSMDVGLVVMEATGGYEAALACALQAVGLHVAVVNPRHARDFARSMGRLAKTDAVDARMLAELAAVLMRRDDLARFLRPVADERQQWLAALVTRRRQLLTMLNSERQRLQITPRKLHPSIEAIVAAIKAQLDDLERQMVGHVREHFGELDGLLQSTNGIGPVASATLIAQLPELGRLNRREIAALAGVAPVANDSGNRKGRRRVQGGRFEIRRVLYMATLTAARYNPVIRAFYERLRAAGKLPKVALVACMRKLLTTLNAMVRTGKPWDPSLHRA

SEQ ID NO: 13244 - protein, 297 aa, unidentified
  source 1..297: note = protein_f301f9a
  REGION 1..104: note = RuvC_domain
  SITE 2: note = RuvC_P2
  SITE 43: note = RuvC_P3
  SITE 45: note = RuvC_P4
  SITE 48: note = RuvC_P5
  REGION 209..295: note = Tnp_domain
  SITE 217: note = Tnp_P1
  SITE 247: note = Tnp_P2
  SITE 255: note = Tnp_P3
  SITE 256: note = Tnp_P4
  SITE 269: note = Tnp_P5
MEATGHYWLSLYSFLVGKGYVIHVVNPIQTDGWRKGTEIRKRKTDTIDSILIAELIRYGDFLETSLADENTMSLKNLTRLRHYLVASIGDLKRKAICVLDQVFPEYQSVFSNVFGQTSKELLLQLQSPDDFQSLSAEKLEDVLKSITFKKFAQNKISTIYELAANSFGLSFCRNSFSMQLKLLLEQIKFIEVHVADVETGLRLLLEKINSSITTIPGIGPINGATILGEIGDISRFSTPAKLVVYAGIDASVSQSGMYQSTNNKMSKRGSPYLRKALFQAALVASNCPYRVQTISSD

SEQ ID NO: 13245 - protein, 342 aa, unidentified
  source 1..342: note = protein_2c6e2c8
  REGION 7..149: note = RuvC_domain
  SITE 10: note = RuvC_P1
  SITE 53: note = RuvC_P2
  SITE 88: note = RuvC_P3
  SITE 90: note = RuvC_P4
  SITE 93: note = RuvC_P5
  REGION 212..296: note = Tnp_domain
  SITE 220: note = Tnp_P1
  SITE 250: note = Tnp_P2
  SITE 258: note = Tnp_P3
  SITE 259: note = Tnp_P4
  SITE 271: note = Tnp_P5
MEKITIIGLDVVKSVFQIHAITEDGHIAVRRALRRSQVLEFFRNIEPCLVGMEACGSAHYWANAIREFGHTVRLMPPAYVKPYVKRNKTDAADAEAICEAVTRPTMRFVPVKSPEEQAAGMVLKTRELLVRQRSQTANAMRGHMAELGIIAATGMTSIAKLTAILRNDQEGRLPHSAKAALLEMADQIERLTERIEVLDSKIAAAVKADEAARRLTTIPGVGPIIAATVRTAVQDPTVFRTGRDLAAWIGITPRANSSGGKERLGKISKRRNKQLRTLLIVGATSILKQARRGSKLPDWIVSIMARRPYKVAAVALANKMARTIWALLVKGGTYQTPAMTKA

SEQ ID NO: 13246 - protein, 341 aa, unidentified
  source 1..341: note = protein_c776149
  REGION 7..149: note = RuvC_domain
  SITE 10: note = RuvC_P1
  SITE 53: note = RuvC_P2
  SITE 88: note = RuvC_P3
  SITE 90: note = RuvC_P4
  SITE 93: note = RuvC_P5
  REGION 209..295: note = Tnp_domain
  SITE 217: note = Tnp_P1
  SITE 247: note = Tnp_P2
  SITE 255: note = Tnp_P3
  SITE 256: note = Tnp_P4
  SITE 268: note = Tnp_P5
MSNTALIGIDLGKHSFHLHAQDGSGRELFRKKTTRPQLIRLLAQQPPCTVAMEACAGSHCLAREIQALGHVVRLISPQFVRPFVRGNKNDFIDAQAICEAASRPSMRFVTPRNEAQQTLSVLHRMRESLIRDRTKTINQLHGFLLEFGISLPRSMAVIRRLSNVLAEHELPVRLVVLLQRLHAHFSYLDEQIKALDKEVVAQVEADDLGSRLLSLPCVGPITTSVLIAELGDGKQYGCSRDFAASVGLVPRQYSTGGRANLLGISKRGDKNLRRLLVQCARVYLQRLEHQRGALADWVRALLVRRHSNVVACALANKLARIAWAIAAKHTRYEAGPDGCAA

SEQ ID NO: 13247 - protein, 325 aa, unidentified
  source 1..325: note = protein_e7462a3
  REGION 6..151: note = RuvC_domain
  SITE 9: note = RuvC_P1
  SITE 54: note = RuvC_P2
  SITE 92: note = RuvC_P3
  SITE 94: note = RuvC_P4
  SITE 97: note = RuvC_P5
  REGION 197..284: note = Tnp_domain
  SITE 205: note = Tnp_P1
  SITE 235: note = Tnp_P2
  SITE 243: note = Tnp_P3
  SITE 244: note = Tnp_P4
  SITE 257: note = Tnp_P5
MKKTFIGIDVSMASLDVFVNDDSGKGSFVIANTTKAISRFFKQYDCESTYVAMENTGRYNWSIYEALASFKGHIYVVPPLHLKKSMGLIRGKNDKIDAVSIASSIEKNHANTPEWKPLPLAIKKIKILLSERTLRISQKKQLDQQLAGYQLIKSTGLDKALIKLNQQLVRGLKSQIDALEKELQGIIQSDETLSAQARLVGSIPGVGKVLTWMLLSATEGFQKITEPRKFGCYCGVVPFEHQSGTSIRGKTRVSVFADKRLKSILHMAAMRAIQLKNDLQEYYQRKVREGKNKMLVLNAIRNKIIHRVFAVITQQIPYQFNLVLS

SEQ ID NO: 13248 - protein, 266 aa, unidentified
  source 1..266: note = protein_3db4bb6
  REGION 7..149: note = RuvC_domain
  SITE 10: note = RuvC_P1
  SITE 53: note = RuvC_P2
  SITE 88: note = RuvC_P3
  SITE 90: note = RuvC_P4
  SITE 93: note = RuvC_P5
  REGION 209..266: note = Tnp_domain
  SITE 217: note = Tnp_P1
  SITE 247: note = Tnp_P2
  SITE 255: note = Tnp_P3
  SITE 256: note = Tnp_P4
MQNITLIGIDLGKHSFHIHCQDKSGKALLRKKFTRTKLMQFLATCPPSVVVMEACAGAHFMARCISDFGHETKLISPQFVRPFVKSNKNDFVDAEAICEAASRPSMRFVQPRTETQQAMRALHRVRESLIRDKVKTTNQIHGFLLEFGISLPIGDAVIKRLSLVLAEHEIPEYLSRLLVRLHTHYFYLVEQIAELESELSQSINADDTAQRIMTIPGVGPITASLLSSQLGDGKQFSCSRDFAASTGLVPRQYSTGGKSTLLGISK

SEQ ID NO: 13249 - protein, 343 aa, unidentified
  source 1..343: note = protein_6228bbd
  REGION 6..149: note = RuvC_domain
  SITE 9: note = RuvC_P1
  SITE 54: note = RuvC_P2
  SITE 89: note = RuvC_P3
  SITE 91: note = RuvC_P4
  SITE 94: note = RuvC_P5
  REGION 213..298: note = Tnp_domain
  SITE 221: note = Tnp_P1
  SITE 251: note = Tnp_P2
  SITE 259: note = Tnp_P3
  SITE 260: note = Tnp_P4
  SITE 272: note = Tnp_P5
MKLTRIGVDVAKQVFQVHGVDRHEQPIWRRRLSRDRWLKAVQEVAEPGCDIGMEACGGAHHWARQLQALGYRVKLIAPQFVKPYVKSNKNDANDAEAICEAMSRPSMRFVSVKSVAQQDLQAMHRVRASLVEQRTAKGNQIRGLVAEYGLVAPREMASLRQAIPGWLEDAENGLSVLFRRVLEGLWHDLRNVEGRVSELDVQINEAGKADPAARRLQQLRGVGPVVATALIACVGDAKQFANGRQMAASLGLTPRQHSSGGKERLLGISKRGDAYVRSLLVHGARAMLRTAPRHDDPLSRWVTRLSARSHPNVACVAMANKTARMAWAMLRHGSNYQPALAAA

SEQ ID NO: 13250 - protein, 408 aa, unidentified
  source 1..408: note = protein_f9ccca3
  REGION 4..160: note = RuvC_domain
  SITE 7: note = RuvC_P1
  SITE 57: note = RuvC_P2
  SITE 97: note = RuvC_P3
  SITE 99: note = RuvC_P4
  SITE 102: note = RuvC_P5
  REGION 274..361: note = Tnp_domain
  SITE 282: note = Tnp_P1
  SITE 312: note = Tnp_P2
  SITE 320: note = Tnp_P3
  SITE 321: note = Tnp_P4
  SITE 334: note = Tnp_P5
MTVVGIDVSKGKSMVAAMKPGGELVAAPYEVRHSDIELSRLALNVLCMEPDTRVVMEATGRYHEPVAALLHSEGIFVSILNPLLIKQSGAGSLRKVKSDPKDALKIAKYGLDNWSTLLEYTPMEAIRQQLKLCARQCDLYNKNIVMLTNNLISLSDKTFPGVNELFSSPEKADGHLKWVDFYRSFWHCDCINRMSPDAFEERYKKWCKRKGYHFSTDAADALYAASCRPYTTLPRDNNAKLLVTVAADQLIALRENQSKLEAEMLNLCKQLPEYETVMAMYGVGKSTGPHLMAELGDVRRFLHRSSIVAFAGVDPGVVGSGKMQLSSVTTSKRGSPQLRKALFQVVSTYVKCKPENEAVYQFYAKKRDEGKPFFVCTTAAANKFLRIYYARVKECLNATESATQVEEG

SEQ ID NO: 13251 - protein, 339 aa, unidentified
  source 1..339: note = protein_4862be1
  REGION 8..150: note = RuvC_domain
  SITE 11: note = RuvC_P1
  SITE 54: note = RuvC_P2
  SITE 89: note = RuvC_P3
  SITE 91: note = RuvC_P4
  SITE 94: note = RuvC_P5
  REGION 212..300: note = Tnp_domain
  SITE 220: note = Tnp_P1
  SITE 250: note = Tnp_P2
  SITE 258: note = Tnp_P3
  SITE 259: note = Tnp_P4
  SITE 271: note = Tnp_P5
MCQEIVVIGLDLAKNLFQVHAVDAQGHPIVRRQLRRAEVLKFFAKIPPCLVGMEACASAHHWGREIGALGHQVRLMPPAYVKPYVKRGKTDAADAEAICEAVTRPTMRFVAVKSKEQQAALMLHKTRDLLVRQRTMLINALRAHLGEYGIVKAQGPAGVNSLLALVQEAQDAVPVHARSALRSIVAQFHALAKEIGHLEKQILEWHRHDEVSQRLATVPGIGPITASAIAATVQDASIFRSGRQFAAWLGLTPRPHSSGGKERLGGITKQGDGYLRRLLVVGATAVIRMTRKDHAKQPWLARLLETKPAKIASVALANKTARIAWVIMSRGEVYRSAVA

SEQ ID NO: 13252 - protein, 340 aa, unidentified
  source 1..340: note = protein_ea835ff
  REGION 5..151: note = RuvC_domain
  SITE 8: note = RuvC_P1
  SITE 53: note = RuvC_P2
  SITE 91: note = RuvC_P3
  SITE 93: note = RuvC_P4
  SITE 96: note = RuvC_P5
  REGION 211..297: note = Tnp_domain
  SITE 219: note = Tnp_P1
  SITE 249: note = Tnp_P2
  SITE 257: note = Tnp_P3
  SITE 258: note = Tnp_P4
  SITE 270: note = Tnp_P5
MSEYIGLDVSLKETAICVRRDGKRVWRGKCASDPAIVAKVLRKNAPEAERVVFETGPLSIWFYHALTAEGVPAICIDARHAKAALDMAPNKTDANDAEGLAHLAEVGFFREVRVKGYDSMLVRTLVAARNKLVQMSTELSNQIRGLMKTFGLIVPSARGGSFEAQVQRLLSGDEGLTQIILPLLEAWQAVRTRAAKLGRHLLAGARQSQACRQLMAIPGIGAITATSFVTAVEDPDNFKSSRSVAAWFGLTTRRYQSGEVDYDGHISRRGDAHMRGLLYEAATVLLTRSRVDSDLRTWGLTLWERLGFKRAAVAVARKLAVVMHAMLKSGEPYHAKAAVA

SEQ ID NO: 13253 - protein, 411 aa, unidentified
  source 1..411: note = protein_059f257
  REGION 5..161: note = RuvC_domain
  SITE 8: note = RuvC_P1
  SITE 58: note = RuvC_P2
  SITE 98: note = RuvC_P3
  SITE 100: note = RuvC_P4
  SITE 103: note = RuvC_P5
  REGION 270..356: note = Tnp_domain
  SITE 278: note = Tnp_P1
  SITE 309: note = Tnp_P2
  SITE 317: note = Tnp_P3
  SITE 318: note = Tnp_P4
MTVFVGDDWAEAHHDVHLMNNAGVRLAARRLPEGLDGIAALHAMLAEHASDPGEVVIGIETERGLWVQALLASGYQVYAINPLSVSRYRDRHNVAGAKSDPGDAKVLADLVRTDRHNHRPIAGDSDDVTGVKVLARAHQNLIWDRTRHTNRLRNDLREFFPAALVAFEDLAHRDAVAVLAKAPSPDQAARLSITQIRSALKRGGRQRNLDTRAADIGTALRAPQLAAPPAVAAAFAATTRALVNVIVGLNTQIAGLETELANHFEQHPDADIYLSLPGLGDVLGARVLAEFGDDPERYNSAKSRRNYAGTSPLTIASGTKRAVLARYVRNRRLYDACDQWAFCSLQASPGCRDFYDQRRAKGDLHHQALRALANRLVAYLHGCLRTRTHYNEHTAWAHRQPPQNQQSQIAS

SEQ ID NO: 13254 - protein, 391 aa, unidentified
  source 1..391: note = protein_be5a0fd
  REGION 4..163: note = RuvC_domain
  SITE 7: note = RuvC_P1
  SITE 60: note = RuvC_P2
  SITE 101: note = RuvC_P3
  SITE 103: note = RuvC_P4
  SITE 106: note = RuvC_P5
  REGION 266..353: note = Tnp_domain
  SITE 274: note = Tnp_P1
  SITE 304: note = Tnp_P2
  SITE 312: note = Tnp_P3
  SITE 313: note = Tnp_P4
  SITE 326: note = Tnp_P5
MISVGIDVAKDKHDCFIINSEGEVLADVFTIPNNMDGFNSLLQRIRECSAPQDKIKVGLEATGHYSYNILGFLLDNGLTTYVLNPLHTNLYRKSLSLRKTKTDRVDARTIAAMLLSDVGLKPYTDTAYHNEELKSLTRYRFDKVKERGQLKQSVSRLVCILFPELEKLVPTLHLASIYALLDEFPGAKQIADAHLTHLKTVLVDTSKGHYGRDKAVEIRESARTSIGSVMPAKSLELRHTIRLIRELDAEINEIETAIDGIMDEIHSPITTIPGIGTRMGAMILAEVGDFSCFESPDKLLAYAGLSPSTYQSGQLNNCYAHMEKRGSRYLRYAIFNAAKCVCLWDPTFVAYLAKKRAEGKHYNVAISHAAKKLVRIIFALEKSGQPYRLAS

SEQ ID NO: 13255 - protein, 387 aa, unidentified
  source 1..387: note = protein_64adfa1
  REGION 4..159: note = RuvC_domain
  SITE 7: note = RuvC_P1
  SITE 58: note = RuvC_P2
  SITE 98: note = RuvC_P3
  SITE 100: note = RuvC_P4
  SITE 103: note = RuvC_P5
  REGION 263..350: note = Tnp_domain
  SITE 271: note = Tnp_P1
  SITE 301: note = Tnp_P2
  SITE 309: note = Tnp_P3
  SITE 310: note = Tnp_P4
  SITE 323: note = Tnp_P5
MYYVGIDIAKLNHFASVISSEGEVLVKPFKFTNDNDGFFRLLSALESFDRSSLIIGLESTAHYGDNLVEFLVSRRYQVCVINPIQTSTMRKNNIRKTKTDKFDTYVIAKTLMTQPHRFMTQEDIDMMHLKNLGRFRMKLVKERTRTKIQLTAYVDRVFPELQYFFKSGLHQKAVYALLKEAPSPEQIASMHLTHLTHLLEVSSHGHFNKEQAKELRVLAQKSVGSSDRALSLQVTQSVDQIELLDRQIHEVESEMENIMLGLDSVIMTIPGIGYINGGMILGEIGDIHRFAKPNQLLAFAGLDPSIYQSGNFNASHTRMSKRGSRALRYALINAAHNVVKNNATFKNYYDKKVAEGRPHYNALGHCAGKLVRIIHKMLTDDVAFNLE

SEQ ID NO: 13256 - protein, 342 aa, unidentified
  source 1..342: note = protein_62d1c1e
  REGION 7..148: note = RuvC_domain
  SITE 10: note = RuvC_P1
  SITE 53: note = RuvC_P2
  SITE 88: note = RuvC_P3
  SITE 90: note = RuvC_P4
  SITE 93: note = RuvC_P5
  REGION 211..295: note = Tnp_domain
  SITE 219: note = Tnp_P1
  SITE 249: note = Tnp_P2
  SITE 257: note = Tnp_P3
  SITE 258: note = Tnp_P4
  SITE 270: note = Tnp_P5
MEAITIVGVDLAKSVFQVHTANSDGRAVIRKRLPRTRFLSFMSQIKPCVVAMEACATSHHWARELTSLGHNVRLIPPIYVKPFVKRQKNDANDAEAIVEAALRPAMRTVPVKSPEQQALAMLFRTRELLLTQKTQLVNALRAHLAEHGVIVAGGRRSIDPFIRILDDVTNTLSHVVRKVGAIYLDRIARTAGEIEDLERQIDEHAKEQEMAQRLRTIPGVGPVTAMAIEAFAPAMESFARGRDFSAWLGLVPRQHSSGGKQRLGRTSKMGQRDIRRLLISGAMSIIHWRGRNGGKPGSWLARMLACKSRMLTAIALANKLARVIWAIMTRKDVYRDPAGAIC

SEQ ID NO: 13257 - protein, 342 aa, unidentified
  source 1..342: note = protein_65e21a7
  REGION 7..148: note = RuvC_domain
  SITE 10: note = RuvC_P1
  SITE 53: note = RuvC_P2
  SITE 88: note = RuvC_P3
  SITE 90: note = RuvC_P4
  SITE 93: note = RuvC_P5
  REGION 211..296: note = Tnp_domain
  SITE 219: note = Tnp_P1
  SITE 249: note = Tnp_P2
  SITE 257: note = Tnp_P3
  SITE 258: note = Tnp_P4
  SITE 270: note = Tnp_P5
MNDVSIIGVDLAKRVFHAHGARSDGSVAFRKRLSRSQLLTFFARQPRCTVAMEACATAHEWGRAIGELGHEIRLIPPAYVKPFVKRQKNDTSDAEAIAEAASRPTMRFVAVKTEEQQARSMIFRTRDLLVRQRTQLINALRGHLAEHGVIAPHGPANVKLLAAALSDFDRSLQPLVRDIGAVYLEQISILNGKIADLEKVLRREAQRGADTSRLQTMPGIGPITAMAIETFAPPMQTFKRGRDFAAWLGLVPVQHSTGGKQRLGRTSKMGQRDIRRLLIVGAMSVIRWASRRGAPEGSWLSRMLARKPLMLVAMALANKMARTAWAMLIKQENYRNPVTMTA

SEQ ID NO: 13258 - protein, 289 aa, unidentified
  source 1..289: note = protein_f40bc8e
  REGION 3..96: note = RuvC_domain
  SITE 37: note = RuvC_P3
  SITE 39: note = RuvC_P4
  SITE 42: note = RuvC_P5
  REGION 161..249: note = Tnp_domain
  SITE 169: note = Tnp_P1
  SITE 199: note = Tnp_P2
  SITE 207: note = Tnp_P3
  SITE 208: note = Tnp_P4
  SITE 220: note = Tnp_P5
MEALTGAFYWQREFEKLGHKVKIISPQYVKPFVHGQKNDSNDALTIAIALMQPIMKFVPPKTVEQQDIQALHRARQRIVNHRTATVCQIRGLLLDRGIAIGVTVTRARREIPLILEDAENELSSRMRRTIAEFYDLFNDLERRIHFFDKEIETVFRQSEACQRIAKVKGIGPKTATAVVAAIGKGTEFKNGRHFAAWLGLVPRQHSSGDRQVLMNMTKKGDKHLRTLFIHGARAVVRVAANNNDGYLNQWVNQLKERRGFNKTTVAVANKNARIIWSILHNETEYRPAV

SEQ ID NO: 13259 - protein, 391 aa, unidentified
  source 1..391: note = protein_3671cb6
  REGION 4..163: note = RuvC_domain
  SITE 7: note = RuvC_P1
  SITE 60: note = RuvC_P2
  SITE 101: note = RuvC_P3
  SITE 103: note = RuvC_P4
  SITE 106: note = RuvC_P5
  REGION 266..353: note = Tnp_domain
  SITE 274: note = Tnp_P1
  SITE 304: note = Tnp_P2
  SITE 312: note = Tnp_P3
  SITE 313: note = Tnp_P4
  SITE 326: note = Tnp_P5
MIYAGIDVAKDKHDCFITNSDGEVLFRAFTIQNNRDGFDDLFQKIFSVAKDLTKVKVGLEATGHYSYNLLGYLVDKGLATYVINPLHTNLYRKSLSLRQTKTDKVDARTIASMIMSDVNLKSYSDTSYHNEELKSLTRYRFDKVKERAKLKTSISRLVTILFPELEKLVPTLHMVSIYTLLSEFPSANAVASAHLTKLANLLETASKGHYSKDTAILFREAARTSIGSNMPAKSLELKHTIKLIQELDSEIDEIESEIKIIMDEINSPILSIPGISYRMGAMIIAEIGDFERFDTPDKILAYAGLSPSTYQSGQLDGAYSHMEKRGSKYLRYALFNATKFVCNWDPTFAAYLAKKRAEGKHYNVAISHATKKLVRVIYQLECSGQTYIKLA

SEQ ID NO: 13260 - protein, 390 aa, unidentified
  source 1..390: note = protein_d04bd58
  REGION 5..162: note = RuvC_domain
  SITE 8: note = RuvC_P1
  SITE 60: note = RuvC_P2
  SITE 101: note = RuvC_P3
  SITE 103: note = RuvC_P4
  SITE 106: note = RuvC_P5
  REGION 267..350: note = Tnp_domain
  SITE 272: note = Tnp_P1
  SITE 302: note = Tnp_P2
  SITE 310: note = Tnp_P3
  SITE 311: note = Tnp_P4
  SITE 323: note = Tnp_P5
MVYFVGIDISKYKHDCFIITESGDVVCKPFTIKNSYDGFNDLLTVLDSLDQARQIRIGFESTGHYALNLKLFLEKAHYSFMEFNPVLLAKFNSSQTLRRTKTDAIDCTSIARWLMTVDYKPHPVGFYHTYSLKSLTRLRDSLVKQRSFYIVKITNVLDHIFPEFKPFFGNRLSKTALYLLENYTTAKKMSRMNSQSYDTLRCISRGKFSMQKFLKLKELAKNTVGEDNEIFLAQLNSLMALYKQVVFEVDSLEGQIISLIEEINPKSLTIPGIGALSAAVIYAEYGDLSKFGTPSQMLSFAGLEPGYYQSGNSEHGGRMVKRGSSHLRFTLMNLCIPLIKYNMVFAEYYAKKRNEGKPHRVACSHLVKKLIRIIFTLEKNNLNFDPLKLR

SEQ ID NO: 13261 - protein, 401 aa, unidentified
  source 1..401: note = protein_070a447
  REGION 4..160: note = RuvC_domain
  SITE 7: note = RuvC_P1
  SITE 57: note = RuvC_P2
  SITE 97: note = RuvC_P3
  SITE 99: note = RuvC_P4
  SITE 102: note = RuvC_P5
  REGION 274..361: note = Tnp_domain
  SITE 282: note = Tnp_P1
  SITE 312: note = Tnp_P2
  SITE 320: note = Tnp_P3
  SITE 321: note = Tnp_P4
  SITE 334: note = Tnp_P5
MNAVGIDVSKGKSMVSIMRPFGEIVFEPFEVKHTSSEIKALIALINSVDGESRIVMEHTGRYYEVLAHQLAEANLFVSTINAKLIKDFDNDSLRKLKSDKADSIKIARYALDKWTGLKQYSLMDEIRNQLKIMNRQFGFYVKQKTAMKNNLIGIIDQTFPGENTYFDSPARNDGSQKWVDFIDTYWHVDCIRNMSLNAFTEHYKKWCKRKKYNYSQSKAVEIYEKAKEVVPVLPKDEITKLIIKQAISQLNNASATVESLRQLMNETASKLPEYPVVMSMKGVGPSLGPQLMAEIGDVTRFSHKAAITAFAGVDPGVNESGTYAQKSVHTTKRGSSELRRTLFLVMDALIKSMPQDDPVYQFLDKKRLQGKPYYVYMTAGANKFLRIYYGKVKEYLSKLEK

SEQ ID NO: 13262 - protein, 329 aa, unidentified
  source 1..329: note = protein_5eaafea
  REGION 5..161: note = RuvC_domain
  SITE 8: note = RuvC_P1
  SITE 62: note = RuvC_P2
  SITE 102: note = RuvC_P3
  SITE 104: note = RuvC_P4
  SITE 107: note = RuvC_P5
  REGION 204..289: note = Tnp_domain
  SITE 212: note = Tnp_P1
  SITE 241: note = Tnp_P2
  SITE 249: note = Tnp_P3
  SITE 250: note = Tnp_P4
  SITE 262: note = Tnp_P5
MREFTGVDISKEKVDIGWLRDVKTGKKKTKVFKNTAAGHQHVADWLLKNLKVPAGEILVTLEPTGVYHEALMYFLHDRGFQVLLVNPGKAKKFAEALNQVHKTDKLDCINLAEYGHAQYHQLTLWQPEAPELRELKAMIRRLDALEKDLQREHNRQEATRVSLSSDRVAQSLQDMIATLKAEIQRLQQDIDDHIDRFPELKRNRELLQSIKGIGPVMSRELVYLFASKRFKSAREAAAYLGLIPKLKESGKRQGHTTLSKVGSARIRAKLYMAAVCASTYNPDIKAQKARLLKAGKVKMQALGAAMRKLIQICFGVIKHQSEYQPQLNF

SEQ ID NO: 13263 - protein, 433 aa, unidentified
  source 1..433: note = protein_d510288
  REGION 44..199: note = RuvC_domain
  SITE 47: note = RuvC_P1
  SITE 96: note = RuvC_P2
  SITE 136: note = RuvC_P3
  SITE 138: note = RuvC_P4
  SITE 141: note = RuvC_P5
  REGION 306..391: note = Tnp_domain
  SITE 314: note = Tnp_P1
  SITE 344: note = Tnp_P2
  SITE 352: note = Tnp_P3
  SITE 353: note = Tnp_P4
  SITE 365: note = Tnp_P5
MTTSLFAGREALRNVDVAIGAVDGRVEHDRRTHVIETGGIDVFLGLDVGKGEHHATAVTPAGKKAFDKRLPNTEPKLRELFAKLQAKHGTVLVVVDQPASIGALPLAVARDMGCPVAYLPGLTMRRIADLYPGEAKTDARDAFIIADAARAMPHTLRSVDLEDETIAELEMIVGFDDDLTGEATRVANRLHGLLAKIHPSLERVLGPRLQHPAVLALLERFGSPAQIRKAGRRRLVTLLRPKAPRMAERLVEDIFTALDEQTVVVPGTDAAALIVPSLAISLQAVLDQRKLLAGRIEELLEAHPLSQVLISMPGVGIRTGARILIEVGDGSSFPSAAHLAAYAGLAPATRNSGSSIRGEQPSRRGNKQLKRAFFLSAFAALGDPASRAYYDKKIAQGKHHTQALLCLARRRADVLFAMLRDGTFYEPQPARTA

SEQ ID NO: 13264 - protein, 261 aa, unidentified
  source 1..261: note = protein_5d6089f
  REGION 6..148: note = RuvC_domain
  SITE 9: note = RuvC_P1
  SITE 52: note = RuvC_P2
  SITE 87: note = RuvC_P3
  SITE 89: note = RuvC_P4
  SITE 92: note = RuvC_P5
  REGION 210..261: note = Tnp_domain
  SITE 218: note = Tnp_P1
  SITE 248: note = Tnp_P2
  SITE 256: note = Tnp_P3
  SITE 257: note = Tnp_P4
MKDTMIGVDLAKNVFVLHAATMAGEVRYRKKLSRGQFLRFLSEQPPAIVIMEACGSAHYWARELVEAGHEVRLIAPQYVRPFVKRQKNDAADAEAIVIAARQPEMRFVPPKTADQQARAVLFRARERIVRQRTELVNALRAVLYEYGQAIPQGIAHIQRIEAIVERTEIGLPELVREECRDLLAQIDEKTARIKEKAKKLVDLSRQSGIAHRLQTMPGVGPLVALAVEAFAPAMENFRCGRDFAAWLGLVPRQFSSGGRND

SEQ ID NO: 13265 - protein, 391 aa, unidentified
  source 1..391: note = protein_3bb72b0
  REGION 4..163: note = RuvC_domain
  SITE 7: note = RuvC_P1
  SITE 60: note = RuvC_P2
  SITE 101: note = RuvC_P3
  SITE 103: note = RuvC_P4
  SITE 106: note = RuvC_P5
  REGION 267..353: note = Tnp_domain
  SITE 274: note = Tnp_P1
  SITE 304: note = Tnp_P2
  SITE 312: note = Tnp_P3
  SITE 313: note = Tnp_P4
  SITE 326: note = Tnp_P5
MIYVGIDVAKDKHDCFIVNSGGTVLFKVFTITNNLDGFNNLYQKIESVMKDVTKVKVGLEANGHYSYNLLGYLIDKGLTTFVINPLHTNLYRKSLSLRQTKTDKVDARTIASMLMSDVNLKSYSNISYHNEELKSLTRYRFNKVEERSKLKSSVSRLVCILFPELEKLVPKLHMASVYAMLSEFPSAKHLADAHLTRLTGLLSVSSMGRYGKEKAITFREAARTSIGSNMPAKSLELKHTIKLIQELTTEIDEIEKEIKIIMDKINPSILSILGINYRMGAMIIAEIGDFSRFDSPDKILAYSGFSPSTYQSGQLDGACSHIEKRGSRYLRYALYNAAKYVCHWDPTFAEYLAKKRAEGKHYNVAISHAVKKLVRVIYYLEKTKQRYVKAA

SEQ ID NO: 13266 - protein, 337 aa, unidentified
  source 1..337: note = protein_44b9bdf
  REGION 6..148: note = RuvC_domain
  SITE 9: note = RuvC_P1
  SITE 52: note = RuvC_P2
  SITE 87: note = RuvC_P3
  SITE 89: note = RuvC_P4
  SITE 92: note = RuvC_P5
  REGION 211..298: note = Tnp_domain
  SITE 219: note = Tnp_P1
  SITE 249: note = Tnp_P2
  SITE 257: note = Tnp_P3
  SITE 258: note = Tnp_P4
  SITE 270: note = Tnp_P5
MKITTIGLDIAKRFFHVVCCNEQGRLVKKKMLKRAQVLSFFQQHTTCLVALEACATSHFWAREIRKCGHEIKLIPPQHVKAFLVGNKNDYNDALAISVASKQHHIKSVCIKSVEQQDNQAQHKARELAVRQRTALCNQIRGLTAEYGIILNQGVNTIRKSIPLILEDENTGLSGAFKAVLKQLETQLNNLDSCIETYSTLIVETAKHNDICQRLQTIPGFGPMVSSAYFNEVGNGSNYKRGRDVSASLGIVPRQHSSGGKDTLLGISKRGNSYLRCLLIQGAKAVVSRAKTKNDKLSQWINRLVQTRGHNRACVAYANKMARMAWAISASGESYSPV

SEQ ID NO: 13267 - protein, 341 aa, unidentified
  source 1..341: note = protein_dda9b6b
  REGION 7..149: note = RuvC_domain
  SITE 10: note = RuvC_P1
  SITE 53: note = RuvC_P2
  SITE 88: note = RuvC_P3
  SITE 90: note = RuvC_P4
  SITE 93: note = RuvC_P5
  REGION 209..295: note = Tnp_domain
  SITE 217: note = Tnp_P1
  SITE 247: note = Tnp_P2
  SITE 255: note = Tnp_P3
  SITE 256: note = Tnp_P4
  SITE 268: note = Tnp_P5
MDTVTLIGIDLGKHSFHLHGQDRHGREVLRKKCNRKQLMEFLAKSQPCTVVMEACAGAHHMARQLVTFGHQVKLISPQFVKPFVKANKNDFIDAEAICEAASRPSMRFVTPKTEEQQVLGAWHRVRESLVRDQVKTTNQIHGFLLEFGISLSTGPGVIKRLPSVLAEHRLPARLVVLLERLHAQYKYFDEQIKEVENELARLLKDDDLGTRLMTIPGVGPITASLLSAELGDGKQYSCGRDFAASLGLVPRQYSTGGKPTLLGISKRGDKAIRRLMVQCARSYMIWVHRKTGCMAEWVRSMLTRRHPNVVACALANKLARTVWALAAKHMVFKEPTATVRS

SEQ ID NO: 13268 - protein, 344 aa, unidentified
  source 1..344: note = protein_96fc12f
  REGION 21..164: note = RuvC_domain
  SITE 24: note = RuvC_P1
  SITE 69: note = RuvC_P2
  SITE 104: note = RuvC_P3
  SITE 106: note = RuvC_P4
  SITE 109: note = RuvC_P5
  REGION 228..300: note = Tnp_domain
  SITE 236: note = Tnp_P1
  SITE 266: note = Tnp_P2
  SITE 274: note = Tnp_P3
  SITE 275: note = Tnp_P4
  SITE 287: note = Tnp_P5
MKKHTTINQSLSAEAAACTTVAVDLAKRVFQLAGEDALGQVLFEDRIKSREAFQAFLHKLPASVTVLVETGPGAQAWARLLQTQGNPVRILPAQHVANHRSGPKNDRNDALAILRAGRDSKISAVPLKSAAALAMQALHRARQGYVRRRTAVGNQMRGLLLEHGVAMAQGEIAISQLEPRILEDATQPLPDLLRELIAELLGEWSQLGERVNVLTGRLETAAKADETAKRLMTVRGVGPIIATALLAKQTEPKRFANARLFAAYFGLVPSQHSSGEKVRLGKMSKHGDAYLRSRTTNVSCVGYPVWVARRRRCDWPTATCASSGCYCKTTRLIVASRALTRRLR

SEQ ID NO: 13269 - protein, 413 aa, unidentified
  source 1..413: note = protein_d3d883e
  REGION 14..166: note = RuvC_domain
  SITE 17: note = RuvC_P1
  SITE 65: note = RuvC_P2
  SITE 103: note = RuvC_P3
  SITE 105: note = RuvC_P4
  SITE 108: note = RuvC_P5
  REGION 273..359: note = Tnp_domain
  SITE 281: note = Tnp_P1
  SITE 312: note = Tnp_P2
  SITE 320: note = Tnp_P3
  SITE 321: note = Tnp_P4
  SITE 332: note = Tnp_P5
MSVTVESTAARVCAGVDWAKDDHAVCIVDAGGEVVDRLTVEHTAAGLKRLIRRLLGAGVSEVGIERGDGPVVEALLAAGLIVLVIAPNQLKNLRSRYGSAGNKDDRYDAYVLADVVRTDRRRLTPLTRSTPATIALRSTVRARRDLVEHRVAAANQLRAHLQIVLPGIVGLFSDLESQVSLSFLERFTTQAKVDWLTPARLGAWLAKIGYSGKVAPEVLHQRLLAAPRGTTTVDAQAHAGTTVAFVAVLRTLNNQIAALAESIAEQFDAHPDAPIVKSLPRAGTLRAARLLAEIGDARGRFPTADSLACLAGVAPSTRQSGKVKAVTFRWSADKELRDALCDFAGDCRRANPWAEDLYQRARARGHDHPHAVRILGRAWASIIWRCWQDGLPYDPARHNALQRFLHEHIAESA

SEQ ID NO: 13270 - protein, 345 aa, unidentified
  source 1..345: note = protein_c8dbec3
  REGION 7..148: note = RuvC_domain
  SITE 10: note = RuvC_P1
  SITE 53: note = RuvC_P2
  SITE 88: note = RuvC_P3
  SITE 90: note = RuvC_P4
  SITE 93: note = RuvC_P5
  REGION 211..296: note = Tnp_domain
  SITE 219: note = Tnp_P1
  SITE 249: note = Tnp_P2
  SITE 257: note = Tnp_P3
  SITE 258: note = Tnp_P4
  SITE 270: note = Tnp_P5
MSEVNTIGLDIAKQVFQAHGADASGRAVFRKKLTRTKLIEFFRSQPQCVVALEACGGAHHWGREIAKLGHTVRLIPPAYVKPFVKRQKNDAADAEAICEAAQRPSMRFVAVKDEEQQASGVVFRARDVLVRQHTKCINALRGHLMEYGWVVPKGATHVSKLIDQIEDPNCHLPQSARVILKVLITTLKSLEENIAVLDVEIARRAKEDPVARRLMAIPGVGPITATAIVALVPPVETFRTARDFAAWLGLTPLQKSTGGKQRLGATSKMGERTIRRLLIIGGSAVVRQACTRGAPEGSWLARMLARKPRMLVSVALANKPARIVWALLSKGEIYGAPVAAAEARP

SEQ ID NO: 13271 - protein, 389 aa, unidentified
  source 1..389: note = protein_14718f1
  REGION 4..160: note = RuvC_domain
  SITE 7: note = RuvC_P1
  SITE 57: note = RuvC_P2
  SITE 97: note = RuvC_P3
  SITE 99: note = RuvC_P4
  SITE 102: note = RuvC_P5
  REGION 270..355: note = Tnp_domain
  SITE 278: note = Tnp_P1
  SITE 309: note = Tnp_P2
  SITE 317: note = Tnp_P3
  SITE 318: note = Tnp_P4
MIFVGIDWSESHHDVCVMDADGKVLAKDRIPEGVQGVAQLHEMVAVHAEEPSDVVVGIELDRGLLVGALLAAGYAVHAINPLSVDRYRDRHRTSGAKSDPGDAKVLADLVRTDRHLHREVAGDSELAEAVKVLARAHQGLIWSRQRQLNQLRNALREFYPAALEAFGTDLASPEALAVLEVTPTPAEGRSLSTTKIAAALKRAGRRRRITERAEEIKQALATSQLEAPAVLARAYGDVVRSTVRIVAEMTAQIDALAAELEASFEEHPDAEILRSLPGLGVVLGVRVLAEFGDDPDRYADTKARKNYAGTSPITKASGRSKVALARFARNRRLADALQMWAFCSLSCSPGARRIRSLANRWVGILHGCLWRRERYSEERAWPTLTEAAA

SEQ ID NO: 13272 - protein, 387 aa, unidentified
  source 1..387: note = protein_06cd010
  REGION 6..159: note = RuvC_domain
  SITE 9: note = RuvC_P1
  SITE 57: note = RuvC_P2
  SITE 98: note = RuvC_P3
  SITE 100: note = RuvC_P4
  SITE 103: note = RuvC_P5
  REGION 221..306: note = Tnp_domain
  SITE 229: note = Tnp_P1
  SITE 259: note = Tnp_P2
  SITE 267: note = Tnp_P3
  SITE 268: note = Tnp_P4
  SITE 279: note = Tnp_P5
MTRVVIGMDPHKRSVTIEVMAPDETVLGGGRYATDEPGFTALLRDAQRWPERVWAVEGCSGIGHHVATRLLAQGEQVVDVPPKLSARARVFSTGQGRKTDATDAHSIALVGTCMAGLRPVVDNQQLAVLRVLADRRRTLGEDHTRMVAQLHHLLLELIPGGAKKDLSAAQAKALLAKVRPRDAAGKTRRRVAAELIADLERVYARKKAADKELRELIEATGTSLLTLNGIGPSGAARLLIDVGDIIRFPTKGHFASWNGTAPLDVSSGDQIRHRLSRAGNRQINRTLHIMATVQLRNPSEGRAYYDRKKASGQTSMEAMRCLKRRLSDIVYRHMVDDAVRAVTGPGGQPGAATQSSAAGSHPHTGSSDKSRPGPATPDPTTVLPAAS

SEQ ID NO: 13273 - protein, 403 aa, unidentified
  source 1..403: note = protein_075227a
  REGION 9..163: note = RuvC_domain
  SITE 12: note = RuvC_P1
  SITE 61: note = RuvC_P2
  SITE 101: note = RuvC_P3
  SITE 103: note = RuvC_P4
  SITE 106: note = RuvC_P5
  REGION 270..357: note = Tnp_domain
  SITE 278: note = Tnp_P1
  SITE 309: note = Tnp_P2
  SITE 317: note = Tnp_P3
  SITE 318: note = Tnp_P4
  SITE 330: note = Tnp_P5
MKVRPVIWVGIDAGKTIHHACAMDSEGKVVFSQKVTNDQTAIEQLIARANKTATEVRWAVDLTSNAAALLLAVLVTAGQRVAYVPGRVVNRMTGVFRGEAKSDAKDARIIAETARMRSDLTELSTPDELVVELTRLTAHREDLMADWVRGVNRLRDLLTSIFPALERAFDYSTRSALILVAGYQTPDAVRAAGEHGLTRHLLDHSAWAKGTPSMVDKTLAAAASQTVRLPGETTTAVLIARLARQLLDLDREIKDTDKLIKDRFRAHPQAEIIESLPGLGPILGAEFIVATGGDLAAFANSGRLASYAGLVPVPQDSGRVTGNLRRPKRYNRKLRRVFYMAALSSIRANGPSRTFYDKKRGERLIHTQALLALARRLVDVLWALLRDGRTFTPTAPPPATTAA

SEQ ID NO: 13274 - protein, 327 aa, unidentified
  source 1..327: note = protein_2033f11
  REGION 4..161: note = RuvC_domain
  SITE 7: note = RuvC_P1
  SITE 60: note = RuvC_P2
  SITE 100: note = RuvC_P3
  SITE 102: note = RuvC_P4
  SITE 105: note = RuvC_P5
  REGION 200..286: note = Tnp_domain
  SITE 208: note = Tnp_P1
  SITE 237: note = Tnp_P2
  SITE 245: note = Tnp_P3
  SITE 246: note = Tnp_P4
  SITE 259: note = Tnp_P5
MFYLGMDVAKAKLDCYLLTQLDPLKGKAKVVTNTAKGLADLLAWLTKNHIPHDQLHVTMEATGVYHELAATLLHDAGVCVSIANPAQVKHFGQGLAVRTKTDGVDSQVLARYCAMINPAAWLPPPPEARILKGFLARREAILQDLLREQNRQEKAQSTVTPELIHQSINDSIAFLNAQLKKLQSQIDDHIDRHPGLKNDLDLLQSIPAIGPQSGTQLLAVMHMHQFNTAEQLSAYLGLVPVERQSGSSLLGRAKLSKAGPSQIRAVLYMAAIVATKYNPHVKALFERLLARGKSKMSALGACMRKLVHLSFGVLKTQKKYQAEYQNA

SEQ ID NO: 13275 - protein, 399 aa, unidentified
  source 1..399: note = protein_6a733bb
  REGION 14..167: note = RuvC_domain
  SITE 17: note = RuvC_P1
  SITE 65: note = RuvC_P2
  SITE 106: note = RuvC_P3
  SITE 108: note = RuvC_P4
  SITE 111: note = RuvC_P5
  REGION 229..314: note = Tnp_domain
  SITE 237: note = Tnp_P1
  SITE 267: note = Tnp_P2
  SITE 275: note = Tnp_P3
  SITE 276: note = Tnp_P4
  SITE 287: note = Tnp_P5
MSNVPRGVEHRVVIGMDPHKRTVTIEVMASDETVLGGGRFETTIEGYAAMREYVDRWPDRVWAIEGCAGIGKHIAARLLGDEEQIVDVPPKLSARARVFSTGQGRKTDATDAHSVALVGTRMAGLHPVVDDQQLAVLRTLVDRRRSLGEDHSRMISQLHQLLLLLIPGGAKKFLSAAQAKVLLAGVRPRDAAGKARRRVAAELIADLERVYRRSKAADKELEALVRATGTSLMDLRGIGPSGAARLLVEVGDITRFPNKAHFGSWTGTAPIDASSGDQVRHRLSRGGNRQINRVLHIMATVQLRNATIGRAYYDRRKNDGKTSMEAMRALKRRLSDVVYRTMLNDAIKGVGAAGTGPGGQPGTTTDSSAADSNPDIDASEKSLPGPADTQPRTTNAAAG

SEQ ID NO: 13276 - protein, 341 aa, unidentified
  source 1..341: note = protein_6c1d429
  REGION 7..148: note = RuvC_domain
  SITE 10: note = RuvC_P1
  SITE 53: note = RuvC_P2
  SITE 88: note = RuvC_P3
  SITE 90: note = RuvC_P4
  SITE 93: note = RuvC_P5
  REGION 211..296: note = Tnp_domain
  SITE 219: note = Tnp_P1
  SITE 249: note = Tnp_P2
  SITE 257: note = Tnp_P3
  SITE 258: note = Tnp_P4
  SITE 270: note = Tnp_P5
MTSVALLGIDIGKHTFYLHGQDQHGHQVLRKKYSRRQLIDVLANTPVCTVVMESCAGAHWLARKLAESGHQVKLIAPQYVKPFLKGNKNDYNDAEAICEAAARPSMRFVAVKTPEQQTLSALHRLRESLIAHRTAAINQVHGFLLEFGVSLPIGMASIQRLPALLDDPVHALPPRLVQVLLRLHARIKGLSAEIKDIEAELARQLQDDDAGRRLLSIPGIGPISASALAAEAGDASQFKCGRDFAASLGLVPRQYSTGGKQTLLGISKRGDKHLRRLLVQGARAVMQRADRRDDALGTWLRGLLGRRHSNVVACALANKLARIVWAVLAKGGQYQPHPHAV

SEQ ID NO: 13277 - protein, 347 aa, unidentified
  source 1..347: note = protein_f53b030
  REGION 7..148: note = RuvC_domain
  SITE 10: note = RuvC_P1
  SITE 53: note = RuvC_P2
  SITE 88: note = RuvC_P3
  SITE 90: note = RuvC_P4
  SITE 93: note = RuvC_P5
  REGION 210..295: note = Tnp_domain
  SITE 218: note = Tnp_P1
  SITE 248: note = Tnp_P2
  SITE 256: note = Tnp_P3
  SITE 257: note = Tnp_P4
  SITE 269: note = Tnp_P5
MEQLIRIGMDTSKQVFQLHGVNAAEEPVLCRKMRRREMVRFFERLEPTIIGIEACGAAHHWGRVLQEMGHQVKLLPPEYAKAYVKRSKNDAADAAALCEAMSRPTMRFVAVKTADQQAAQMLAGTRDRLVRRRTQLSNAIRGYATEFGVIAGRGLAKIEPLLARLDEEKTLPKLARELFATHAREYAQLAAELEEIEAKLMAWHRQNEASRRLVRIPGIGPIGATLLAMKTPQPEAFRSGRQFAAWIGLTPKDHSTAGKTRLGAITRAGDAMLRQVLVVGATAVIQQARRGKGQPSPWLVELLKRKPPKLAAVALANKTARIAWKLMVSGEHYTSNRASAVSPAEAA

SEQ ID NO: 13278 - protein, 343 aa, unidentified
  source 1..343: note = protein_7148b97
  REGION 7..149: note = RuvC_domain
  SITE 10: note = RuvC_P1
  SITE 53: note = RuvC_P2
  SITE 88: note = RuvC_P3
  SITE 90: note = RuvC_P4
  SITE 93: note = RuvC_P5
  REGION 211..303: note = Tnp_domain
  SITE 219: note = Tnp_P1
  SITE 249: note = Tnp_P2
  SITE 257: note = Tnp_P3
  SITE 258: note = Tnp_P4
  SITE 270: note = Tnp_P5
MREISMIGLDLAKNVFQVHGIDASGGVVLRRQLRRSAVEKFFAQLPPCTVGMEACGSAHHWARVIGRYGHQVRLMPPAYVKPYVKRNKNDGRDAEAICEAVCRPTMRFVPVKSVEQQATLAVHSTRSLLVRQRTMVANALRAALSELGIVAAAGLEGLHELMARLEAPSTEIPEMMRGALLVLARHWQGLDTDERALERQIARAARADREARRLMEVPGVGPIIASTVLAKVPDAQVFRSGRDFAAWIGLTGRDHGTGGKHRPGRISKQGDRMLRALLISGASAHLRQQKRRGISDPWLRELLARRPYKVAMVAFAAKTARIIWAMLVKGEQYRARASAPAAV

SEQ ID NO: 13279 - protein, 398 aa, unidentified
  source 1..398: note = protein_e363fbd
  REGION 10..164: note = RuvC_domain
  SITE 13: note = RuvC_P1
  SITE 61: note = RuvC_P2
  SITE 101: note = RuvC_P3
  SITE 103: note = RuvC_P4
  SITE 106: note = RuvC_P5
  REGION 271..356: note = Tnp_domain
  SITE 279: note = Tnp_P1
  SITE 308: note = Tnp_P2
  SITE 316: note = Tnp_P3
  SITE 317: note = Tnp_P4
  SITE 329: note = Tnp_P5
MITTDVDIFLGLDVGKTDHWACAVTKDGTKIWNKTLPNDEAKLTAVYENLSAKGTVLVVVDQPATIGALAVAVAQHLGIPVAYLPGLSMRRIADMYPGTAKTDEKDAFIIADSARTMPHTLRSIQLSDEDEATLGMLTGLDLDLTRQITQTSNRIRGLFTQIHPSLERVLGPWLEHDAVLEVLASWPTPALLKHAGKARIDAKLKKHGARRHTAWTGAILEALDQQNVVVVGTDAAGLVIPHLARQLISLHAQRVDVAMHLEAMVEAHPLYPVLTSMPGVAVRTAAIIIAEISGKTFASAAALASYAGLAPTTRQSGTSIKSERVSHSGNKCLKRALFLSAFASIRFDPTSRAYYDRKRAQGKRHNQALIALAHRRLTVLFAMIRDASLYDLPELKIA

SEQ ID NO: 13280 - protein, 420 aa, unidentified
  source 1..420: note = protein_cbcec2f
  REGION 21..177: note = RuvC_domain
  SITE 24: note = RuvC_P1
  SITE 74: note = RuvC_P2
  SITE 114: note = RuvC_P3
  SITE 116: note = RuvC_P4
  SITE 119: note = RuvC_P5
  REGION 291..378: note = Tnp_domain
  SITE 299: note = Tnp_P1
  SITE 329: note = Tnp_P2
  SITE 337: note = Tnp_P3
  SITE 338: note = Tnp_P4
  SITE 351: note = Tnp_P5
MCLRWLSIATKLKELIVLNAVGIDVAKGKSVVSILRPYGEVISSPFELCHTSSAIDDFIHSLSNLEGEVRIVLEYIGRYHEPIARWLSDADFYVSVVNPKLIKDFGNNSLRKVKSDKKDALKIARYALDNWNDLRQYCFMDKTRDQLKTMNRQFDFYMKHKTALKNNLIALLDQTFPGANTFFTSPVRKDGSQKWVDFVASFWHVDCVRKVSLSVFTERYRKFCVRKGYDFHPDKPAQIFEASKELIALLPKDKMTKNLIMQAIEQLNTLSRTIEQLRLQMDQTAAQLPEYPVVMAMKGVGPSLGPQIMAEIGDVRRFSRRGALTAFAGVDPGVNQSSTYNQKSVRTSKRGSAQLRKSLFQVMDVLVKTSPENDPVYAFLSKKRAEGKPYYVYMTAGANKFLRIYYGRVKEYLASLSEEE

SEQ ID NO: 13281 - protein, 423 aa, unidentified
  source 1..423: note = protein_3a9a3bd
  REGION 23..183: note = RuvC_domain
  SITE 26: note = RuvC_P1
  SITE 81: note = RuvC_P2
  SITE 122: note = RuvC_P3
  SITE 124: note = RuvC_P4
  SITE 127: note = RuvC_P5
  REGION 290..376: note = Tnp_domain
  SITE 298: note = Tnp_P1
  SITE 328: note = Tnp_P2
  SITE 336: note = Tnp_P3
  SITE 337: note = Tnp_P4
  SITE 349: note = Tnp_P5
MKFKSQDRQNQLIEKITAQHLVVGIDIAQQTHVARAVNFRGIVVGNPLSFSNDEEGFQFLLRWIQTLQSTHALTEAIVGMEPTGHYWFSLSNWLSDRQFEVVLVNPHLVRKNKENRDNTPSKSDKKDALVIADMVKNGYYLFIRNTPEAFEELRVFLSNRDSVVTRLVSAKNQIHRWVDVVFPELRQVFKNIMCTGSLATLRLFPTPEELYKLQPQDVLQGWKSVMKRHSGEPKAKALISFASRSVGTKQALHAYKLHLKQLLDEYDLACLQLKTVETEIVAVLKRIPFAESMLAVKGISVISLAGILGEAGDLSGFVHGNALLRHAGLNLAEASSGKWTGQMKISKRGRSRLRRFIFMMTMSLVASNSEFKAMHTYNVQVKKMKKMRSIMKLCGKLARILVGMARSGEAYNPPKTMPIQLAA

SEQ ID NO: 13282 - protein, 362 aa, unidentified
  source 1..362: note = protein_dc801cd
  REGION 8..155: note = RuvC_domain
  SITE 11: note = RuvC_P1
  SITE 59: note = RuvC_P2
  SITE 95: note = RuvC_P3
  SITE 97: note = RuvC_P4
  SITE 100: note = RuvC_P5
  REGION 220..308: note = Tnp_domain
  SITE 228: note = Tnp_P1
  SITE 257: note = Tnp_P2
  SITE 265: note = Tnp_P3
  SITE 266: note = Tnp_P4
  SITE 278: note = Tnp_P5
MFTERTSVGLDVHARSIRASAIDTVTGELFEQTLSPGEDYRPVMDWITRLPGPVAVAYEAGPTGFGLARVLAGAGIRCVVAAPSKINRAPGDRVKTDARDARLLARLLRLDDLAAVVVPTIEQESARDLVRLRFDNRSDLMSARHRLGKLLLRHGHVYAGAKAWTGAHEQWMNSIHFTHPGTRIAFAESRELVTHLQARRDRLDAQIGLLAANSSFTPVVTRLCCLRGIATLTGFALAVEIGDWTRFTGSSIGSFLGLTPTEHSSGGTRRQGGITKAGNTHARRLLVESAWLHKPRYIVGKVLQERWNAATPAARERADLANRRLHHRWTQFDARGKKHTVATTAIARELAGWCWSLAVLPD

SEQ ID NO: 13283 - protein, 408 aa, unidentified
  source 1..408: note = protein_3773e74
  REGION 6..170: note = RuvC_domain
  SITE 9: note = RuvC_P1
  SITE 63: note = RuvC_P2
  SITE 109: note = RuvC_P3
  SITE 111: note = RuvC_P4
  SITE 114: note = RuvC_P5
  REGION 282..368: note = Tnp_domain
  SITE 289: note = Tnp_P1
  SITE 319: note = Tnp_P2
  SITE 327: note = Tnp_P3
  SITE 328: note = Tnp_P4
  SITE 341: note = Tnp_P5
MNPLYVGIDVSSKSNVVYFMLPDGSKHSNFSVANSHTGSSQLVKRILSAMTSCSLDTVLIGLEATSVYGDNLVYFLREDAALARFNSKIHVLNPKQVSKFKEAYNDLPKNDLIDSFVIADCLRFGRINKEVYIGDYRYKALQNLTRARYFAVFNLIKEKQRFMNILFKKYSTMTQEKVFSDTFSTTALAVYDEFESAEALADMDLHELTAFIMEKGKNRFPNPNAVAKAIQKAARSSYRLPKTVNDSVNQVLSISITSIKALEAQIKEFDKAIATQMELLPNVLISIPGIGPVFSAGIMAEIGDINRFHNQAQLAKYAGLAWKQHQSGDFEAQTTRLINSGNRFLKYYLCEAAFSLVRCDKEYSDFYHLKYKEVNRYQHKRALALTARKFVRLVFRLLKDNRLYTSAE

SEQ ID NO: 13284 - protein, 341 aa, unidentified
  source 1..341: note = protein_2ec7b73
  REGION 6..148: note = RuvC_domain
  SITE 9: note = RuvC_P1
  SITE 52: note = RuvC_P2
  SITE 87: note = RuvC_P3
  SITE 89: note = RuvC_P4
  SITE 92: note = RuvC_P5
  REGION 211..296: note = Tnp_domain
  SITE 219: note = Tnp_P1
  SITE 249: note = Tnp_P2
  SITE 257: note = Tnp_P3
  SITE 258: note = Tnp_P4
  SITE 270: note = Tnp_P5
MNITTVGLDLAKNVFQVHGINAAGEVVVRRRLRRSQVCAFFADLEPCLIGMEACGTAHFWARELAALSHDVRIMPPSYVKAYIRRGKNDAVDAEAICEAVMRPNMRFVPIKTEEQQAALMLHKARELLIRQQTMLVNALRAHMAELGMITPQGRGRVEDIIAVIEDDQDESIPGLAKSALKPLVTQLRAAEETTASLDAEIMSWHKSNEASKRLATIPGVGVLTASAIAATVPDPSFFCSGREFSAWLGLTPRQNSSGGKDRLGRISKQGNRYIRRLLVIGATSVLRHARAKSAPGADWVNGLLERRPPRLVTVAMANKTARIAWALLTKGETYRAPIAVV

SEQ ID NO: 13285 - protein, 343 aa, unidentified
  source 1..343: note = protein_8187c60
  REGION 7..149: note = RuvC_domain
  SITE 10: note = RuvC_P1
  SITE 53: note = RuvC_P2
  SITE 88: note = RuvC_P3
  SITE 90: note = RuvC_P4
  SITE 93: note = RuvC_P5
  REGION 212..305: note = Tnp_domain
  SITE 220: note = Tnp_P1
  SITE 250: note = Tnp_P2
  SITE 258: note = Tnp_P3
  SITE 259: note = Tnp_P4
  SITE 271: note = Tnp_P5
MQTIKTIGLDIAKSVFQVHGVDAAGQVVVRRKLKRRYVLAFFEKLPPCLVGIEACASSHHWSRELQTLGHTVRLMPPAYVKPYVKRQKNDAADAEAICEAVTRANMRFVATKTPEQQSGLVLHRTRHLFIRQQTAVINAIRTHLAEFGIVAPVGRNGVEQLLNVVANPNDKRVPEIARACLLALGAQLQRLKGQILEFDRMIRAWHRSSETSRRLDDCPGVGPALATALVATVADPKSFRSGRNFSAWIGLVPKQHSSGGKNRLGSISKQGDRYLRGLFVAGALAVIRYAKIHGSGHRPWLAALLARRPTKVAAIALANKIARMAWAMMAKGERYREPVALAA

SEQ ID NO: 13286 - protein, 350 aa, unidentified
  source 1..350: note = protein_abae11a
  REGION 7..149: note = RuvC_domain
  SITE 10: note = RuvC_P1
  SITE 53: note = RuvC_P2
  SITE 88: note = RuvC_P3
  SITE 90: note = RuvC_P4
  SITE 93: note = RuvC_P5
  REGION 213..293: note = Tnp_domain
  SITE 221: note = Tnp_P1
  SITE 251: note = Tnp_P2
  SITE 259: note = Tnp_P3
  SITE 260: note = Tnp_P4
  SITE 273: note = Tnp_P5
MSEVIIIGLDIAKHVFHAHGADEQGRAIFSKRIRRGKLLDLFAAQPSCTVALEACGGAHHWARQLTQLGHEVRLIPPAYVKPFVKRQKNDAIDAEAICEAAQRPSMRFVAVKSEQQQAAGLVFRTRDLLVRQRTQLINAIRGHLTEYGWVAPKGPSHVAMLADLIEEEEMASSLPEAAHAMFRLMLDLLASLNGKIADLDKEIARRAREDEISRRLMTVPGIGPISATAIAALAPPAETFAKGRDFAAWLGLTPLQRSTARCDIQNGRTHAQAPTHHRQQRGRASGDQTRRAKGFAAPTNAGSQTAHAGDRCARQQDGADRLGATCKAGKLQSSGRSQGVSLAGLRSSHV

SEQ ID NO: 13287 - protein, 348 aa, unidentified
  source 1..348: note = protein_65ef7f7
  REGION 11..152: note = RuvC_domain
  SITE 14: note = RuvC_P1
  SITE 57: note = RuvC_P2
  SITE 92: note = RuvC_P3
  SITE 94: note = RuvC_P4
  SITE 97: note = RuvC_P5
  REGION 216..301: note = Tnp_domain
  SITE 224: note = Tnp_P1
  SITE 254: note = Tnp_P2
  SITE 262: note = Tnp_P3
  SITE 263: note = Tnp_P4
  SITE 275: note = Tnp_P5
MIRNKPSAAVYGIDLGKNVFHVVGTDAAGNVIQRARFRRDTLLAFFERAERALVGMEACPGSQWLARKLQAIGHSVRIIPAQFVKPYVKSNKNDTIDAAAIAEAVVRPTMRFVQIKEPDQVDLQALHRIRDQLVGSRTRLICQMRAFCLEYGVAIRQGAGVFKLDLPRVIADESNDLTPTMRRLLAELFDDLSRLEKRIGGVTREIEGLAATDELARRLMTVPGIGPLVATALLAAAGNAQQFKKARDMAAWLGLVPQQYSTGGRTQMLGISKRGNRYVRRLLIHGARSCMMHLDRSRDRLGAWIDRLQSRMHVNKVTVALAAKIARIAWVVINRPGAIYERRDPAIA

SEQ ID NO: 13288 - protein, 342 aa, unidentified
  source 1..342: note = protein_9a18482
  REGION 6..147: note = RuvC_domain
  SITE 9: note = RuvC_P1
  SITE 52: note = RuvC_P2
  SITE 87: note = RuvC_P3
  SITE 89: note = RuvC_P4
  SITE 92: note = RuvC_P5
  REGION 211..296: note = Tnp_domain
  SITE 219: note = Tnp_P1
  SITE 249: note = Tnp_P2
  SITE 257: note = Tnp_P3
  SITE 258: note = Tnp_P4
  SITE 270: note = Tnp_P5
MEISTIGIDLSKTTFHVIGLNTRGEIVLRRKFSRKQLLQFTSNRQQMLIGMEACGGAHFLGRALRTQGHDAKLMPAQFVKAYRKSNKNDYLDAEAIAEAVQRPTMRFVPIKTDDQLDLQALHRVRDRWVARRTAVMNQIRGFLLERGITVRKGPSHLATQFQRMIEDADMPLSGRLRLLILELKHEWDELETRIEAANVELQRIAKQDDACSRLMEIPGFGPLVSTALVAAIGNGITFRTGRDLAAWLGLVPRQHSTGGKTRLLGISKRGNEYLRRMLLHGARSVVAQIGRTPSALGLWIADLSARSHRNVTVVALANKMARTAWAILSKGTRYCAPAMAAV

SEQ ID NO: 13289 - protein, 341 aa, unidentified
  source 1..341: note = protein_2e04ae8
  REGION 7..149: note = RuvC_domain
  SITE 10: note = RuvC_P1
  SITE 53: note = RuvC_P2
  SITE 88: note = RuvC_P3
  SITE 90: note = RuvC_P4
  SITE 93: note = RuvC_P5
  REGION 211..295: note = Tnp_domain
  SITE 219: note = Tnp_P1
  SITE 249: note = Tnp_P2
  SITE 257: note = Tnp_P3
  SITE 258: note = Tnp_P4
  SITE 270: note = Tnp_P5
MEKVSIVGLDLAKSIIQVHGASVDGSVLFRRKISSKKLLDFLSKIDPCIVAMEACAGSHHWGREIAKLGHQVKLIAPIYVKPFVKRQKNDAADAEAICEAAMRPTMRFVAVKSQEKQASATVFKVRDLLVRQKTQVINALRGLMAEFGITVPQGPAHVGILISQVEGDCSSLTEAARAPCLALIATLRALMDKVRELDQEIGRRARRDDVAKRLMSIPGIGPVIATALEALAPPAETFTRGRDFSAWMGLTPRQHSSGGKARLGKTSKMGQRDLRRLLIIGAAAVVRWASRRGAIEGSWLSRMIGKKPPMLITVALANRMGRIAWALMTNGGRYEEKRLAA

SEQ ID NO: 13290 - protein, 322 aa, unidentified
  source 1..322: note = protein_d1e7e24
  REGION 7..160: note = RuvC_domain
  SITE 10: note = RuvC_P1
  SITE 54: note = RuvC_P2
  SITE 94: note = RuvC_P3
  SITE 96: note = RuvC_P4
  SITE 99: note = RuvC_P5
  REGION 197..281: note = Tnp_domain
  SITE 205: note = Tnp_P1
  SITE 234: note = Tnp_P2
  SITE 242: note = Tnp_P3
  SITE 243: note = Tnp_P4
  SITE 254: note = Tnp_P5
MSDSIFIGIDVSRDTLEVGSTAQPATWSQPNTTEAIEALSTQLLALGPALVVLQATGGYEFEAACALQAAGLAVAVVNPRQARDFARAMGALAKTDSLDARMLAEFARVLNQHPKRERFVKPLADAQRQRQRQRLQALVLRRRQLVDMLTAERLRLRTSHASARPSVEQTIEFLKAQLGDIERDCAEHVNARHAELASALGSVKGVGTATTAVLLALLPELGTLCRRRIAALVGVAPLNRDCGLMRGKRTIYGGRADIRQVLYMAALVAVRHNPVFRAFYERLLAARKSKKVALVAAMRKLLGVLNAIARSGKHWDDSLHLA

SEQ ID NO: 13291 - protein, 424 aa, unidentified
  source 1..424: note = protein_a3a5c14
  REGION 6..162: note = RuvC_domain
  SITE 9: note = RuvC_P1
  SITE 60: note = RuvC_P2
  SITE 100: note = RuvC_P3
  SITE 102: note = RuvC_P4
  SITE 105: note = RuvC_P5
  REGION 268..355: note = Tnp_domain
  SITE 276: note = Tnp_P1
  SITE 307: note = Tnp_P2
  SITE 315: note = Tnp_P3
  SITE 316: note = Tnp_P4
  SITE 328: note = Tnp_P5
MPQIWAGIDAGKGHHHCVVIDADGAKLHSARVANDEAALLELIATVTDLAGGDECLWAIDLSSGGAALILGLLTAHDLPVVYIPGHAVHHAAKAYRGDGKTDAKDAAIIADQARMRRDLQLLSVADETRIELRALTAHRRDLVCDRTRAINRLRGHLLEYFPALERAFNYSASRASLLLLTGYATPDAIRKMGESRLARWLRAQGCRTAVATAATAVSAAKSQQSVLPGQAIAAELARRLALDVIALESRIAEIDQLIAACVESSRAAELLRSMPGFGPLLAAEFLASTGADLSVYVSADRLAGVAGLAPAPRDSGKISTNHHRPRRYDRRLLRACYLAAMVSVQQKTESRVFYDRKRGEGKSHKQAILALARRRLDVIWAMFRDDRSYTPPPSFGADFGENTTAPIAPKESQTTRSTPSLLAA

SEQ ID NO: 13292 - protein, 399 aa, unidentified
  source 1..399: note = protein_86a14ee
  REGION 12..166: note = RuvC_domain
  SITE 15: note = RuvC_P1
  SITE 63: note = RuvC_P2
  SITE 103: note = RuvC_P3
  SITE 105: note = RuvC_P4
  SITE 108: note = RuvC_P5
  REGION 273..358: note = Tnp_domain
  SITE 281: note = Tnp_P1
  SITE 311: note = Tnp_P2
  SITE 319: note = Tnp_P3
  SITE 320: note = Tnp_P4
  SITE 332: note = Tnp_P5
MTVSTDAIAVFCGLDVGKGQHHATALSPDGKRLHDKALPNTEPGLRELFTALAQHGPVLIVVDQPASIGALPLAVARTVGCQIGYLPGLTMRRLADLHPGESKTDARDAFVIADAARTLPHTLRSIDTDDETAAELTMLTGFDEDLAAESTRLRNRIRGLLTQIHPSLERVLGRRLDHPGVLALLEAFPTPTTMAAAGRDALLEVVKPHAPRMAERLVTDVLTALDEQTVVVAGTSAAATILPHLTSSLRSILHQRDTVAAQVEHLLEEHPLSQVLTSMPGIAVRTAARILVEIGDGSGFHNAAHLAAYAGLAPATRRSGSSIRGENPSRRGNKQLKRALYLSAFAALRDPQSQAYYQRKRSEGKHHVAALTCLARRRVDVLFAMLRDHTLYQPTPITA

SEQ ID NO: 13293 - protein, 349 aa, unidentified
  source 1..349: note = protein_be0b340
  REGION 7..148: note = RuvC_domain
  SITE 10: note = RuvC_P1
  SITE 53: note = RuvC_P2
  SITE 88: note = RuvC_P3
  SITE 90: note = RuvC_P4
  SITE 93: note = RuvC_P5
  REGION 211..298: note = Tnp_domain
  SITE 219: note = Tnp_P1
  SITE 249: note = Tnp_P2
  SITE 257: note = Tnp_P3
  SITE 258: note = Tnp_P4
  SITE 270: note = Tnp_P5
MKEVSIVGLDLAKRVFQVHAVSADGGFVLRKKLSRVHVMAFFQRLPSCTVAMEACATAHYWAREIGKLGHEVRLLPPAYVKPFVKRQKNDAADAEAIVEAAIRPSMRFVAPKTEKQQAACMVFRTRDLFVRQRTQLINALRAHLAEHGVIAPQGIANLAALIGIVDHDNNGLKRVVVETARLYLEQIDLLSSRIGNLEKAIKSEARQSDNTARLMSMPGMGPITAMAIEAFAPTMTAFRKGRDFAAWLGLVPRQHSSGGKQVLGRTSKMGQRDIRRLLIIGAMTVIRWACRKAPPENSWLGKMLSRKPRMLVAIALANKMARSVWAMMTKNEEFKVSALASAQAKIAVL

SEQ ID NO: 13294 - protein, 274 aa, unidentified
  source 1..274: note = protein_60905ad
  REGION 6..147: note = RuvC_domain
  SITE 9: note = RuvC_P1
  SITE 51: note = RuvC_P2
  SITE 86: note = RuvC_P3
  SITE 88: note = RuvC_P4
  SITE 91: note = RuvC_P5
  REGION 208..253: note = Tnp_domain
  SITE 216: note = Tnp_P1
  SITE 246: note = Tnp_P2
MTFELLAIDLGKSSFHLHSIASDGAILSRKVSRSKLAETVNALAPKTIAMEACASAHHWGRQFKDNGREVLLINPRFVKPFVRGSKNDAVDAAAIYEAATRPTMRFVPVKSITQQDVQSLHRVRERMIIQRTSLINHARGLLAEYGIVLPQGAWRFVSQAPAAVESADLSDLGRELFLELLDQLTDVNDRIAKIDRKISEICRDREDCRRLSELPGVGPIIATALVASVEDGRHFKSGRELAAWIGLVRDNTRLAANHALAELAAERTIIYVAR

SEQ ID NO: 13295 - protein, 404 aa, unidentified
  source 1..404: note = protein_037008c
  REGION 4..159: note = RuvC_domain
  SITE 7: note = RuvC_P1
  SITE 59: note = RuvC_P2
  SITE 96: note = RuvC_P3
  SITE 98: note = RuvC_P4
  SITE 101: note = RuvC_P5
  REGION 267..353: note = Tnp_domain
  SITE 275: note = Tnp_P1
  SITE 306: note = Tnp_P2
  SITE 314: note = Tnp_P3
  SITE 315: note = Tnp_P4
MWYTGIDWADEHHDALTIDEKGHQMGSIRVDHTPQGLAKLDTFLMQIIGSASKEQMACIIETTHGLLIVHLLEAGWPVYPVNPRTVDRRRSASGAKTDTIDAYLLAKTGRADFADLHRLTPDSDKVAELKQLTRDQDSLIRTQTRLVNQLTACLKAYYPVALDLFSKLQQKSTLGFLRAYPTLETARAASLQEVQQQLKHTRHPHPADAAASIVELLHHPQLQADVVLTRTKSRLMLALVSQLLPLMEQIATYDKEIHTLFLTHEDHAIFESLPRAGQHLAPRRLSEIGDDRQRYQDASSLQALAGTSPVLYQSGMYSKAHRRLGCIKPLRNALYQFAWQSTQSEAWAQDYYQRKRTEGKSHTVAIRALANVWVRIIFAMWTHRECYQTATFELAQQHHARRAA

SEQ ID NO: 13296 - protein, 422 aa, unidentified
  source 1..422: note = protein_4d4f18a
  REGION 4..157: note = RuvC_domain
  SITE 7: note = RuvC_P1
  SITE 59: note = RuvC_P2
  SITE 94: note = RuvC_P3
  SITE 96: note = RuvC_P4
  SITE 99: note = RuvC_P5
  REGION 284..371: note = Tnp_domain
  SITE 292: note = Tnp_P1
  SITE 323: note = Tnp_P2
  SITE 331: note = Tnp_P3
  SITE 332: note = Tnp_P4
  SITE 344: note = Tnp_P5
MLGIGIDWAEEFHDIALGTQEKGVIEQFRIGHGPAGVTALIERALRLEPDPAEVRVVLETRHGLLVEALIDAGFTVVPVNPDVVARRRGPARKKDDAEDARICCLLALDRHAALKTLIPHGELGGELRAIARDDDRATRDQRRLLNRLRADLHTTYPAALVLAGQDLGAPTVLRLLERWPTQPELAEASYQELVEFARLGRHGWPDRFADRVTAALAAPSLPTRDYLVRAKAAGIRLAAVQLLALHEARRGWQARMAELLLGGPRTGRDHTVKTPDPGKAFPGGEIYLSMPGLGDLLAARVAGEIGEHINQFDSPAGLQCYAGSAPVTRRSGKSDFVVARRLAHNHYLGAAVHQWAFCSLRQSGWAREFYDGKIAAGKSHHAALRALSNRWLEVLWHCLTKGILYDENVHVANRNRALGHAA

SEQ ID NO: 13297 - protein, 344 aa, unidentified
  source 1..344: note = protein_2c76e6d
  REGION 6..146: note = RuvC_domain
  SITE 9: note = RuvC_P1
  SITE 52: note = RuvC_P2
  SITE 87: note = RuvC_P3
  SITE 89: note = RuvC_P4
  SITE 92: note = RuvC_P5
  REGION 211..296: note = Tnp_domain
  SITE 219: note = Tnp_P1
  SITE 249: note = Tnp_P2
  SITE 257: note = Tnp_P3
  SITE 258: note = Tnp_P4
  SITE 270: note = Tnp_P5
MQISILGIDIGKNSCSVVGVDAHGAVVARRTMRRQTLIEFVEKLPTCVIAMEACCGAHHLGRLFTSKGHEVRLMSPEYVRPYVKAQKNDDRDAEGIAEAASRPTMRFVELKSQEQLDIQTLHRVRSRLVAERTTLINQLRAVLLERGLIFAAGRVKFESALDGLLAEADEMLSPRIRNLVIELRNEWRMLDEKVEALNAEFVSLARQNSAMRRLTSIPGIGVLNATALVAAIGDAGSFKHARDLGAWLGLVPRQFTTGGKARLLGITKRGNTYLRTLLVHGARAAMHTLSQSDTPIGRWLQAMLSRGIQRNVVIVALANKLARIAWAVLRKGQPYERAYGVAVV

SEQ ID NO: 13298 - protein, 342 aa, unidentified
  source 1..342: note = protein_63f459f
  REGION 7..149: note = RuvC_domain
  SITE 10: note = RuvC_P1
  SITE 53: note = RuvC_P2
  SITE 88: note = RuvC_P3
  SITE 90: note = RuvC_P4
  SITE 93: note = RuvC_P5
  REGION 212..298: note = Tnp_domain
  SITE 220: note = Tnp_P1
  SITE 250: note = Tnp_P2
  SITE 258: note = Tnp_P3
  SITE 259: note = Tnp_P4
  SITE 271: note = Tnp_P5
MSTIQTIGIDLAKNVFSIHGVDAYGKCVLRKTVKRNRLLEVFANLPPCLVGMEACSGAHHWARELSKLGHTPRIMASKFVIPYRQNEKNDANDAEAICEAVSRPKTRFVAIKSTEQQAVLTLHRIRHGLIKNRTATINQLRGLLSEFGIIIPQGRYPLQNTISSILEDAENGLPMLARELLYDLVNRIHDINIEVLRYDRKIYALVSQMKEAKKLMTIPGVGEHSATAIVATVSDGKQFRSSRQFAAWVGLVPRQYTTGGHVQLGRISKRGDKHIRTLLIHGARAVIARCKDKTDRNSLWLQQLVERRGYKRATVALAAKNARIIWALLTSGNEYKVNYING

SEQ ID NO: 13299 - protein, 341 aa, unidentified
  source 1..341: note = protein_1c85c26
  REGION 1..107: note = RuvC_domain
  SITE 4: note = RuvC_P2
  SITE 44: note = RuvC_P3
  SITE 46: note = RuvC_P4
  SITE 49: note = RuvC_P5
  REGION 214..299: note = Tnp_domain
  SITE 222: note = Tnp_P1
  SITE 252: note = Tnp_P2
  SITE 260: note = Tnp_P3
  SITE 261: note = Tnp_P4
  SITE 273: note = Tnp_P5
MIVDQPNTIGALPVTVARACGHDVAYLPGLSMRRIADLYPGQAKTDARDAFIIADTARTMPHTLRRVDTGDETLAELGVLVGFDDDLAGESTRTSNRIRGVLTGIHPALERVLGPRVTHPAVLEILARLGGPDGIRRAGKRKLTSVAVKHAPGMGARLADEILAALDALTVTVPSSKAAEIVLPHLADSLKEILLQRKRICVDVERMLDDHPLSHVLISMPGVGVRTAARILLEVGDGSAFKSAGHLAAYAGIAPVTHRSGSSIRGEHPARSGNRKLKRAVFLSAFAALHDPTSRAYYDRKRAEGKKHNAALICLARRRCDVLYAMLKNKTLYQIPAAAAA

SEQ ID NO: 13300 - protein, 439 aa, unidentified
  source 1..439: note = protein_7932a2e
  REGION 6..162: note = RuvC_domain
  SITE 9: note = RuvC_P1
  SITE 60: note = RuvC_P2
  SITE 100: note = RuvC_P3
  SITE 102: note = RuvC_P4
  SITE 105: note = RuvC_P5
  REGION 268..355: note = Tnp_domain
  SITE 276: note = Tnp_P1
  SITE 307: note = Tnp_P2
  SITE 315: note = Tnp_P3
  SITE 316: note = Tnp_P4
  SITE 328: note = Tnp_P5
MPQIWAGIDAGKGHHHCVVIDADGAKLHSTRVANDEAALLELIATVTDLAGDDECLWAIDLSSGGAALILGLLAAHDLPVVYIPGHAVHHAAKAYRGDGKTDAKDAAIIADQARMRRDLQLLTVADETRIELRALTAHRKDLVCDRTRAINRLRGHLLEYFPALERAFNYSASRASLLLLTGYATPDAIRKMGESRLARWLRAQGCRSAVATAATAVIAAKSQQSVLPGQAIAAELARRLALDVIALESRITEIDQLIATRVETSRAAELLRSMPGFGPLLAAEFLASAGADLSVYVSADRLAGVAGLASAPRDSGKISSNHHRPRRYDRRLLRACYLAAMVSVQQKTESRVIYDRKRAEGKSHKQAILALARRRLDVIWAMFRDDRPYSSPIKEGRGATPVSSSRTGLRQLLEPTQGDSGLSEGVVPLSDRSFVPISS

SEQ ID NO: 13301 - protein, 371 aa, unidentified
  source 1..371: note = protein_0f87743
  REGION 9..158: note = RuvC_domain
  SITE 12: note = RuvC_P1
  SITE 62: note = RuvC_P2
  SITE 98: note = RuvC_P3
  SITE 100: note = RuvC_P4
  SITE 103: note = RuvC_P5
  REGION 223..306: note = Tnp_domain
  SITE 231: note = Tnp_P1
  SITE 261: note = Tnp_P2
  SITE 269: note = Tnp_P3
  SITE 270: note = Tnp_P4
MNKYTTKYVGMDVHKETIAVAIAKEGRGGPLYYGEIPNTDEAIKKLLKKVASNGEKVLFCYEAGPCGYDVYRQLVDLGQRCDVIAPSLIPKKSGDRVKTDRLDATTLTRLHRAGELTPVWVPDKEQEAMRDLSRAREDMKAMESHAKQRLGAFLLRHGKRFSGRCKWTQAYFRWLAEIKFDMPAQQIVLQEYVDTVKYMKGRVEALEEEMRQAMQGWSLAPVVTGLMALRGVELITAMTVIAELGDMSRFDSARQLMAHLGLVPSEHSSGNRQKRGGITKTARRVLIEASWCYRSPARKTAQIQRRAEKTSETVQAIAWKAQKRLCRRYWYLINKGKRPVEACTAVARELSGFMWAIACEVMGKNYVCATA

SEQ ID NO: 13302 - protein, 346 aa, unidentified
  source 1..346: note = protein_750377e
  REGION 7..149: note = RuvC_domain
  SITE 10: note = RuvC_P1
  SITE 53: note = RuvC_P2
  SITE 88: note = RuvC_P3
  SITE 90: note = RuvC_P4
  SITE 93: note = RuvC_P5
  REGION 212..299: note = Tnp_domain
  SITE 220: note = Tnp_P1
  SITE 250: note = Tnp_P2
  SITE 258: note = Tnp_P3
  SITE 259: note = Tnp_P4
  SITE 271: note = Tnp_P5
MKQITTIGLDLAKQVFQVHGADAEGAPIINRKLRRAEVLRFFEKLPPCLVGLEACGGSHYWAREIAALGHDVRLIPPIYVKAFVKRGKTDAADAEAISEAVTRKTMRFVPVKSADQQAAAMVLKTRALLVRQQTQAINALRAHLSEFGVIAAIGAKKVATLIETVRDETDSRLPKAARFALTEIANQIEGLTRQIDKLEREIVAETKRDKDMRRLATIPGVGAIIAASIKALVPDPDGFKSGRHFAAWLGLTPKPHSSGGKERLGRISKMGNPMLRCLLIVGATSVLRRVRGNANAPQWLVALLARRPFKVGAVALANKIARIIWALLTKGGTYRNAGVANGAVIA

SEQ ID NO: 13303 - protein, 408 aa, unidentified
  source 1..408: note = protein_3478065
  REGION 12..172: note = RuvC_domain
  SITE 15: note = RuvC_P1
  SITE 69: note = RuvC_P2
  SITE 109: note = RuvC_P3
  SITE 111: note = RuvC_P4
  SITE 114: note = RuvC_P5
  REGION 279..363: note = Tnp_domain
  SITE 287: note = Tnp_P1
  SITE 316: note = Tnp_P2
  SITE 324: note = Tnp_P3
  SITE 325: note = Tnp_P4
  SITE 337: note = Tnp_P5
MIEHYDSVDVFVGVDVGKGEHHAVAYDRAGKVLFDKALPNDKALPNDAAKLREVIGKLKKHGQVLFVVDQPATIGALPVAVAQAENVLVGYLPGLAMRRIADLHPGEAKTDARDAAIIAQAAHTLPHALRSIQLADEQVAELSMLCGFDDDVLGQIVATSNRIRGLLTQIHPALERVLGPHLDHPAVLDLLQKHPSPASMKAAGTVRLGNRLIKRAPRMGRRLAAQITQALGEQTVVAVGTNAANTVLPRLAEQLSALRRQRDEIAVEVERLIDAHPLQPVLISMPGVGARTAARLLTEVSGKEFANAGHLASDAGLAPVTRRSGSSIRGEHSSRRGNKALKRALFLSALAALHDQASRTYYDRKIAEGKHHNQALLALARPRCNVLYAMLRDGTLYENEPKKHALAA

SEQ ID NO: 13304 - protein, 349 aa, unidentified
  source 1..349: note = protein_3c58194
  REGION 12..152: note = RuvC_domain
  SITE 15: note = RuvC_P1
  SITE 58: note = RuvC_P2
  SITE 93: note = RuvC_P3
  SITE 95: note = RuvC_P4
  SITE 98: note = RuvC_P5
  REGION 217..302: note = Tnp_domain
  SITE 225: note = Tnp_P1
  SITE 255: note = Tnp_P2
  SITE 263: note = Tnp_P3
  SITE 264: note = Tnp_P4
  SITE 276: note = Tnp_P5
MPHKLNSGIAVIGIDIGKNSFHVVGHDKRGAIVLRQKWSRGQVETRLANLRPCLIGMEACVGAHHLRRKLQMLGHDARLMPAKYVRPYSKGQKNDFRDAEAIAEAVQRPTMKFVATKTAEQLDLQAMHRVRERLVSQRTGIINQIRAFLLERGVAVRQGLRFLRTELPRILAAPCDALSPRMLRVIEDLAGDWRRLDERIEGLSSEIEVLARRDVGCERLMTVPGIGPIISSAMVAAVGTGDAFTKGRDFAAWLGLVPKQISTGDRTILGKISKRGNRYLRVLFVQAAWVVLIKPKSWDRHGLKPWLETAKKRLHHNVLAIALANKLARIAWSVLAHGRAFEASKLQVG

SEQ ID NO: 13305 - protein, 340 aa, unidentified
  source 1..340: note = protein_92206d2
  REGION 6..148: note = RuvC_domain
  SITE 9: note = RuvC_P1
  SITE 52: note = RuvC_P2
  SITE 87: note = RuvC_P3
  SITE 89: note = RuvC_P4
  SITE 92: note = RuvC_P5
  REGION 210..296: note = Tnp_domain
  SITE 218: note = Tnp_P1
  SITE 248: note = Tnp_P2
  SITE 256: note = Tnp_P3
  SITE 257: note = Tnp_P4
  SITE 269: note = Tnp_P5
MEITTIGLDIAKNVFQLHGVDGDGRAVLRRKVKRDQLLALLGDLEPCLIGIEACATAHHWARQLQALGHEVRLMPPAYVKAYVKRNKNDAADAEAICEAVTRPTMRFVPIKSADAQSVLMLHRARHLLVRQRTAQVSAMRAHLAEYGVIAPKGRAHVRDLVETLTDGTAPIPELARQTLLLIAGMIEGLSRQIRAIEIELLAWHRANAICRRLETIPGIGFITATALAATVGDAKVFRSGRQFAAWLGLVPKQHSSGGKERMGGISKMGDRYLRHLLVVGATAVIRYTRRKTTTVSAWAAQLLERKPARLVSVAVANKTARIAWAVMTREENYRAAPATA

SEQ ID NO: 13306 - protein, 400 aa, unidentified
  source 1..400: note = protein_019aaee
  REGION 10..164: note = RuvC_domain
  SITE 13: note = RuvC_P1
  SITE 62: note = RuvC_P2
  SITE 102: note = RuvC_P3
  SITE 104: note = RuvC_P4
  SITE 107: note = RuvC_P5
  REGION 270..356: note = Tnp_domain
  SITE 278: note = Tnp_P1
  SITE 308: note = Tnp_P2
  SITE 316: note = Tnp_P3
  SITE 317: note = Tnp_P4
  SITE 329: note = Tnp_P5
MRERKARVWTGIDAGKGHHWAAVVDETGATLWSRKVDNDEAAILTALGEILDLADEVRWAVDISGTSSALLLALLAAHGQRAVYVPGRTVNRMSGAYRGEAKNDARDAYVIAETARHRNDFAAIDVPAQLAADLALLTGHRSDLVADRTRMINRLRDVLTGIFPALERAFDYSSQKGALVLLTGCQTPGAIRRRGRARLTAWLANRSVRSADSVAATALRAARAQQAALPGEEIAAQIVADLAGQILALDDRLKRIDKQIRETFCSHPQAEIIESMPGMGPTLGAEFVVAAGDLSAYVDAGHLASAAGLVPVPRDSGRRTGNLHRPKRYSRRLRRVFYLSAQTSIIRDGPNRDFYLKKRGEGCKHVQAVIALARRRASVLWALLRDGRVFTSAPPVTQAA

SEQ ID NO: 13307 - protein, 343 aa, unidentified
  source 1..343: note = protein_078c958
  REGION 7..149: note = RuvC_domain
  SITE 10: note = RuvC_P1
  SITE 53: note = RuvC_P2
  SITE 88: note = RuvC_P3
  SITE 90: note = RuvC_P4
  SITE 93: note = RuvC_P5
  REGION 212..304: note = Tnp_domain
  SITE 220: note = Tnp_P1
  SITE 250: note = Tnp_P2
  SITE 258: note = Tnp_P3
  SITE 259: note = Tnp_P4
  SITE 271: note = Tnp_P5
MQTVTTIGLDIAKSVFQVHGVDGAGQVVIRRQLKRRYVLAFFQKLPPCLVGIEACASSHHWSRELQALGHTVRLMPPAYVKPYVKRQKNDMADAEAICEAVTRANMRFVPTKTPEQQSGLMLHRTRHLLIRQQTSVINAIRAHLAEFGISAPVGRRGIEELLRVVADPSDKRVPELVRSCLAALGSQLLSLKKQILEFDRMILAWHRCNQTSKRLNCIPGVGPLLATALVASVGDAKSFRSGRNFSAWIGLVPKQQSSGGRERLGSISKKGDRYLRSLFVAGALAVIRYAKLHGSNHRPWLTALLARRPTKVAAVALANKLARMAWALMARGERYNYPVALRP

SEQ ID NO: 13308 - protein, 357 aa, unidentified
  source 1..357: note = protein_c04393e
  REGION 2..113: note = RuvC_domain
  SITE 12: note = RuvC_P2
  SITE 51: note = RuvC_P3
  SITE 53: note = RuvC_P4
  SITE 56: note = RuvC_P5
  REGION 224..314: note = Tnp_domain
  SITE 232: note = Tnp_P1
  SITE 262: note = Tnp_P2
  SITE 270: note = Tnp_P3
  SITE 271: note = Tnp_P4
  SITE 283: note = Tnp_P5
MNDLHHPQLIFESTGIYSRGMERFCCVNQINYIQMNPLEAKFKTSALRSWKTDQADAHKLACLGPTLKQTDNLPIHELIFFELRERVRFHLEIENEQNRLKFQILELLHQTFPGLERLFSSRYSIIALNIAEIFTHPDMVLDIDKDVLITHIFNSTDKGMSMDKATKYALQLRVIAQESYPNVDRHSFLVEKLRLLIQQLKQSIHHLKQLDDAMIQLAQQLDYFENIHSIPGIGKLSTAMIIGEIGDIKRFKSNKQLNAFVGIDIKRYQSGHTHCRDTINRRGNKKARKLLFWVIMNIIRGQHHYDNHVVDYYYKLRKQPNEKPHKTAIIACINRLLKTIHYLVMNHKLYDYQMSPH

SEQ ID NO: 13309 - protein, 328 aa, unidentified
  source 1..328: note = protein_5dfab43
  REGION 3..132: note = RuvC_domain
  SITE 36: note = RuvC_P2
  SITE 71: note = RuvC_P3
  SITE 73: note = RuvC_P4
  SITE 76: note = RuvC_P5
  REGION 195..282: note = Tnp_domain
  SITE 203: note = Tnp_P1
  SITE 233: note = Tnp_P2
  SITE 241: note = Tnp_P3
  SITE 242: note = Tnp_P4
  SITE 254: note = Tnp_P5
MVGFDSKGKEVKRKRLTRGKLVESVANLPPCLIAMEACGGAHHWARRFQDLGHEVRLIAPQYVKAYVRGNKNDYNDARAIGEAARVADMRFVQVKSVEQQDVQAMHRLREARVGERTALCNQLRGLLTEYGIVLAQGVGTVRKRVPELLEDAANGLSDFLRALLADAYRQLRELDGHIGFYTDALTAHARQNEAVERLQTVPGFGPIVASAFHAFVGNGHAFGKGRDLSAALGLVPRQHSSGGKTVLLGISKRGDRYLRSLLVHGARAVVRMADKKDDPLSRWICRLKVTRGANKAAVALANKLARIGWAILQRGGTYRAQPAPGGAG

SEQ ID NO: 13310 - protein, 391 aa, unidentified
  source 1..391: note = protein_5367882
  REGION 4..163: note = RuvC_domain
  SITE 7: note = RuvC_P1
  SITE 60: note = RuvC_P2
  SITE 101: note = RuvC_P3
  SITE 103: note = RuvC_P4
  SITE 106: note = RuvC_P5
  REGION 267..353: note = Tnp_domain
  SITE 274: note = Tnp_P1
  SITE 304: note = Tnp_P2
  SITE 312: note = Tnp_P3
  SITE 313: note = Tnp_P4
  SITE 326: note = Tnp_P5
MICVGIDVAKDKHDCFIISSEGKVLANVFTIQNSMEGFGYLLEKIRACSLPLDKIKVGLEATGHYSYNILGFLLDNGLDTYVINPLHTNLYRKSLTLRKTKTDRVDARTIAAMLMSDVGLKPYTDTAYHNEELKSLTRYRFDKVKVRAKLKSSIARLVCILFPELEKLVSSLHMASVYALLDEFPGAKQIAAAHLTRLTHLLAESSKGRYGRDKAIEIREAARQSIGSVTTAKSLELRHTIRLIRELDAEIAEIEQVIQRIMDKMLSPITTIPGIGYRMGAMILSEVGDFSRFDSPDKILAYAGLSPSTYQSGQLKNCYAHMEKRGSRYLRYAIFNATKFVCLWDPVFAAYLARKRAEGKHYNVAISHAAKKLVRLIYALEKSGEPYRLAA

SEQ ID NO: 13311 - protein, 339 aa, unidentified
  source 1..339: note = protein_cb3247b
  REGION 6..147: note = RuvC_domain
  SITE 9: note = RuvC_P1
  SITE 52: note = RuvC_P2
  SITE 87: note = RuvC_P3
  SITE 89: note = RuvC_P4
  SITE 92: note = RuvC_P5
  REGION 210..297: note = Tnp_domain
  SITE 218: note = Tnp_P1
  SITE 248: note = Tnp_P2
  SITE 256: note = Tnp_P3
  SITE 257: note = Tnp_P4
  SITE 269: note = Tnp_P5
MNSMAVGVDIAKQVFQVHYVDRETGEIVNRQIKRAKFLEHFANRAPCLIGMEACGGAHHWARELTKLGHEVRLMPAEFVKAFNIRNKNDAADARAIWLAVQQPGKPVAVKTEMQQAMLALHRMREQLVKFRTMQINGLRGLLTEYGEVMSKGRAALDKEIPAALGRIAARLPAALIDTLREQWNGLARLDEQIAEIERRMREWKQQDRAVKAISEIPGVGLLTATAAVAMMGDPKAFRSGREFAAWAGLVPKQTGSGGKVNLHGISRRGDTYLRTLLIHGARSVLTHTKEPGPWVEQMKQRRPMNVVIVALANKMARMIWAVLAHERPYRNDYVSVKPA

SEQ ID NO: 13312 - protein, 256 aa, unidentified
  source 1..256: note = protein_80ffafc
  REGION 2..110: note = RuvC_domain
  SITE 16: note = RuvC_P2
  SITE 51: note = RuvC_P3
  SITE 53: note = RuvC_P4
  SITE 56: note = RuvC_P5
  REGION 173..233: note = Tnp_domain
  SITE 181: note = Tnp_P1
  SITE 211: note = Tnp_P2
  SITE 219: note = Tnp_P3
  SITE 220: note = Tnp_P4
MIRYFERLPPVLVAIESCGSSHHWARLLQSFGHEVKLIPPQYVKAYVKRGKNDAADAEALCEAVTRPSMRFVPVKSKERQAACMLMTVRERLVSVKSQLSNAFRSYAAEFGIVGPAGRQNVAALIKRVLEDNSLPEMARDLFRLQAEEYATVEARLAKVEAKLMKWHREDDVSRRIATIPGVGPIGSSMLSMKAPPPETFRSGRDFAAWLGLTPKDHSTGGRQKKRRYYEGWRFGAPIDFDRRRDRAAEAYPKGAA

SEQ ID NO: 13313 - protein, 320 aa, unidentified
  source 1..320: note = protein_c7ac150
  REGION 5..152: note = RuvC_domain
  SITE 8: note = RuvC_P1
  SITE 57: note = RuvC_P2
  SITE 97: note = RuvC_P3
  SITE 99: note = RuvC_P4
  SITE 102: note = RuvC_P5
  REGION 194..279: note = Tnp_domain
  SITE 202: note = Tnp_P1
  SITE 231: note = Tnp_P2
  SITE 239: note = Tnp_P3
  SITE 240: note = Tnp_P4
  SITE 252: note = Tnp_P5
MEAVLGIDIGKMKFHVTLQFPDGTRRRKACANSPAGCTDLLAWMRRQGATRVHAGLEATGTYGEVLATRLVDAGHQVSLLNPAIIHHYAKSRLSRAKTDAVDADVIAEYVAKEHPPLWTPLPREIRELQALVRRLDALIGMQTEERNRAQAGGLTPAVEQSIAAVLRHLEQQIQQVRDQIRTHMDQHPGLRAQRDLLTSIPGIGEATAALLLAELFNKRFTSARQAAAFAGTVPRPNDSGLHQGRRVMCKVGPSRVRKGLYFPAIAAIRFNPSLQPLARRLKDAGKPPMLIIGAAMRKLIHLAFGVLKSGRAYDATLAKA

SEQ ID NO: 13314 - protein, 318 aa, unidentified
  source 1..318: note = protein_60c74d9
  REGION 10..159: note = RuvC_domain
  SITE 13: note = RuvC_P1
  SITE 55: note = RuvC_P2
  SITE 95: note = RuvC_P3
  SITE 97: note = RuvC_P4
  SITE 100: note = RuvC_P5
  REGION 191..275: note = Tnp_domain
  SITE 199: note = Tnp_P1
  SITE 228: note = Tnp_P2
  SITE 236: note = Tnp_P3
  SITE 237: note = Tnp_P4
  SITE 249: note = Tnp_P5
MKNQQATEFVGVDVASAHLDVAVYGQSSVQRYDNTVEGITKLLRTLRRGCVLGLESTGRYHTALAQAAHAAGLRVYVLNPLDARRYAQSVGQRGKTDRIDALVLARYVCREHEQLRQWQPPTASQAQLRELITHRATLVRQRSALKQAGSHNEMLTQLNAPVLKALKEAIEHIDTQLTAIIKADPPSRQAFEHITSVPGLGLVCGSLLVMLFGSMQQPSANAVIAFTGLDPRPNDSGKKTGQRRLSKRGWPESRRLLYVAAMSAARTKTWKEFYLAQREKGLSTTAALIVLARKLLRVAYSLFMQQNNFDGSRVAIKG

SEQ ID NO: 13315 - protein, 347 aa, unidentified
  source 1..347: note = protein_d8992b6
  REGION 6..148: note = RuvC_domain
  SITE 9: note = RuvC_P1
  SITE 52: note = RuvC_P2
  SITE 87: note = RuvC_P3
  SITE 89: note = RuvC_P4
  SITE 92: note = RuvC_P5
  REGION 211..299: note = Tnp_domain
  SITE 219: note = Tnp_P1
  SITE 249: note = Tnp_P2
  SITE 257: note = Tnp_P3
  SITE 258: note = Tnp_P4
  SITE 270: note = Tnp_P5
MNIATVGLDLAKSVLQLHAVDSHGQIVVRKQLRRADVLRYFATLQPCVIGMEACASSHYWGRELAKLGHTVRLIAPQFVRPYVKSNKTDAADAEAICEAITRPNMRFVPVKTQAQQTVLSLHRARAGLVKSRTALANQIRGLLGEFGIVLPQGIRLLGQRAMAALSIRDGEHSEPFRALIQMLVEHLRELGSKVAELEGRIRAIHRTDAPGQLLETIPGIGPLTASALAASIGNARAFRSGRELAAWLGLVPRQHSSGGTPHLLGISKRGDTALRTLLIHGARAVIRMAASKSEMADSWLMKLCRRRHKNIAAVALAAKNARTAWAMLIRNQAFQANHVPTRSSVTG

SEQ ID NO: 13316 - protein, 352 aa, unidentified
  source 1..352: note = protein_1d9adb1
  REGION 4..159: note = RuvC_domain
  SITE 7: note = RuvC_P1
  SITE 59: note = RuvC_P2
  SITE 100: note = RuvC_P3
  SITE 102: note = RuvC_P4
  SITE 105: note = RuvC_P5
  REGION 222..307: note = Tnp_domain
  SITE 230: note = Tnp_P1
  SITE 260: note = Tnp_P2
  SITE 268: note = Tnp_P3
  SITE 269: note = Tnp_P4
  SITE 280: note = Tnp_P5
MVTVGIDPHKHVHVAVAVNAQGRRLGKPLTVKNDAFMITVLLTWVRSIAGDMPVTWAIEDGRGFARRLADGLLLASQEVVWVPARLTAAHRKLHAATGTKSDPVDAAAAAHAALATPGLDRHRIDERVRELRVLVDYRADLIKRRTMMINQLKAQLHVWLDHTPGDLARPKGMDAVTALLDAASLGAHVRQALTEMSMEIAELNRRVRQLDDAIRELVTPLAPTLLEITGISHISAAILIAEIGDITRFSSSAKLARYTGCAPIPVYSADKERHRLHRGGNRRLNSVLYTAAIVQKRRYPAAQALLARHEPTKGSRGARRILQRHLIDVIHRAMTTDQASWQHHITRHDHAA

SEQ ID NO: 13317 - protein, 343 aa, unidentified
  source 1..343: note = protein_e2b96c8
  REGION 6..150: note = RuvC_domain
  SITE 9: note = RuvC_P1
  SITE 54: note = RuvC_P2
  SITE 89: note = RuvC_P3
  SITE 91: note = RuvC_P4
  SITE 94: note = RuvC_P5
  REGION 213..299: note = Tnp_domain
  SITE 221: note = Tnp_P1
  SITE 251: note = Tnp_P2
  SITE 259: note = Tnp_P3
  SITE 260: note = Tnp_P4
  SITE 272: note = Tnp_P5
MKLSRIGIDLAKNVFQLHGVDRHEKAVWKRRLKRDQWLKAVFNQAEPGCEIGMEACAGAHHWARELESRGYLVKLMAPQFVKPYVKSNKNDANDAEAICEAMSRPHMRFVTVKSVEQQDIQATHRIRSELMTQRTAKSNQIRGLVTEYGLVAPLTLRALRAAIPCWLEDAENGLTDHFRSLLHGLWSDLSALGDRVLELDQTILKIANSNEITRRLQQLRGVGPMVATALIATVGDAQQYHKGRQMAAAIGLTPRQHSSGGKNRLLGISKRGDVYLRSLLVHGARAVVSQAKHRDDRLSRWVTGIAQRRHPNVAAVALANKTARMAWAMLRNETNYDPDFATS

SEQ ID NO: 13318 - protein, 320 aa, unidentified
  source 1..320: note = protein_61a5cad
  REGION 8..163: note = RuvC_domain
  SITE 11: note = RuvC_P1
  SITE 56: note = RuvC_P2
  SITE 96: note = RuvC_P3
  SITE 98: note = RuvC_P4
  SITE 101: note = RuvC_P5
  REGION 195..279: note = Tnp_domain
  SITE 203: note = Tnp_P1
  SITE 232: note = Tnp_P2
  SITE 240: note = Tnp_P3
  SITE 241: note = Tnp_P4
  SITE 252: note = Tnp_P5
MSSSSVVVGIDVAKAHVDVSVLGAKLDAQRFDNLAEAHSALPAALKPLDVVLAVMEATGGYETELACALQTAGLPVAVVNPRQARDFAKSMGRLAKIDAVDARMLAECAAVLLRRDDLARFLRPLVDEQQQWLAALVTRRRQLLSMLLSERQRLQITPKGLHPSIEAIIAAIKAQLDDIEAQMVAHVGKHFAELDALLQSASGIGPVASATLIAELPELGRLNRRQIAALVGIAPMANDSGSSKGRRRIRGGRFDVRRVLYMAALTASRRNPVVKAFYERLIAADKLPKVALVACMRKLLTTLNAMVRTNKPWDNSLHGA

SEQ ID NO: 13319 - protein, 419 aa, unidentified
  source 1..419: note = protein_663d813
  REGION 4..162: note = RuvC_domain
  SITE 7: note = RuvC_P1
  SITE 60: note = RuvC_P2
  SITE 101: note = RuvC_P3
  SITE 103: note = RuvC_P4
  SITE 106: note = RuvC_P5
  REGION 268..355: note = Tnp_domain
  SITE 276: note = Tnp_P1
  SITE 306: note = Tnp_P2
  SITE 314: note = Tnp_P3
  SITE 315: note = Tnp_P4
  SITE 328: note = Tnp_P5
MVYAGVDIAKVDHVIGAVDERGEEQGKRMPFKNSAAGFERCEAWLEGVAERPSDVLVGMEATGHYWMALYAFLVSRGYSVAVIDPVQVRAVRRLKGLDRVKNDRVDAGLIAETLRIGQYDPTRLATDEVQSLRSLTRYRQSLKAELAEAKTQCLCLLDSYFPELPGAFSDVFGAAGRAVLSRSPLPSELARRRTDSLQRDISEAARGSRRMDGKAAELRALAKGSVGIRLGEAAASMQVRSLVRQMDFLDAECAKFDALIRELLERVEPLVLTIPGVSYATGAQIVAEIGDISRFRNAPALVSYAGLNSGVNQSGKFDSGGGPITKHGSPYLRRALWLAASRARQYDPSLRAFYERKRAEGKCHRVAVTAVARKLCHIVFAVMRDGVPYDPARPGRDPSKHSVSGSQGAGSDESGNEKS

SEQ ID NO: 13320 - protein, 392 aa, unidentified
  source 1..392: note = protein_e74793d
  REGION 6..159: note = RuvC_domain
  SITE 9: note = RuvC_P1
  SITE 57: note = RuvC_P2
  SITE 98: note = RuvC_P3
  SITE 100: note = RuvC_P4
  SITE 103: note = RuvC_P5
  REGION 223..308: note = Tnp_domain
  SITE 231: note = Tnp_P1
  SITE 261: note = Tnp_P2
  SITE 269: note = Tnp_P3
  SITE 270: note = Tnp_P4
  SITE 281: note = Tnp_P5
MARMVIGLDPHKRSATIEIINNQERVLHQGRYRTDSGGYQAMLAAGRRHLERVWAVEGCNGIGRHVAQRLVADGETVWDVPAKLAAKARIFDTGHGRKTDPHDAHHIAVTALRTPNLRQVSADDTTVALRLLADRRDQLGVARTETVSRLHQLLLELIPGGAKKNLTTAQARTLLDAMTVTTADIVTITRHQLAGDLIDELITLDAKKKTATQQLDTLLATTGTGLTSLNGIATSGAARLLGDIGDIRRFPSRGHFATWNGTAPIDVSSGDNEHHRLNRAGNRRINRTLHIMAIAQLRYDTPGRAYYQRKRAEGKSAMEAMRALKRRLSDTVYRQMVTDDRAARQTATGPGGHTGATTNSSAADPNPKIDTSDKSLPEPANHHTKTSTPDTP

SEQ ID NO: 13321 - protein, 337 aa, unidentified
  source 1..337: note = protein_6c92f55
  REGION 6..148: note = RuvC_domain
  SITE 9: note = RuvC_P1
  SITE 52: note = RuvC_P2
  SITE 87: note = RuvC_P3
  SITE 89: note = RuvC_P4
  SITE 92: note = RuvC_P5
  REGION 209..299: note = Tnp_domain
  SITE 217: note = Tnp_P1
  SITE 247: note = Tnp_P2
  SITE 255: note = Tnp_P3
  SITE 256: note = Tnp_P4
  SITE 268: note = Tnp_P5
MQITTIGLDLAKHVFQVHGCDAAGNCGVKRRLRRNQVLEFFAGLAPCLVGIEACGTAHHWARELRALGHDVRLMPAHYVKAYVKRGKNDAADAAAICEAVSRPSMRFVPIKTREQQAVLTMHRTRDLLMRQRTQLINAVRGHLAEFGIVEPQGVWHLGRVLRHLEVDDEVIEPARQVIGLLASQLNDLEGRIKEVDKQIALWHKASPTSQRLATIPGIGPVIASAIAATVPDAGVFRSGREFAAWLGLVPRQRSTGGKQRLGRITRDGDRYIRRLLIMGAQAVLQSSKAARANPWIQNLLARCPRLKVAVALANKTARIAWAVMTKGEIYRQAAASA

SEQ ID NO: 13322 - protein, 342 aa, unidentified
  source 1..342: note = protein_23dfcb2
  REGION 6..148: note = RuvC_domain
  SITE 9: note = RuvC_P1
  SITE 52: note = RuvC_P2
  SITE 87: note = RuvC_P3
  SITE 89: note = RuvC_P4
  SITE 92: note = RuvC_P5
  REGION 210..295: note = Tnp_domain
  SITE 218: note = Tnp_P1
  SITE 248: note = Tnp_P2
  SITE 256: note = Tnp_P3
  SITE 257: note = Tnp_P4
  SITE 269: note = Tnp_P5
MKDTMIGVDLAKSVFQLHGASLAGHLKFRKKVTRVQLRHFMAKHEPAVVVMEACGSASYWAREMVKLGHEVRLIAPQYVRPFVKRQKNDAADAEAIVVAAQRPEMRFVEPKSEDQQACAVLFRARERLLHQRTERVNALRSVLYEYGHVFPKGIAHLRRIEAVLTDPASDLPALVRDECHDLLEQISEQTARIEAKTAKTRGLAGTNDTARRLQTMPGVGPQTALAISGFAPPMDSFKRGRDFAAWLGLVPRQYSSGGKERLGRISKAGQTDIRYLLIIGAMSRLTVLARKSIQEGSWLARMLHRKPLMLVAIALANKMARAIWAMMTKKEDYRDPARAVST

SEQ ID NO: 13323 - protein, 315 aa, unidentified
  source 1..315: note = protein_4605604
  REGION 12..182: note = RuvC_domain
  SITE 15: note = RuvC_P1
  SITE 57: note = RuvC_P2
  SITE 97: note = RuvC_P3
  SITE 99: note = RuvC_P4
  SITE 102: note = RuvC_P5
  REGION 193..276: note = Tnp_domain
  SITE 200: note = Tnp_P1
  SITE 229: note = Tnp_P2
  SITE 237: note = Tnp_P3
  SITE 238: note = Tnp_P4
  SITE 250: note = Tnp_P5
MAMPVSASKPIVGVDVAKNELVIYHAELSLLEEIPNNKTAIKKWLKALPSTVAIAVEATNIYHLEFADLAYEAGCVIYMVGGYELKHYREGVKVRAKTDALDAKLLARYLKNEHEELHPWTPPSPLYRQLLSLFRRRAALVQARVGLVQSWANEPLLKTAFAEQVKSMQQLEMLIEKTINDQLKEAGLLGQLKRCLKVEGIGFLTGARLITAFQRGDFRNADAFIAFLGMDLRVSKSGQKDGRRSLTKRGDPEARRLLHNAAMSASRTEAWKDFYQEQRARGFSTTQALVMLARKLARVVFALLKGQDEYQPKVS

SEQ ID NO: 13324 - protein, 347 aa, unidentified
  source 1..347: note = protein_25fe88e
  REGION 13..166: note = RuvC_domain
  SITE 16: note = RuvC_P1
  SITE 65: note = RuvC_P2
  SITE 106: note = RuvC_P3
  SITE 108: note = RuvC_P4
  SITE 111: note = RuvC_P5
  REGION 207..294: note = Tnp_domain
  SITE 215: note = Tnp_P1
  SITE 245: note = Tnp_P2
  SITE 253: note = Tnp_P3
  SITE 254: note = Tnp_P4
  SITE 267: note = Tnp_P5
MPYHAQEEVQVFAGIDVSARELNVAWRRPEKDKETTATFTNTRSGHKALLAFLLRGNQRVRVCLEVTGNYSLDLALALQAHGQVEINVVNPRRARRFAESLGERSKTDPVDAHVLCEYALRMPWVPWQPPSSTALHLRAVMRAVEDLTSILTQEKNREHALAASHALPSLVLTELKRHQRYLQNRLTRLRREALQLVARDSQLSRRFQLMQTTPGIGENSALQILGELAVLPDTLDARQWVAFSGLDPRRFKSGTSVEQRPRISRAGSRHLRRALYMPALVALRHDPHLGSFYQHLLKHGKARLQAVVAVMRKLLHAFFAMFRSDQPYDGSRLCPFELANKPVDSCG

SEQ ID NO: 13325 - protein, 320 aa, unidentified
  source 1..320: note = protein_cde4cf7
  REGION 8..163: note = RuvC_domain
  SITE 11: note = RuvC_P1
  SITE 56: note = RuvC_P2
  SITE 96: note = RuvC_P3
  SITE 98: note = RuvC_P4
  SITE 101: note = RuvC_P5
  REGION 195..279: note = Tnp_domain
  SITE 203: note = Tnp_P1
  SITE 232: note = Tnp_P2
  SITE 240: note = Tnp_P3
  SITE 241: note = Tnp_P4
  SITE 252: note = Tnp_P5
MSAFSVVAGIDVAKAHVDVDVVGAQFAAQRFDNEAEGHTAVAVALKALGVGLVVMEATGGYETALACALQGAGLAVAVVNPRQPRKFAEAMGYLAKTDRIDARVLAEFGQTLARRPDLSRFIRPMDDADQQWLAALVTRRRQLIAMMLSERQRLQLTPKKLHPSIEAIIAAIKAQLDDIEGQMVAHVKEHFSALDAILQSVKGIGPVSSATFIAELPELGKLNRRQIASLVGVAPFARESGTSKGRRRVQGGRFDVRRVLYMATLTAAFRNPVFKAFYQRLVDAGKLPKVALVACMRKLLTTLNAMVKTGSTWDPEHCRA

SEQ ID NO: 13326 - protein, 346 aa, unidentified
  source 1..346: note = protein_82ddfa6
  REGION 7..149: note = RuvC_domain
  SITE 10: note = RuvC_P1
  SITE 53: note = RuvC_P2
  SITE 88: note = RuvC_P3
  SITE 90: note = RuvC_P4
  SITE 93: note = RuvC_P5
  REGION 212..299: note = Tnp_domain
  SITE 220: note = Tnp_P1
  SITE 250: note = Tnp_P2
  SITE 258: note = Tnp_P3
  SITE 259: note = Tnp_P4
  SITE 271: note = Tnp_P5
MKQITTIGLDLAKHVFQVHGADADGAPVLRRKLRRAEVHAFFAKLPSCLVGMEACGSSHYWSREIAALGHEVRLIPPIYVKPYIKRGKTDAADAEAICEAVTRKTMRFVPIKSADQQAAAMVLKARDLLVRQQTQTINALRAHLSEFGIITGIGTAKVAALIAIVRDADDTRLPGAARFALSAIADQIEALARQVEKLEREIVAIAKRDEDMRRLATIPGVGAIIAASIKALVPDPDGFKSARHFAAWLGLTPKSHSSGGKERLSGISKMGNTTLRSLLVLGATSVLRYVRHNENAPRWLVALLARRPFKVVAVALANKMARIIWVLLTKGGTYQKPAVATGAANA

SEQ ID NO: 13327 - protein, 394 aa, unidentified
  source 1..394: note = protein_ed8456f
  REGION 4..163: note = RuvC_domain
  SITE 7: note = RuvC_P1
  SITE 60: note = RuvC_P2
  SITE 101: note = RuvC_P3
  SITE 103: note = RuvC_P4
  SITE 106: note = RuvC_P5
  REGION 266..353: note = Tnp_domain
  SITE 274: note = Tnp_P1
  SITE 304: note = Tnp_P2
  SITE 312: note = Tnp_P3
  SITE 313: note = Tnp_P4
  SITE 326: note = Tnp_P5
MIYVGIDVAKDKHDCFIANSDGEVLYDVFTIQNNITGFKDLLFKIKTAEPNPDKVKVGLEATGHYSCNILGFLKNMGLTTIVINPLYTSLSRKSISLRKTKTDKVDARTIASMIMSDVSLKPYSDKLYHNEDLKSLTRYRFDKVSQRAKLKQSVSRLVNILFPELETLISTLHGKAIYALLSEFPSAQHIASANLKHLTHLLDKASKGRFKRASADQIREAARQSIGSYLPSKSLELKHTIRLINELNDEIAEIESEIKKIMDAIDSPILSIPGIGLNLGAIIIAEIGDFSRFSNPDKILAFAGCSPSTYQSGQLYSSHAKMEKRGSRYLRWALLNAASYVCNWEPTFAAYLSKKRAEGKHYYVALSHAAKKLVRLLYHLEITGETYQPQIMSS

SEQ ID NO: 13328 - protein, 346 aa, unidentified
  source 1..346: note = protein_c4942c4
  REGION 7..148: note = RuvC_domain
  SITE 10: note = RuvC_P1
  SITE 53: note = RuvC_P2
  SITE 88: note = RuvC_P3
  SITE 90: note = RuvC_P4
  SITE 93: note = RuvC_P5
  REGION 214..298: note = Tnp_domain
  SITE 222: note = Tnp_P1
  SITE 252: note = Tnp_P2
  SITE 260: note = Tnp_P3
  SITE 261: note = Tnp_P4
  SITE 273: note = Tnp_P5
MMNIRVLGIDLGKNVCSLVGLDGAGAVVLRRGAKRETLIALAAKLPPCIIGMEACCGAHHLGRLFTNQGHEVRLMSPEYVRPYIKAQKNDDRDAEGIAEAATRPTMRFVDVKSQEQLDMQMLHRSRDRLVAERTALINQMRGILLERGIIVPQDKRALEQHLAALVEESDDASGLSPRMRVLIIDARAQWLELDRRIAAFDSEFSAFVKESEEAKRLVTIPGVGVTIASALIAAIGNAEAFEHGRDLAAWLGLVPRQSTTGGKPKLLGISKRGNKYLRKLLIHGARAALPHVAGRDTPLGRWAKGLLARAHHNVVVVALANKLARIAWAVLRSGDKFDVVGSPVAA

SEQ ID NO: 13329 - protein, 403 aa, unidentified
  source 1..403: note = protein_a679fb2
  REGION 6..158: note = RuvC_domain
  SITE 9: note = RuvC_P1
  SITE 57: note = RuvC_P2
  SITE 95: note = RuvC_P3
  SITE 97: note = RuvC_P4
  SITE 100: note = RuvC_P5
  REGION 266..352: note = Tnp_domain
  SITE 274: note = Tnp_P1
  SITE 305: note = Tnp_P2
  SITE 313: note = Tnp_P3
  SITE 314: note = Tnp_P4
  SITE 325: note = Tnp_P5
MSNYFAGLDWASKTHALCVIDERGGVVERFDIDHDAGGLTELRRRLRRFGSPPVAIERPSGLLVDTLVDADFTVVPIHPNAVKASRPRYRSHGGKSDASDAYVLADLLRTDGHRFKALTPQSDEIRALRALVRGRDDLVATRVHLANQLRTLLESFWPGAAAVFADIDSPIALAFIERYPTPESASRLGPKRMAAFCAQHAYCGRRSPDDLLARLQEAPSAVSAETEMEAKGELARCVARTLTRLVEQLRLLSSRIEHLVASLDDGRILMSFPRAGRICAAQILAELGSVRERFATDAQLAAEAGVAPVTYESGKSKAVTFRWACNHRLRAAITCLADNSRHVNAWAAHVYANARARGCDHPHSIRILARAWLRVIWRAWTDRKTYDPMQHRAAQLLLKAAGG

SEQ ID NO: 13330 - protein, 392 aa, unidentified
  source 1..392: note = protein_0489b67
  REGION 5..163: note = RuvC_domain
  SITE 8: note = RuvC_P1
  SITE 62: note = RuvC_P2
  SITE 102: note = RuvC_P3
  SITE 104: note = RuvC_P4
  SITE 107: note = RuvC_P5
  REGION 267..356: note = Tnp_domain
  SITE 275: note = Tnp_P1
  SITE 305: note = Tnp_P2
  SITE 313: note = Tnp_P3
  SITE 314: note = Tnp_P4
  SITE 327: note = Tnp_P5
MEPVVGVDVAKGSSVVQAFRKRNEPFGKAIDIVHEPSGFDQFTEMLGALQAETGVAPVVVLEATGHYHRALVCCLDQSGYTYYIVNPLQSKRARGAQLRKVKTDATDAWHLAEMYYRGDVKAHRTWDETFTELQHLTRQHEFVTGIFVQAKLNSRALLEQVFPEYEGLFSNVFSATSLTVLACCLEEGTADWIEVIQGSAGKSRSKQWVIEKVRKLEEVLGDWREARRSPSQRQALLGMVKLLLTMIRQLDELEKQMEDIATNLPEVELVKSIPGIGMKLAAAIVAEIGDVRQFRDAKQLVAFAGLDPGIFSSGKFTATGTRITKRGSKRLRRSLYLAVQCGMRKNVNAKIGSYYEKKRKEGKPYKVVVIACANKLLHHIFAILQKSQPYQS

SEQ ID NO: 13331 - protein, 261 aa, unidentified
  source 1..261: note = protein_e67d7d9
  REGION 1..65: note = RuvC_domain
  SITE 5: note = RuvC_P3
  SITE 7: note = RuvC_P4
  SITE 10: note = RuvC_P5
  REGION 129..214: note = Tnp_domain
  SITE 137: note = Tnp_P1
  SITE 167: note = Tnp_P2
  SITE 175: note = Tnp_P3
  SITE 176: note = Tnp_P4
  SITE 188: note = Tnp_P5
MKSNKNDFVDAEAIAEAVERKNMRFVPIKTDDQLDLQAIHRVRDRLISRRTAVINQLRAFLLERGMVFAQTPAKLKAAMADILENAEADLTPQMRNLIDMLWSEWKTVEQQIEELTTQLERISAADAGCTRIRQIPGIGPIVATAIVAAIGNGAAFRKGRDFAAWLGVVPRQYSTGGKAKLLGISKRGNVYLRKVLIHGARAAVLRIKRDRAPIGPWLDRLDARAPKNVVVVAMANKLARIAWAVLSSGEDYRPQPSVSAA

SEQ ID NO: 13332 - protein, 340 aa, unidentified
  source 1..340: note = protein_cfe70c4
  REGION 5..151: note = RuvC_domain
  SITE 8: note = RuvC_P1
  SITE 53: note = RuvC_P2
  SITE 91: note = RuvC_P3
  SITE 93: note = RuvC_P4
  SITE 96: note = RuvC_P5
  REGION 211..296: note = Tnp_domain
  SITE 219: note = Tnp_P1
  SITE 249: note = Tnp_P2
  SITE 257: note = Tnp_P3
  SITE 258: note = Tnp_P4
  SITE 270: note = Tnp_P5
MDEYIGLDVSLKDTAVSIRRGGKRIWRGKCASDPQLLAALIRKHAPAAKRVVFETGRLSVWFFHALTAEEVPAICIDARHAKAALDMAANKTDANDADGLAHLAEVGFYKEVRVKSFDSMLARTLVAARTRLVRIGTELSNQIRGLMKTFGLIVPAVTGTRFEHKVKELLAGNVELAQIIRPLLEAWHAVRLRAAELGRKLLADARRSEACQLLMTIPGVGVVTATSFITAIEDPTNFKHSRSVGAWVGLTTRRYQSGEVDYDGHISRRGDSHLRGLLYEAATVLLTRSRSECDLRKWGLQLRERLGFKRAAVAVARKLAVIMHAMLSTGEPFRGAHVTD

SEQ ID NO: 13333 - protein, 390 aa, unidentified
  source 1..390: note = protein_342140c
  REGION 4..163: note = RuvC_domain
  SITE 7: note = RuvC_P1
  SITE 60: note = RuvC_P2
  SITE 101: note = RuvC_P3
  SITE 103: note = RuvC_P4
  SITE 106: note = RuvC_P5
  REGION 266..353: note = Tnp_domain
  SITE 274: note = Tnp_P1
  SITE 304: note = Tnp_P2
  SITE 312: note = Tnp_P3
  SITE 313: note = Tnp_P4
  SITE 326: note = Tnp_P5
MIYVGIDVAKDKHDCCILGSDGEILFSPFTFQNSLQGFDALYEKILSLTSDLSEIKVGLEATGHYHLNLLRSLLDNGLASFVINPLHTNLYRKGQSLRKTKTDKVDAASIAMMLLTDRSLKPYSDTSYHNEELKSLTRYRFDKVQERARLKISVSRLVSILFPELEKLVPTLHMASVYALLSEFPGASFIAAAHLTRLKHLLYDASKGHYGRDMALTVRDAATSSIGSVIPAKSLELKHTIHLIQVLSAEIDEIEDAINAIMDTLDSPITTIPGIKNRMGSMILAEIGDVSRFDNPDQILAYAGLSPSTYQSGQLTSSYAHMEKRGSRYLRYALFNAAIYVCHWDPTFKAYLTKKRTEGKHYYVAVSHACKKLVRVIYRMQLTGEPYRVA

SEQ ID NO: 13334 - protein, 429 aa, unidentified
  source 1..429: note = protein_af57143
  REGION 19..180: note = RuvC_domain
  SITE 22: note = RuvC_P1
  SITE 77: note = RuvC_P2
  SITE 119: note = RuvC_P3
  SITE 121: note = RuvC_P4
  SITE 124: note = RuvC_P5
  REGION 287..375: note = Tnp_domain
  SITE 295: note = Tnp_P1
  SITE 325: note = Tnp_P2
  SITE 333: note = Tnp_P3
  SITE 334: note = Tnp_P4
  SITE 346: note = Tnp_P5
MNYTQNEKIMQVKNSTLVVGVDIVKNKHAARAFNFRGIEYDKAIFFENNEAGFKKLLHWIRKISEKENKTDVIVGMEPTGHYWFALEEYLRRKTDFLRVVVNPAHVKRIKTLDDNSPTKTDKKDAKVIAKLVVEGRYSVPHMPEKEYADLRVAMSHRERLVKDIIDLSNKVQQLLDKYFPEYKKVFKKWDGKASVAVLKELFLPELILEKTDEEIVEVFRKGANRAVGIKRARKLKKAALNSVGIKEGAEFTQFELRNLLEQYELLNKQKDLLEEKVEKLLESMPEAKYMESVKGVGFMTVAGFIAEVGDVNNYDHPKQIQKLAGLNLKENSSGKHQGQTRITKRGRPKLRALLYRVMMPMLANNLEFKKLHEYYITRRDNPLKKKQSMIALACKLIRIFFALGQKHIMYDGEKLMNDIEKNLSLQEAA

SEQ ID NO: 13335 - protein, 309 aa, unidentified
  source 1..309: note = protein_a44b306
  REGION 8..149: note = RuvC_domain
  SITE 11: note = RuvC_P1
  SITE 54: note = RuvC_P2
  SITE 94: note = RuvC_P3
  SITE 96: note = RuvC_P4
  SITE 99: note = RuvC_P5
  REGION 190..274: note = Tnp_domain
  SITE 198: note = Tnp_P1
  SITE 227: note = Tnp_P2
  SITE 235: note = Tnp_P3
  SITE 236: note = Tnp_P4
  SITE 247: note = Tnp_P5
MKQSVVYIGVDVAKAHLDVAWEKRSRRFPNDKSGRAALVAWIKQSPTAVQLICEASGGYEQRLLESLEQSGLKVTLVQANRVRQYARAAGILSKTDKVDARVLSAFGAAMQPKPTVPQSAEQKRLREYEAQRRHLNRILLAEQNRLAQLGSAELRALNRSLMSKIKKQIAVLDTRIGTLIAQNEELRLKAQKLTSITGVGERTAALVLAQMPELGQLNRRQAAALGGLAPFNRDSGTLRGKRTIFGGRRALRSGLYMAALAAARHNQILSPFYQRLRATGKPHKLALTAVMRKLLLALNHSLKPIPSPA

SEQ ID NO: 13336 - protein, 321 aa, unidentified
  source 1..321: note = protein_2371d6d
  REGION 1..92: note = RuvC_domain
  SITE 31: note = RuvC_P3
  SITE 33: note = RuvC_P4
  SITE 36: note = RuvC_P5
  REGION 196..285: note = Tnp_domain
  SITE 204: note = Tnp_P1
  SITE 234: note = Tnp_P2
  SITE 242: note = Tnp_P3
  SITE 243: note = Tnp_P4
  SITE 256: note = Tnp_P5
MGYLKRSGWTHFIVNPLQSKRSKGTQLRKVKSDAADARHLAEMYYRGDVKPHREWKESHSELQHLTRQHEFVTAMYVQAKLNSRALLEQVFPSFIGLFHNLNAVTSLRVLQRCLDNQTEDVGELISECVGKSHSKRWAAEKTDQLRERLLSWNSHYKSPAQSVALSSMISLLLEFDKQLSQLEREMDELADALPEVELVKSIPGVGDKLAAAIVAELGDASQFSDAKQLVAYAGLDPGIYSSGKFAATSNRITKRGSKRLRRALYLAVQCGIRRGVNQRITEYYSRKRKEGKPYKVVVIACANKLLHHVYAILSKGQPYKL

SEQ ID NO: 13337 - protein, 259 aa, unidentified
  source 1..259: note = protein_d855e7f
  REGION 1..67: note = RuvC_domain
  SITE 7: note = RuvC_P3
  SITE 9: note = RuvC_P4
  SITE 12: note = RuvC_P5
  REGION 127..213: note = Tnp_domain
  SITE 135: note = Tnp_P1
  SITE 165: note = Tnp_P2
  SITE 173: note = Tnp_P3
  SITE 174: note = Tnp_P4
  SITE 186: note = Tnp_P5
MDETLNKTDANDADGLAQLAEAGFYKVVRVKSFDSMLTRTLVGARNQLLNISTQLSNQIRGLMKTFGLIVPKGTGRVFDGNVRELLAGNNDLARIILPLLEAWRDIRKRAADLDRQLLAVARQSQSTKLLMTIPGIGAVTAVSYIAAIEDPENFRTSRSVGAWLGLTTRRYQSGEVDYNGHISRRGDNHLRGLLYEAATVLLTRASVRTESSLKTWGLKLRERLGFKRAAVAVARKLAVIMHSMLRTGEVFNASVGATA

SEQ ID NO: 13338 - protein, 284 aa, unidentified
  source 1..284: note = protein_b9f7592
  REGION 6..147: note = RuvC_domain
  SITE 9: note = RuvC_P1
  SITE 52: note = RuvC_P2
  SITE 87: note = RuvC_P3
  SITE 89: note = RuvC_P4
  SITE 92: note = RuvC_P5
  REGION 211..278: note = Tnp_domain
  SITE 219: note = Tnp_P1
  SITE 249: note = Tnp_P2
  SITE 257: note = Tnp_P3
  SITE 258: note = Tnp_P4
  SITE 270: note = Tnp_P5
MDRTTYGLDIAKNVMQLHWVDGETGEIGRRKLTRARLGEFFAQRQPACVAMEACGSAHHWARVLGGLGHQVELLPARQVRAFVRSNKDDAADARAIWLAARQSDIRRVPVKTVEQQAVMSLHRARSHWVSVRTATINMLRGLLYEFGVLLPGGKKVGLKTIGVKRAEIDDRLPLLMRRLVDLQLETLKGVERSIDQLEAEIAEQQRQIGQARTLREVPGIGVLGATALAATLGDASGWRSGREFAASLGLVPAHSGTGGKTRIGHLSKRGDPYLRTCSSTGRGR

SEQ ID NO: 13339 - protein, 312 aa, unidentified
  source 1..312: note = protein_7804c80
  REGION 6..151: note = RuvC_domain
  SITE 9: note = RuvC_P1
  SITE 53: note = RuvC_P2
  SITE 93: note = RuvC_P3
  SITE 95: note = RuvC_P4
  SITE 98: note = RuvC_P5
  REGION 189..273: note = Tnp_domain
  SITE 197: note = Tnp_P1
  SITE 226: note = Tnp_P2
  SITE 234: note = Tnp_P3
  SITE 235: note = Tnp_P4
  SITE 246: note = Tnp_P5
MINHTIGIDISKDTLDVHIHPSGEDRRFTNDAEGFRALREWIGERSVERLVFEATGAYHRAFEQAMGQTGLPICKVNPRQAKRFGEALGVLVKTDRIDARMLARFGVLIEPPIRSAPPEILLQLKDLQVARTALIKDRTAAKNRERSLQSPLLKRQSCQRLAQIERHLAAIEAEMVSLVGGDPDLARKFEIITSIPGLAERSALALITSMPELGTLDGQAAAALSGTAPMTRQSGKRIGKACITGGRSQVRQSLYMPALVAAHHNPDFATKYKDLKARGKPAKVALTAIMRKLIILANALIRDDRKWSPKPA

SEQ ID NO: 13340 - protein, 343 aa, unidentified
  source 1..343: note = protein_118d4d3
  REGION 6..147: note = RuvC_domain
  SITE 9: note = RuvC_P1
  SITE 52: note = RuvC_P2
  SITE 87: note = RuvC_P3
  SITE 89: note = RuvC_P4
  SITE 92: note = RuvC_P5
  REGION 211..295: note = Tnp_domain
  SITE 219: note = Tnp_P1
  SITE 249: note = Tnp_P2
  SITE 257: note = Tnp_P3
  SITE 258: note = Tnp_P4
  SITE 270: note = Tnp_P5
MSIVILGVDLGKNSCSIVGVDAAGAVVVRRSMRRQTLIDYVLKLPACVVAMEACCGAHHLGRLFAARGHEIRLMSPEYVRPYVKAQKNDDRDAEGIAEAASRPTMRFVELKTEEQLDIQTLHRVRSRLVAERTNLINQLRAILLERGVIFPAGRRKLELCLDGMLADDDSALSRRVRELVSDLRAEWRELDTKIEALNGEFVELARTDPAARRLTSIPGVGVLNATALIAAVGNASAFAKARDLGAWLGLVPRQHTTGGKPRLMGISKRGNTYLRTLLIHGARAALPSLSESDTSLGRWLKAMIERGVHRNAVVVALANKLARIAWATLRRETTFERGYAAAV

SEQ ID NO: 13341 - protein, 322 aa, unidentified
  source 1..322: note = protein_ff60d8a
  REGION 12..166: note = RuvC_domain
  SITE 15: note = RuvC_P1
  SITE 63: note = RuvC_P2
  SITE 103: note = RuvC_P3
  SITE 105: note = RuvC_P4
  SITE 108: note = RuvC_P5
  REGION 273..322: note = Tnp_domain
  SITE 281: note = Tnp_P1
  SITE 310: note = Tnp_P2
  SITE 318: note = Tnp_P3
  SITE 319: note = Tnp_P4
MIKNHESIDIFIGVDVGKSNHHAVAIDRTGKKLLDRALPQDEAKLRAIIRAVAGKGTVLLVVDQPSTIGALPVAVAQSEGILVGYIPGLAMRRIADLHPGEAKTDARDAMIIASAARTMPHTLRSIVISDEQAAELSMLCGFDDDLAKQATAASNRIRGLLTQIHPALERVIGPHLDHPAMPELLIKYPSPQALSRAGQSRIAMLLAKHAPRAGKRWAAEIFAALGEQSVVVAGSGAAGLVLAQLAAMLKQLRTAREELLTQVEALVEAHPLHLVLTSMPAVGVRTEARIITEVAGKEFQSSGHLASYAGLSPVTWRSGTSI

SEQ ID NO: 13342 - protein, 400 aa, unidentified
  source 1..400: note = protein_6ee7911
  REGION 10..164: note = RuvC_domain
  SITE 13: note = RuvC_P1
  SITE 62: note = RuvC_P2
  SITE 102: note = RuvC_P3
  SITE 104: note = RuvC_P4
  SITE 107: note = RuvC_P5
  REGION 270..356: note = Tnp_domain
  SITE 278: note = Tnp_P1
  SITE 308: note = Tnp_P2
  SITE 316: note = Tnp_P3
  SITE 317: note = Tnp_P4
  SITE 329: note = Tnp_P5
MSKERDRVWVGIDAGKAHHWAAVVDETGATLRSKKIDNDEAAILAALGEILALADEVRWAVDISGTASALLLALLAAHGQRAVYVPGRTVNRMSGAYRGEAKTDARDAYVIAETARHRNDFAAIDVPAQLAADLAWLTAHRSDLVADRVRMINRLRDVLTGVFPALERAFDYSTHKGALVLLTGYQTPAAIRRRGRTRLTAWLANRSVRGADTVAATALEAAQAQQTALPGEDVAAQIVADLAAQILALDDRLNRIDKQIRKTFRSHPQAEIIESLPGMGPILGAEFIVAAGDMSAYADAGHLASAAGLVPVPRDSGRRTGNLHRPKRYSRRLRRVFYLSAQTSIIRDGPNRDFYLKKRGEGCKHVQAVIALARRRVGVLWALLRDGRLFTSVPPVAQAA

SEQ ID NO: 13343 - protein, 339 aa, unidentified
  source 1..339: note = protein_f9955d0
  REGION 6..148: note = RuvC_domain
  SITE 9: note = RuvC_P1
  SITE 52: note = RuvC_P2
  SITE 87: note = RuvC_P3
  SITE 89: note = RuvC_P4
  SITE 92: note = RuvC_P5
  REGION 211..302: note = Tnp_domain
  SITE 219: note = Tnp_P1
  SITE 249: note = Tnp_P2
  SITE 257: note = Tnp_P3
  SITE 258: note = Tnp_P4
  SITE 270: note = Tnp_P5
MQVTTIGLDLAKNVFQVHGIYKDGEVAFNRALRRAQVLSFFERLEPCLVGIEACGTSHHWARELIKLGHNVKLIPPVYVKPYVKRGKSDAVDAAAICEAVTRPTMRFVEVKAPEQQAILAVHRTRDLIVRQRTQTINMLRAQLAEFGIILPQGIYHALAFAKGWLNGEQPDLPEVSGEVIFELCDQLLFLHSKTLGYSRQMNQIAKREKRVALLRTIPGVGPITASAIVATVGSGKQFNNGREFAAWLGLTPINKSSGGKERLGHISKMGDQYIRRLLVLGMTSRIRSIRAEPEKFDPWFADILSRKPSKVAAIAMANKTARMIWAVLIRNEPYKVRTV

SEQ ID NO: 13344 - protein, 408 aa, unidentified
  source 1..408: note = protein_72209e1
  REGION 6..159: note = RuvC_domain
  SITE 9: note = RuvC_P1
  SITE 57: note = RuvC_P2
  SITE 98: note = RuvC_P3
  SITE 100: note = RuvC_P4
  SITE 103: note = RuvC_P5
  REGION 221..306: note = Tnp_domain
  SITE 229: note = Tnp_P1
  SITE 259: note = Tnp_P2
  SITE 267: note = Tnp_P3
  SITE 268: note = Tnp_P4
  SITE 279: note = Tnp_P5
MSQVIIGMDPHKRSATIEVMTSDETVVGGGRYGTDADGFRAMLAEAKRWRERTWAIEGCQGIGRHIANRLLAAGEHVVDVPPKLSARTRVFATGQGRKTDATDAHSVALAATRMTGLRQVVDDQQLAVLRILADRRRSLGEDHTRMVSQLHQLLLELMPGGAKKDLSAAQAKALLARVRPRDAAGKARRRVAAELISDLERIYQRKKEANKELNALLAVTGTTLTDLHGIGPSGAARLLVEVGEVTRFPNKAHFASWDGTAPMDASSGDQVRHRLSRAGNRQINRVLHIMAVVQLRNPTEGRAYYDRKVAAGKTPREAMRALKRRLSDIVYHQMITDTRRAATGPGGHLGAATGSSAADLHPSAGTSEKSLPGPATNDLTPGKPAHSPGRSRHSPSAPDRRRRQAQSA

SEQ ID NO: 13345 - protein, 371 aa, unidentified
  source 1..371: note = protein_e86a0af
  REGION 25..169: note = RuvC_domain
  SITE 28: note = RuvC_P1
  SITE 73: note = RuvC_P2
  SITE 108: note = RuvC_P3
  SITE 110: note = RuvC_P4
  SITE 113: note = RuvC_P5
  REGION 232..318: note = Tnp_domain
  SITE 240: note = Tnp_P1
  SITE 270: note = Tnp_P2
  SITE 278: note = Tnp_P3
  SITE 279: note = Tnp_P4
  SITE 291: note = Tnp_P5
MNKHTTKHNSRNRTDVGDISACTTVAVDLAKRVFQVAGEDARGQVVYEQRIRSREAFQGWLHKLAPQVTVLIETGPGAQAWARQLQAQGNPVRILPAQRVAEHRSGAKNDRNDVLAILRAGRDVNITAVPVKTVAALAMQALHRVRRGYLRRRTALGNQMRGLLLEHGIVLPQGDAALRDRVSLILGDASQPLPALLRDLMAELQAEWTHLGERIDRLTGQLDVSARADATARRLMTVRGIGPIIATAVLAKQTTPERFTSGRQFAAYFGAVPDQHSSGPKVRLGRMSKRGDAYIRSLLIQGAHAVLKQVRADSVHADDRRLLRWRQRHGQKGAAIRLANRNLRIVWVLLQTDQVYRRPPTDPVEEVTMAH

SEQ ID NO: 13346 - protein, 407 aa, unidentified
  source 1..407: note = protein_501a826
  REGION 6..162: note = RuvC_domain
  SITE 9: note = RuvC_P1
  SITE 61: note = RuvC_P2
  SITE 99: note = RuvC_P3
  SITE 101: note = RuvC_P4
  SITE 104: note = RuvC_P5
  REGION 270..356: note = Tnp_domain
  SITE 278: note = Tnp_P1
  SITE 309: note = Tnp_P2
  SITE 317: note = Tnp_P3
  SITE 318: note = Tnp_P4
  SITE 329: note = Tnp_P5
MTMWYAGIDWADQHHDAVVIDEAGKRVATTRVSHTAAGLDTLVTFLKEQGDVADHPDHLACIVETNRGLLIAALLDAGLPVYPVNPKTVERHRKPAGAKTDAIDAYLLARTGRSDLADLRRLTPDSPLIAELKALTRDQDTLIQSQTRLVNQLTACLKAYYPVALELFGKLQQPTTLAFLQAFPTPDQARAATVEQIAAVLKAAGHPTVAAKAARIRGRVDQPQLRADPVVTRTKTRLMLTLAAQLQVLLPEIAAYDEEITRLFRLHSDSRAFASLPRAGTRLAPRLLAEWGDDRERYTDAASVQSLAGTSPVPFQSGNFAKAHRCYACNKPLRNALQQFAWQSTQKEPWALTYRQRKRRDGKSHAMAVRALANQWVRFIYALWTNHDTYDPAIFHAAQQAHAPRAA

SEQ ID NO: 13347 - protein, 400 aa, unidentified
  source 1..400: note = protein_ee17c62
  REGION 10..164: note = RuvC_domain
  SITE 13: note = RuvC_P1
  SITE 62: note = RuvC_P2
  SITE 102: note = RuvC_P3
  SITE 104: note = RuvC_P4
  SITE 107: note = RuvC_P5
  REGION 270..356: note = Tnp_domain
  SITE 278: note = Tnp_P1
  SITE 308: note = Tnp_P2
  SITE 316: note = Tnp_P3
  SITE 317: note = Tnp_P4
  SITE 329: note = Tnp_P5
MSKRQDRVWAGIDAGKGHHWAAVVDQTGATLWSKKVDNDESAILAALGEILDLADEVRWAVDISGTSSALLLALLAAHGQHAVYVPGRTVNRMSGAYRGEAKTDARDAYVIAETARHRQDFAAIDVPAQLAADLALLTAHRADLVADRVRMINRLRDVLTGIFPALERAFDFSGHKGALVLLTGYQTPAAIRRRGRARLTAWLANRSVRGADAVATTALEAAQAQQTALPGEDIAAQIIADLAAQILALDNRLRRIDQQIRDTFRSHPQSEIIESLPGMGPILGAEFVVAAGDLSAYADGGHLASAAGLVPVPRDSGRRTGNLHRPKRYSRRLRRVFYLSAQTSIIRDGPNRDFYLKKRGEGCKHVQAVIALARRRAGVLWALLRDNRLFTSVPPDAQTT

SEQ ID NO: 13348 - protein, 411 aa, unidentified
  source 1..411: note = protein_63aac9c
  REGION 4..160: note = RuvC_domain
  SITE 7: note = RuvC_P1
  SITE 57: note = RuvC_P2
  SITE 97: note = RuvC_P3
  SITE 99: note = RuvC_P4
  SITE 102: note = RuvC_P5
  REGION 269..355: note = Tnp_domain
  SITE 277: note = Tnp_P1
  SITE 308: note = Tnp_P2
  SITE 316: note = Tnp_P3
  SITE 317: note = Tnp_P4
MIFVGDDWAEAHHDVYVCDEAGGKILARRLPEGIEGVTALHQLLAEQVDDPAEVVVGIETDRGLWVQSLVEAGYQVYAINPRAASRYRDRHTVSGAKSDPGDAKLLAELVRTDRHNHRQVAGDSDLAEGVKVLARAHQNLIWDRTRATNRLRCSLREYFPAALATFNELADRDTLAVLAKAPTPAEAKALPLGKVRSALKAGGRQRNIDTRARQIVDGLRVDELAAQPAVTSAFAATTRTAIAIITELNTQIAALETELADHFEQHPDADIYLSQPGIGVILGARALGEFGDDPNRYADAKSRKNYAGTSPITRASGNRHVALARFIRNRRLADAIDQWAFCSLSTSPGARAYYDHQRDKGLSHHKALRALANRLVGILHGCLHHGTSYDEHTAWAHRPENTLTKKIPNAA

SEQ ID NO: 13349 - protein, 329 aa, unidentified
  source 1..329: note = protein_867e834
  REGION 9..153: note = RuvC_domain
  SITE 12: note = RuvC_P1
  SITE 58: note = RuvC_P2
  SITE 98: note = RuvC_P3
  SITE 100: note = RuvC_P4
  SITE 103: note = RuvC_P5
  REGION 197..283: note = Tnp_domain
  SITE 205: note = Tnp_P1
  SITE 235: note = Tnp_P2
  SITE 243: note = Tnp_P3
  SITE 244: note = Tnp_P4
  SITE 256: note = Tnp_P5
MSKLSKKVIGVDVGAKFLTVSFTDNVNQDQVFNIQNNQRSILSFLKKFPTEDYCLAIEATGNYSSRILHLSLDNGFESSLINCMSVKYFSRMKNIISKTDAEDAKVIRLYGEIFRPEVYIPKSIEIEHLDQEIKLLNDLEEEKRRYSVKLKSLRYNPQLNPNTEKHYEKRLKQLDKEIREVEMRLPQLQDEEFREIKGLIQSVSGIGEKTSLQLMTATSGFKNFDSSKSLVKYFGLAPRIYQSGKKSYSPGKCRTSKTHIRSLLYVCSWTAIKHNTQCKELYLRLLEKGKPKKLALIAVCNKLLRICFGVVKNKTAYQQNFQKNFKILT

SEQ ID NO: 13350 - protein, 404 aa, unidentified
  source 1..404: note = protein_907ce10
  REGION 20..176: note = RuvC_domain
  SITE 23: note = RuvC_P1
  SITE 74: note = RuvC_P2
  SITE 114: note = RuvC_P3
  SITE 116: note = RuvC_P4
  SITE 119: note = RuvC_P5
  REGION 280..367: note = Tnp_domain
  SITE 288: note = Tnp_P1
  SITE 318: note = Tnp_P2
  SITE 326: note = Tnp_P3
  SITE 327: note = Tnp_P4
  SITE 340: note = Tnp_P5
MVDITVSDFMKGRYNLMIYVGIDIAKLNHFASAISSDGKILIEPFKFTNDYDGFYLLLSKLDPLDPDSIIIGLESTAHYGDNLVRFLITRNYKVCVLNPIKTSTMRKNNVRKTKTDKVDTFVIAKTLMMQDSLRFSSLEDLDYIELKELGRFRQKTLKQRTRLKIQLTSYVDQVFPELQYFFKSGLHQKAVYALLKEAPMPKDIASMHMTHLSNLLVKNSRGHFTKEMARELRVLAQKSVGLNDSSLSIQITQTITQIELLDSQLFETELEMANLVTCLHSVIMTIPGIGFVNGGMILGEVGDIHRFPAPNKLLAFAGLDPTVYQSGNFQAKRTRMSKRGSKVLRYALMNAAHNAVKNNATFKAYYNAKRAEGRSHYNALGHCAGKLVRVIWKMLTDNVEFNLE

SEQ ID NO: 13351 - protein, 369 aa, unidentified
  source 1..369: note = protein_3b4363a
  REGION 6..147: note = RuvC_domain
  SITE 9: note = RuvC_P1
  SITE 52: note = RuvC_P2
  SITE 87: note = RuvC_P3
  SITE 89: note = RuvC_P4
  SITE 92: note = RuvC_P5
  REGION 211..297: note = Tnp_domain
  SITE 219: note = Tnp_P1
  SITE 249: note = Tnp_P2
  SITE 257: note = Tnp_P3
  SITE 258: note = Tnp_P4
  SITE 270: note = Tnp_P5
MNVTAVGIDLAKNVFQVHAVDARGKVVLRKQLRRAQVAGFFSNMPPCLIGMEACASAHHWGRTFERFGHTVRLMASQFVKPYVKTNKNDVADAEAICEAVGRQSMRFVPIKSVEQQAILSVHRVRQGFVKARTAQANQIRGLLGEFGLVIPQGICNVAKRVPELLEDASNELPVPFRHLIERLTQHLKELDRQVKEFEKEIIEWHRSSELSRKLEAIPGIGPLAASALVASIADAHSFDNGRQVSAWLGLVPRQSSTGGKPTLLGMSKRGDAYLRTLLIHGARSAILAAKNTVDNTQGWLTDLLKRRHPNIAAVALANKNVRTVWRCLPTGASSRPTISRLGWPRSRKILLTTTAEQEHTLPIAQAIKQ

SEQ ID NO: 13352 - protein, 343 aa, unidentified
  source 1..343: note = protein_387a9d0
  REGION 7..149: note = RuvC_domain
  SITE 10: note = RuvC_P1
  SITE 53: note = RuvC_P2
  SITE 88: note = RuvC_P3
  SITE 90: note = RuvC_P4
  SITE 93: note = RuvC_P5
  REGION 212..296: note = Tnp_domain
  SITE 220: note = Tnp_P1
  SITE 250: note = Tnp_P2
  SITE 258: note = Tnp_P3
  SITE 259: note = Tnp_P4
  SITE 271: note = Tnp_P5
METITTIGLDLAKSVLQVHAITQDGRVIIRRALRRSQVLDFFRGLAPCLVGLEACASAHHWANAIGQFGHTVRMMPAAYVKAYVKRNKTDAADAEAICEAVTRPTMRFVPIKTPDEQAACMVLKTRELFVRQRTQTSNAMRAHMAELGIIAATGMASIDKLIAILRDEADTRLPVAARAALLEMAEQIERLSSRIAALDTKIVKAVKEDETARRLTSIPGVGPIIAATVRAAIQDPAAFRTGRDLAAWIGITPSAHSSGGKERLGGITKRGNAQLRSLLVVGATSILKQAKRGVKLPAWVVSLMARKPYKVAAVALANKMARTIWALLVKGGTYRAPMVMAAA

SEQ ID NO: 13353 - protein, 342 aa, unidentified
  source 1..342: note = protein_341fd7c
  REGION 7..148: note = RuvC_domain
  SITE 10: note = RuvC_P1
  SITE 53: note = RuvC_P2
  SITE 88: note = RuvC_P3
  SITE 90: note = RuvC_P4
  SITE 93: note = RuvC_P5
  REGION 211..297: note = Tnp_domain
  SITE 219: note = Tnp_P1
  SITE 249: note = Tnp_P2
  SITE 257: note = Tnp_P3
  SITE 258: note = Tnp_P4
  SITE 270: note = Tnp_P5
MSEVTIIGIDLAKRVFQVHGACSDGSVAFRKKLSRSQVLAFFTQQSRCVVAMEACATAHGWGRELERLGYEVRLIPPVYVKPFVKRQKNDAADAEAIVEAALRPTMRFVAVKTEDQQARAMLFRTRQMFVGQRTQLINALRGHLAEHGLVAATGTAQLKRLADAIEDCGTALPEGVRDLGQIYLAQIAGLNARVAELDMKMRSVAKEADLARRFQTMPGVGPITALAIETFAPDLTTFRRGRDFAAWLGLVPKQHSTGGKSRLGRTSKMGQRDIRTLLVSGAMAVLQAVERFGTPNKGWLTRMRARKPRMVVAIALANKMARGLWAMMTKQQDYRVPVAAMV

SEQ ID NO: 13354 - protein, 329 aa, unidentified
  source 1..329: note = protein_1cc76f2
  REGION 21..177: note = RuvC_domain
  SITE 24: note = RuvC_P1
  SITE 74: note = RuvC_P2
  SITE 114: note = RuvC_P3
  SITE 116: note = RuvC_P4
  SITE 119: note = RuvC_P5
  REGION 291..329: note = Tnp_domain
  SITE 299: note = Tnp_P1
  SITE 329: note = Tnp_P2
MCLRWLSIATKLKELIVLNAVGIDVAKGKSVVSILRPFGEVISSPFELCHTSSAIDDFIHSLSNLEGEVRIVLEYTGRYHEPIARWLSDADFYVSVVNPKLIKDFGNNSLRKVKSDKKDALKIARYALDNWNDLRQYCFMDKTRDQLKTMNRQFDFYMKHKTALKNNLIALLDQTFPGANTFFTSPVRKDGSQKWVDFVASFWHVDCVRKVSLSVFTERYRKFCVRKGYDFHPDKPAQIFEASKELIALLPKDKMTKNLIMQAIEQLNTLSRTIEQLRLQMDQTAAQLPEYPVVMAMKGVGPSLGPQIMAEIGDVRRFSRRGALTAFAG

SEQ ID NO: 13355 - protein, 336 aa, unidentified
  source 1..336: note = protein_e7bba2f
  REGION 5..153: note = RuvC_domain
  SITE 8: note = RuvC_P1
  SITE 55: note = RuvC_P2
  SITE 92: note = RuvC_P3
  SITE 94: note = RuvC_P4
  SITE 97: note = RuvC_P5
  REGION 212..300: note = Tnp_domain
  SITE 220: note = Tnp_P1
  SITE 250: note = Tnp_P2
  SITE 258: note = Tnp_P3
  SITE 259: note = Tnp_P4
  SITE 271: note = Tnp_P5
MGYYAGIDVSLKESSVCVVDATGKLVREVKVGSEPECLVGYFDQLGFPVERIGLEAGPLSQWLYAALVAAGHDVVLLETRHVKAALSAMTVKTDRKDARGIAQLLRMGWYRPVHAKSSPAQDTPALLVGRKLLQSKLLDVELSIRGILRGYGLKVGEVSRGRFEARIRELIEGHSTLSTVIDAMLTARVALWSEFTKLHREMLRIARADKVCKRLMSAPGVGALIALTYRSAVDDPARFEKSRTVGAYFGLTPKKYQSGETDRDGGVSKVGDAMVQTALFETAHIMLTRATRFSSLKRWALDVARRRGMKRAKVALARKLGVVLHRMWVDATFAGA

SEQ ID NO: 13356 - protein, 271 aa, unidentified
  source 1..271: note = protein_82bba68
  REGION 1..109: note = RuvC_domain
  SITE 12: note = RuvC_P2
  SITE 52: note = RuvC_P3
  SITE 54: note = RuvC_P4
  SITE 57: note = RuvC_P5
  REGION 148..232: note = Tnp_domain
  SITE 156: note = Tnp_P1
  SITE 185: note = Tnp_P2
  SITE 193: note = Tnp_P3
  SITE 194: note = Tnp_P4
  SITE 205: note = Tnp_P5
MREAEVSLVVFEATGVYHRLLETSLAMHDFPFARVNSRQARRFAEGTGTMAKTDRVDAAMLAKMGSLLELQADKPKSEMLHNLKGMTTARQALIKDRTAARARLATATHPLLRKQATQRLRQVERDIEQIDATIETIITSDKTLSEKADILISIPGIAKITAFAMLIEMPELGSLSGKQAASLAGLAPISRQPGKWQGKEHIQGGRACLRRAIYLPAVVPTRFNADMKAKYHELIAKGKCKKLAITAVMRKLVVMANALLRDGRKWTETRA

SEQ ID NO: 13357 - protein, 343 aa, unidentified
  source 1..343: note = protein_d57a8ff
  REGION 5..157: note = RuvC_domain
  SITE 8: note = RuvC_P1
  SITE 56: note = RuvC_P2
  SITE 97: note = RuvC_P3
  SITE 99: note = RuvC_P4
  SITE 102: note = RuvC_P5
  REGION 220..306: note = Tnp_domain
  SITE 228: note = Tnp_P1
  SITE 258: note = Tnp_P2
  SITE 266: note = Tnp_P3
  SITE 267: note = Tnp_P4
  SITE 278: note = Tnp_P5
MAVIIGVDPHKATHTAVAISGGEEELGRKKVRAGGAQAEQLVAWAEPFRARTWAIESAGGLGYLLAQQLVAAGETVVDVPATLASRVRVLSTGRSDKNDPNDALSVAIAALRSRGLRRVDTVGHSEVLRLLAKRNTDIGNHRTRLVCRMHALLAELAGGGITKEINASDVDRFLEVLTPANPVEQTRYDLAVELLDDIRRLDTQLKASHKRIRDAVRASGTTVTDLFGVGPILAAMLIGYSADITRFATRDRYAAYNGTAPVEFSSGGRVVHRVSERGNRQLNHAIHMAAICQLRQPHSEGRAYFDRRVAEGKTTREALRALKRHVSNAVYRRLIADARRAGR

SEQ ID NO: 13358 - protein, 345 aa, unidentified
  source 1..345: note = protein_9c16011
  REGION 5..153: note = RuvC_domain
  SITE 8: note = RuvC_P1
  SITE 57: note = RuvC_P2
  SITE 95: note = RuvC_P3
  SITE 97: note = RuvC_P4
  SITE 100: note = RuvC_P5
  REGION 220..307: note = Tnp_domain
  SITE 229: note = Tnp_P1
  SITE 259: note = Tnp_P2
  SITE 267: note = Tnp_P3
  SITE 268: note = Tnp_P4
  SITE 280: note = Tnp_P5
MPIVGGLDIHRKQITFDYLDTVTGEVRRGQISPGDREHLRAWLARFGGRDDVEFAAEGCTGWRYVTEELAAAGVAAHLAEPADTAFARGRKRHAKTDKTDCRHLRMLLAEGRLPECWIPPGHILECRALLETYHDLRAEHTAWVQRIHAVLFHQGAPALGDGALRSEQGLDALRASAAAHLSPAGQLQIATALEMTAALETRLHELRHQLTDAARHLAGAKVLAARLYGVGPVTALAMTCWLGGAGRFSSSRKAVRFAGLDVTVYSSDRKGPPGRLSRQGPPVLRWAVYEAGKTHARTSAPDHAYYAQVKDRCNGKRAALSEARKILRQACHILAELGDDALSAA

SEQ ID NO: 13359 - protein, 410 aa, unidentified
  source 1..410: note = protein_487e923
  REGION 13..169: note = RuvC_domain
  SITE 16: note = RuvC_P1
  SITE 65: note = RuvC_P2
  SITE 106: note = RuvC_P3
  SITE 108: note = RuvC_P4
  SITE 111: note = RuvC_P5
  REGION 276..360: note = Tnp_domain
  SITE 284: note = Tnp_P1
  SITE 313: note = Tnp_P2
  SITE 321: note = Tnp_P3
  SITE 322: note = Tnp_P4
  SITE 334: note = Tnp_P5
MTGFDLLSFALFIGLDVGKSEHHATALTTTGEKVYDKALPNDETKLRTLLSELTAAHGPALLVVDQPATIGALPVAVAQETPEIEVAYLPGLTMRRMADLHAGSAKTDARDAFIIAETARTMPSALRQIAASDEQIAELAVLSGFDDDLLGQTTAARNRLRGLLTQIHPGLERVLGSHLHHYGVLDALAMWPTPQKLKTAGRGHVRNRIKKHNPRLAGRITEAIFEALDAQTVVVAGTGAATTIVPILAGQLKELYTQRNNVLEQVDALVEAHPLHPVLTSMPGVGVRTAARILTEVVGKNFKTAGHLASYAGIAPTTRRSGTSIRGEFANRGGNKRLKSTLFNSAFASLHHPPSRVYYNKKRAAGKTHKQAVIALARRRLDTLYAMLRDGTFYQDPDNARGGSGHALAA

SEQ ID NO: 13360 - protein, 344 aa, unidentified
  source 1..344: note = protein_a93e88f
  REGION 6..146: note = RuvC_domain
  SITE 9: note = RuvC_P1
  SITE 52: note = RuvC_P2
  SITE 87: note = RuvC_P3
  SITE 89: note = RuvC_P4
  SITE 92: note = RuvC_P5
  REGION 211..296: note = Tnp_domain
  SITE 219: note = Tnp_P1
  SITE 249: note = Tnp_P2
  SITE 257: note = Tnp_P3
  SITE 258: note = Tnp_P4
  SITE 270: note = Tnp_P5
MQINSVGIDLGKTTFHLVVLGEAGKVLVRKKFNQRQLLTYTANLPTSLIGLEACSGAHFLGRALRKQGHDVRLIAAQFVKPFVKSNKNDFVDAEAIAEAVERKNMRFVPIKTDDQLDLQAIHRVRDRLIARRTAVINQLRAFLLERGLTFAKTPAKLRNALPDILENPEVDLTTQMRNLIDLLWAEWKAVEDQIERLSRELERISAADAGCTRLRRIPGIGPIVATAIVAAIGNGAAFRKGRDFAAWLGVVPRQYSTGGKTRLLGISKRGNVYLRKVLIHGARAAVLRMKRDRAPIGAWLDALDARAPKNIVVVAMANKLARIAWAVLSSGEDYKPASNQLKAA

SEQ ID NO: 13361 - protein, 345 aa, unidentified
  source 1..345: note = protein_91daad1
  REGION 6..147: note = RuvC_domain
  SITE 9: note = RuvC_P1
  SITE 52: note = RuvC_P2
  SITE 87: note = RuvC_P3
  SITE 89: note = RuvC_P4
  SITE 92: note = RuvC_P5
  REGION 211..298: note = Tnp_domain
  SITE 219: note = Tnp_P1
  SITE 249: note = Tnp_P2
  SITE 257: note = Tnp_P3
  SITE 258: note = Tnp_P4
  SITE 270: note = Tnp_P5
MEIHTVGIDLGKTVFNLVGLSVQGEVVVRKKFSRKQLLHFTANLRVGLIGMEACGGAHFLGRALREQGHDVRLMPAQYVRPYVKTNKNDYIDAEAIAEAVRRPRMRFVPIKTDEQLDMQSLHRVREGWVGRRTAVINQLRGLLLERGITVRKGRRHIEDALPGILEDADNKLSAALRLLLFQLCSEMRHLQSQIDEADAVILRMASEDESCQRLDEVPGIGPVIATATISAIGNGAAFKKGRGFAAWLGLVPGEYSTGGKQKLLGISKRGNSYLRRLFVHGAHAVMQQRAKQSSGLRQWLEQLSARVHRNVAVVALANKLARIAWAVLAKGERYRPSLLAEGVCA

SEQ ID NO: 13362 - protein, 342 aa, unidentified
  source 1..342: note = protein_c0eb0c0
  REGION 7..149: note = RuvC_domain
  SITE 10: note = RuvC_P1
  SITE 53: note = RuvC_P2
  SITE 88: note = RuvC_P3
  SITE 90: note = RuvC_P4
  SITE 93: note = RuvC_P5
  REGION 211..297: note = Tnp_domain
  SITE 219: note = Tnp_P1
  SITE 249: note = Tnp_P2
  SITE 257: note = Tnp_P3
  SITE 258: note = Tnp_P4
  SITE 270: note = Tnp_P5
MSTLVIVGLDLAKNVFQAHGADASGKVLFRKKLRRGQVLEFFNELPACVIAMEACGGAHFWGREVGKLGHEVRLIPPSYVKPFLKRQKNDAADAEAICEAAVRPTMRFVSVKSEETQGAAMVFRVRELLIRQRTQTINALRGHLNEFGQIVPQGVANASRLVALVECSECKLPMEAIATFQALIATLGHFETEIAKLDAEITRRAKEDELARRLMTVPGIGPLIATAIATLAPPPKNFRRARDFAAWLGLVPRQHSTGGKQRLGATTKMGERSLRRLLIIGANSVIIKRHTHQEAQPGTWLGNLLLRKPPMLVRVALANKMARIVWALMARGGVYQSPVAAA

SEQ ID NO: 13363 - protein, 397 aa, unidentified
  source 1..397: note = protein_41f0242
  REGION 11..164: note = RuvC_domain
  SITE 14: note = RuvC_P1
  SITE 62: note = RuvC_P2
  SITE 103: note = RuvC_P3
  SITE 105: note = RuvC_P4
  SITE 108: note = RuvC_P5
  REGION 226..311: note = Tnp_domain
  SITE 234: note = Tnp_P1
  SITE 264: note = Tnp_P2
  SITE 272: note = Tnp_P3
  SITE 273: note = Tnp_P4
  SITE 284: note = Tnp_P5
MKNTSTTRVVIGMDPHKRSVTIEVMAADETVLGGGRYATDQGGFAEMRRYVSQFPDHIWAIEGCNGIGHHVAVRLLAAGEEVVDVPPKLAARTRVFATGQGRKTDATDAHSVALVGTRMAGLRPVVDDEQLAVLRLLVDRRRSLGDEHTRKTSQLHQLLLELVPGGAKKDLSAAQAKALLAKARPRDVVGKTRRRVAAELVADLERIYARKKAANKELTELVKATGTTLLDLHGIGPSGAAQLLVEVGDITRFPDRDHFASWNGTAPIDASSGDQVRHRLSRAGNRQINRVVHIMATVQLRNATEGRAYYDRRKAEGKTSMEAMRALKRRLSNIVYKTMLDDTVAHTATGSRTGPGGQRGNDSDSSAAGSQPQTNSSDKPLPGPATTDPRTPLPTAS

SEQ ID NO: 13364 - protein, 342 aa, unidentified
  source 1..342: note = protein_ea4cac6
  REGION 7..148: note = RuvC_domain
  SITE 10: note = RuvC_P1
  SITE 53: note = RuvC_P2
  SITE 88: note = RuvC_P3
  SITE 90: note = RuvC_P4
  SITE 93: note = RuvC_P5
  REGION 211..296: note = Tnp_domain
  SITE 219: note = Tnp_P1
  SITE 249: note = Tnp_P2
  SITE 257: note = Tnp_P3
  SITE 258: note = Tnp_P4
  SITE 270: note = Tnp_P5
MKEVSIIGLDLAKNVIQAHGAAPDGSVVFRRKLSRGQLLKFFADQAPCTVAMEACAGAHHWARAIRSLGHEVKLIAPAYVKPFVKRQKNDAADAEAIAEAASRPTMRFVEPKSEAQQAAAMAYRTRDLLVRQRTQTINALRAHLAEFDLVVPTGITHVGRLAAFVEGDESGLPEAATALGRMLVDQIEMLGSQIEALDKELRVRASADDTARRLMTIPGVGPITAAALTTFAPPAQTFTKGRDFAAWVGLTPRQHSSGGKGRLGKTSKMGQRNIRRLLIIGAVAVVRWAARKGAPEGSWLARMIDRKPRMLVAVALANRMARVAWALMRNGGEYRDPALAAQ

SEQ ID NO: 13365 - protein, 345 aa, unidentified
  source 1..345: note = protein_256ee3b
  REGION 7..147: note = RuvC_domain
  SITE 10: note = RuvC_P1
  SITE 53: note = RuvC_P2
  SITE 88: note = RuvC_P3
  SITE 90: note = RuvC_P4
  SITE 93: note = RuvC_P5
  REGION 210..301: note = Tnp_domain
  SITE 218: note = Tnp_P1
  SITE 248: note = Tnp_P2
  SITE 256: note = Tnp_P3
  SITE 257: note = Tnp_P4
  SITE 269: note = Tnp_P5
MEKIIRIGMDTSKHVFQLHGVDAAEKPVLRKKLRRKEMIDFFRICPPTVIAIEACGGSHHWARLLTDLGHEVKLIAPQLVKPYVKRSKNDAADAEALCEAMSRPTMRFVPVKAADEQAATMLVGVRDRLIRNRTQLANAIRGYAAEFGISVAKGLAHIPLLLERTQSDETVPELARALFASQAEEYAQLQEKITDVDARLMAWQRADERCKCLNTIPGIGPIGAALLIMKTPAPELFRSGRQFAAWIGLTPKDHSTGGKLRLGRITKAGDEALRAVLVAGATTVIQHARRHGKTSPWLAELLNRKPSKLAAVALANKMARIAWKLMVTGESYNAKYASALMVGAT

SEQ ID NO: 13366 - protein, 345 aa, unidentified
  source 1..345: note = protein_6504c10
  REGION 5..152: note = RuvC_domain
  SITE 8: note = RuvC_P1
  SITE 55: note = RuvC_P2
  SITE 92: note = RuvC_P3
  SITE 94: note = RuvC_P4
  SITE 97: note = RuvC_P5
  REGION 212..300: note = Tnp_domain
  SITE 220: note = Tnp_P1
  SITE 250: note = Tnp_P2
  SITE 258: note = Tnp_P3
  SITE 259: note = Tnp_P4
  SITE 271: note = Tnp_P5
MKHYAGLDVSLKEISICVLDEAGTICREIKVPSHPDDLVQTLKNPAWQFVRIGLEAGPLSQWLFSGLAAAGLPATCIETRHAKAFLKAQVNKTDRNDARGIAQMMRVSLFRPVHVKTLASQHRRALLTARKLLQEKAIAIENDIRGLLRNFGLKVGIVGTVGFDDRIHELVDDTPDLGEIMEPLLAARQKLRETFTALHRKLLSIVREDETCRRLMTIPGIGPVTSLAFTSTIDVPARFSNSRAVGPALGLTPVLNQSGESHRVGRVSLCGDGMMRALLYEAAQVMLSRVKKWSWLKAWAMNVAKRRGRQKAIVALARRLAVIMHRMWSDGTEFRWTRESMSAAV

SEQ ID NO: 13367 - protein, 343 aa, unidentified
  source 1..343: note = protein_6112637
  REGION 7..149: note = RuvC_domain
  SITE 10: note = RuvC_P1
  SITE 53: note = RuvC_P2
  SITE 88: note = RuvC_P3
  SITE 90: note = RuvC_P4
  SITE 93: note = RuvC_P5
  REGION 212..303: note = Tnp_domain
  SITE 220: note = Tnp_P1
  SITE 250: note = Tnp_P2
  SITE 258: note = Tnp_P3
  SITE 259: note = Tnp_P4
  SITE 271: note = Tnp_P5
MQAVTTIGLDIAKSVFQIHGVDAAGNVIVRRQLKRRYVLPFFQRLPPCLIGIEACASSHHWSRELKALGHTVRLMPPAYVKPYVKRQKNDAADAEAICEAVTRANMRFVETKTPEQQSCLMLHRTRHLFIRQQTAVINAIRAHLAEYGIVAAVGRNGVEELLGVVADPSDKRVPEIARACLAALGAQLRMLKAQILEFDRMITAWHRSNETSKRLDAIPGVGPALATALVASVPDPKAFRSGRNFSAWIGLVPKQHSSGGKDKLGSISKQGDRYLRSLFTAGALAVIRYAKIHGTKHRPWLTALLARRPAKVAAIALANKIARMAWAMMAKGERYKEPVALAV

SEQ ID NO: 13368 - protein, 408 aa, unidentified
  source 1..408: note = protein_4dba40d
  REGION 4..165: note = RuvC_domain
  SITE 7: note = RuvC_P1
  SITE 62: note = RuvC_P2
  SITE 102: note = RuvC_P3
  SITE 104: note = RuvC_P4
  SITE 107: note = RuvC_P5
  REGION 273..359: note = Tnp_domain
  SITE 281: note = Tnp_P1
  SITE 312: note = Tnp_P2
  SITE 320: note = Tnp_P3
  SITE 321: note = Tnp_P4
MLFVGDDWAEDHHDIELMDASGRRLAKARLPEGVAGMARLHALIAEHFESDLGEDADQVSIGIETDRGPWVQALIAAGYRVFAINPLQASRYRDRHAVSGAKSDAADAHVLADMVRTDSHQLRTVAGDSAEAAAIKVVTRAHKTLIWERTRHLQRLRHALREYFPAALEAYDDLSASDALELLALAPDPASAAQLPIAQITAALTRARRRNLADKAAAIHAALHAEHLGQPQAVTTAYAATVRASIAVLTVINEQIAFLEEQVEASFSEHPAAEIILSQPGLGPIVGARVLAEFGDDPTRYANAKARKNYAGTSPITRASGKKKVILARYVHNDRLVDALGTQAFCALRGSPGARAYYDRLRARGAGHHTALRQLANRLVGILHGCLKTGTPYNEATAWGHHAAVGGA

SEQ ID NO: 13369 - protein, 344 aa, unidentified
  source 1..344: note = protein_9c3cf0c
  REGION 6..148: note = RuvC_domain
  SITE 9: note = RuvC_P1
  SITE 52: note = RuvC_P2
  SITE 87: note = RuvC_P3
  SITE 89: note = RuvC_P4
  SITE 92: note = RuvC_P5
  REGION 211..297: note = Tnp_domain
  SITE 219: note = Tnp_P1
  SITE 249: note = Tnp_P2
  SITE 257: note = Tnp_P3
  SITE 258: note = Tnp_P4
  SITE 270: note = Tnp_P5
MEITTVGLDLAKNVFQVHAIGRTGEVLVRRALRRAQVMAFFSKLPPCLIGMEACGTSHHWARELTALGHAVRLMPPASVKPYVKRGKTDAADAEAICEAVTRPTMRFVPIKSVEQQAALALHRTRDLLVRQRTQLVNMIRGLLAEFGINLRKGITHALAFVRRAVAGAAREVPDLAAKVIAVLAAQASEVQDRIRQLERDLLAWYRASELARRIATVPGVGLLGATALAATVTDPTHFRSGRQFAAWLGLTPLNNSSGGKERLGRISKMGDQYLRRLLVTGMTSLVRRNKHHPSAADPLMNALLARKPVRVVTVAMANRAARAIWAIMVRGEVYRMPVTSVATA

SEQ ID NO: 13370 - protein, 370 aa, unidentified
  source 1..370: note = protein_3acc119
  REGION 9..159: note = RuvC_domain
  SITE 12: note = RuvC_P1
  SITE 63: note = RuvC_P2
  SITE 99: note = RuvC_P3
  SITE 101: note = RuvC_P4
  SITE 104: note = RuvC_P5
  REGION 224..309: note = Tnp_domain
  SITE 232: note = Tnp_P1
  SITE 262: note = Tnp_P2
  SITE 270: note = Tnp_P3
  SITE 271: note = Tnp_P4
  SITE 283: note = Tnp_P5
MDHHNGAFVGIDTSKLRNAIAVAEDGRGGDVRYLGEIDTTEAATRKLVTKLAAKYRQLTFCYEAGPTGYGLYRLIRKLGHDCIVVAPSLIPKKPGDRVKTNRRDAVGLAKLSRAGELTAVWVPDERHKAMRDLSRAREAAQKDLQGKRQQVSSFMLRLGRHYPGKKTWGRAHMNWLMQQKLEQREQRIALEELLGAVRQESERVERLEQAIRDATPEWSLAEVVTALQAMRGLDLVAAVTELAEIGDLSRFQTPRELMGYLGLVPCESSTGDTVNRGGITKAGNGRARRILVEAAWSYRHPPRVSLKKQIKVAASPQAVREIAWKAQMRLCGRFRSLTRKGKRPNVIVTAIARELSAFIWAINREVMAGR

SEQ ID NO: 13371 - protein, 343 aa, unidentified
  source 1..343: note = protein_60ff686
  REGION 7..149: note = RuvC_domain
  SITE 10: note = RuvC_P1
  SITE 53: note = RuvC_P2
  SITE 88: note = RuvC_P3
  SITE 90: note = RuvC_P4
  SITE 93: note = RuvC_P5
  REGION 211..296: note = Tnp_domain
  SITE 219: note = Tnp_P1
  SITE 249: note = Tnp_P2
  SITE 257: note = Tnp_P3
  SITE 258: note = Tnp_P4
  SITE 270: note = Tnp_P5
MAKASIIGVDLAKHVFQIHGAGADGSVAFRKKISRLKFLPFLASQPRCVVAMEACAGAHSWARDILAQGHEVRLIAPVYVKPFVKRQKNDMADAEAITEAAARPTMRFVAVKSAEKQASGMVFKTRDLLVRQRTQTINALRGHLTEHGIIAPQGVFHVGRLAAEVENVNSRLPSIVTELCKLLLRHIAILNEQIATLDRRIRDRAREDERARRLMTIPGVGPICATALEALAPPSETFAKGRDFAAWLGLTPRQNSSGGKARLGRISRMGQRDLRRLLIVGAMAVVRSAARRGAPAGSWLARMMARKPRMLVAIALANKIARVAWALMTKGGVYQISAAAALA

SEQ ID NO: 13372 - protein, 339 aa, unidentified
  source 1..339: note = protein_4183121
  REGION 4..153: note = RuvC_domain
  SITE 7: note = RuvC_P1
  SITE 55: note = RuvC_P2
  SITE 96: note = RuvC_P3
  SITE 98: note = RuvC_P5
  REGION 216..301: note = Tnp_domain
  SITE 224: note = Tnp_P1
  SITE 254: note = Tnp_P2
  SITE 262: note = Tnp_P3
  SITE 263: note = Tnp_P4
  SITE 274: note = Tnp_P5
MTMIGIDLYMATHTVVAVDDDGTVIAEFTLGSSNTQAQRLCDWAEGLGEREWAVESATGLGYLIGQQLVAAGETVFDVPPVLASRVRLLGSGRSQKNDARSIAIAVLRSDRLVVVQRDDHVVVLRLLVKRHRDMARLRNKHCSRLHALLLELEAGGIGGKISSSNASELLDRVTATDEAARYRILIAREVTADIARLDRALKASKDRIAVAVTASATSLRDIVGVGPIGAATIIGYTKDIKRFPTKGHYATYNATAPIEASSGGTKRHRLNLRGNRILNHAIHIAAVTQLRHDTNGRIYYDRKIAEGKTSREAIRALKRRISDAIYRALIADTTRVAAN

SEQ ID NO: 13373 - protein, 396 aa, unidentified
  source 1..396: note = protein_43f8fb8
  REGION 6..160: note = RuvC_domain
  SITE 9: note = RuvC_P1
  SITE 58: note = RuvC_P2
  SITE 98: note = RuvC_P3
  SITE 100: note = RuvC_P4
  SITE 103: note = RuvC_P5
  REGION 265..352: note = Tnp_domain
  SITE 273: note = Tnp_P1
  SITE 304: note = Tnp_P2
  SITE 312: note = Tnp_P3
  SITE 313: note = Tnp_P4
  SITE 325: note = Tnp_P5
MPRIGAGVDIGKDHHHCVVIDADGERLLSRRALNDETSLLELIGDVLALDADALWAVDLNHGGAALLIGLLLSHDQPMAYITGLAVHRASASYRGESKTDAKDAFVIADQARMRRDLGLLRPGDEIAVDLRILTTRRTDLMCDRTRQINRLRARLLEIFPALERELELTNKGPVILLTGYQTPAAIRRAGAKRIETWLRNRKVRSAAALARTAVEAAEAQHTALPGEKLAAAMGVRLAKGVMALDEEIAEVDALIEARFREHPHAEVILSLPGMGKQMGAVFIAATGGDMDAFGSADRLAGYAGLAPAPRDSGRVRGNLRRPRRFHRGLLNAMYLSALSSLKSCPASKSYYARKRAEGKGHKQALLALARRRLNVLWAMIRDGACYQATPPVTAAA

SEQ ID NO: 13374 - protein, 339 aa, unidentified
  source 1..339: note = protein_8310ca2
  REGION 14..161: note = RuvC_domain
  SITE 17: note = RuvC_P1
  SITE 65: note = RuvC_P2
  SITE 105: note = RuvC_P3
  SITE 107: note = RuvC_P4
  SITE 110: note = RuvC_P5
  REGION 206..293: note = Tnp_domain
  SITE 214: note = Tnp_P1
  SITE 244: note = Tnp_P2
  SITE 252: note = Tnp_P3
  SITE 253: note = Tnp_P4
  SITE 266: note = Tnp_P5
MSKSIDCSQATVFCGIDVSAATLAVAVIEQDQPLQQREFVNRASGHKALIGWLGKRKAQVRVSLEATGIYSLDLALALNDAPGIEVAVLNPKMANRFAQTLRRSKTDAADALVLAEYSCRMPFTAWRPPSLSALRLRAVGRHIVALVVQHTREQNRLHAAAGSQATPRCVVQDLKRSLISLERRIVKMRREAMALVHGDTEVQQRFRLLTGIPGIAATSAVQILGELALLAPEMNVRQWVAHSGLDPVHQHSGTSVHKLSRISRAGNRYLRRALYMPALSAVRWDPHMKAFYELLQTRHKTKLQAVIAVARKLLHAIYGVLRSRTPYDGRKLFPQLEPA

SEQ ID NO: 13375 - protein, 344 aa, unidentified
  source 1..344: note = protein_f458bf7
  REGION 4..160: note = RuvC_domain
  SITE 7: note = RuvC_P1
  SITE 57: note = RuvC_P2
  SITE 97: note = RuvC_P3
  SITE 99: note = RuvC_P4
  SITE 102: note = RuvC_P5
  REGION 274..336: note = Tnp_domain
  SITE 282: note = Tnp_P1
  SITE 312: note = Tnp_P2
  SITE 320: note = Tnp_P3
  SITE 321: note = Tnp_P4
MNAVGIDVSKGKSMVAIMRPFGEIVSAPFEIKHTASDIHSLVELINSVEGESRIVMEHTGRYYEVLAHQLSKANLFVSAINPKLIKDFDNDSLRKVKSDKADSVKIARYALDKWQNLKQYNVMDELRNQLKTMNRQFGFYMKHKTAMKNNLIGILDQTYPGVNTYFDSPARSDGSQKWVDFASTYWHVDCVRKMSLNAFIDHYQNWCKRKKYNFSQSKAEEIYGKAKELVPVLPKDDITKLIIKQAVNQLNSASTTVESLRTLMNETASKLPEYPIVMAMKGVGASLGPQLMAEIGDVSRFTHKGAITAFAGVDPGVNESGSYEQKVFQLQNEAHLILERLYFR

SEQ ID NO: 13376 - protein, 402 aa, unidentified
  source 1..402: note = protein_09b556e
  REGION 5..163: note = RuvC_domain
  SITE 8: note = RuvC_P1
  SITE 62: note = RuvC_P2
  SITE 102: note = RuvC_P3
  SITE 104: note = RuvC_P4
  SITE 107: note = RuvC_P5
  REGION 276..365: note = Tnp_domain
  SITE 284: note = Tnp_P1
  SITE 314: note = Tnp_P2
  SITE 322: note = Tnp_P3
  SITE 323: note = Tnp_P4
  SITE 336: note = Tnp_P5
MNPVIGLDISKEESHGQAFIERGKPYRGTFKFEHTQEGLKKLLQVVQDLEHSSRQRPMLILEATGHYQSPVVQFLEEHHYLYIVINPLISNRLRKSNLRKVKTDTADAYLLAELYYKEEFEPFKKRGVQLLNLRYLTRQYEALSKMCVQTKLQFQAVLDQVFPAYKGVFGAMYSNISLQFLNEFPTSNSVLQTDEDTLKAKMKELLSSKRGRSEDWIHLRVQRLLDAAKENPFQRTMYASHLVNLKVLISLILQYQEHLAGLEQNIDALAGEIEEYDLIQSIPGIGHKIAATILSEIGEVDRFDHPKKLVAFAGIDPSVFASGKFTATRNRITKRGSRQLRYALVLAVQCGLIRSRNTRIKEFYDRKRAEGKPHKVALVACANKLVHWLYAILKNKKMFRPA

SEQ ID NO: 13377 - protein, 342 aa, unidentified
  source 1..342: note = protein_ce200e2
  REGION 7..149: note = RuvC_domain
  SITE 10: note = RuvC_P1
  SITE 53: note = RuvC_P2
  SITE 88: note = RuvC_P3
  SITE 90: note = RuvC_P4
  SITE 93: note = RuvC_P5
  REGION 212..298: note = Tnp_domain
  SITE 220: note = Tnp_P1
  SITE 250: note = Tnp_P2
  SITE 258: note = Tnp_P3
  SITE 259: note = Tnp_P4
  SITE 271: note = Tnp_P5
MNKSMTVGIDLAKAIFFVVVLDPSGKQVHRKKLRRQQVLAFLANYPQAVVAMEACSGSHYWAREIEAAGHQVKLLPPQHIKAYLRRQKNDYNDAEAIAEAAQYGRVRAVAVKTVEQQLDQSLQRMRQALLADQIGLINRTRALLAEHGIVMPEGKANFRKTVVALLEDPENGLPWRLRELVNRQYQQYCIWEQELEWYTQQIEIRANQDEVCQNLMSIPGYGEIVSSAFRCWIGDGHQFKNGRDASAAMGLVPKQYSTGGKIILGRISKCGDKRMRALLVHGARAFARVASKRNDRLSRWVCNLIERRGYNKAVIALANKLVRIGWAVVTRCEPYRAINISQ

SEQ ID NO: 13378 - protein, 324 aa, unidentified
  source 1..324: note = protein_7043e9e
  REGION 4..154: note = RuvC_domain
  SITE 7: note = RuvC_P1
  SITE 59: note = RuvC_P2
  SITE 99: note = RuvC_P3
  SITE 101: note = RuvC_P4
  SITE 104: note = RuvC_P5
  REGION 199..285: note = Tnp_domain
  SITE 207: note = Tnp_P1
  SITE 236: note = Tnp_P2
  SITE 244: note = Tnp_P3
  SITE 245: note = Tnp_P4
  SITE 258: note = Tnp_P5
MFFLGIDVSKAKLDCLLLVDGATTRKTKVVPNTAVGVQTLLDWCIKHGAQPEQIHAVLEPTGQYHEQAATVLHDASMNVSLVNPAQARDFAGALAVRSKTDGIDSYVLARYGQALKPPLWHPAPVHARQLRALLARRESLVKDLLRELNRQEKTQFSRPPALVESSIDKAIAFLREEIKRLDRAIDEHIDRHPDLRADRDLLTSIPAIGPQAANAILSIMHNRRINSAEGLAAYLGLIPVQRQSGTSLNGRPCLSKAGSPRVRATMYMAAIVATRYNPHVQALYARLLDAGKSKMSALGAAMRKLAHLCFGVLKTRSPYRPDYA

SEQ ID NO: 13379 - protein, 326 aa, unidentified
  source 1..326: note = protein_11a23e2
  REGION 4..156: note = RuvC_domain
  SITE 7: note = RuvC_P1
  SITE 61: note = RuvC_P2
  SITE 101: note = RuvC_P3
  SITE 103: note = RuvC_P4
  SITE 106: note = RuvC_P5
  REGION 200..286: note = Tnp_domain
  SITE 208: note = Tnp_P1
  SITE 237: note = Tnp_P2
  SITE 245: note = Tnp_P3
  SITE 246: note = Tnp_P4
  SITE 259: note = Tnp_P5
MAIIGIDISKHKFDCLWLRDVRSLKVKTKVFANRSTGFAELIDWCCAQTGETVEQLQVFLEATGVYHEPLALYLHDRGVQVFVLNPARVREYARSLGIQGKTDKQDSLVLARYGATQPVRPWTPERREVRELKALIARHEALQDDLQRELNRREKAEVSGSPGVLASIDNLVQALRQEAERIRQDIDDHIDRHDDLKRDRALLQSIDGIGEVLSRHLLALLHSRDFGDARQCTAFVGLVPRPWQSGKTVEGRTVLSKAGSPLIRAKLYMGAIVAKERNPDVKALYERLLARGKARMSALGAAMRKLLQIAYGVLKTQRPYQPRQAL

SEQ ID NO: 13380 - protein, 341 aa, unidentified
  source 1..341: note = protein_5d90e7a
  REGION 7..149: note = RuvC_domain
  SITE 10: note = RuvC_P1
  SITE 53: note = RuvC_P2
  SITE 88: note = RuvC_P3
  SITE 90: note = RuvC_P4
  SITE 93: note = RuvC_P5
  REGION 209..295: note = Tnp_domain
  SITE 217: note = Tnp_P1
  SITE 247: note = Tnp_P2
  SITE 255: note = Tnp_P3
  SITE 256: note = Tnp_P4
  SITE 268: note = Tnp_P5
MSESALIGIDLGKHSFHLHGQDTWGREVFRKKCSRPQMMQFFGNLPACTVVMEACAGAHFIARQLMTMGHTAKLIAPQFVRPFVKGNKNDFVDAEAICEAASRPSMRFVTPKTEGQQTLSVLHRLRESLVRDRTKTANQMHGFLLEFGISLPKGLAIMKRLASVLAEHELPARLTVLLQRLHEHFCYLDEQVKALDQELASQLADDDLGSRLLSMPCVGPITASLLAVEMGDGRQYGCSRDFAASVGLVPRQYSTDGKANLLGISKRGDKNLRQLLVQCARVYLQRLDYQHGPLAAWVRALLGRRHSNVVACALANKLARIAWALAAHHTQYETGPDALNA

SEQ ID NO: 13381 - protein, 333 aa, unidentified
  source 1..333: note = protein_a8fa437
  REGION 6..148: note = RuvC_domain
  SITE 9: note = RuvC_P1
  SITE 52: note = RuvC_P2
  SITE 87: note = RuvC_P3
  SITE 89: note = RuvC_P4
  SITE 92: note = RuvC_P5
  REGION 211..297: note = Tnp_domain
  SITE 219: note = Tnp_P1
  SITE 249: note = Tnp_P2
  SITE 257: note = Tnp_P3
  SITE 258: note = Tnp_P4
  SITE 270: note = Tnp_P5
MKLTVIGMDIAKHVFQLHAVNPSTGEIERIKLRRSQLLEFFAKRERSLVAMEACGGAHHWARELLQLGHDVKLICPRSVRPFVLRNKSDAADARAIWTAVQQPEARLVAVKSEAQQTILALHRLRAQLMKFRIMQTNALRGLLHEFGEALPEGYQALSKEIPAALAKVSDRLPAMLIDSLREQWARVQATDKDINLLEHRLKLALRDSQQCQRIAEIPGIGLLTATAAVATIGDPHTFRSGREFAAWLGLVPKQVGTGGKVRQLGLSKRGDTYLRTLLMHGARSVITRGTRSPWLDGLLARRPFNVVVAALANKLARTIWAVLSRGTPYHGAA

SEQ ID NO: 13382 - protein, 314 aa, unidentified
  source 1..314: note = protein_9251ad1
  REGION 8..149: note = RuvC_domain
  SITE 11: note = RuvC_P1
  SITE 53: note = RuvC_P2
  SITE 93: note = RuvC_P3
  SITE 95: note = RuvC_P4
  SITE 98: note = RuvC_P5
  REGION 188..273: note = Tnp_domain
  SITE 196: note = Tnp_P1
  SITE 225: note = Tnp_P2
  SITE 233: note = Tnp_P3
  SITE 234: note = Tnp_P4
  SITE 246: note = Tnp_P5
MTIQTPIVGIDVAKESLSLYRLDTQQASTLANARSTILAWLKTLPADCSLAIEATSTYHVLLADLAYQRGHRIYVIDGYRLSNYRKGIGGRVKNDQSDARLLARYLAHEQRQLRPWKPTCKAYRRLQVLLRRRATLIRSTTALRLSFAQDRQMARELKPVLERMKRLEVRLNEELNKALQEAGLAEQAKRCQAIEGIGPLTAAALNLAFLRGSFRSSDAFIAFLGLDVRVKESGRYNGRRKLSKQGDSETRRLLYNAAMAASRTKAWQSRYQQYLQRGLKRTEALIILARKLARIAFALMKTQQPYRPTVDTVG

SEQ ID NO: 13383 - protein, 341 aa, unidentified
  source 1..341: note = protein_9b0348f
  REGION 7..148: note = RuvC_domain
  SITE 10: note = RuvC_P1
  SITE 53: note = RuvC_P2
  SITE 88: note = RuvC_P3
  SITE 90: note = RuvC_P4
  SITE 93: note = RuvC_P5
  REGION 210..297: note = Tnp_domain
  SITE 218: note = Tnp_P1
  SITE 248: note = Tnp_P2
  SITE 256: note = Tnp_P3
  SITE 257: note = Tnp_P4
  SITE 269: note = Tnp_P5
MRKFIRIGVDLAKNVFQLHGIEREDGSPFQRKLTRVKFREFFSRLTPCRVGMEACGSAHYWARVLGAMGHEVVLIAPAYTKPYVKRGKNDAADAAAICEAMSRPEMRFVPVKSADQQAVLMLHKTRDLLVKQRTMAVNALRGHLHEFGLIAAKGIHRVQELVALALADEGLPEEAKEAVTLLAGQSEQLDMKIDALEKQIAKASGKNPMSRLLKEIPAIGPLISSAMAASHPDPNVFKSGSDFAASLGLTPSQHSSGGKERLGSITKKGNRYLRKMLVVGCTSVLRVAHKYKGALAEWIIAIKARKPERVAAVALANKLARICWAVLSTGESFRQELYTRA

SEQ ID NO: 13384 - protein, 309 aa, unidentified
  source 1..309: note = protein_298b936
  REGION 8..149: note = RuvC_domain
  SITE 11: note = RuvC_P1
  SITE 54: note = RuvC_P2
  SITE 94: note = RuvC_P3
  SITE 96: note = RuvC_P4
  SITE 99: note = RuvC_P5
  REGION 190..274: note = Tnp_domain
  SITE 198: note = Tnp_P1
  SITE 227: note = Tnp_P2
  SITE 235: note = Tnp_P3
  SITE 236: note = Tnp_P4
  SITE 247: note = Tnp_P5
MKQSVVYIGIDVAKAHLDVAWAGTFRRLPNERSGHAVLVRWIKQSATPVQLICEASGGYEQGLLESLEKSEVKVTLVQAVRVRQYARAAGILAKTDQMDAKVLAAFGSAMQPPPTPPLCAEQKRLRQYEAQRRHLSRVLVAEQNRLAQLSCAELRNLSRGLISKIKKQIETIDTRIGDLIAQDQTLREKAQKLTAIRGVGVRTAALLLAQMPELGQLNRRQAAALAGLAPFNHDSGSICGKRAIFGGRRALRSGLYMAALSAARFNPILSRFYRRLRTKGKPHKLALTAVMRKLLLALNQTLKPIPSLA

SEQ ID NO: 13385 - protein, 342 aa, unidentified
  source 1..342: note = protein_b77f117
  REGION 7..149: note = RuvC_domain
  SITE 10: note = RuvC_P1
  SITE 53: note = RuvC_P2
  SITE 88: note = RuvC_P3
  SITE 90: note = RuvC_P4
  SITE 93: note = RuvC_P5
  REGION 212..298: note = Tnp_domain
  SITE 220: note = Tnp_P1
  SITE 250: note = Tnp_P2
  SITE 258: note = Tnp_P3
  SITE 259: note = Tnp_P4
  SITE 271: note = Tnp_P5
METAVTIGLDLGKSVFQVHCVDAGGTVVVQRRLTRSKLLGFFAKQEPCLVGMEACAAAHHWGRELSKLGHRVRLMPPRYVKPYVKRQKNDAADAEAICEAVTRPTMRFVEIKTCEQQGTLVLHRVRLMLMRQRVQLSNAIRGHMAEYGLVAPVGRNGLQRLIAILGNPDDERVPAVARASLAPLVSQFGLVNDQVLENDRRVRASARSTELGRRLMEVPGVGPVLASAMVATVPDPTAFKSGRNLAAWIGLVPRQNSSGGKEKLGGITKQGDRYLRQLLVAGALAVIRYAQRHGTKRPWLVHLLARRTPKIAAVALANKMARMIWAMMMTGERYREPTVAAA

SEQ ID NO: 13386 - protein, 312 aa, unidentified
  source 1..312: note = protein_8201f7c
  REGION 6..154: note = RuvC_domain
  SITE 9: note = RuvC_P1
  SITE 53: note = RuvC_P2
  SITE 93: note = RuvC_P3
  SITE 95: note = RuvC_P4
  SITE 98: note = RuvC_P5
  REGION 190..273: note = Tnp_domain
  SITE 197: note = Tnp_P1
  SITE 226: note = Tnp_P2
  SITE 234: note = Tnp_P3
  SITE 235: note = Tnp_P4
  SITE 246: note = Tnp_P5
MSQDTIGADISKDHIDLHRLPDGRRLRVANDRTGFAAILKWIGGAAVARIVYEPTGAYHKAFERCMISHGLALAKVNHGLARRFAEASGKLAKTDRIDAAILARYGLLLEPRLLHATADALNDLKELHVARLALVKDRTAAKNRAKNLTQPLLKRQNASRLRQIERQMDDINQAIMRLIEADDSLKARFLILVSIPGISTVSAFALIIEMPELGELDEKAAASLCGLAPISRQSGRWTGRAFITGGRATVRQALYMPALVAAHFNPDLKAKYKLLTENGKPPKVAIAAVMRKLIVLANALLRDERKWTPKPA

SEQ ID NO: 13387 - protein, 389 aa, unidentified
  source 1..389: note = protein_63b4776
  REGION 7..160: note = RuvC_domain
  SITE 10: note = RuvC_P1
  SITE 58: note = RuvC_P2
  SITE 99: note = RuvC_P3
  SITE 101: note = RuvC_P4
  SITE 104: note = RuvC_P5
  REGION 222..307: note = Tnp_domain
  SITE 230: note = Tnp_P1
  SITE 260: note = Tnp_P2
  SITE 268: note = Tnp_P3
  SITE 269: note = Tnp_P4
  SITE 280: note = Tnp_P5
MSDRVVIGMDPYKRSATIEVMAGDETVVGGGRFDTDRDGYTAMRKYASQWPHRVWAIEGCQGIGRHIANRLLTDGEQVVDVPPKLSARARVFATGQGRKTDATDAHSIALVGTRMAGLRPVVNDEQLALLRILVDRRRSLGEDHTRMVSQLHQLLLDLIPGGAKKSLSAAQAKALLATVRPLDVVGKARRRVAAELISDLERVYQRSKDADKELKELVASTGTTLMDLHGIGPSGAARLLVEVGDITRFPNRAHFASWNGTAPIDASSGDQVRHRLSRAGNRQINRVLHIMATVQLRNPTEGRAYFDRKKDTGKTSMEAMRALKRRLSDIVYRHMINDAAAAAAAGPGGQRGTTTDSSVTSSHPQAGSSEKSLPGPAETQLRTPLPMMS

SEQ ID NO: 13388 - protein, 325 aa, unidentified
  source 1..325: note = protein_f7e6e00
  REGION 6..148: note = RuvC_domain
  SITE 9: note = RuvC_P1
  SITE 54: note = RuvC_P2
  SITE 92: note = RuvC_P3
  SITE 94: note = RuvC_P4
  SITE 97: note = RuvC_P5
  REGION 197..284: note = Tnp_domain
  SITE 205: note = Tnp_P1
  SITE 235: note = Tnp_P2
  SITE 243: note = Tnp_P3
  SITE 244: note = Tnp_P4
  SITE 257: note = Tnp_P5
MKKIFIGIDISNLTLDICIKKDGQLQYFTIHNQIKAIKAFFKKHTTEGNVIAMENTGRYNWNLYEVLASSNFQVYVIPPVHLKMSLGLSRGKNDKVDALRICSYIEKNQAESIIWKPSSIVVRQLKVLLTERQSRIKMKSQLIRQQYDYRLMKTLALDKDLLSLNKQLIKAIEIQILKIEADIEKSILGDQELKKQSELIKSVPGVGKVVSWTLIAKTEGFTTISDPRKLACYCGVAPFDYQSGTSIRGRSRVSMFADKNMKTLLHLAAMSAIRLNNELKMYYQRKVGEGKNKMSVLNAVRNKIIHRVFAVIKNQTIYKNDLVLS

SEQ ID NO: 13389 - protein, 325 aa, unidentified
  source 1..325: note = protein_9534295
  REGION 21..183: note = RuvC_domain
  SITE 24: note = RuvC_P1
  SITE 68: note = RuvC_P2
  SITE 106: note = RuvC_P3
  SITE 108: note = RuvC_P4
  SITE 111: note = RuvC_P5
  REGION 202..286: note = Tnp_domain
  SITE 210: note = Tnp_P1
  SITE 239: note = Tnp_P2
  SITE 247: note = Tnp_P3
  SITE 248: note = Tnp_P4
  SITE 259: note = Tnp_P5
MDPDDKHGIAEKMSDNLPQTIGIDISKASLDCHVHPAGAERQFSNTAKGHKALIAWLRQWPVERIAYEATATYHRALEAALADWPCVKLNPERARRFAQATGTLAKTDRIDAMLLARMAATLQPPVRPARSAQQAQMAELINARDGLVRDRTALKNREKNLTIAFLKRQCRQRLEQIDRHIEALDTEIANLIAADAALARRHEILTSIAGVGTLTANQLIATMPELGSLENKQAASLAGLAPVARQSGQWKGKSFIRGGRANVRQALYMPALVAARYNPDLKAKYQQLVTAGKPAKIAITAVMRKLVVTANALLKADRCWTQSPA

SEQ ID NO: 13390 - protein, 326 aa, unidentified
  source 1..326: note = protein_864f235
  REGION 6..158: note = RuvC_domain
  SITE 9: note = RuvC_P1
  SITE 59: note = RuvC_P2
  SITE 99: note = RuvC_P3
  SITE 101: note = RuvC_P4
  SITE 104: note = RuvC_P5
  REGION 199..285: note = Tnp_domain
  SITE 207: note = Tnp_P1
  SITE 237: note = Tnp_P2
  SITE 245: note = Tnp_P3
  SITE 246: note = Tnp_P4
  SITE 258: note = Tnp_P5
MTESMIGIDVAKATFDVAAPLEPKGKYRTKAKLPNTPAGFTLLSDWLDRHVPGAAVCMEATGVYHEALATFLVERGVTVYVANPAQVAAYAKSELSRTKTDHADAKLIARFAMAQLQVGTTLRPWVPPTPAQRKLRALIHRLNDLEGMRQMERNRLDVSDQAVRGSIADVMETLDAQIAELKKEIDNHIDSDPDLRRDAGLLTSIPGIGELTAAFMLGCAGDLRRFDDPRKLDAFAGMNPAIRESGKWVGQSRLSKLGHALLRAKLYMPAMTAIRHNVAVRALFDRLVARGKPRKLALGAAMRKLLHLAWGVIRSGKNFDPSIALA

SEQ ID NO: 13391 - protein, 344 aa, unidentified
  source 1..344: note = protein_9a824c0
  REGION 6..147: note = RuvC_domain
  SITE 9: note = RuvC_P1
  SITE 52: note = RuvC_P2
  SITE 87: note = RuvC_P3
  SITE 89: note = RuvC_P4
  SITE 92: note = RuvC_P5
  REGION 211..294: note = Tnp_domain
  SITE 219: note = Tnp_P1
  SITE 249: note = Tnp_P2
  SITE 257: note = Tnp_P3
  SITE 258: note = Tnp_P4
  SITE 270: note = Tnp_P5
MSIAILGVDLGKNSCSIVGVDAAGAVVVRRTMRRQTLIDYVTKLPACVVAMEACCGAHHLGRLFMAQGHQIRLMSPEYVRPYIKAQKNDDRDAEGIAEAASRPTMRFVELKSQEQLDIQTLHRVRSRLVAERTNLLNQLRAILLERGVIFPAGRRKFELDLDRMRSEGNETLSPRMRQLIDGLRAEWKELDAKIGALNDEFVQLARNDAATRRLTSIPGIGVLNATALVAAVGNASSFAKARDLGSWLGLVPRQYSTGGKARLLGISKRGNTYLRTLLIHGARAALPSLSKSDTPLGRWLTAMIERGVHRNAVVVALANKLARIAWAALRKETRFERGYLVATA

SEQ ID NO: 13392 - protein, 400 aa, unidentified
  source 1..400: note = protein_ad2765a
  REGION 4..160: note = RuvC_domain
  SITE 7: note = RuvC_P1
  SITE 57: note = RuvC_P2
  SITE 97: note = RuvC_P3
  SITE 99: note = RuvC_P4
  SITE 102: note = RuvC_P5
  REGION 275..362: note = Tnp_domain
  SITE 283: note = Tnp_P1
  SITE 313: note = Tnp_P2
  SITE 321: note = Tnp_P3
  SITE 322: note = Tnp_P4
  SITE 335: note = Tnp_P5
MISVGIDVSKGKSTVCILKPYGEIVSKPFNITHTQKDLSELSSMLFRLNDEVKIVMEATGIYHLPVLTYLQEKGFFVSVINPYLMKSYRNESLRKAKTDKIDSRIIANYGIDHWFKMKEFQTSGEIYEELKLLGQQYRHYMKLHLLSLAELTHLLDLTMPGIKNLLASWNETNRKDKRSDFVERFWHYDVITSMSEQEFTEEYILWAKEKKYVPSQEKAKVIYTLAQESIPTLPSETSSVKILVTEAVRVLKEVDATLGLILSRMQEIAKTLPEYSVVREMGGVGNTLAPKLIAEIGDVRRFRNGKALVAFAGIDPPPYESGQFVGCNRKISKRGSASLRKVGYETMRSLKMRSRPEDPVYRYVVKKESEGKSKKAAKIAGLNKFLRIYYARVTELYKNI

SEQ ID NO: 13393 - protein, 403 aa, unidentified
  source 1..403: note = protein_d00c77e
  REGION 10..164: note = RuvC_domain
  SITE 13: note = RuvC_P1
  SITE 61: note = RuvC_P2
  SITE 101: note = RuvC_P3
  SITE 103: note = RuvC_P4
  SITE 106: note = RuvC_P5
  REGION 271..357: note = Tnp_domain
  SITE 279: note = Tnp_P1
  SITE 309: note = Tnp_P2
  SITE 317: note = Tnp_P3
  SITE 318: note = Tnp_P4
  SITE 330: note = Tnp_P5
MPETDIRVFVGVDMAKMEHFAHAVTVEGDELFARSVSNDETAIEQMIDDAAEHGHTAVVVDMTASGAQLLLSVAARRQVPVAYVTGLQMRRAAQLYAGSAKTDPRDAWVLADYARRHTDQLVWLDVSDELLIRLRVLNGRDVDLAGDATRARNRTRDALVAVSPALERVVGPRLHQAGVRDVITKWSTPTTLRQAGKTRIRNTIKKRSPRLADKVTDEIWAALDAQTVTLPAEVTWGDVISDLLSDLERISGQRDELETVIDEVFLSHPLGKVLVTLCGFGPRTGARTLAEIGDPNRFATGSRLASYAGLAPIDWRSGTSTSGSFHSRGGNHRLKNAMFLAAFVATRHDPDAKAYYQRKRDEGKKHNAAVICVARRRCDLILAMLKTATDYDVNRHTELQKAA

SEQ ID NO: 13394 - protein, 304 aa, unidentified
  source 1..304: note = protein_e40bb4a
  REGION 4..155: note = RuvC_domain
  SITE 7: note = RuvC_P1
  SITE 50: note = RuvC_P2
  SITE 90: note = RuvC_P3
  SITE 92: note = RuvC_P4
  SITE 95: note = RuvC_P5
  REGION 182..266: note = Tnp_domain
  SITE 190: note = Tnp_P1
  SITE 219: note = Tnp_P2
  SITE 227: note = Tnp_P3
  SITE 228: note = Tnp_P4
  SITE 239: note = Tnp_P5
MNGIGIDVSKRQLDVGTTDGETLQVSNNLAGFSELDVWLRKHPAAQIVLEATGGYEQPVLDFLHKAGHPVVRANALRARRLAQGMGHIAKTDRLDAYALAQMAALVKLPPYQPLELWQQKMREFVRARRQAMEMLTIARQQQEMVGDRELRRLLQANINRQQALVERLGKQIAEQVAQQPQLAVLKSMKGVGPALQAVLASYLPELGRITGKRIASLVGVAPMSHDSGTMRGKRSIHGGRAEIRQVLYMAAMSAMRHEPRLRDFYQSLRARGKEGKVAIVAVMRKMLVILNARVRDAESGPIPA

SEQ ID NO: 13395 - protein, 344 aa, unidentified
  source 1..344: note = protein_12dc666
  REGION 7..151: note = RuvC_domain
  SITE 10: note = RuvC_P1
  SITE 55: note = RuvC_P2
  SITE 90: note = RuvC_P3
  SITE 92: note = RuvC_P4
  SITE 95: note = RuvC_P5
  REGION 214..301: note = Tnp_domain
  SITE 222: note = Tnp_P1
  SITE 252: note = Tnp_P2
  SITE 260: note = Tnp_P3
  SITE 261: note = Tnp_P4
  SITE 273: note = Tnp_P5
MNKLSRVGIDLAKNVFQIHGVDRHDKVVWRRRLTRDKWLNALLEKIDPGCEIGMEACAGAHHWAREMQAEGFTVKLIAPQFVKPYVKSNKNDANDAEAICEAMSRPNMRFVAVKTVEQQDIQAAHRIRTELIGHRTAKANQIRGLVAEYGMVAPQQLARLRAAVPNWLEDAENGLTSRFRCLLAGLWGDLKTLDHRVAELDHEINVIAQSDPVAKRLQQLRGIGPMVATALVATVGNAEQFANGRQMAASLGLTPRQHSSGGKDRILGISKRGDAHLRSILIHGARSVIRTAKAKDDRLSQWVTSLAERRHPNVAAVALANKTARIAWAMLRNGTDYEPDYLVA

SEQ ID NO: 13396 - protein, 311 aa, unidentified
  source 1..311: note = protein_45409b7
  REGION 6..153: note = RuvC_domain
  SITE 9: note = RuvC_P1
  SITE 53: note = RuvC_P2
  SITE 92: note = RuvC_P3
  SITE 94: note = RuvC_P4
  SITE 97: note = RuvC_P5
  REGION 188..272: note = Tnp_domain
  SITE 196: note = Tnp_P1
  SITE 225: note = Tnp_P2
  SITE 233: note = Tnp_P3
  SITE 234: note = Tnp_P4
  SITE 245: note = Tnp_P5
MTDHTIGVDISKSHLDVFDAERGAATRFDTSTSGFRAFEEWLGKAPIARVVYEPTGPYHRAFEERFCDRLPLVKVNPLQARRFAEACGTRAKTDALDAQGLARMGVALELEPDTPVAKTTRVLKDLQVARTALIKDRTRLKNRAYVQTNTVLKRQTKARLALVEKHIAELDREIDALIQADKTTARRREIVTSIPGLGSVASAAIVTYLPEIGTLDRRQVGSLAGVVPYNRDSGQWKGRSFICGGRKPLRDALYMPALVAMRYNPDLKAKYDALRAAGKPAKVAIVAIMRKLIETANALVKADRVWTPKTA

SEQ ID NO: 13397 - protein, 341 aa, unidentified
  source 1..341: note = protein_c2fa234
  REGION 7..149: note = RuvC_domain
  SITE 10: note = RuvC_P1
  SITE 53: note = RuvC_P2
  SITE 88: note = RuvC_P3
  SITE 90: note = RuvC_P4
  SITE 93: note = RuvC_P5
  REGION 212..299: note = Tnp_domain
  SITE 220: note = Tnp_P1
  SITE 250: note = Tnp_P2
  SITE 258: note = Tnp_P3
  SITE 259: note = Tnp_P4
  SITE 271: note = Tnp_P5
MSEVRVIGLDIAKSVFQLHGVDGAGATVLQKRLTRARLLPFFEKLSPCLIGIEACATSHFWARELTRLGHEVRLMPAQYVKPYLKRQKNDMADAEAIAEAVTRPTMRFVGAKSADEQSAMMLHKVRLMLNRQLVMLSNAMRAHMAEFGIIAPIGRGGIDRLRAIIEDEADERIPAQARRCLQMLIAQLKLVKLQILDNDRQVLALARSTELGRRLMEIPGIGPLVASALVACVPDPSMFRCGRNMSAWFGLVPRQNSSGGKERLGSITKAGNRYLRQMLFAGAMAVIRRAMQSTRRTWLSQLLARRRPKIAAVALANKNARIAWAMMTNGQRYQEPMAIAA

SEQ ID NO: 13398 - protein, 366 aa, unidentified
  source 1..366: note = protein_20bc353
  REGION 4..160: note = RuvC_domain
  SITE 7: note = RuvC_P1
  SITE 57: note = RuvC_P2
  SITE 97: note = RuvC_P3
  SITE 99: note = RuvC_P4
  SITE 102: note = RuvC_P5
  REGION 243..319: note = Tnp_domain
  SITE 270: note = Tnp_P2
  SITE 278: note = Tnp_P3
  SITE 279: note = Tnp_P4
  SITE 292: note = Tnp_P5
MNAVGIDVSKGKSMMAALRPMGEVALLPQEFLHTAPGLDQMAHAILALGEDTRVVMEATGRYHEPVAAALSAYGIYVCILNPLYIKQSGAGSIRKVKTDKADSLKIAKYGLDNWVDLREHTAMDTIRQQLKLCSRQYNIYMKTEVSLQNNLISLTDKTFPGVNELFSSPARADGHQKWIDFVMTFWHCDCVFRISEKAFTARYEKWCKRKGYHFRAEKAAEIYAQSCELFVTLPKDDNTKLLITTAAQLMAEIGDVRRFPRRSSIVAFAGVDPAITQSGKHEVQSTATTKRGSPHLRKTLYQIVCTYLRKSPEDEPVYQFLDKKRGEGKPYFVYMTAAQNKFLRIYYARVKECLEAFDTQQNTVQD

SEQ ID NO: 13399 - protein, 405 aa, unidentified
  source 1..405: note = protein_0c1dea4
  REGION 4..160: note = RuvC_domain
  SITE 7: note = RuvC_P1
  SITE 59: note = RuvC_P2
  SITE 97: note = RuvC_P3
  SITE 99: note = RuvC_P4
  SITE 102: note = RuvC_P5
  REGION 271..357: note = Tnp_domain
  SITE 279: note = Tnp_P1
  SITE 310: note = Tnp_P2
  SITE 318: note = Tnp_P3
  SITE 319: note = Tnp_P4
MIFVGNDWAADHHDVCVMDEQGSVLASRRLPNDAGGITVLHQMLAGVCQDAGQVIVGIETDHGMWAAALIGAGYQVYAINPLSVRRYRDRHHLAGTKSDKADAKLLADLVRTDRHNHRPVATDSAEVAAITVMARAHQNLVWMRAGQQNVLRAQLCAYYPAAIEAFGEDLAHHDCLSVLLRAPTPERGARMSLSALRATLTRGGRQRHLDERARQIQQSLRAQGHLHTSPASTAAYAATVTATVNLLISLNTQISDLQTQLAQSFRTHPDAEIYLSLPGIGDITGARMLGEFGDDPERYASAKCRKNYAGTSPRTIASGKSHAVLARHIRNNRLTDAALRMAQGALCASPGARAYYDHLKTGQRSHTQALRALANRLIGILHGCLKTRTRYDEHTAWGHRNTLPA

SEQ ID NO: 13400 - protein, 338 aa, unidentified
  source 1..338: note = protein_36e58c8
  REGION 6..152: note = RuvC_domain
  SITE 9: note = RuvC_P1
  SITE 53: note = RuvC_P2
  SITE 91: note = RuvC_P3
  SITE 93: note = RuvC_P4
  SITE 96: note = RuvC_P5
  REGION 211..297: note = Tnp_domain
  SITE 219: note = Tnp_P1
  SITE 249: note = Tnp_P2
  SITE 257: note = Tnp_P3
  SITE 258: note = Tnp_P4
  SITE 270: note = Tnp_P5
MSILTVGIDLAKSVFAVHGVDEAGRAELVRPAVPREKLHELIATLPPCVIGMEACSGAHHWARLFQAAGHTVRLIAPKFVTPYRMSGRRSKNDAADAAAICEAVQRPHMRFVPIKTLDQQSQLMVHRARQGFVEQRTATINRIRGLLAELGIVLPLKAATVRRRAGQCLEDLPGWANMVIGDLLGEVDRLDERIAQYDRHIRQIARQDIRAQRLTRLSGVGETTATCLVALIGNGHDFECGRQFAAWLGLVPGQYSSGGKARLGRITKAGDAYLRSLLVMGARAVLAAARNKTDGLSRWALAVEQRRGYWKAVVAIAAKNARMAWAVLRRGEAFALPT

SEQ ID NO: 13401 - protein, 403 aa, unidentified
  source 1..403: note = protein_6ba3525
  REGION 5..160: note = RuvC_domain
  SITE 8: note = RuvC_P1
  SITE 57: note = RuvC_P2
  SITE 97: note = RuvC_P3
  SITE 99: note = RuvC_P4
  SITE 102: note = RuvC_P5
  REGION 268..354: note = Tnp_domain
  SITE 276: note = Tnp_P1
  SITE 307: note = Tnp_P2
  SITE 315: note = Tnp_P3
  SITE 316: note = Tnp_P4
MSIYVGLDWGSQEHAVCVLDPSGTRLAQFTITHNQEGLRQLRHRLSILAPPNQIRVALERPSGLLVDSLVETGYTVVPIHPNIVKATRPRYSSAAAKSDRSDALLLADLLRTDEHRFRPLTPECDALKALRALVRTRDDLIATRIELANQLRALLESFWPGAAAIFADIDSPIALAFLLRYPTPGSAAHLGEKRLASFLAQHRYCGRRGSAELLQRLRSAPLGRCGGLESQAKGELVRCLSSVLTTLVEQLRQISSRIEHEVAALEDGQRLMSFPRIGRINAAQLLAELGCVRARFPTDSALACEAGVSPVTRQSGKSHAVVFRWACNKRLRVALTTFAHNSTRASPWAAAIYARARARGIDHPHAIRILARAWVRVLWRTWTDHQPYDPTKHRNAAPLLAAA

SEQ ID NO: 13402 - protein, 340 aa, unidentified
  source 1..340: note = protein_3359b06
  REGION 5..145: note = RuvC_domain
  SITE 8: note = RuvC_P1
  SITE 51: note = RuvC_P2
  SITE 86: note = RuvC_P3
  SITE 88: note = RuvC_P4
  SITE 91: note = RuvC_P5
  REGION 210..297: note = Tnp_domain
  SITE 218: note = Tnp_P1
  SITE 248: note = Tnp_P2
  SITE 256: note = Tnp_P3
  SITE 257: note = Tnp_P4
  SITE 269: note = Tnp_P5
MEQVIGIDLAKRVFQLHIASPLGKMIKNTVVTRDKLMTFIAQQPPSKIVMEACGNANYWSRQFKRFGHEVKQISPQYVAPFRMGSKNDKNDAVAIVEADSRPGMRYVPEKTQKQQDIQCLHRVRQRLMKNRTALINQIRGLGLEYGIAIPESAHKVEQCLPEHLENAENDLTPLSRELFQELLLELKEQQQRLKILDKRLNPLNAREEDIRRLLTLPGIGPLGASALMIALGESTDFKNGRHFASYLGLVPREHSSGGKVRLLGITKRGDGYLRGILIHGARSVVYRVQKIPDEQCNRLQRWLKGVIARSGPNKAAVALANKNARIAWTLVSQQSSYEPR

SEQ ID NO: 13403 - protein, 403 aa, unidentified
  source 1..403: note = protein_572406a
  REGION 6..162: note = RuvC_domain
  SITE 9: note = RuvC_P1
  SITE 59: note = RuvC_P2
  SITE 99: note = RuvC_P3
  SITE 101: note = RuvC_P4
  SITE 104: note = RuvC_P5
  REGION 276..363: note = Tnp_domain
  SITE 284: note = Tnp_P1
  SITE 314: note = Tnp_P2
  SITE 322: note = Tnp_P3
  SITE 323: note = Tnp_P4
  SITE 336: note = Tnp_P5
MNRNAVGIDVAKGKSMVAILRPFGEVVSSPFEVHHTSDEIRSLIEQIQSVPGETRIVLEHTGRYHEPLVHELSQAHLFISPVNPKLIKDFRTPSLRKVKSDKTDALKIARYALDSWPELKQYGPMNEIRNQLKTMNRQFDFYMKHKTAMKNNLIGVLDQTYPGANAYFSSPARNNGHQKWVDFVTTYWHVDCVRQKTLPAFIDHYQNWCQRKKYNFNPTKAKEIYEGAKKLVPVLPKDPLTHQLVKQAVEQLNTASITVEGLRTLMNETAAKLPEYTIVMAMKGVGPSLGPQLMAEIGDVTRFTHKSAITAFAGVDPGVNQSGAYEQKGVRASKRGSSTLRKTLFQVMDVLIKTQPQEDAVYQFLDKKRAQGKPYYVYMTAGANKFLRIYYGRVKEYLNALSQ

SEQ ID NO: 13404 - protein, 307 aa, unidentified
  source 1..307: note = protein_26402b3
  REGION 3..145: note = RuvC_domain
  SITE 6: note = RuvC_P1
  SITE 50: note = RuvC_P2
  SITE 90: note = RuvC_P3
  SITE 92: note = RuvC_P4
  SITE 95: note = RuvC_P5
  REGION 184..268: note = Tnp_domain
  SITE 192: note = Tnp_P1
  SITE 221: note = Tnp_P2
  SITE 229: note = Tnp_P3
  SITE 230: note = Tnp_P4
  SITE 241: note = Tnp_P5
MFAGIDVSKDDLEAQLDSKDAGINCPNTANGFPLLIDWLKSHQVRCVLLEATGGYERQVMKALQTDGFEVIRVNPSRARSFAKAMGQQAKTDPIDARLLAQFAATIKPPKTQPTSPDQDDLRALVHQRENFVQQRSDDERRLKTAGSDAVKPLLKGHIDYLNKVIVLLDAQIRQSAESLDRKRVLRLCSVKGIGLITAASLMAYLPELGKVGRHEIAALAGLAPYNNDSGKQKGKRYISGGRFSVRRSLYMACWSVIRFQPEFNARYKALLDKGKCAKVALIACMRVLLIRLNAMIRDDSEWRDRVA

SEQ ID NO: 13405 - protein, 359 aa, unidentified
  source 1..359: note = protein_eb891e1
  REGION 14..164: note = RuvC_domain
  SITE 17: note = RuvC_P1
  SITE 69: note = RuvC_P2
  SITE 109: note = RuvC_P3
  SITE 111: note = RuvC_P4
  SITE 114: note = RuvC_P5
  REGION 223..310: note = Tnp_domain
  SITE 231: note = Tnp_P1
  SITE 261: note = Tnp_P2
  SITE 269: note = Tnp_P3
  SITE 270: note = Tnp_P4
  SITE 283: note = Tnp_P5
MRSVPPSAAYQLYVGVDIAAATATVAWQAPTQKPGKPITIEQTPEGFSSLHQRLVKTGARPAEILVVMEATGIYWLALATFFAHLGYAVSVVNPAQAHHFAKALLKRAKTDAIDAQTLTQLAALLHPALWTPPPAIYEELEQRLTQRDTLLVMRGQVRNQLHALEHNPVVVAQVRQRMQMLDQTIVEQIAQIETELAALVSTDEQEAAEGEDNSVDRAWRCTLAKLQTIPGIGLVTALWIVVATLNFTLCSSTEQATAYAGLAPMPRESGTSVHKRPCIGHTGNGRLRTALYLATLSAARYNPVLKPFYDRLRAAGKPDKVARCAVARKLLHLAFAVGTHLEDFDPNYQPKYQQRAIGC

SEQ ID NO: 13406 - protein, 315 aa, unidentified
  source 1..315: note = protein_e2683f5
  REGION 9..156: note = RuvC_domain
  SITE 12: note = RuvC_P1
  SITE 56: note = RuvC_P2
  SITE 96: note = RuvC_P3
  SITE 98: note = RuvC_P4
  SITE 101: note = RuvC_P5
  REGION 192..276: note = Tnp_domain
  SITE 200: note = Tnp_P1
  SITE 229: note = Tnp_P2
  SITE 237: note = Tnp_P3
  SITE 238: note = Tnp_P4
  SITE 249: note = Tnp_P5
MTATIAPTAGIDISKDRLDVALHPTSETRQFGNDRRGHDKLLCWLKKRAVACVVFEATGSYARELERRLEKSAVAFARVNPRHARRFAEATGRLAKTDRVDALMLARFGAVMEPECRPLRSETLDQLAELVAARRALVKDRTATLNRRKTLRIALLARQAARRLTQIDAQIKAIDDAARALTQGDPDLDRRRAILESIRGFGETTAIALLADMPELGTLDEKQAAALAGLAPMNRQSGTWKGKSRIQGGRRHVRQTLFMPALVAARYNADMKARLESLTRAGKPAKVAITAVMRKLIILTNALLRDDRLWTPKPA

SEQ ID NO: 13407 - protein, 401 aa, unidentified
  source 1..401: note = protein_84669b5
  REGION 5..164: note = RuvC_domain
  SITE 8: note = RuvC_P1
  SITE 62: note = RuvC_P2
  SITE 103: note = RuvC_P3
  SITE 105: note = RuvC_P4
  SITE 108: note = RuvC_P5
  REGION 274..363: note = Tnp_domain
  SITE 282: note = Tnp_P1
  SITE 312: note = Tnp_P2
  SITE 320: note = Tnp_P3
  SITE 321: note = Tnp_P4
  SITE 334: note = Tnp_P5
MNPVIGLDISKGQSQGQVFLDKGQPYGKSFSFLHTQEGLHYLLNLINDVTKLSGHSPTVILESTGHYQAAVVQFLEEHSIILIVVNPLISNQAKKSSSLRKVKTDAVDAYQLCELYYKEEFDAYRQRSVHFLNLRHLTRQFESLTDMYVQAKLQFHAILDQVFPEYNGIFGDLFSKISLLLLREFPTAESILAAGENTIMERVACICTSRSERWAKEKAELIIAAATRNPFQKTAYQSHLISLELYIRLLLQYQEHLSSLQDQIDALAEEVEEYEIIQSIPGIGKKIAATILSEIGEIDRFTHAKKLVAYAGVDPSVYSSGKFTATANRITKRGSKRLRHALYLAVLCGLRRSCNKKLKEFYDKKREEGKPYRVAVIACVNKLLHWIYAILRSKHSFLDLA

SEQ ID NO: 13408 - protein, 336 aa, unidentified
  source 1..336: note = protein_1633490
  REGION 6..148: note = RuvC_domain
  SITE 9: note = RuvC_P1
  SITE 52: note = RuvC_P2
  SITE 87: note = RuvC_P3
  SITE 89: note = RuvC_P4
  SITE 92: note = RuvC_P5
  REGION 211..300: note = Tnp_domain
  SITE 219: note = Tnp_P1
  SITE 249: note = Tnp_P2
  SITE 257: note = Tnp_P3
  SITE 258: note = Tnp_P4
  SITE 270: note = Tnp_P5
MELTVIAVDIAKKVFQLHWVDPDTGSIERMKLKRAQVLPWFANRESAIVAMEACGGAHEWGRQLMKLGHEVRLLPPKMVRPFVHRNKTDAADARAIWTASQQPDMRFVPVKTEAQQVVLALHRIRAQLMKMRIMQTNELRGLLYEFGIVLPESHRALLEELPGALRDAQGKLPAMLIESLNEQLHRVRQLDADIGAVERRLAQHMREMPACKTLAEIPGIGLLTATAIVASMGSPTAFKDAREFAAWIGLVPRQVGTGGRVRQLGISKRGDAYLRTLLMHGARALVRSDKGQAWPWLAELLKRRPYCVAVAAVANKLARTIWAVLAKGQAWKASAW

SEQ ID NO: 13409 - protein, 363 aa, unidentified
  source 1..363: note = protein_47f4f2f
  REGION 33..173: note = RuvC_domain
  SITE 34: note = RuvC_P1
  SITE 77: note = RuvC_P2
  SITE 112: note = RuvC_P3
  SITE 114: note = RuvC_P4
  SITE 117: note = RuvC_P5
  REGION 235..323: note = Tnp_domain
  SITE 243: note = Tnp_P1
  SITE 273: note = Tnp_P2
  SITE 281: note = Tnp_P3
  SITE 282: note = Tnp_P4
  SITE 294: note = Tnp_P5
MGWTAPAPGTDVPRLELQSSVGASHGKRQRHRPDLAKSVFPVHGIDAAGNILVRRQLRRLEVIAFFKKLSPCLVGIEACATAHHWARELIKLGHTVKLMPPIYVKPYVQRGKTNAADAEAIAEAVTRPTMRFVAVKTVDQQAVLMTHKVRELLVRQRTALINALRGHLAEFGIVAAQGSAGLKDAIAQFRAEQASLPAVARSALLRLIERIRQITDEVRKTEKEIVAWCRADTASRRLITIPGVGPITASAISASVPDPALFRSGRQFAAWLGLTPKPHSSGGRERLGRISKQGDGSIRRLLVIGATSMIHRARQDNPGKAWAKQLLERQPARVVSVALANKTARIAWAVLTRGEVFKAAAAA

SEQ ID NO: 13410 - protein, 334 aa, unidentified
  source 1..334: note = protein_a827b62
  REGION 7..149: note = RuvC_domain
  SITE 10: note = RuvC_P1
  SITE 53: note = RuvC_P2
  SITE 88: note = RuvC_P3
  SITE 90: note = RuvC_P4
  SITE 93: note = RuvC_P5
  REGION 209..296: note = Tnp_domain
  SITE 217: note = Tnp_P1
  SITE 247: note = Tnp_P2
  SITE 255: note = Tnp_P3
  SITE 256: note = Tnp_P4
  SITE 268: note = Tnp_P5
MQNITLIGIDLGKHSFHIHCQDKFGKALLRKKFTRTKLMQFLATCPPSVVVMEACAGAHFMARRISDFGHETKLISPQFVRPFVKSNKNDFVDAEAICEAASRPSMRFVQPRTEPLQAMRALHRVRESLIRDKVKTTNQIHGFLLEFGISLPTGDAVIKRLSLVLAEHEIPEYLSRLLVRLHTHYLYLVEQIAELESELSQSINADDTAQRIMTIPGVGPITASLLSSQPGDGKQFSCSRDFAASTGLVPRQYSTGGKSTLLGISKRGDKNLRRLLVQCARSFMMRLERQHGKLAEWVREQLNKKHSNVVACALANKLARIAWVITTQQKEYQA

SEQ ID NO: 13411 - protein, 323 aa, unidentified
  source 1..323: note = protein_5106c1a
  REGION 13..155: note = RuvC_domain
  SITE 58: note = RuvC_P2
  SITE 98: note = RuvC_P3
  SITE 100: note = RuvC_P4
  SITE 103: note = RuvC_P5
  REGION 196..281: note = Tnp_domain
  SITE 204: note = Tnp_P1
  SITE 233: note = Tnp_P2
  SITE 241: note = Tnp_P3
  SITE 242: note = Tnp_P4
  SITE 253: note = Tnp_P5
MIAEPAEIQCVLGLDVSCNTVTLFDSCTGRCLTIANEADALRTALQPYQGTATLAVCEATGGHEDTLLGVLLELAIPAHRADPAKVNAYIKSFGKHAKNDPIDTRWLRSYGGDRVATLARWQPAEPCQQKLELLVARRLDLVAMRVQEQNRLKAPRSSLIADNIQAHLAEINRHIDALNQQIDALIAESRSMVLRAEALRSVPGIGQVLVPLLLAVMPELGSLNRRQIASLAGVAPHPKDSGKASWHRSTIGGRRQIRPALFIAALAACRGATPLAIAYKAMLKRGKPKRLALTALMRKIITIANARVRDALRQKNEIMPISA

SEQ ID NO: 13412 - protein, 329 aa, unidentified
  source 1..329: note = protein_a84a691
  REGION 7..163: note = RuvC_domain
  SITE 10: note = RuvC_P1
  SITE 63: note = RuvC_P2
  SITE 100: note = RuvC_P3
  SITE 102: note = RuvC_P4
  SITE 105: note = RuvC_P5
  REGION 201..288: note = Tnp_domain
  SITE 209: note = Tnp_P1
  SITE 239: note = Tnp_P2
  SITE 247: note = Tnp_P3
  SITE 248: note = Tnp_P4
  SITE 261: note = Tnp_P5
MKRNWFIGIDISKKTLDVVIYDQEKKNASKHFKVNNELKGFKEMIKTLKAGGVVLKEAFICLEYCGVYGLELGLFLEGKIDFCFCSPLHIKRSLGLTRGKNDKLDAYKIAWFSYLFRDELSPSKMPTETMLKLKSLMGERYRVVKASATEKQVLRELSRQLDSKSIRRIKHRLKILAADIKAIENEVKELIQSSPALKKNYELLISITGIALVNATMMILCTNNFEGIINARAFACYCGVAPFEYSSGTSIRGRTKVSNLANKRMKADLTNAARSAIVHDPEMRIYYKRKRAEGKEYGTVINAVKFKIITRAFAVIKRGTPFVKLRQAG

SEQ ID NO: 13413 - protein, 423 aa, unidentified
  source 1..423: note = protein_a8469db
  REGION 9..157: note = RuvC_domain
  SITE 12: note = RuvC_P1
  SITE 63: note = RuvC_P2
  SITE 97: note = RuvC_P3
  SITE 99: note = RuvC_P4
  SITE 102: note = RuvC_P5
  REGION 260..348: note = Tnp_domain
  SITE 268: note = Tnp_P1
  SITE 299: note = Tnp_P2
  SITE 307: note = Tnp_P3
  SITE 308: note = Tnp_P4
  SITE 319: note = Tnp_P5
MKVTYQTCCGVDVHKSFLVATIVKTTGGIEPSYQKKRFSTFNNSILEFKQWLLDNDCRDVCMESTGKYWVPVFNLLEDEINVVIANPKWVKAVKGNKDDTKDSKWIGDLFRLGLVKGSYIPCKIVRILRGIHSLSLQSLFPAVQVKKNRYQNALTVCNVALDSVVSDIFGKSSTSIIDYLLEQSGTSINHEEIASKLLRSLKSKEDAVIESVEGYQMTDAQKYRMRLVRAHMDYITAEIKDVDKMIENMISSNPDFENAVQFLCTIPGVKCDSAITIISEIGTDMSQFSSSKRLCCWAGLTPGSNESAGKKKSVRITRAGVYLKPALVQCAHAAVKSDQSPYYKKKYESLVKRRGKKRAIIAIARMILTAIYQMLSTGEQWNPSDLIKSMCLKLLLKNKKAKSYQSKPRNYCNERDYFLLMSQ

SEQ ID NO: 13414 - protein, 402 aa, unidentified
  source 1..402: note = protein_85a8e57
  REGION 5..163: note = RuvC_domain
  SITE 8: note = RuvC_P1
  SITE 62: note = RuvC_P2
  SITE 102: note = RuvC_P3
  SITE 104: note = RuvC_P4
  SITE 107: note = RuvC_P5
  REGION 276..365: note = Tnp_domain
  SITE 284: note = Tnp_P1
  SITE 314: note = Tnp_P2
  SITE 322: note = Tnp_P3
  SITE 323: note = Tnp_P4
  SITE 336: note = Tnp_P5
MNPVIGLDISKGESHGQAFLDRGKPFRGTFQFAHTRDGLLQLLQAIHDVERESGQRPTLILEATGHYQSPVVQFLEEHQYVYIVINPLISNRLRKTNLRKVKTDAADAYLLGELHYKEEFEPFRKRGVRLLDLRYLTRQFESFSKMCVQTKLQFQAVLDQVFPAYKGVFGAMYSSVSLRLLYEFPTSYSVLQSDEETIKTKIKALLPSKRGRSENWINERAQRMLDAAKQNPFQQTLYASHLINLKILISIILQYQEHLAELEQNIDALAKEIEEYDLIQSIPGIGHKIAATILSEVGEIDRFDHPKKLVAFAGIDPSVFASGKFTATRNRITKRGSRQLRYALVMAVQCGLIRSRNTRLKEFYERKRAEGKPHKVALVACANKLVHWLHAILKSKKTFRDA

SEQ ID NO: 13415 - protein, 341 aa, unidentified
  source 1..341: note = protein_5d6656b
  REGION 7..149: note = RuvC_domain
  SITE 10: note = RuvC_P1
  SITE 53: note = RuvC_P2
  SITE 88: note = RuvC_P3
  SITE 90: note = RuvC_P4
  SITE 93: note = RuvC_P5
  REGION 211..296: note = Tnp_domain
  SITE 219: note = Tnp_P1
  SITE 249: note = Tnp_P2
  SITE 257: note = Tnp_P3
  SITE 258: note = Tnp_P4
  SITE 270: note = Tnp_P5
MTEVSTIGLDLAKNVFQAHGADAGGAPVFRKKLRRDQVLAFFAAQPPCLVAMEACPGAHHWGREIGRLGHTVRLIAPAYVKPFVKRQKNDAADAEAICEAVQRPTMRFVAVKTEAKQASAVIFRTRDVLVGQRTQIINAIQSHLAEYGLIAPQGPFHVERLIGQIEDPESDIPPAARTCMSVLVGALRHLQEQTAVLDAEIAARAKSNETARRLMSVPGIGPLIATAIEALAPPTETFRSGRDFAAWVGLTPVQRSTGGKQRLGRTSRMGERTLRRLLIIAASSVVRWAKRKGVSADSWLGRMLARKPPMLVIVAVANKNARIAWALLTKGGIYRAPAVAV

SEQ ID NO: 13416 - protein, 346 aa, unidentified
  source 1..346: note = protein_31ff4c4
  REGION 6..147: note = RuvC_domain
  SITE 9: note = RuvC_P1
  SITE 52: note = RuvC_P2
  SITE 87: note = RuvC_P3
  SITE 89: note = RuvC_P4
  SITE 92: note = RuvC_P5
  REGION 211..298: note = Tnp_domain
  SITE 219: note = Tnp_P1
  SITE 249: note = Tnp_P2
  SITE 257: note = Tnp_P3
  SITE 258: note = Tnp_P4
  SITE 270: note = Tnp_P5
MHIASIGIDLGKTTFHLVALGERSKVLVRKKFSRTQLLAYTANLPASLIGLEACAGAHFLGTALREQGHQVRLIPAQFVKPYRKSNKNDFLDAEAIAEAVTKQNMRFAQLKTQEQLDWQALHRVRDRLVQRRTALINEIRGFLLERGITFATQPIHLRKNLPAVIEDAEQNLSPRLRWLLTRMWQEWKQIETEVETISEEIERISKDDARCRQLRQIPGFGPMVSTATVAAIGNGSAFRRGRDFAAWVGVVPRQHSTGGKQRLYGISKRGNVYLRRMLIHGARSVLFRVKYDTGGFGQWVRRLAQRAPRNKVVVAIANKLARIAWAVLSSGRDYRHQPLPQQMTTA

SEQ ID NO: 13417 - protein, 344 aa, unidentified
  source 1..344: note = protein_aac8e77
  REGION 6..147: note = RuvC_domain
  SITE 9: note = RuvC_P1
  SITE 52: note = RuvC_P2
  SITE 87: note = RuvC_P3
  SITE 89: note = RuvC_P4
  SITE 92: note = RuvC_P5
  REGION 211..297: note = Tnp_domain
  SITE 219: note = Tnp_P1
  SITE 249: note = Tnp_P2
  SITE 257: note = Tnp_P3
  SITE 258: note = Tnp_P4
  SITE 270: note = Tnp_P5
MDRTTYGLDLAKNVMQLHWVDAQTGEIKRKKMPRAKLAEYFAPLQPTRVAMEACGSAHHWARVLGDLGHQVELLPAQHVKPFVRSNKDDAADARAIWVAAQHEDIRRVPIKSREQQAVLAVHRTRSHWVSVRTATVNALRGLLYEFGVVLRGGRNAGLKALAQQRAEIDAQLPATLQVLVDGQLEMLVQVEQRIEALEHQLAALQKQIDSARTLREVPGIGLLGATALAATLGDGKDWRSGREFSASLGLVPAHSGTGGKTRVGKLSKRGDSYLRTLLINGARSVIERTKHQPLWLEKMLARRPVNVVVVALANKMARTAWALIAHGRTYQREWKSNVPMACAS

SEQ ID NO: 13418 - protein, 424 aa, unidentified
  source 1..424: note = protein_9ec6b8c
  REGION 11..166: note = RuvC_domain
  SITE 14: note = RuvC_P1
  SITE 63: note = RuvC_P2
  SITE 103: note = RuvC_P3
  SITE 105: note = RuvC_P4
  SITE 108: note = RuvC_P5
  REGION 273..358: note = Tnp_domain
  SITE 281: note = Tnp_P1
  SITE 311: note = Tnp_P2
  SITE 319: note = Tnp_P3
  SITE 320: note = Tnp_P4
  SITE 332: note = Tnp_P5
MIDTGDVDVFLGLDVGKGEHHGTAVTRAGKRVFDKRLPNSEPRLRAVLDKLTARHGTVLVVVDQPAFIGALPLAVARDVGCRVAYLPGLTMRRIADLYPGEAKTDARDAAVLADAARTMPHTLRGIELADETIAELEMIVGFDDDLAGEATRIANRLRGLLTQIHPHLERVLGPRLDHPAVLALLERFGSPTALRKAGRRHLLGVARPVAPRMFERLVEDILTALDEQTVVVAGTEAAALIVPSLAGSLRAVLDQRNLLEKRIQELLDEHPLSQILTSMPGIGTRTGARVLIDVGDAAAFPTAAHLASYAGLAPATRSSGSSIRGEQPSRRGNKQLKRALFLSAFASLGDPASRTYYDRKISQGKRHTQALLCLARRRVDVLFAMLRDGTLYQSRPAQRGQLSRGFASSTTRSAAGTNPSTGFA

SEQ ID NO: 13419 - protein, 340 aa, unidentified
  source 1..340: note = protein_fffa977
  REGION 5..158: note = RuvC_domain
  SITE 8: note = RuvC_P1
  SITE 56: note = RuvC_P2
  SITE 97: note = RuvC_P3
  SITE 99: note = RuvC_P4
  SITE 102: note = RuvC_P5
  REGION 220..306: note = Tnp_domain
  SITE 228: note = Tnp_P1
  SITE 258: note = Tnp_P2
  SITE 266: note = Tnp_P3
  SITE 267: note = Tnp_P4
  SITE 278: note = Tnp_P5
MTVIIGIDPHKASHTAVAIDRDEQRLAEIKVRATIQQSTKLLAWAEPLGDRTWAVESAGGMGYLLSQQLVGAGERVLDVPATLASRVRVLGTGKSDKNDPNDALSVAVAALRSPGLRFVEMANHREVLRLLAKRNNQIGRLRNITVSRLHAALINLSPGGISKELNASDAMRLLNDFDPVTPVEQIRFDLAHELLDDVERLDAQLKVSHKRIKDAVKASGTSLTDLYGVGPILAAALIGYTGDVRRFSNRDQFASYAGVAPIEHSSGGRVVHRLSRRGNRQLNHAIHMVAICQIRQKDSEGRVYFERKVDEGKTKREAIRSLKRQVSNAVYRQLLIDAQK

SEQ ID NO: 13420 - protein, 403 aa, unidentified
  source 1..403: note = protein_274fa7f
  REGION 4..162: note = RuvC_domain
  SITE 7: note = RuvC_P1
  SITE 60: note = RuvC_P2
  SITE 101: note = RuvC_P3
  SITE 103: note = RuvC_P4
  SITE 106: note = RuvC_P5
  REGION 267..354: note = Tnp_domain
  SITE 275: note = Tnp_P1
  SITE 305: note = Tnp_P2
  SITE 313: note = Tnp_P3
  SITE 314: note = Tnp_P4
  SITE 327: note = Tnp_P5
MIYAGIDIAKNSHVIGATDERGKDAARPMRFANSASGFDRCVAYLEGLAGSKSDLLVGMEATGHYWLPLFCRLSDRGYDVVVINPMRTDAMRRFKGSSRVKTDVVDCVLIAETLRCGDFEPSKLGDEAMIELRQLTRLHQSLKESVADLKRQTVAALDQVFPEYDSVFSNTFGESSKAFLRRCPTPEECLSIRVDSLAKTLREASRGRLGREKADEIKAAARASCGVGVATSAFSFQIKLLIDQMDFIERQIAEVEKRIRDGVEAVEPLILTIPGIGCALGAQIVSEIGDVRRFHSAPAVVKYAGINPSVSQSGKFSSEDNRITKQGSPYLRRALYLAAMAQLKLKTPFYGYYAKKRADGKSHREALVAVARKLVHVIYAVLSKGEPYDPEVTRNPELASRSE

SEQ ID NO: 13421 - protein, 387 aa, unidentified
  source 1..387: note = protein_3ee6fea
  REGION 5..161: note = RuvC_domain
  SITE 8: note = RuvC_P1
  SITE 59: note = RuvC_P2
  SITE 100: note = RuvC_P3
  SITE 102: note = RuvC_P4
  SITE 105: note = RuvC_P5
  REGION 261..347: note = Tnp_domain
  SITE 269: note = Tnp_P1
  SITE 299: note = Tnp_P2
  SITE 307: note = Tnp_P3
  SITE 308: note = Tnp_P4
  SITE 320: note = Tnp_P5
MIYYVGIDISKYKHDFCIIANTGEVIVENSSFENNKKGFQYLLDQLKPYNKSDVHIAFEATGHYSLNLELYLIDQGFSFMKMNPLVIHQFLKARSLRRTKTDKADSLTIASYLMSVPYKPNSSLLYNIYTLKSLCRAREQLIKEKSKFQVLLTNELDKTFPELKPFFNNNISSTLLYILEKYKNTEHISLMRDYESLRKISHGKFTYAKFAQLKELAKNSIGRHDENTDLLISTYVSIINNFNEKIDPIDKQILTIIKELNPRMLSIPGLGEISAATILSEYGDIKNFSSPNKMLAFAGLEPSVIESGTLQSNGKMVKHGSGHLRYSIMNISMTILRYSPTFYDYYLKKRSEGKCHRVALSHVSKKLIRVIYSLEKYNNDFDPSLLK

SEQ ID NO: 13422 - protein, 381 aa, unidentified
  source 1..381: note = protein_eb7ed07
  REGION 1..145: note = RuvC_domain
  SITE 44: note = RuvC_P2
  SITE 84: note = RuvC_P3
  SITE 86: note = RuvC_P4
  SITE 89: note = RuvC_P5
  REGION 250..337: note = Tnp_domain
  SITE 258: note = Tnp_P1
  SITE 288: note = Tnp_P2
  SITE 296: note = Tnp_P3
  SITE 297: note = Tnp_P4
  SITE 310: note = Tnp_P5
MIDGEGAVIIKPFSFTNNCSGYNRLLAMLTKAKLPLDEVSFAMEATGHYWLALFTRLQKEGFRVQVINPVQTNSIRSFYIRQAKTDPRDALLIAEMIRFGHFSESTLHPENIYELRELCRGRHAIVSMQADVKRKVVALLDQVFPEYETAFTNMFGDTSMAILQTCPTPKELSKMPLEELCHLIEVSSHKRFRMAKAQELQALARNSFGFAMAGDVFSTMIRLYAKHLVFLKQQVQEMDRKIAEIMDTLDTPITTITGIGPTLGAYILSEIGDISRFSSAAKLAAYAGIDPTMRQSGEYNGVRNRMSKRGSPYLRHAIWLAASSAVLHDPALKLYFQKKRDEGKPYMASVGHACRKMVSIIYAVMRDNKAYTPYIPNEISA

SEQ ID NO: 13423 - protein, 342 aa, unidentified
  source 1..342: note = protein_e87d6f1
  REGION 6..147: note = RuvC_domain
  SITE 9: note = RuvC_P1
  SITE 52: note = RuvC_P2
  SITE 87: note = RuvC_P3
  SITE 89: note = RuvC_P4
  SITE 92: note = RuvC_P5
  REGION 212..296: note = Tnp_domain
  SITE 219: note = Tnp_P1
  SITE 249: note = Tnp_P2
  SITE 257: note = Tnp_P3
  SITE 258: note = Tnp_P4
  SITE 270: note = Tnp_P5
MKITTLGIDLAKQVFQLHGVDEQGKTVLRKQLKRDQMATFFATLPVCLIGMEACGSAHHWARKLESFGHTVRLIAPQFVKPYVKTNKNDAADAEAICEAVARPNMRFVPIKNIEQQSVLALHRARQGFVRARTAQANQIRGLLAEFGLIVPQGISHLHTRVPALLEQANQELTGSFRLLILRLLDHLKELDKQVHELERQIKAWHKANEASCRLEKVAGIGPITASALVATIGDAKNFTNGRQLAAWLGLVPKQHSSGGKSVLLGISKRGDQYLRTLLIHGARAVIYRARQAAEPTGWLQRLLQRSHANVAAVALANKNARIVWALLANQRTFQPDYTPDGS

SEQ ID NO: 13424 - protein, 311 aa, unidentified
  source 1..311: note = protein_044fae2
  REGION 6..153: note = RuvC_domain
  SITE 9: note = RuvC_P1
  SITE 53: note = RuvC_P2
  SITE 92: note = RuvC_P3
  SITE 94: note = RuvC_P4
  SITE 97: note = RuvC_P5
  REGION 188..272: note = Tnp_domain
  SITE 196: note = Tnp_P1
  SITE 225: note = Tnp_P2
  SITE 233: note = Tnp_P3
  SITE 234: note = Tnp_P4
  SITE 245: note = Tnp_P5
MTDDTIGIDISKATLDIHRLSDGKIMSFSNCPAGFRALAKFCAQTAVIRVVYEATGAYHSGLERALGVHLPLVKVNPLQARRFAQAQGMRAKTDAVDAKMLAVMGDAFVLAPDEPATKTQHDLKELRTFRSGLVKDRTRIMSRLKTQTLSITCRQSKARLVHVEKQIAEIDAEVDRLINSNDTLAHSMKILRSIPGIGAVCASTILIEMPEIGSMDRKQVASLTGVAPMTRQSGQWRGKSFIQGGRKVVRNALYMPALVAMRHNPDLKAKYQAMIKAGKPPKVAITALMRKLIELANALIKANRNWVKKEA

SEQ ID NO: 13425 - protein, 344 aa, unidentified
  source 1..344: note = protein_88d88a1
  REGION 5..152: note = RuvC_domain
  SITE 8: note = RuvC_P1
  SITE 55: note = RuvC_P2
  SITE 92: note = RuvC_P3
  SITE 94: note = RuvC_P4
  SITE 97: note = RuvC_P5
  REGION 212..300: note = Tnp_domain
  SITE 220: note = Tnp_P1
  SITE 250: note = Tnp_P2
  SITE 258: note = Tnp_P3
  SITE 259: note = Tnp_P4
  SITE 271: note = Tnp_P5
MKHYAGLDVSVKETAICIVDENGRICREAKVVSHPEDLSKALTETGFRIERIGLEAGPLSQWLFEGMARAGLPVICVETRHTKAFLKAQINKSDRNDARGIAQMMRVNLYRQVHVKTLASQKRRALLRARKLLQEKAIAIENDIRGLLRNFGLKVGIVGAAKFEARIKELIEDMPDLEEFIDVLLAARRKLRDSFSRLHGKILELVGNDAACKRLMTIPGVGPVTALAFISTIDIPARFRSSRSVGPALGLTPVLKQSGESERVGRVSLCGDGMMRGLLYEAAQSMLTRVKKWSWLKAWAMTVARRGGLKKAVVALARRIAVIMHRMWIDGSEFRWSREGAAEI

SEQ ID NO: 13426 - protein, 331 aa, unidentified
  source 1..331: note = protein_a0d8b69
  REGION 5..153: note = RuvC_domain
  SITE 8: note = RuvC_P1
  SITE 55: note = RuvC_P2
  SITE 95: note = RuvC_P3
  SITE 97: note = RuvC_P4
  SITE 100: note = RuvC_P5
  REGION 199..283: note = Tnp_domain
  SITE 204: note = Tnp_P1
  SITE 234: note = Tnp_P2
  SITE 242: note = Tnp_P3
  SITE 243: note = Tnp_P4
  SITE 256: note = Tnp_P5
MSMHVGLDVGSRTTAMGWRNDGRFAGACNIDQTPAGRKAAVNRLLELKPLSVVMEATGIYYLDLAMELTAAGLPVSVINPKSFHNFAKLMLKNSKTDAIDAQLLAEYGERMSPKLWTPPTTIQLELRAIGRHINRLTCHRTRAKNELHALKATQTTVKMLIEDEEEAIEAFDKRIERFRLAGRALIDNCPTLSAQFGHMIAAPGMGEISVFAALAELTTLPVTLKSAQVSRHAGLDVRLTQSGTSIDKPGRISKGGNTYLRSAMYMPALTAIRCDSNVKAFYEALIGRGKRKMQAIVAVMRKYLTGLWACMRAGEDFNTAKLFCAKDLAKA

SEQ ID NO: 13427 - protein, 425 aa, unidentified
  source 1..425: note = protein_e1c5203
  REGION 4..157: note = RuvC_domain
  SITE 7: note = RuvC_P1
  SITE 59: note = RuvC_P2
  SITE 94: note = RuvC_P3
  SITE 96: note = RuvC_P4
  SITE 99: note = RuvC_P5
  REGION 284..371: note = Tnp_domain
  SITE 292: note = Tnp_P1
  SITE 323: note = Tnp_P2
  SITE 331: note = Tnp_P3
  SITE 332: note = Tnp_P4
  SITE 344: note = Tnp_P5
MLGIGIDWSEEFHLVALGRPGEGVIEVSRVEHSPTEVDALVAKIAGLEPDPAEVRVVIETRHGLLVERLVDAGYVVVPVNPDLVARRRGPAKKKDDAEDARIACLIALDRHERLRPLIPHGEIAGELRAIARDDERAARDERRFLNRLRQDLISTFPAALAIGGEDLGAPTFLRMLERWPTADTLAAAPRTELVAFARSCRHGWPERLADRVQASLAAEHFRPKDYLVRAKADTIRLAATQLLAIGAQRRTWERRMGELLLGAPRQGRDKRPRGDGLGKGFPGGEIYLSFPGLGDRLAARIAGEIGDHPEQFDTPNSLQCYAGKAPVTRRSGKSEVVVACRLAHNRYLGGAVQQWAFCSLRRSGWAREFYDSQRARGKGHQAALRALGNRWLEILWHCLHRGVPYDEAVHVANRNRALGRTTQAA

SEQ ID NO: 13428 - protein, 400 aa, unidentified
  source 1..400: note = protein_48bf9cf
  REGION 4..160: note = RuvC_domain
  SITE 7: note = RuvC_P1
  SITE 57: note = RuvC_P2
  SITE 97: note = RuvC_P3
  SITE 99: note = RuvC_P4
  SITE 102: note = RuvC_P5
  REGION 275..361: note = Tnp_domain
  SITE 283: note = Tnp_P1
  SITE 313: note = Tnp_P2
  SITE 321: note = Tnp_P3
  SITE 322: note = Tnp_P4
  SITE 335: note = Tnp_P5
MLSVGIDVSKEKSTVCGMRHLGEIVFGPFEIAHTESDLSELARMIVRLDDDTRVVMEATGIYHLPVATFLREQGLFVSIINPYEMKVYRSQDIRKVKTDRRDSMVIANYGVDKWINLREFTPQEDVYAELRLLGRQYRFFMESRIEQLLNLTHLLDYTMPGLKSCFSGWSEYSGKDKLCDFVEEYWHYDNIIKFSESKFVERYQKWTKKKGYQFSETKAVQIYRLAKEGIPTVPSNAPSTKMLLLEATKALREINSALFAILTRMKELAKTLPEYPVVRAMSGVGDVLAVKLMAEIGDVRKYHSSKSLVAYAGIDPPPYESGKLIGTNRHITKRGSSTLRKIGYEVMRCVKANGRSEADPAVYDFMLKKESEGKAKKAAKIAALNKFLRIYYARVLEVYA

SEQ ID NO: 13429 - protein, 326 aa, unidentified
  source 1..326: note = protein_bd2170e
  REGION 4..156: note = RuvC_domain
  SITE 7: note = RuvC_P1
  SITE 61: note = RuvC_P2
  SITE 101: note = RuvC_P3
  SITE 103: note = RuvC_P4
  SITE 106: note = RuvC_P5
  REGION 201..286: note = Tnp_domain
  SITE 209: note = Tnp_P1
  SITE 238: note = Tnp_P2
  SITE 246: note = Tnp_P3
  SITE 247: note = Tnp_P4
  SITE 259: note = Tnp_P5
MHHIGIDISKTKLDCCWLSDPENNKIKTKVFKNTHAGHDDLAKWLTHQTKAAASSIQVVMESTGIYHEPMACTLHKLGFKVCVLNPARSKDFANSLGNTHKTDLKDSVMLALFSHRMMPRAWQPESPEVRELKALLARFDALETDLQRELNRLEKAQFSCSSDRIIESITHMVTYLTAEKKQLEQSIDDHIDRHPQLKKDRDLMTSIPGVGRVVSRVMLSVLHGHQFACAGQVAAFIGLIPRIQESGQWKGRSRLSKQGSSKIRAKLYMAAVTSVSCNPDLRAQYQRLLSKGKSKMQAIVAAMRKLVQICFGVVKHQSEYRPQCLI

SEQ ID NO: 13430 - protein, 344 aa, unidentified
  source 1..344: note = protein_d383257
  REGION 6..147: note = RuvC_domain
  SITE 9: note = RuvC_P1
  SITE 52: note = RuvC_P2
  SITE 87: note = RuvC_P3
  SITE 89: note = RuvC_P4
  SITE 92: note = RuvC_P5
  REGION 211..295: note = Tnp_domain
  SITE 219: note = Tnp_P1
  SITE 249: note = Tnp_P2
  SITE 257: note = Tnp_P3
  SITE 258: note = Tnp_P4
  SITE 270: note = Tnp_P5
MSIVILGVDLGKNSCSVVGVNAAGAVVVRRTMRRQTLIDYVTKLPACVVAMEACCGAHHLGRLFAVQGHEIRLMSPEYVRPYIKAQKNDDRDAEGIAEAASRPTMRFIELKSQEQLDIQTLHRVRSRLVAERTSLINQLRAILLERGVTFPAGRRKLELGVDDLLAEDDGLLSPRVRQLVDELCVEWKELDAKITALNGEFVELARHDAAARRLTSIPGVGALNATALIAAVGNASSFAKARDLGAWLGLVPRQYSTGGKARLLGISKRGNTYLRTLLIHGARAALPSLSNSDTPMGRWLKAMIERGVHRNAVVVALANKLARIAWATLRKETRFERGYLAAAA

SEQ ID NO: 13431 - protein, 343 aa, unidentified
  source 1..343: note = protein_3f78298
  REGION 6..150: note = RuvC_domain
  SITE 9: note = RuvC_P1
  SITE 54: note = RuvC_P2
  SITE 89: note = RuvC_P3
  SITE 91: note = RuvC_P4
  SITE 94: note = RuvC_P5
  REGION 213..299: note = Tnp_domain
  SITE 221: note = Tnp_P1
  SITE 251: note = Tnp_P2
  SITE 259: note = Tnp_P3
  SITE 260: note = Tnp_P4
  SITE 272: note = Tnp_P5
MKLTRIGVDIAKQVFQLHGTDRSEQTLWRRRVPRERWLQALREVAVPGCEIGMEACGGAHHWARQLQAMGYHVKLIAPQFVKPYVKSNKNDANDAEAICEAMSRPGMRFVTLKSTRQQDIQALHRVRASLMEQRTAKGNQIRGLVAEYGLVAPRELSSLRRAMPCWLEDADNGLSACFRQLLDGLWRDLRGVDDRILELDHSLADLAQADPDARRLQKLRGVGPLVATALIAAVGDAKQFASGRQMAASLGLTPRQHSSGGKDRLLGISKRGDAYVRSLLVHGARSALRTAPAKDDRLSQWVVRLAKRAHPNVASVALANKTARLAWALLHHQCEYQPALAAA

SEQ ID NO: 13432 - protein, 340 aa, unidentified
  source 1..340: note = protein_147f618
  REGION 7..149: note = RuvC_domain
  SITE 10: note = RuvC_P1
  SITE 53: note = RuvC_P2
  SITE 88: note = RuvC_P3
  SITE 90: note = RuvC_P4
  SITE 93: note = RuvC_P5
  REGION 211..297: note = Tnp_domain
  SITE 219: note = Tnp_P1
  SITE 249: note = Tnp_P2
  SITE 257: note = Tnp_P3
  SITE 258: note = Tnp_P4
  SITE 270: note = Tnp_P5
MNSLALLGLDIGKSTFHLVGHDVRGHEVLRKQFNRNRLLQFLAKLEPCTIVMESCGGSHWLARKLISFGHQVKLIAPQHVKPYVTGNKNDYIDAEAICEAASRPKARYVAIKTVEQQVLSTQHRLREALVCQRTQTINRIHGFLLEFGIALPATKAAMNQIHQILDDPAAELPQQLTQFIEHLLEDIKRLTVEIKSIDHSIKEQVAVDDAGTRLMSIPGIGPIIASALLADVGDASNFHSARDFAASLGLVPRQYSTGGQTVLLNISKRGDKYLRKLLVQGSRAVLVRIDKRNDALGAWCRDLLTRKHPNKVACALANKLARIVWAVLARGGSYNAQLMT

SEQ ID NO: 13433 - protein, 345 aa, unidentified
  source 1..345: note = protein_2300364
  REGION 7..147: note = RuvC_domain
  SITE 10: note = RuvC_P1
  SITE 53: note = RuvC_P2
  SITE 88: note = RuvC_P3
  SITE 90: note = RuvC_P4
  SITE 93: note = RuvC_P5
  REGION 210..297: note = Tnp_domain
  SITE 218: note = Tnp_P1
  SITE 248: note = Tnp_P2
  SITE 256: note = Tnp_P3
  SITE 257: note = Tnp_P4
  SITE 269: note = Tnp_P5
MEQISRIGMDTSKHFFQLHGVNAAEKVVLRKKLRRKEMVAFFKALAPTVIGIEACGAAHYLARLLGSFGHEVKLIAPQLVKPYVKRGKNDGADAEALCEAMSRPSMRFVPVKTAEQQAALMMVGLRDRLIRNCTQLSNAIRGYAAEFGFSAAKGKAHLVPLLERIQADESVPVLARELFTAQAEEYARLQAQIDAVDAKLLAWHKADESSRRLVKIPGVGPIGAVLLMLKTPAPELFRSGRQFAAWIGLTPKDHSTAGKVRLGGITRAGDEALRSVLVVGATSVIQHVRRGGRGSPWIVNLLKRKPPKLAAVALANKMARVAWKLMVTGERYAAKSAPAALANAT

SEQ ID NO: 13434 - protein, 345 aa, unidentified
  source 1..345: note = protein_af22068
  REGION 7..148: note = RuvC_domain
  SITE 10: note = RuvC_P1
  SITE 53: note = RuvC_P2
  SITE 88: note = RuvC_P3
  SITE 90: note = RuvC_P4
  SITE 93: note = RuvC_P5
  REGION 210..296: note = Tnp_domain
  SITE 218: note = Tnp_P1
  SITE 248: note = Tnp_P2
  SITE 256: note = Tnp_P3
  SITE 257: note = Tnp_P4
  SITE 269: note = Tnp_P5
MDKIIRIGIDTSKHVFQLHGVNAAERPVLRKKMRRREMIDFFTTCSPTVIAIEACGGSHHWARLLTSLGHEVRLIAPQLVKPYVKRSKNDAADAEALCEAMSRPTMRFVPVKSVDEQAALMLVGVRDRLIRNRTQLANAIRGYATEFGIAAAKGLAHLPLLLERIQADETVPELARELFASQADEYARLEEKIADVDAKLEAWERNDERSKRLKTIPGIGPIGAALLIMKTPAPELFQSGRQFAAWIGLTPKDHSTGGKLRLGCITRAGDEALRAALVVGATSVIQHARRTGKASVWLTELLKRKPPKLAAIALANKMARIAWKVLVSSETYNAKSASIVMAGVA

SEQ ID NO: 13435 - protein, 340 aa, unidentified
  source 1..340: note = protein_ec78661
  REGION 6..148: note = RuvC_domain
  SITE 9: note = RuvC_P1
  SITE 52: note = RuvC_P2
  SITE 87: note = RuvC_P3
  SITE 89: note = RuvC_P4
  SITE 92: note = RuvC_P5
  REGION 210..296: note = Tnp_domain
  SITE 218: note = Tnp_P1
  SITE 248: note = Tnp_P2
  SITE 256: note = Tnp_P3
  SITE 257: note = Tnp_P4
  SITE 269: note = Tnp_P5
MEITTIGLDIAKNVFQIHGIDAHGRAVLRRKVRRDQLLALFGGLDPCLIGIEACATAHHWARQLQALGHEVRLMPPAYVKAYVKRNKNDAADAEAICEAVTRPTMRFVPIKTADAQSVLMLHRARHLLVRQRTAQVSAMRAHLAEYGVVAPKGRTHVRELVDVLTGGRASIPELARQTLLLIAGMIDGLSQQIRAIEIELRKWHQANATCCRLETIPGIGFITATALAATVGDAKVFRSGRQFAAWLGLVPKQHSSGGKDRMGGISKMGDRYLRHLLVVGATAAIRYTRRKTTTVSTWVAQLLERKPARLVSVAVANKTARIAWAVMTREENYRAARATA

SEQ ID NO: 13436 - protein, 343 aa, unidentified
  source 1..343: note = protein_d4a47c8
  REGION 7..149: note = RuvC_domain
  SITE 10: note = RuvC_P1
  SITE 53: note = RuvC_P2
  SITE 88: note = RuvC_P3
  SITE 90: note = RuvC_P4
  SITE 93: note = RuvC_P5
  REGION 211..304: note = Tnp_domain
  SITE 219: note = Tnp_P1
  SITE 249: note = Tnp_P2
  SITE 257: note = Tnp_P3
  SITE 258: note = Tnp_P4
  SITE 270: note = Tnp_P5
MKEISIIGVDLAKNVFQLHGAAADGTVVFRKKLSRPQFQRFMTEHPQCLVVMEACGGAHHWARELVRVGHEVKLIAPRYVKPFIKRQKNDAADAEAIVEAALRPTMRYVEPKTGEQQARSILFRTREQFVKQRTEAVNALRSHLYEFGFTAPEGIGYLPRLGAVLEDPSSNLPPLAREICREMLEQIANLSDRINAMKKRLDAIAREGETSRRLQTMPGVGPISALAVETFAPPMEQFKRGRDFAAWLGLVPRQASTGGKQRLGKTSKMGQRDIRRLLVTGAMAVIRWALRRGAPGNPWLARLLERKPPMVAAFALANKMVRGIWAMMTRGEDYRGPEIGSAA

SEQ ID NO: 13437 - protein, 398 aa, unidentified
  source 1..398: note = protein_50facab
  REGION 5..164: note = RuvC_domain
  SITE 8: note = RuvC_P1
  SITE 62: note = RuvC_P2
  SITE 102: note = RuvC_P3
  SITE 104: note = RuvC_P4
  SITE 107: note = RuvC_P5
  REGION 273..362: note = Tnp_domain
  SITE 281: note = Tnp_P1
  SITE 311: note = Tnp_P2
  SITE 319: note = Tnp_P3
  SITE 320: note = Tnp_P4
  SITE 333: note = Tnp_P5
MKPVIGIDVAKGKSVVQCFLKRNRPVGRAETILHTPKGFERLKSLLIELEQQSGFKPQIILEPTGHYHRVLVQYLQREAFEVILVNPLQAQRARRTGLRKVKTDESDAWHLGDLYYQEEDWLAHPLKDKALTDLQFLTRQHEFVTSLYVQAKLNTRSLIDQMIPGYENVFKDLFSKTSLNLLKACLSPEGIQERCDNLHEVIKEAARASRSDVWMNKKVELMRAVCEANPVTAIGFGLRQSLQLMLKILGEFQEQLAELERMIYEVSQTIPQVQLLESIPGVGTKLATVMVAEIGDASQFSHPKQVVAMAGLDPSVFSSGKFTASENKITKRGSKRLRRAAYLAVICGLRKGLNPRLRAYYDKKKSEGKPHKVAVIACANKVLHHVYAMLKKGQPYAL

SEQ ID NO: 13438 - protein, 410 aa, unidentified
  source 1..410: note = protein_8b8aadd
  REGION 11..166: note = RuvC_domain
  SITE 14: note = RuvC_P1
  SITE 63: note = RuvC_P2
  SITE 103: note = RuvC_P3
  SITE 105: note = RuvC_P4
  SITE 108: note = RuvC_P5
  REGION 274..360: note = Tnp_domain
  SITE 282: note = Tnp_P1
  SITE 313: note = Tnp_P2
  SITE 321: note = Tnp_P3
  SITE 322: note = Tnp_P4
MSKSTTEPIYVGLDWAAATHAVCILSAVGKVLAQFTIDHTAEGIATLIRKLARYGDPADVQIGIERPNGRLVDLLLEAGHPVIPVSPNAIKTWRDGEVVSGAKSDAGDALVIAEYLRLRRHRLDPVAPYSAQTKALRSVVRTRDDIVAMRVSATNQLSALLDNYWPGAKAIFADVESPISLAFLRQYPTAIRAARLGEKRLAAFLAKHGYSGRRTASELLGRLRGAPAGTTTPALSVAVADAVTALVTVLEALNTACKNLDRSVIARLGEHPDAEIFTSLPRSGQINAAQVLAEWGDSRAAYDGPDAVAALAGATPVTKASGKQYAVHFRWACNKRFRRALTTFADNSRHQSPWAADIYTRARARGHDHPHAVRILARAWIRVIYRCWRDNRPYDPNLHGGTQRLLPQTA

SEQ ID NO: 13439 - protein, 339 aa, unidentified
  source 1..339: note = protein_4db2ece
  REGION 6..148: note = RuvC_domain
  SITE 9: note = RuvC_P1
  SITE 52: note = RuvC_P2
  SITE 87: note = RuvC_P3
  SITE 89: note = RuvC_P4
  SITE 92: note = RuvC_P5
  REGION 211..302: note = Tnp_domain
  SITE 219: note = Tnp_P1
  SITE 249: note = Tnp_P2
  SITE 257: note = Tnp_P3
  SITE 258: note = Tnp_P4
  SITE 270: note = Tnp_P5
MQVTTIGLDLAKNIFQVHGIDANGKIAFNRSLRRSQVLAFFKSLKPCLVGIEACGTSHYWAREISNLGHPVKLIPPAYVKPYVKRGKSDAVDAEAICEAVTRPTMRFVEIKTPEQQAILSVHRTRNLLVRQRTQLINMLRAQLGEFGIVIAQGVYHALHFAKECLNGEQPDIPSIASDVIFELCELLRQLHEKINRCTRQIKQIAKNESRVALLETIPGVGPVIASAIVATIGSGKQFKNGRQFSAWLGLTPLNKSSGGKERLGHISKMGDQYIRRLLFLGMTSRIRRIQAEPEKFDPWFADMLSRKPRMLAAIAMANKTARMIWAVLTRNEPYKVRTV

SEQ ID NO: 13440 - protein, 400 aa, unidentified
  source 1..400: note = protein_9e48e02
  REGION 12..167: note = RuvC_domain
  SITE 15: note = RuvC_P1
  SITE 65: note = RuvC_P2
  SITE 105: note = RuvC_P3
  SITE 107: note = RuvC_P4
  SITE 110: note = RuvC_P5
  REGION 273..360: note = Tnp_domain
  SITE 281: note = Tnp_P1
  SITE 312: note = Tnp_P2
  SITE 320: note = Tnp_P3
  SITE 321: note = Tnp_P4
  SITE 333: note = Tnp_P5
MPGLKGSVDAFFGIDISKDKFDVYGIGRDEKKLFQFSAAMDRNGFEKLKEHLVVVSVSSVLIGMESTASYHVNLFSYLVSEGYQVVIINPLLISNYVKMQLRKTKTDKKDAVVIAQFLLANGNTLIQRVDSSLISDLRDLSRQREGLIDEMTALKINIKRLLNITFPELEHMTSVFTKSILKLVQKYPSAIALGNANLGQLSQMLIADSYGHKREAFAVKLIKAAHSSVGTKSSAKEIILKQNVTLLLHLEEALEEITGILIEMSRKQMEDDINILTSIKGIGDKSAVNFLIEMGGDVNHYEYSGKIIAMAGLDPAVYQSGQHEGKGRITKRGNRHLRRIIWMMTTKVIQYNDIFKAYYLKRRTEGLPYKMAVLATAHKLIRIAYAMLTRRTTFCPQMNS

SEQ ID NO: 13441 - protein, 280 aa, unidentified
  source 1..280: note = protein_8d0c3fb
  REGION 1..65: note = RuvC_domain
  SITE 5: note = RuvC_P3
  SITE 7: note = RuvC_P4
  SITE 10: note = RuvC_P5
  REGION 115..203: note = Tnp_domain
  SITE 123: note = Tnp_P1
  SITE 154: note = Tnp_P2
  SITE 162: note = Tnp_P3
  SITE 163: note = Tnp_P4
  SITE 174: note = Tnp_P5
MKGNKDDTKDSKWIGDLFRLGLVKGNYITCKKVRILREYTRYRYKLVSCRSSEKNRYQNALTVCNVALDSVVSDIFGKSSTSIIDYLLEQSGTSINHEEIASKLLRRLKSKEDAVQFLCTIPGVKRDSAITVISEIGTDMSQFSSSKRLCCWAGLTPGSNESAGKKKSVRITRAGIYLKPALVQCAHAAVKSDKSPYYKKKYESLVKRRGKKRAIIAIARMILTAIYQMLSTGEQWNPSDLYKIDMPVALVEKQKAKAIKQAKKLLQREGLLPPDEPLAS

SEQ ID NO: 13442 - protein, 290 aa, unidentified
  source 1..290: note = protein_7d55079
  REGION 7..148: note = RuvC_domain
  SITE 10: note = RuvC_P1
  SITE 53: note = RuvC_P2
  SITE 88: note = RuvC_P3
  SITE 90: note = RuvC_P4
  SITE 93: note = RuvC_P5
  REGION 211..255: note = Tnp_domain
  SITE 219: note = Tnp_P1
  SITE 249: note = Tnp_P2
MGEISIIGLDLAKQVFQVHGARVDGSVVLRKKLTRGQLLVFFSKLPPCIVAMEACATAHYWAREIGEFGHEIRLVPPAYVKPFVKRQKNDVADAEAIAEAATRPTMRFVEPKTPEQQARAMVFRTRELFVRQRTQTINALRAHLAEHGLIAPKGLWNLSSIRQLIDQAEDTVDGLIVETARIYLEQIETFSTRILSLEAVLKKEAARSDASSRMMTIPGLGPITAMAIEAFAPTLSVFKRSRDFACMVGSCAAPTFEWRKADFGTYIENGAARYSAFAHNRCHVDNTLGK

SEQ ID NO: 13443 - protein, 314 aa, unidentified
  source 1..314: note = protein_036877e
  REGION 3..117: note = RuvC_domain
  SITE 21: note = RuvC_P2
  SITE 56: note = RuvC_P3
  SITE 58: note = RuvC_P4
  SITE 61: note = RuvC_P5
  REGION 180..271: note = Tnp_domain
  SITE 188: note = Tnp_P1
  SITE 220: note = Tnp_P2
  SITE 228: note = Tnp_P3
  SITE 229: note = Tnp_P4
  SITE 241: note = Tnp_P5
MTPNEFLNWLVNQKPFIIIFEACGTTNYWKQKALEAGHDARLISAKLVSAVRQNQKTDKNDALTIIQASLLPEVNFIDGKNIKQQQLQSIKRLRELAVKQRDAIQKQVIALLLELNIRCPNKSASLLKLISDVLEDGENNLLFEFRQALETAKITLTTLIEAVFAYDDCMNNVIQADNDCKKFLKLEGVGSVNAANLYIELGCSESTRFNKGKDASACIGVTPIQYSSGSKIKIGTIGKTKNSLLRSQLITGSMAFVRQVVKREPKTTKEVWLKALAERRGNKCAAVALANKTVRTAFAMIKNSTEYKAALIAA

SEQ ID NO: 13444 - protein, 345 aa, unidentified
  source 1..345: note = protein_1dca04e
  REGION 6..147: note = RuvC_domain
  SITE 9: note = RuvC_P1
  SITE 52: note = RuvC_P2
  SITE 87: note = RuvC_P3
  SITE 89: note = RuvC_P4
  SITE 92: note = RuvC_P5
  REGION 211..296: note = Tnp_domain
  SITE 219: note = Tnp_P1
  SITE 249: note = Tnp_P2
  SITE 257: note = Tnp_P3
  SITE 258: note = Tnp_P4
  SITE 270: note = Tnp_P5
MKITTIGIDLAKNVLQVHGVNEHGKVVLKKQLKRDQVAAFFAKLPPCLIGMEACGSAHYWARKLQTFGHTVRLMAPQFVKPYVKTNKNDAADAEAICEAVARPNMRFVPIKNVEQQAVLALHRVRQGFVKARTAQANQIRGLLAEFGLVIPQGIGHIAKRVPELIEDASNELPGSFRLLVQRLLEHLKELDREVGEMEAQIVAWHRSNEDSRKLERVPGIGPITASAIVASIGDAKNFDNARQMAAWLGLVPRQHSSGGKNVLLGISKRGDVYLRTLLVHGARSVISAAQRKKDSMDGWLGGLLKRRNVNVTAVALANKNARIVWALLRHGCEFRADYVASITRV

SEQ ID NO: 13445 - protein, 385 aa, unidentified
  source 1..385: note = protein_2dd616f
  REGION 4..157: note = RuvC_domain
  SITE 7: note = RuvC_P1
  SITE 56: note = RuvC_P2
  SITE 96: note = RuvC_P3
  SITE 98: note = RuvC_P4
  SITE 101: note = RuvC_P5
  REGION 261..348: note = Tnp_domain
  SITE 269: note = Tnp_P1
  SITE 299: note = Tnp_P2
  SITE 307: note = Tnp_P3
  SITE 308: note = Tnp_P4
  SITE 321: note = Tnp_P5
MVYIGIDIAKFKHFASVVSSDGEVIVKPFPFENSRQGFMELVEEIENFQDCLIGLESTGHYAENLIYFLYERGYRIGVINPIQTDALRDSNIRKTKTDKIDTKLIVQCLMLKKYSLVNSQDINIIKLRRLSRFKLETIGQQTRIKTQLTACLDIVFLELSSFFKGNLHLKVSYALLEKYPSAKAIAHCRIDGLTNLLYDNSRGHYNQDKALQLKELAKQSIGLDNPAIELQIQCLIKQLRLYQKQIKDIDLAIMTLMELLNSPILTIPGVGYTLGAMIISEIGDIKRFSNPSKLLAFAGLDPVVKQSGDFQASSMKISKRGSTYLRYAIYRVAFLIIYNNETFHNYYISKRAQGKTHRVALGHVCNKLVRVIFKILTDETPFNLS

SEQ ID NO: 13446 - protein, 402 aa, unidentified
  source 1..402: note = protein_e50d749
  REGION 4..160: note = RuvC_domain
  SITE 7: note = RuvC_P1
  SITE 57: note = RuvC_P2
  SITE 97: note = RuvC_P3
  SITE 99: note = RuvC_P4
  SITE 102: note = RuvC_P5
  REGION 274..361: note = Tnp_domain
  SITE 282: note = Tnp_P1
  SITE 312: note = Tnp_P2
  SITE 320: note = Tnp_P3
  SITE 321: note = Tnp_P4
  SITE 334: note = Tnp_P5
MNCVGIDVSKGKSMIAVMRPFGEVVVSPFEVLHTDSELSKLAGLLKSLDGETRVVMESTGYHHTPVAWLLHDAGLYVSVVNAMLVHDYGNNSLRRAKTDKKDAVKLANCGLDHWLTLPRYVPEEDTRLMLKTCYRKYQQYSKVQTMLKNNLISLLDIAFPDANRLFTSPPRADGSEKWVDFVAAFWHCECVCNLSEKAFTAKYHKWCRKHRYKFCEDKTLDIYSSACGHFGVIPKTDTAKLLVEQAISQLQTTSSALAALKQEMQSLAASLPEYPVVMGMFGIGPALGPPLMAEIGDVRRFYSKKALVAYAGLDAPPNDSGDVTGRHKSMSKIGASSLRRTLFLVMSVYLQNAPLDEPVYQFMDKKRSEGKPYRVYMMASANKFLRIYYASVKAYLESLEHD

SEQ ID NO: 13447 - protein, 326 aa, unidentified
  source 1..326: note = protein_fed6a48
  REGION 8..132: note = RuvC_domain
  SITE 37: note = RuvC_P2
  SITE 72: note = RuvC_P3
  SITE 74: note = RuvC_P4
  SITE 77: note = RuvC_P5
  REGION 195..285: note = Tnp_domain
  SITE 203: note = Tnp_P1
  SITE 233: note = Tnp_P2
  SITE 241: note = Tnp_P3
  SITE 242: note = Tnp_P4
  SITE 254: note = Tnp_P5
MLHGASRDGAVVFRKKLSRGQVLTFVAKLPRCVIAMEACATAHGWGREIERLGREVRLIPPIYVKPFVKRQKNDAADAEVIVEAALRPTMRFVALKTIDQQARAMLFRTRQMFVGQRTQMINALRGHLAEHGLVAARGPAHLKRLADAIEDSDTALPSEVRELGQVYLEQIEVLNARIAQLDGKMRRVAKDAVVAHRAQTMPGVGPVTALAIETFAPDLANFRRGRDFAAWLGLMPKQHSTGGKARLGRTSKMGQRDIRTLLVSGAMAILQAVERFDRPRNGWLKRLLTRKPRMVAAIALANKMARGLWAMMTKQEDYRKPAAAMA

SEQ ID NO: 13448 - protein, 337 aa, unidentified
  source 1..337: note = protein_8859a78
  REGION 7..148: note = RuvC_domain
  SITE 10: note = RuvC_P1
  SITE 53: note = RuvC_P2
  SITE 88: note = RuvC_P3
  SITE 90: note = RuvC_P4
  SITE 93: note = RuvC_P5
  REGION 210..300: note = Tnp_domain
  SITE 218: note = Tnp_P1
  SITE 248: note = Tnp_P2
  SITE 256: note = Tnp_P3
  SITE 257: note = Tnp_P4
  SITE 269: note = Tnp_P5
MLEVNTIGLDLAKNVFQVHCGDASGSVLFRKKLRRDQVLGFLAMQPTCTVAMEACAGGHYWAREIAKLGHAVRLIAPGYVKPFVKRQKNDAADAEAICEAAQRPTMRFVAVKSEVQQAAVMVFRVRDLVVRQRTQTINAIRGHLAEFGLVAAQGLFHVTKLVAAIEKDSTIPEAARPILFLLVEQLRSLDARVAMLDREIAQRAREDAEARRLMTIPGIGPITATALAALAPSAQTFKRGRDFAAWLGLTPLQRSSGGKQKLGETSRMGERTLRRLLIIGASATVRWAARKGSMTDPWLSRMLERKPPMLVIVALANKMARIVWALMARGGIYRTPA

SEQ ID NO: 13449 - protein, 342 aa, unidentified
  source 1..342: note = protein_eae503f
  REGION 6..148: note = RuvC_domain
  SITE 9: note = RuvC_P1
  SITE 52: note = RuvC_P2
  SITE 87: note = RuvC_P3
  SITE 89: note = RuvC_P4
  SITE 92: note = RuvC_P5
  REGION 210..294: note = Tnp_domain
  SITE 218: note = Tnp_P1
  SITE 248: note = Tnp_P2
  SITE 256: note = Tnp_P3
  SITE 257: note = Tnp_P4
  SITE 269: note = Tnp_P5
MYDTMIGVDLAKRVFHLHVASMTGHVRDRKKLTPLQFRRYMADAPNCVVVFEACGSAHYWARQMMELGHEARIIPAQYVKPFVKRHKNDRNDAEAIVVAAQRPEMHFTTVKSEQQQARAVVFRARERLVNQRTELVNALRSTLYEYGHTFPVGFGHVKRIAELLEAPECDLPALVVTECQDLLAQIAEKTERITAKDKLIRQLAKESAVARRLQTMPGVGPMTALAMEAFAPDMAQFSCGRDFAAWLGLVPLQKSTGGKSRLGKLSKMGQVDIRRLLIIGAMSRIIGRARHTIPDDSWLGRKVAMKPKMLVGITLANKMARQIWAMLTKNEDYRDPALVGAA

SEQ ID NO: 13450 - protein, 321 aa, unidentified
  source 1..321: note = protein_edc4197
  REGION 8..152: note = RuvC_domain
  SITE 11: note = RuvC_P1
  SITE 57: note = RuvC_P2
  SITE 97: note = RuvC_P3
  SITE 99: note = RuvC_P4
  SITE 102: note = RuvC_P5
  REGION 196..283: note = Tnp_domain
  SITE 204: note = Tnp_P1
  SITE 234: note = Tnp_P2
  SITE 242: note = Tnp_P3
  SITE 243: note = Tnp_P4
  SITE 256: note = Tnp_P5
MTKNKNYIGIDISKLSFDVAIKMENEKYSHFKFSNDNAGFIKFKELLNQDYAICVMEASGPYYLKLATFLFNRKASVCVINPLVIRRFSQMRMSRTKTDKKDAVMIAEYGKSQTPNLWKPEAEYVLEIKQMHAYVEQMNKSRTGLIRQREAFKYNAVESLALKESLEKMILLLETEIALIENKMIAIIKDQHNELFQQLKSIPGIGIKTAMLLIVISGGFTKFDNARQLSSYVGISPRIFESGTSVKGKSKICKMGMSRIRAMLYVCSWSAKKCNAACKELYDRLVEKGKAKKIALIAVANKLLKQAFALASKNEYYLQNN

SEQ ID NO: 13451 - protein, 344 aa, unidentified
  source 1..344: note = protein_49f12f2
  REGION 7..149: note = RuvC_domain
  SITE 10: note = RuvC_P1
  SITE 53: note = RuvC_P2
  SITE 88: note = RuvC_P3
  SITE 90: note = RuvC_P4
  SITE 93: note = RuvC_P5
  REGION 212..299: note = Tnp_domain
  SITE 220: note = Tnp_P1
  SITE 250: note = Tnp_P2
  SITE 258: note = Tnp_P3
  SITE 259: note = Tnp_P4
  SITE 271: note = Tnp_P5
MSKVTTVGIDLAKNTFVLFGLGPKGHSGWKRKVRRKQLLEQLVRLEPCTVALEACGSSHYWARQIRALGHQVELLPPQHVKGYLRGQKNDYNDARAIAEASEHGRIRPVPIKEVEQQDDQMLHKLRQGVSKDRVRISNQLRGLLAEYGVIMPQGIAALRRELPLALEDADNGLSERARQLLHRQYQRFLEVEQELAWYDQQVKQRSRQDETCRRLQAIPGVGEVVASLLKGWMGDGRQFRRGRDAGAALGLIPRQNSTGGKDVLLGISKRGDPYVRAQLVHGARAVVARADGKMDRLSRWIQRLKAERGFNKATVALANKLVRIAWVIIARGEHYQPSEQRLAV

SEQ ID NO: 13452 - protein, 399 aa, unidentified
  source 1..399: note = protein_ec2ed69
  REGION 10..164: note = RuvC_domain
  SITE 13: note = RuvC_P1
  SITE 61: note = RuvC_P2
  SITE 101: note = RuvC_P3
  SITE 103: note = RuvC_P4
  SITE 106: note = RuvC_P5
  REGION 271..356: note = Tnp_domain
  SITE 279: note = Tnp_P1
  SITE 308: note = Tnp_P2
  SITE 316: note = Tnp_P3
  SITE 317: note = Tnp_P4
  SITE 329: note = Tnp_P5
MEPGDFKIWLGIDVGKADHWATAVNDSGELVYSHSLPNDESKLRAIYDDLAAQGRLLIVVDQPATIGALAVAVAQSMAIAVAYLPGLAMRRIADLYPGNAKTDQRDAFIIAHAARTMPHTLRTLRTIDEDEAELGMLTGFDDDLARQITQTRNRIRGLLTQIHPGLERVIGPRLDHPAILAMLQTWPVPAALKKAGHSRIGAKLKKHGARRWQAWANEIIDALATQTVTVTGTNAAAIVIPHLAHTLAGLYHQRDDIETQIEKLVTEHPLYPVLTSMPGIGVRTTAVIIAELAGKEFDSAANLASYAGLVPRTRQSGTSIKSENVSHTGNKRLKRALFLSAFASLRADPISRRYYDKKRLNGKRHNQAIIALAHRRLTVIYAMLRDGTFYETQPPKKAA

SEQ ID NO: 13453 - protein, 310 aa, unidentified
  source 1..310: note = protein_83da6e6
  REGION 1..76: note = RuvC_domain
  SITE 13: note = RuvC_P3
  SITE 15: note = RuvC_P4
  SITE 18: note = RuvC_P5
  REGION 183..268: note = Tnp_domain
  SITE 191: note = Tnp_P1
  SITE 221: note = Tnp_P2
  SITE 229: note = Tnp_P3
  SITE 230: note = Tnp_P4
  SITE 242: note = Tnp_P5
MRRIADLYPGNAKTDARDAYVIADAARTLPHTLRHLNVDDDALAELDVLIGYDDDLAAEATRISNRIRGLLTGIHPALERVLGPKVSHPAVLEILIRCGGPIGIRKAGRRKLASIATKNAPRMGATLVENILAALDEQTVTVAGTTAADKILPRLAESLKTVLTQRKNVASEVEEILDAHPLAQVLTSMPGIGVRTSARILLEIGDASGFKSSGHLAAYAGIAPVTHRSGSSIRGEHPARTGNRKLKRAFFLAAFAALSDPTSRAYYDHKRAEGKKHNAALICLARRRCDVLFAMLHNKTHYQHPEPQAA

SEQ ID NO: 13454 - protein, 345 aa, unidentified
  source 1..345: note = protein_d62f203
  REGION 7..149: note = RuvC_domain
  SITE 10: note = RuvC_P1
  SITE 53: note = RuvC_P2
  SITE 88: note = RuvC_P3
  SITE 90: note = RuvC_P4
  SITE 93: note = RuvC_P5
  REGION 212..305: note = Tnp_domain
  SITE 220: note = Tnp_P1
  SITE 250: note = Tnp_P2
  SITE 258: note = Tnp_P3
  SITE 259: note = Tnp_P4
  SITE 272: note = Tnp_P5
MNKVTIIAIDLAKNSFQVCKFNKGNSVAYNKAINRKALIELLGKHEPVVVAMEACGGAHYWARLAQRHGHQEKILQARAVKGLQLKQKTDKNDAYAIGIAAQLPHIRPCCVMSEEEQGLQSLERVLTLQIKQRTALINQIRGLLSEFGIVISKGIRNLVKSLPDVLEDGENGLPMNYRQALYAQSEWLKQYTEQIDGYDKLIAEHTRHHSTCQKLSKLEGVGPQVALGLTVRLGNAQEFKTGRDASSCIGLTPKQHSTGGKEHIGHISKFSADKRLRSLLFQGAMSVVHKVVLREPRTVKEQWLKKLIERRGKKIAAIALANKTVRTAVALIKNNDDYQPALLAV

SEQ ID NO: 13455 - protein, 343 aa, unidentified
  source 1..343: note = protein_48fab52
  REGION 6..147: note = RuvC_domain
  SITE 9: note = RuvC_P1
  SITE 52: note = RuvC_P2
  SITE 87: note = RuvC_P3
  SITE 89: note = RuvC_P4
  SITE 92: note = RuvC_P5
  REGION 211..297: note = Tnp_domain
  SITE 219: note = Tnp_P1
  SITE 249: note = Tnp_P2
  SITE 257: note = Tnp_P3
  SITE 258: note = Tnp_P4
  SITE 270: note = Tnp_P5
MQIRSVGIDLGKTTFHLVALGDDSKVLLKKKFTQKQLIAFTANLQTSLIGMEACSGAHFMGRVLRAQGHDVKLIPAQFVKPFVKSNKNDFLDAEAIAEAVDRKNMRFVPIKTDDQLDLQALHRVRDRLIARRTSVINQLRAFLLERGMTFARTPAKLKVAMPEILENADANLTPRMRNLISLLWSEWKDLEQQIVTVNAEVEQIASSDAACLRLRQIPGIGPLIATAIVAAIGNGAAFHKGREFSSWLGLVPRQHSTGGKARLLGISKRGNSYLRKILIHGARSAVVRMKRERAPFGAWLDALQTRAPLNVVVTATANKLARIAWAVLSTGKEYRALPSPPPA

SEQ ID NO: 13456 - protein, 350 aa, unidentified
  source 1..350: note = protein_0cec75b
  REGION 8..161: note = RuvC_domain
  SITE 11: note = RuvC_P1
  SITE 67: note = RuvC_P2
  SITE 107: note = RuvC_P3
  SITE 109: note = RuvC_P4
  SITE 112: note = RuvC_P5
  REGION 208..295: note = Tnp_domain
  SITE 216: note = Tnp_P1
  SITE 246: note = Tnp_P2
  SITE 254: note = Tnp_P3
  SITE 255: note = Tnp_P4
  SITE 268: note = Tnp_P5
MSITKQSVGIDISKDTFTACGCSHQSDGKLIFSEVKNFTNEPTGFNQLLRWVKGFAAPGTEVVFLMEATGVYYESLVHHLFKIKKKVVVVLPNTSKHYFASLNVKSKTDELDARVLSRFGVERIHRYWIAPSPVMLQLRNLTRYHLQLQEQKTALGNIKHSKDSAHEVQKFIMQSNKRLIKQIDVQLVSCKTEIERLIKSDVELSEKIRKLLTIKGVGLMTVATIVAETLGFEHFKSAKQVVSYAGYDVVQRESGTSIKGKTRISKKGNKYIRNALFFPALVATRFNPDLKTTYMRIIATKTSKMIGQVAIQRKLLVLIYTLWKTNSNYIPGYNEVASTKMAEATLDSYL

SEQ ID NO: 13457 - protein, 400 aa, unidentified
  source 1..400: note = protein_3ee33d4
  REGION 4..160: note = RuvC_domain
  SITE 7: note = RuvC_P1
  SITE 57: note = RuvC_P2
  SITE 97: note = RuvC_P3
  SITE 99: note = RuvC_P4
  SITE 102: note = RuvC_P5
  REGION 274..360: note = Tnp_domain
  SITE 282: note = Tnp_P1
  SITE 312: note = Tnp_P2
  SITE 320: note = Tnp_P3
  SITE 321: note = Tnp_P4
  SITE 334: note = Tnp_P5
MNAVGIDVSKGKSMVAILRPFGEIVSSPFEIHHTSGDIRLLIKQIKSIAGETRIVMEHTGHYYEPLAHELSNANLFVSTVNPKLIKDFGNNTLRKVKTDKADALKIARYTLDNWTDLKEYSLMDEIRNQLKTMNRQFSFYMKHKSAMKNNFIKILDQTYPGVNTYFDGPARDDGSQKWVDFATTYWHVDCVRKMSLSTFTDHYQKWCKRKKYNFSKYKAEEIYGTAKELVPVLPKDSLTKLIVKQASDQLNSTSKTVEELRTLMNETASHLPEYPIVMAMQGVGPSLGPQLMAEIGDVTRFNHKGALAAFAGVDPGVNDSGSRHQKSVKTTKRGSANLRKTLFQVMDGLIKTKPINDPVYLFMDKKRAQGKPYYVYMTAGANKFLRIYYGRLKEYLNTLT

SEQ ID NO: 13458 - protein, 324 aa, unidentified
  source 1..324: note = protein_73c7700
  REGION 4..160: note = RuvC_domain
  SITE 7: note = RuvC_P1
  SITE 57: note = RuvC_P2
  SITE 97: note = RuvC_P3
  SITE 99: note = RuvC_P4
  SITE 102: note = RuvC_P5
  REGION 275..318: note = Tnp_domain
  SITE 283: note = Tnp_P1
  SITE 313: note = Tnp_P2
MNAVGIDVSKGKSTVTVLKPFEEVVASPFDVVHNDSDLHQLVELIKGLPDESKVVMEYTGTYFEPIAQFLHNNDIFVSVVNALLVHDYGGNSLRKVKTDKKDDLKLASYALDRWTELEEYVPADEQCKTLKLLNRQYNQSVKIQTMIKNNLISLTDSVFPGVNKLFTSPERQSDGHEKWVDFLRAFPHKDCVAKLYLSSFKAKYKSWCSKNKYNYTDSKAEEIHAYARSVIAVLLLNDSIKLLVTQAVTQLNTILETVSSIRKEMDRIASSLPEYETVMAMYGVGKVYGPQLMAEIGDTRRFRNRRAITCFCRARRPAVSVGTA

SEQ ID NO: 13459 - protein, 347 aa, unidentified
  source 1..347: note = protein_d2e137e
  REGION 4..147: note = RuvC_domain
  SITE 7: note = RuvC_P1
  SITE 51: note = RuvC_P2
  SITE 86: note = RuvC_P3
  SITE 88: note = RuvC_P4
  SITE 91: note = RuvC_P5
  REGION 207..294: note = Tnp_domain
  SITE 215: note = Tnp_P1
  SITE 245: note = Tnp_P2
  SITE 253: note = Tnp_P3
  SITE 254: note = Tnp_P4
  SITE 266: note = Tnp_P5
MKRIAVDLAKSVYQVAECVRSGQVVQRKRLNREALRRYIQEQVEPVEWVMEACGTAHYWGRLAQSLGHHVKLLHPRYVRPYRRRNKTDRNDCDAMLEAARCTDIHPVSVKSHDQQQLQQLHGLRETWKKSRTQRINLLRGVLREAGIEAPASTAAFIQAASELVDQPELTSLNRLLHIVLAEINLYEQCMAECEQQLQRWHADDDIVRKLDEVSGIGLLTASALTATVGKPERFASGRQLSAWLGMTPREFSSGNSRKLGHISRQGNVYVRTLFIHGSRAALLAAQRCQARTPEKLTQLQRWAVETAARIGHNKAAVALASKLVRICWAVWCHERRFNGNWQSVKPA

SEQ ID NO: 13460 - protein, 397 aa, unidentified
  source 1..397: note = protein_d1ea044
  REGION 5..160: note = RuvC_domain
  SITE 8: note = RuvC_P1
  SITE 59: note = RuvC_P2
  SITE 99: note = RuvC_P3
  SITE 101: note = RuvC_P4
  SITE 104: note = RuvC_P5
  REGION 270..359: note = Tnp_domain
  SITE 278: note = Tnp_P1
  SITE 308: note = Tnp_P2
  SITE 316: note = Tnp_P3
  SITE 317: note = Tnp_P4
  SITE 330: note = Tnp_P5
MNPVIGLDVAKGESQVQAFLQRKKTYKQSFKFEHHLQGLHTFYQEVEQVAGQPPAVIFESTGHYHEPVLQFLEDQAITYYVINPVVSYEAKKTGLRKVKTDKVDAYHLGELYYKEDLEAFQKKTEQYLDLRQLTRQHSALTDSYVEIKLQFQAAVDHIFPEYHNVFSDLCGKLSLNTLLHYPTASAIQKVSQQTLADDMCQFGARRSDAWFLDKAAQLKAAADRNPFQHPVCHGHIVSLQMYIQMLFQYQEHLSQLKREIDALARSFEDHGLIQSIPGIGDKLAATIISEIGGINQFERPKQLAAYAGLDPSVFESGKYKASINRITKRGSSRLRQALYTAVQCGLAKNRNKKLIAFYSRKRNEGKPHRVAVIACANKLVHWIHAMFKRQEVFVDQS

SEQ ID NO: 13461 - protein, 341 aa, unidentified
  source 1..341: note = protein_6a882e5
  REGION 7..149: note = RuvC_domain
  SITE 10: note = RuvC_P1
  SITE 53: note = RuvC_P2
  SITE 88: note = RuvC_P3
  SITE 90: note = RuvC_P4
  SITE 93: note = RuvC_P5
  REGION 209..295: note = Tnp_domain
  SITE 217: note = Tnp_P1
  SITE 247: note = Tnp_P2
  SITE 255: note = Tnp_P3
  SITE 256: note = Tnp_P4
  SITE 268: note = Tnp_P5
MQNVTLVGIDLGKHTFHLHGQDRSGKAVFRKKVNRKQVIEFFATFETCTIVMEACAGAHHMARKLATFGHTVKLISPQFVRPFVKGNKNDFVDAEAICEAASRPSMRFVSPKTESQQTLSALHRVRESLIRERTKTVNQIHAFLLEFGISLQTGQAVIKRLPAVLAEHPLPPRLVSILERLHAHNKYLSEQIAEIDKEVGRQLADDDLGQRLLSIPGVGPVTASVLAAEMGDGKQYGSGRDFAASLGLVPRQYSTGGRANLLGLSKRGDKNIRRLLVQCARAYMQRIERQTGRLADWVRGMLARRHSNVVACALANKLARTAWALAAHHTTFKVDGSARQA

SEQ ID NO: 13462 - protein, 388 aa, unidentified
  source 1..388: note = protein_5703fee
  REGION 4..160: note = RuvC_domain
  SITE 7: note = RuvC_P1
  SITE 59: note = RuvC_P2
  SITE 99: note = RuvC_P3
  SITE 101: note = RuvC_P4
  SITE 104: note = RuvC_P5
  REGION 263..350: note = Tnp_domain
  SITE 271: note = Tnp_P1
  SITE 301: note = Tnp_P2
  SITE 309: note = Tnp_P3
  SITE 310: note = Tnp_P4
  SITE 323: note = Tnp_P5
MLLLGIDIAKLNHVASLVDSTSGELIFSNFKFQNNFIGFSSLLEKISKFPVTEIIIGLESTGHYGENFINFFFQKGFKIAVINPLQTSHLRKANIRDSKNDRLDSINIAKTLLFNEHRYVTQKNLTNFALKKLTRFRKNLIKQKTKFKIQLVSLLDIIFPELQYFFKSGIHSNAVYTLLKKYPSTEKIAALREKTLFSILNKASKGHYKEEHALQLKSLAKSSVGIKDTSVSMHIPQLIKLIEVLDSQINSVEEEIQSSIDKESVVLSIPGINLVAAASILGEINDIDNFDSTSKLLAFSGLDPKVRQSGNFNASSCRMSKKGSPYLRYALIITSWNLVRNSETFNKYYLSKRAQGKSHYSALGHTAHKLVRIIYTLLKKNILYQEIK

SEQ ID NO: 13463 - protein, 342 aa, unidentified
  source 1..342: note = protein_22d543c
  REGION 4..157: note = RuvC_domain
  SITE 7: note = RuvC_P1
  SITE 55: note = RuvC_P2
  SITE 96: note = RuvC_P3
  SITE 98: note = RuvC_P4
  SITE 101: note = RuvC_P5
  REGION 219..304: note = Tnp_domain
  SITE 227: note = Tnp_P1
  SITE 257: note = Tnp_P2
  SITE 265: note = Tnp_P3
  SITE 266: note = Tnp_P4
  SITE 277: note = Tnp_P5
MTMIGIDPHKATHTAVAVDDNEEVLDEFKLRASTAQAVRLCEWADDFEKREWAVESANGLGYLVAQQLVAAGETVFDVPPLLASRVRVLGSGRSQKNDPNDARSVAIAALRSDRLAQVRPDDHARVLRVLAKRHRDMARLRNKHCTRLHALLLELEPGGIGSEITVTKANQLLARVKIDNEITRHRALIGNEIVDDIARLDTALKTSKKRIKVAVAASATTLTDIVGIGPVCAAIIIGFTGDVTRFPTKGHFATYNATAPIEASSGDRPRHRLNPRGNRKLNHAIHVAAICQLRYPGEGRTYYDKRIAEGKTSKEAIRALKRRISDRVYQHLIADARRSTTT

SEQ ID NO: 13464 - protein, 330 aa, unidentified
  source 1..330: note = protein_e7aab40
  REGION 8..158: note = RuvC_domain
  SITE 11: note = RuvC_P1
  SITE 59: note = RuvC_P2
  SITE 97: note = RuvC_P3
  SITE 99: note = RuvC_P4
  SITE 102: note = RuvC_P5
  REGION 202..289: note = Tnp_domain
  SITE 210: note = Tnp_P1
  SITE 240: note = Tnp_P2
  SITE 248: note = Tnp_P3
  SITE 249: note = Tnp_P4
  SITE 262: note = Tnp_P5
MKSFNVILGVDVSKLTLDICCAERNLHVKIDNCSKGFCVLKKWCKTSSINLEETLIVLEFTGGYEYRFLQFCESLSISYCRVPGLQIKKSLGMIRGKSDQADAFRIGEYGEEKIKKLTPSNPVDKNILELKQLLSFRKRLVREKAGLESTVKERKHMYPQKKADKITHIARAKIKSDEQHIRQIEQQIIEVIKSNEDMWLNYRIITSIKGIGKINAWMTIAYTENFTSFTDPRKYGVYVGVIPFGHTSGTSIKKRDKVSHLANKALKSELNQAARAAIAHDPEIAAYAERKLKNKEYRLVLNNVKFKLILRMFSLVKRGKMYVENYQRAA

SEQ ID NO: 13465 - protein, 411 aa, unidentified
  source 1..411: note = protein_a4efd20
  REGION 5..163: note = RuvC_domain
  SITE 8: note = RuvC_P1
  SITE 62: note = RuvC_P2
  SITE 102: note = RuvC_P3
  SITE 104: note = RuvC_P4
  SITE 107: note = RuvC_P5
  REGION 273..373: note = Tnp_domain
  SITE 281: note = Tnp_P1
  SITE 311: note = Tnp_P2
  SITE 319: note = Tnp_P3
  SITE 320: note = Tnp_P4
  SITE 333: note = Tnp_P5
MNPVVGLDVAKGESQIQAYLERKKPYKKSFKVKHDLDGLASLLEFIKEIEDISGERPPLVMESTGHYHTPVVQYFEDKGYLIIIVNPLISYKAKSSSLRKVKTDIIDANHLCELYYKEDLEPYKKRGIQLMNLRHLTRQHDNITGMFVQTKLQFQAVLDQVFPEYSKVFGDLYSDVSLKTLQAFPTSEDVLKSDTETLTTKIKEFCNTRSLQWANKQAEKLMTAATQNPFQKALYSSLALSLDMFINMLFEYKKHLSMIEKEIDALVKGIEESKIIRSIPGIGEKIAATIISEIGEIERFNHPKKLVAFAGLDPSVFESGTFKGTYNRITKRGSSRLRQALYMAVKCAIRDCRKQKTTDEILPRNKRLRAFYDKKREEGKPFRVAVIACANKLLHWIYALLKNKTSFLDLA

SEQ ID NO: 13466 - protein, 352 aa, unidentified
  source 1..352: note = protein_0d10b35
  REGION 10..160: note = RuvC_domain
  SITE 13: note = RuvC_P1
  SITE 64: note = RuvC_P2
  SITE 100: note = RuvC_P3
  SITE 102: note = RuvC_P4
  SITE 105: note = RuvC_P5
  REGION 234..314: note = Tnp_domain
  SITE 237: note = Tnp_P1
  SITE 267: note = Tnp_P2
  SITE 275: note = Tnp_P3
  SITE 276: note = Tnp_P4
  SITE 287: note = Tnp_P5
MLAEAVDAIIGIDTHRDSHEVEIADVTGKPLATMRISNDSGGFAQLLGAIAELAPGPRVAVLIEGSRSYGIGLARALTAAGLLVIECGQPARRQRRGKGKSDAIDAHLAVLAGLRMDASRVPALRADGDREALRILLGARQEIAVASTAQASRLRALLLAGDDADRQAARAALTTAALQVLAQRAVCAAGRDHAVRQAEIRRLALAVGQARRDLKENLAQLLAIVEDIAPGSTKRYGIGPVSAAQAIVSFSHPGRCRSEAAFAALSGTSPIPASSGRTIRHRLNRGGDRALNRAIHVIAVTRIRSCPRTRAYVARRTAEGKTGPEIRRCLKRYIARELYRHLTHSMTPPTAP

SEQ ID NO: 13467 - protein, 402 aa, unidentified
  source 1..402: note = protein_81b742b
  REGION 9..163: note = RuvC_domain
  SITE 12: note = RuvC_P1
  SITE 61: note = RuvC_P2
  SITE 101: note = RuvC_P3
  SITE 103: note = RuvC_P4
  SITE 106: note = RuvC_P5
  REGION 270..357: note = Tnp_domain
  SITE 278: note = Tnp_P1
  SITE 309: note = Tnp_P2
  SITE 317: note = Tnp_P3
  SITE 318: note = Tnp_P4
  SITE 330: note = Tnp_P5
MTDRPLVWVGIDVGKAHHHACAMDPDGKVVFSQKVANDQAAIEQLVARAAKSATEVRWAIDLTSSAAYLLIAVLAATGQRVAYVPGRVVNRMTGAFRGEAKSDAKDARVIAETARMRTDLTPVTATDDLVVELTRLTAHREDLMADWVRGVNRLRELLTGIFPALERAFDYSMRSALVLLTGFQTPDAIRAAGPEGVAAFLREHGAWPKGIPGMAADAHAAALAQTVRLPGEATTAALIARQAAVLLELDRRIKDTDKLITSRFREHPQAGIIESLPGLGPHLGAEFVVATGGNLAGFGTSGRLASYAGLVPVAQDSGRVTGNLRRPKRYNRKLRRVFYMAALSSLRVSGPSRAFYDKKRGERLVHTQALLALARRLVDVLWALLRDGRTFTPAAPQPAAAA

SEQ ID NO: 13468 - protein, 315 aa, unidentified
  source 1..315: note = protein_616634a
  REGION 9..159: note = RuvC_domain
  SITE 12: note = RuvC_P1
  SITE 56: note = RuvC_P2
  SITE 96: note = RuvC_P3
  SITE 98: note = RuvC_P4
  SITE 101: note = RuvC_P5
  REGION 192..276: note = Tnp_domain
  SITE 200: note = Tnp_P1
  SITE 229: note = Tnp_P2
  SITE 237: note = Tnp_P3
  SITE 238: note = Tnp_P4
  SITE 249: note = Tnp_P5
MTATIAQTVGVDISKLTLDVYLHPQATARQFPNTTAGITALLAWLGQTIVHRIIFEPTGAYHHCLERQLGNAGVPMVKVNPLQARRFAEAIGQRAKTDAVDAAMLARFGALDALQDRPMVSQTLSDMKELLVARRGLVKDRVAASNRNHVHRASLLKRLAGQRLRQVERQIAAIDAALRGLCRSDAELKARLDILVSIPAIGEATALTMLIEMPELGTIDNKCVASLAGLAPIARDSGQYSGNRYIRAGRAHFRQALYMPALVAIRFNPDMKTKYQALITAGKPPKVAITAVMRKLAILANALLHGQRNWTPKPA

SEQ ID NO: 13469 - protein, 414 aa, unidentified
  source 1..414: note = protein_b22b665
  REGION 10..158: note = RuvC_domain
  SITE 13: note = RuvC_P1
  SITE 64: note = RuvC_P2
  SITE 98: note = RuvC_P3
  SITE 100: note = RuvC_P4
  SITE 103: note = RuvC_P5
  REGION 254..342: note = Tnp_domain
  SITE 262: note = Tnp_P1
  SITE 293: note = Tnp_P2
  SITE 301: note = Tnp_P3
  SITE 302: note = Tnp_P4
  SITE 313: note = Tnp_P5
MLKIVYRVCCGMDVHKSFVVACIASTTEYGVTTYKSKRFSTFTGDLRRCAAWLAENSCKDVCMESTGKYWIPIYNILEPTCNIVLAHPKYVKAIRGKKTDKRDAKWIADIFKHDLVAGSFIPPADIRQLRDLVRYRWKLTNFTTGEKNRAQNCLTVSNIKLDDVFSDVFGKTASAITTRILENPAEKITDVSGFRTKGMKATNEQVLAAVDGEMCEEQAEKLRIIRSHMDSLQLCKLDLESLILATAEKYLPQLGLVMTVPGIQSFTAIGIISEIGVDMSVFPTSKHLCSWAGLTPQNNESAGKKKTTRISRAGAYIKPLLVQCALNAVRAKKFPEVRNRYLALKKRRGHKKAIIAIARMLLTAIYNILKKNESYNPELYRQTDRPPAHREVSVAEAIFILQRQGYLVAAPPTP

SEQ ID NO: 13470 - protein, 408 aa, unidentified
  source 1..408: note = protein_92240ab
  REGION 11..166: note = RuvC_domain
  SITE 14: note = RuvC_P1
  SITE 63: note = RuvC_P2
  SITE 103: note = RuvC_P3
  SITE 105: note = RuvC_P4
  SITE 108: note = RuvC_P5
  REGION 273..359: note = Tnp_domain
  SITE 281: note = Tnp_P1
  SITE 312: note = Tnp_P2
  SITE 320: note = Tnp_P3
  SITE 321: note = Tnp_P4
MSDQIPETIYVGLDRAAAIHAVCVVSAVGKVLAQFTIEHSAHGIASLISRLAKYGDPADNHVGIERPNGRLVDLLLDAGHPVIPVSPNAIKTWREGEVVSGAKSDAGDALVIAEYLRLRHHRLHPVTPHSAQTKALRTVVRTRDDIVEMRVAATNQLSSLLEAHWPRATKIFADVESPISLTFLRRYPTAAAAAHLGERRLAAFLTKHGYSGRRPATELVTRLRRAPAGATDPTLTAAIHDAVLALVTVLDALNTATKQLDRSVAHLEEHPDAEVFTSLPRSGQINAAQVLAEWGDSRAAYDSPDAVAALAGVTPVTKESGKQHAVHFRWACNQRFRRATTTFADNSRHFSPWAAHIYNQARARGHDHPHAVRILARAWIRVIYRCWHNHQPYDPNLHGGTQRLTNAA

SEQ ID NO: 13471 - protein, 347 aa, unidentified
  source 1..347: note = protein_e2aec8a
  REGION 6..147: note = RuvC_domain
  SITE 9: note = RuvC_P1
  SITE 52: note = RuvC_P2
  SITE 87: note = RuvC_P3
  SITE 89: note = RuvC_P4
  SITE 92: note = RuvC_P5
  REGION 211..294: note = Tnp_domain
  SITE 219: note = Tnp_P1
  SITE 249: note = Tnp_P2
  SITE 257: note = Tnp_P3
  SITE 258: note = Tnp_P4
  SITE 270: note = Tnp_P5
MQLSIIGIDLGKTSCSLVGVDTAGKVLVRRRMRRDTIVAFCSKYPGSVVALEACCGAHHIGRALAAKGHEIRLMSPEYVRPCVKAQKNDDRDAEAIAEAASRPTMRFVTLKSEEQLDMQTLHRVRDRLVGDRTSLMNQMRSLLLERGHIVAQGRAKLAVALAELLYAKERVLAARIHELIVDMRRQWVALDERIKAFDAEFTAAAKAQDGAKRLLSIPGIGALNATALVAAIGDAGTFARGRDLAAWLGLVPRQVTTGGRPKLLGITKRGSKYLRKMLIQGARSALPTLKAGDTAVGAWLRGLLARAHLNAAVVALVAKMARTVWALLRHGDIYKAAPAAPTAPVAA

SEQ ID NO: 13472 - protein, 432 aa, unidentified
  source 1..432: note = protein_5149f0d
  REGION 43..200: note = RuvC_domain
  SITE 46: note = RuvC_P1
  SITE 99: note = RuvC_P2
  SITE 139: note = RuvC_P3
  SITE 141: note = RuvC_P4
  SITE 144: note = RuvC_P5
  REGION 306..392: note = Tnp_domain
  SITE 313: note = Tnp_P1
  SITE 343: note = Tnp_P2
  SITE 351: note = Tnp_P3
  SITE 352: note = Tnp_P4
  SITE 365: note = Tnp_P5
MNELDVGSGLPFSSNISQGCVPSFQRHSFCNSSPKKVNTMFFVGIDIAKNSHEAAVIDGSGKIVVKPFKFPNSIGGFEKFLAAVKGVSEDLSQFEFGMEATGHYWLNLYTKLMDFNVVVHVINPVQSDALRGLYIRKTKNDAKDAFIIAELIRFGRYSETTLSDSDLLSLRELTRQRFYLVDCVSDAKRKAISFIDKIFPEYQTLFSDTFGATSVELLQTYTSPDVIAELDTELFTHFLKSVSHGRFGRSKAEEIQSVAKNTFGSFLFADSATLAIRQFIQQIKLLEEQIAEIEDFISEKFASFDCKLDTIVGVGTTLAASFLAEIGDITRFESPDKLAAFAGIDPSVKQSGEFNGTRNKMSKRGSPYLRRTFWLAAISGIRFNPALKSIYDKKCAQGKHHAVAVSAAMHKLCNIVFAMLKTNEPYKIILPE

SEQ ID NO: 13473 - protein, 400 aa, unidentified
  source 1..400: note = protein_4c72261
  REGION 5..163: note = RuvC_domain
  SITE 8: note = RuvC_P1
  SITE 62: note = RuvC_P2
  SITE 102: note = RuvC_P3
  SITE 104: note = RuvC_P4
  SITE 107: note = RuvC_P5
  REGION 273..362: note = Tnp_domain
  SITE 281: note = Tnp_P1
  SITE 311: note = Tnp_P2
  SITE 319: note = Tnp_P3
  SITE 320: note = Tnp_P4
  SITE 333: note = Tnp_P5
MNPVVGLDVAKGESEAQAFLDKDKPYGKSFRIQHIKEDLDTFISFLKEIERKTGVRPAVILESTGHYHTPIIQCLEESQYLYILVNPIISHQAKKTSLRKVKTDAVDAYQLCVLYYKEEFEPYKKRGLRLLNLRTLSRQYEAVTNLYIQAKLQFHTILDQVFPEYRGVFGDLFSKVSLQVLKEFPTSEDVLRTGEAKILERIVGMRIKRSEGWARERAAKLIASAERNPFQQGVYQSQLFSLDMYISMLLQYQKHLSSIEAEIDVLAEEIEECKIIQSIPGIGGKIAATIISEIGEIDRFNHPKKLVAYAGVDPSVHSSGKFTATINHITKRGSSRLRHALYMAVLCGIRSSRNKKLKEYYDRKRNEGKPSRVAMIACVNKLLHWIYAILKRNEQFLDMA

SEQ ID NO: 13474 - protein, 402 aa, unidentified
  source 1..402: note = protein_af834e0
  REGION 4..160: note = RuvC_domain
  SITE 7: note = RuvC_P1
  SITE 57: note = RuvC_P2
  SITE 97: note = RuvC_P3
  SITE 99: note = RuvC_P4
  SITE 102: note = RuvC_P5
  REGION 275..362: note = Tnp_domain
  SITE 283: note = Tnp_P1
  SITE 313: note = Tnp_P2
  SITE 321: note = Tnp_P3
  SITE 322: note = Tnp_P4
  SITE 335: note = Tnp_P5
MNAVGIDVSKGKSTVVVLRPFGEVVASPFDVAHTGSDLKALANFIKKLPGETKVVMEATGNYYEPIARYLHEQNIFVSVVNPVLISDFGGNTLRKPKTDKKDALKIASYALSYWVDLKKYVPQEDLRKSLKLLNRQYQQASKLKTMMNNNLISLLDLTFPGINKLFTSPSRESDGHEKWVDFVLAFPHCDMISKLTIKFFSRKYKKWCNSNSYHFTEAACKKIYEYSKECISSVSSKESTAFAVIQAARMLNSATENCHVIQLEMNRVAAQLPEYSTVMSMYGVGKAMGPQLMAEIGDPRRFHSRKAITAYFGYDSENNDSGQKVSISNSMTKKGASALRRTLFIIMQVLLQNKPIDNPVYDFLIKKQSEGKHYYSYMNAAANKFLRIYYAKVKEVLTAAET

SEQ ID NO: 13475 - protein, 342 aa, unidentified
  source 1..342: note = protein_683ad47
  REGION 7..149: note = RuvC_domain
  SITE 10: note = RuvC_P1
  SITE 53: note = RuvC_P2
  SITE 88: note = RuvC_P3
  SITE 90: note = RuvC_P4
  SITE 93: note = RuvC_P5
  REGION 211..296: note = Tnp_domain
  SITE 219: note = Tnp_P1
  SITE 249: note = Tnp_P2
  SITE 257: note = Tnp_P3
  SITE 258: note = Tnp_P4
  SITE 270: note = Tnp_P5
MSEITTIGLDLAKNVFQVHGADSSGRALLRRKLRRHQVLAFFTTLPPCTVAVEACGSAHFWGRELAKLGHDVRLIPPAYVKPFVKRQKNDAADAEAICEAALRPTMRFVPLKSEETQGAAMLFRVRELLIRQRTQGINALRGHLAEFGQIVPQGAANAARLIAIVEDPDSGLPGPATATLQVLVVALAHLEIEIGKLDAEIARQAKENEVARRLMTVPGIGPLIATALAVLAPPPETFRKARDFAAWLGLTPRQHSTGGKQRLGATTRMGERSLRRLLILGANSVIIKRHVHAAAQPGTWLGGMLMRKPRMLVRVALANKMARIVWALMTRGGVYQSPAAAA

SEQ ID NO: 13476 - protein, 341 aa, unidentified
  source 1..341: note = protein_b9f0648
  REGION 8..165: note = RuvC_domain
  SITE 11: note = RuvC_P1
  SITE 64: note = RuvC_P2
  SITE 102: note = RuvC_P3
  SITE 104: note = RuvC_P4
  SITE 107: note = RuvC_P5
  REGION 205..292: note = Tnp_domain
  SITE 213: note = Tnp_P1
  SITE 243: note = Tnp_P2
  SITE 251: note = Tnp_P3
  SITE 252: note = Tnp_P4
  SITE 265: note = Tnp_P5
MKKNLFFIGLDISKDDFAASIYETPGKSVITKVAIPNKPKGFSQLISWLKEHHITKSNCCICMEATGVYSQAIAYYLLFQGFPVSVEPPLKVKRAFDPIGHKTDPVDSQQIAEYAYRFQDELTTWKPKEEILEKIRQLLSVREQFTKQKTAIKNAMHAYSLQRVQVKLIPKAHQETLAQIEKQIARIDKELARYINEDPLISQRVSHLGSIPGYGMLLAAHLLVMTENFTKIQQYKRLAAFIGIVPYQHQSGSSVRKRAKIQHFGPMPSRKLLRLAAQSVATHDATFRHYYLRKLAQGKAKGLVLNNIANKLLKVACSIIRNNTRYIKDHRSIHPMYLKSA

SEQ ID NO: 13477 - protein, 329 aa, unidentified
  source 1..329: note = protein_dc63494
  REGION 12..132: note = RuvC_domain
  SITE 36: note = RuvC_P2
  SITE 71: note = RuvC_P3
  SITE 73: note = RuvC_P4
  SITE 76: note = RuvC_P5
  REGION 197..284: note = Tnp_domain
  SITE 205: note = Tnp_P1
  SITE 235: note = Tnp_P2
  SITE 243: note = Tnp_P3
  SITE 244: note = Tnp_P4
  SITE 256: note = Tnp_P5
MHGIDAQGNAVIRKALRRANVLPFFAELPPCLIGIEACSSAHHWAREFMKLGHTVKLMPPSYVKPYVKRGKTDAADAKAICEAVRRPTMRFVPVKSPDQQAVLMLHRVRALLMCQRTMAVNALRGHLAEFGIVAGQGAKNLRELIERVFAADPDQSEIPQLAHIALGLLVTQLNHLQVQVRAIEVELLVWHRTSPASKRLETIPGVGFITATAIAATVTDPTHFKSSRQFAAWLGLTPKQNSSGGKERLGGISKMGDRYLRTLLVVGATSVMRYARDNGAVSAVWINKLLAKKPARLVSVALANKTARIAWALLVKQEDYRTPLMPAVA

SEQ ID NO: 13478 - protein, 279 aa, unidentified
  source 1..279: note = protein_fbb9ea7
  REGION 6..147: note = RuvC_domain
  SITE 9: note = RuvC_P1
  SITE 52: note = RuvC_P2
  SITE 87: note = RuvC_P3
  SITE 89: note = RuvC_P4
  SITE 92: note = RuvC_P5
  REGION 209..269: note = Tnp_domain
  SITE 216: note = Tnp_P1
  SITE 246: note = Tnp_P2
  SITE 254: note = Tnp_P3
  SITE 255: note = Tnp_P4
  SITE 267: note = Tnp_P5
MKDTVIGVDLAKNIFQVHGASRAGEVMFRKKLRRQQFMQFMATQPPALVVLESCGSAHYWARELAGAGHEVRLIAPQYVKPFVKRQKNDAADAEAIVIAARQPEMRFVEPRTEAQQARGVLFRARQRLVHQRTELVNALRAVLYEFGLVVPQGIAHIRHIEAMLDEAVLPEAVKQECLDLLRQISEQSVRIDVRTKKIRMLVQESENTCRLQSMPGVGPLTALAIEAFAPDLQSFRRGRDFAAWLGLVPVSSHLAERKGWGRYQKPGRLISAGFSSWAP

SEQ ID NO: 13479 - protein, 308 aa, unidentified
  source 1..308: note = protein_dafef18
  REGION 6..147: note = RuvC_domain
  SITE 9: note = RuvC_P1
  SITE 52: note = RuvC_P2
  SITE 87: note = RuvC_P3
  SITE 89: note = RuvC_P4
  SITE 92: note = RuvC_P5
  REGION 209..292: note = Tnp_domain
  SITE 216: note = Tnp_P1
  SITE 246: note = Tnp_P2
  SITE 254: note = Tnp_P3
  SITE 255: note = Tnp_P4
  SITE 267: note = Tnp_P5
MKDTVIGVDLAKNIFQVHGASRAGEVMFRKKLRRQQFMQFMATQPPALVVLEACGSAHYWARELAGAGHEVRLIAPQYVKPFVKRQKNDAADAEAIVIAARQPEMRFVEPRTEAQQARGVLFRARQRLVHQRMELVNALRAVLYEFGLVVPQGIAHIRHIEAMLDEAVLPEAVKQECLDLLRQISEQSVRIDVRTKKIRMLAQESENTCRLQSMPGVGPLTALAIEAFAPDLQSFRRGRDFAAWLGLVPRQFSSGGKERLGKISKAGQADIRRLLIMGAMTQVNWASRKAPAPGSWLARMLARKPVCW

SEQ ID NO: 13480 - protein, 341 aa, unidentified
  source 1..341: note = protein_0d692e7
  REGION 7..149: note = RuvC_domain
  SITE 10: note = RuvC_P1
  SITE 53: note = RuvC_P2
  SITE 88: note = RuvC_P3
  SITE 90: note = RuvC_P4
  SITE 93: note = RuvC_P5
  REGION 209..296: note = Tnp_domain
  SITE 217: note = Tnp_P1
  SITE 247: note = Tnp_P2
  SITE 255: note = Tnp_P3
  SITE 256: note = Tnp_P4
  SITE 268: note = Tnp_P5
MQDVTLIGIDLGKHGFHLHGQDRHGKALLRRKFDRKHLITFLANFPPCTIVMEACAGAHWMARQLSALGHKAKLISPQFVRPFVKGNKNDFIDAEAICEAASRPSMRFVTPKTEAQQCLSALHRTRESLVRARVKAINQIHGFLLEFGIGLPKGAGIIKRLPSVLAERALPARLVSLIERLRAHIQYLDEQIDELEKDLGRQLQEDDLGQRLMAIPGVGPITASALSAEMGDGKQYSCGRDFAASLGLVPQQHSTGGRANLLGISKRGDKNIRRLLVQCARSYMRGLDRHTDRLAQWARSMLGRRHSNVVACALANKLARTAWAMAAHHTEYKMQEAVTSL

SEQ ID NO: 13481 - protein, 389 aa, unidentified
  source 1..389: note = protein_306e839
  REGION 4..161: note = RuvC_domain
  SITE 7: note = RuvC_P1
  SITE 59: note = RuvC_P2
  SITE 100: note = RuvC_P3
  SITE 102: note = RuvC_P4
  SITE 105: note = RuvC_P5
  REGION 264..349: note = Tnp_domain
  SITE 271: note = Tnp_P1
  SITE 301: note = Tnp_P2
  SITE 309: note = Tnp_P3
  SITE 310: note = Tnp_P4
  SITE 322: note = Tnp_P5
MYFVGIDISKYKHDCFITTETGLIVYDPFTIENSHDGFDELLTVLRSLGHPNAIRIGFESTGHYALNLKLFLEKAHYSFMEFNPVLLAKFNKAQSLRRTKTDAIDCSSIARWLMTVEYKPHPIGFYHTYSLKSLTRLRNSLIQQRSFYLVKLTNVLDHTFPEFKPFFNKKFGATALYLLENYATAEKMARMNSQSYDILRGISRGKFSLQKFIKLKELARNTIGESNAIFVSQLNSLLDLYKLSAKEIQSLEKQIISLVQEMNPRTLSIPGIGPISAAVICSEYGNFSHFDSPAKMLSFAGLEPGYYQSGLAEHKGHMVKRGSSNLRYTLMNLSIPLIQYNMVFAEYYAKKRAEGKSHRVACSHLIKKLIRVIYTLEKNDMDFDPKKLR

SEQ ID NO: 13482 - protein, 343 aa, unidentified
  source 1..343: note = protein_b92ba61
  REGION 7..149: note = RuvC_domain
  SITE 10: note = RuvC_P1
  SITE 53: note = RuvC_P2
  SITE 88: note = RuvC_P3
  SITE 90: note = RuvC_P4
  SITE 93: note = RuvC_P5
  REGION 212..301: note = Tnp_domain
  SITE 220: note = Tnp_P1
  SITE 250: note = Tnp_P2
  SITE 258: note = Tnp_P3
  SITE 259: note = Tnp_P4
  SITE 271: note = Tnp_P5
MQTVTTIGLDIAKSVFQVHGIDAEGKVLIRRQLKRRYVLAFFEKLPPCLVGIEACATSHHWSRELKAFGHNVRLMPPAYVKPYVKRQKNDAADAEAICEAVTRANMRFVETKTSEQQSCLMLHRTRQLFVRQQTSVINAIRAHMAEFGIVAPVGRKGIEQLLAVVADAIDARVPEVARACIAALGAQLRMLKAQILEFDRQIMAWHRSNETSRRLDAIPGIGPALATALVASVANPKAFRSGRNFSAWIGLVPKQHSSGGKDKLGSISKQGDRYLRSLFTAGALAVIRYAKIHGTKHRPWLTSLLARRPTKVAAIALANKIARMAWAMMAKGECYKEPAALAA

SEQ ID NO: 13483 - protein, 422 aa, unidentified
  source 1..422: note = protein_246ad7d
  REGION 4..157: note = RuvC_domain
  SITE 7: note = RuvC_P1
  SITE 59: note = RuvC_P2
  SITE 94: note = RuvC_P3
  SITE 96: note = RuvC_P4
  SITE 99: note = RuvC_P5
  REGION 285..371: note = Tnp_domain
  SITE 292: note = Tnp_P1
  SITE 323: note = Tnp_P2
  SITE 331: note = Tnp_P3
  SITE 332: note = Tnp_P4
MLGVGIDWAEEFHLVALGRPAEGVVEVVRVEHTPAAVDRLVQRIAGLEPDPAEVRVVIETRHGLLVERLLDAGYGVLPVNPDLVARRRGPARKKDDAEDARIACLLALDRHAGLRILVPHGELAGELRAIARDDDRCARDQRRLLNRLRQDLISTFPAALQLAGEDLGAPTVLRLLERWPTRQALAAASHQELVDFARASRHGWPDRFADRVEVALAGDHFTPRDYLVRAKADTIRLAATQLLTIATQRKRWERRMGTLLLGAPRYGRAKQPREQRPGQAVPGGKVYLSFPGLGDRLAARVAGEIGDHPAQFGSPNALACYAGKAPVTRRSGKSELVVATRLACNRYLADAVQQWAFCSLRCSGWAREFYDAQRARGKGHHAALRALGNRWLEVLWHCLIRGQLYDEATHVANRNRALGKAA

SEQ ID NO: 13484 - protein, 410 aa, unidentified
  source 1..410: note = protein_df9709d
  REGION 4..160: note = RuvC_domain
  SITE 7: note = RuvC_P1
  SITE 57: note = RuvC_P2
  SITE 97: note = RuvC_P3
  SITE 99: note = RuvC_P4
  SITE 102: note = RuvC_P5
  REGION 274..361: note = Tnp_domain
  SITE 282: note = Tnp_P1
  SITE 312: note = Tnp_P2
  SITE 320: note = Tnp_P3
  SITE 321: note = Tnp_P4
  SITE 334: note = Tnp_P5
MNAAGIDVSKGKSMVSVMRPFGEVVAKPFTVRHTGSELKELADYLKSLDGETRIIMEHTGRYYEPVAQFLHDAGLYVSAVNPKLIKDYGNNSLRKVKTDKADSRKIAKYGLDNWVELRQYVSMDKIRYQLKTLNRQCNLYGKTKTMMKNNLIALLDQTYPGVNDLFDSPVREDGTQKWVDFAASFWHLECVKNMSLDAFTGRYRKWCKRNKYNFSSDKAAEIYAGVQDQIAMLPKDALTKLMIRQAINALNAVSATLEKLKAEMLELSSQLPEYPAVMEMRGVGDSLGPQLMAEIGDVMRFARRSAITSFAGVDPGADQSGGHEAKSVPTSKSGPPELRKALFLVMDHLIQTKPLNDPVYQFMDKKRAEGKPYLVYMTAGANKFLRIYYGRVKEYLAKLEQPLAPNPEQH

SEQ ID NO: 13485 - protein, 391 aa, unidentified
  source 1..391: note = protein_7ee820b
  REGION 4..161: note = RuvC_domain
  SITE 7: note = RuvC_P1
  SITE 59: note = RuvC_P2
  SITE 99: note = RuvC_P3
  SITE 101: note = RuvC_P4
  SITE 104: note = RuvC_P5
  REGION 264..351: note = Tnp_domain
  SITE 272: note = Tnp_P1
  SITE 302: note = Tnp_P2
  SITE 310: note = Tnp_P3
  SITE 311: note = Tnp_P4
  SITE 324: note = Tnp_P5
MICIGIDVGKFKHCAAVMDDKTGEVLIKSFFFTNDQKGLDLFYSKTKQFLHRKHAVGMEDTGHYMINLTKFLLEKKFTVKYINPRSTALRRKELGMSAKNDRKDALLIAEMLSEKKFWRSVSAVTMQTDKLRELTRLYHQLKEQQNQDMNRLQRALDIVFPEVNTLSWTRYSQSYMQFLSEYPSAASIASEDIRNLRKALEVNGRGRRSKVTAEEIKEAARNSVGDDNTAVALEVQSMIALINTRAEQIDTLDKKIEEFSHQLNSPITSIPGISYITGMTILAEIGDINDFPEAAKLISYAGMEPLVHQSGKYDAAHMPISKHGSRYLRKALYQAVFTVCKYCQVFNDYYTKKRDQGKTYRCAQGHCVRKLLRVIYKLLSTDTVYDSALVH

SEQ ID NO: 13486 - protein, 391 aa, unidentified
  source 1..391: note = protein_c87bc18
  REGION 4..163: note = RuvC_domain
  SITE 7: note = RuvC_P1
  SITE 60: note = RuvC_P2
  SITE 101: note = RuvC_P3
  SITE 103: note = RuvC_P4
  SITE 106: note = RuvC_P5
  REGION 266..353: note = Tnp_domain
  SITE 274: note = Tnp_P1
  SITE 304: note = Tnp_P2
  SITE 312: note = Tnp_P3
  SITE 313: note = Tnp_P4
  SITE 326: note = Tnp_P5
MIYVGIDVAKDKHDCFITNSDGEVLFKPFSISNNREGFENLFQRIESVSDDLAKVKVGLEATGHYSYNLLGFLLDKGLTTYVINPLHTNLYRKSLSLRKTKTDKVDFRTIATMIMSDMNLKSYSDTSYHNEELKSLTRYRFDKVKERAKLKSSVSRLVCILFPELEKLVPTLHMASVYALLSEFPSAHAVSSAHLTRLSNLLSESSKGHYGKDTAVIFREAARSSIGSHMPAKSLELKHTIMLIQELTTEIDEIELAIKSIMDSLHSPILSIPGISYRMGAMIIAEIGDFNRFDSADRLLAYAGMSPSTYQSGQLDGSHSHMEKRGSRYLRYALYNSTKYVCQWDESFAAYLAKKRAEGKHYNVALSHAAKKLVRLIYAMEKSGQSYSKKA

SEQ ID NO: 13487 - protein, 341 aa, unidentified
  source 1..341: note = protein_501c9fe
  REGION 7..149: note = RuvC_domain
  SITE 10: note = RuvC_P1
  SITE 53: note = RuvC_P2
  SITE 88: note = RuvC_P3
  SITE 90: note = RuvC_P4
  SITE 93: note = RuvC_P5
  REGION 209..295: note = Tnp_domain
  SITE 217: note = Tnp_P1
  SITE 247: note = Tnp_P2
  SITE 255: note = Tnp_P3
  SITE 256: note = Tnp_P4
  SITE 268: note = Tnp_P5
MDDVTLVGIDLGKHSFHLHGQDAKGKAVVRKKLSRKQLIEFFATFHACTVIMEACAGSHHMARKLAAFGHTVKLISPQFVRPFVKSNKNDFVDAEAICEAASRPAMRFVTPKTESQQTLSALHRVRDSLVRDRTKTSDQMHGFLLEFGISLPVGHAVIKRLPAVLAEHPLPPRLVTILERLHAHFKYLSEQIGAIDKDIAVQLAEDDLGQRLLSIPGVGPITASVLAAEMGDGKQYGCSRDFAASVGLVPRQYSTGGKANLLGISKRGDKNIRRLLVQCARAYMQRLDRQCGRLADWVRAMLTRRHSNVVACALANKLARTAWALATRNTRFDAGARAMPA

SEQ ID NO: 13488 - protein, 330 aa, unidentified
  source 1..330: note = protein_bde99d9
  REGION 8..154: note = RuvC_domain
  SITE 11: note = RuvC_P1
  SITE 59: note = RuvC_P2
  SITE 97: note = RuvC_P3
  SITE 99: note = RuvC_P4
  SITE 102: note = RuvC_P5
  REGION 202..289: note = Tnp_domain
  SITE 210: note = Tnp_P1
  SITE 240: note = Tnp_P2
  SITE 248: note = Tnp_P3
  SITE 249: note = Tnp_P4
  SITE 262: note = Tnp_P5
MKNWNVILGVDVSKLTLDVCWAERRLHLKIDNCSKGFNVFKEWCRANEILLNDTLVVLEYTGGYEYRFIQFCQSVSLSYCRIPGLEIKQSMGMVRGKSDRDDSFRISQYGQEKADRLVPSAPLNNSVLALKQLLSFRKRLVRENAGLVNTVKERKHMYPFKETDTIIRIATAKIKANKKFICLLEQQVTDLIKSDEAFLMNYRIITSIKGIGKVNAWMTIAYTENFTSFTNARKYAVFVGVAPFEHSSGTSIKGRKRVSHLAHKELKQELNQAAKYAVVHDPELRLYAERKLKNKCYSLVLNKVKFKLILRMFSLVNRGEVYVENYKPAA

SEQ ID NO: 13489 - protein, 341 aa, unidentified
  source 1..341: note = protein_b5cc31b
  REGION 7..149: note = RuvC_domain
  SITE 10: note = RuvC_P1
  SITE 53: note = RuvC_P2
  SITE 88: note = RuvC_P3
  SITE 90: note = RuvC_P4
  SITE 93: note = RuvC_P5
  REGION 209..296: note = Tnp_domain
  SITE 217: note = Tnp_P1
  SITE 247: note = Tnp_P2
  SITE 255: note = Tnp_P3
  SITE 256: note = Tnp_P4
  SITE 268: note = Tnp_P5
MHNVTMVGIDLGKHSFHLHGQDGAGKAVFRKKVSRKQLLEFFVTFHPCTVVMEACAGAHWMARRLSEFGHTVKLISPQFVRPFVKSNKNDFVDAEAICEAASRPSMRFVTPKTESQQTLSALHRVRQALVRDRVRTTNQMHGFLLEFGISLPVGHAVVKRLPAVLAEHRLPPRLVAILDRLHAHFKYLTEQIRDIEKELERQLADDSIGQRLLTIPGIGTITASLLASELGDGKQYRCSRDFAAAVGLVPRQYSTGGKSNLLGISKRGDKNIRHLLVQCARAFMLRLDKQSGRMADWVRAMLGRRHSSVVACALASKLARIAWAIVSHDTVFERQAPAAVA

SEQ ID NO: 13490 - protein, 343 aa, unidentified
  source 1..343: note = protein_14f8b13
  REGION 5..152: note = RuvC_domain
  SITE 8: note = RuvC_P1
  SITE 55: note = RuvC_P2
  SITE 92: note = RuvC_P3
  SITE 94: note = RuvC_P4
  SITE 97: note = RuvC_P5
  REGION 212..300: note = Tnp_domain
  SITE 220: note = Tnp_P1
  SITE 250: note = Tnp_P2
  SITE 258: note = Tnp_P3
  SITE 259: note = Tnp_P4
  SITE 271: note = Tnp_P5
MEHYAGIDVSLKESSVCVVDANGKIVREAKVASEPEALCDLIAELGFSVSRIGMEAGPLSQWLREGLADAGFEVVLLETRHVKAALSAMTVKTDRKDARGIAQLLRMGWYRPVHAKSAACQEVRALLVGRKLLQAKLLDVELSIRGILRGFGLKVGEVSRGRFEARVRELADGHAMLETVIGAMLQARAALWNEFIRLHREMLKIARTDHVCRRLMSAPGVGALVAITYRSAVDDPERFTRSKTVGAYFGLTPKKYQSGETDIDGGISRVGDAMVRTALFEAAHIMLTRAMRFSALKRWALGVAKRRGMKRAKVALARKLAVVLHRMWVDATEFRWSKDASAA

SEQ ID NO: 13491 - protein, 384 aa, unidentified
  source 1..384: note = protein_a4e8fb1
  REGION 5..155: note = RuvC_domain
  SITE 8: note = RuvC_P1
  SITE 56: note = RuvC_P2
  SITE 97: note = RuvC_P3
  SITE 99: note = RuvC_P4
  SITE 102: note = RuvC_P5
  REGION 217..302: note = Tnp_domain
  SITE 225: note = Tnp_P1
  SITE 255: note = Tnp_P2
  SITE 263: note = Tnp_P3
  SITE 264: note = Tnp_P4
  SITE 275: note = Tnp_P5
MAVIIGMDPHKRSATIEIIDYTSKILTTGRYDTDKTGYAEMLTAARKYVDRVWAIEGCNGIGRHLAHRLVHDGETVIDVPAKLSAQIRVFATGNGRKTDPVDAHSVALRAPNLRPVQPDSKLIALGMLADRRDELGRARTDTVNRLHRLLLELLPGGAKKFLSATQARKLVATVKPRDPAGKVRRRLVVELISELETIDRKIKTADKEPRQLVAEHGSALTDLYGIGPAGAARLLADVGDIHRFRDRNRFASWNGTAPLDASSGQQQRHRLSRAGNRKINRVLHTMAIVALRNPSAGRTYYDCRKAEGKTSMEAMRALKRRLSNVVYRRMLDDQLRREKASPGGQSGTTTDSSATGSTPHTATSDKPHPGLTTNQSSPDLQPAP

SEQ ID NO: 13492 - protein, 342 aa, unidentified
  source 1..342: note = protein_27c6b2c
  REGION 7..149: note = RuvC_domain
  SITE 10: note = RuvC_P1
  SITE 53: note = RuvC_P2
  SITE 88: note = RuvC_P3
  SITE 90: note = RuvC_P4
  SITE 93: note = RuvC_P5
  REGION 212..296: note = Tnp_domain
  SITE 219: note = Tnp_P1
  SITE 249: note = Tnp_P2
  SITE 257: note = Tnp_P3
  SITE 258: note = Tnp_P4
  SITE 270: note = Tnp_P5
MGEVTIIGVDLAKNVFQLHGAASDGTVVYRKKLSRPQFARFIAEQSPCLVAMEACAGAHHWARQMARHGHEVRLIAARYVKPFIKRQKNDAADAEAIVEAAQRPTMRFVEPKSADQQARAVAFRTREQLVKQRTEAVNALRSYLYEFGHVAPEGIGYLPRLAKVVDDPDADIPDLAREICRMLLEQIAQLTDRINALKARIAAMSNEADMPRQLQTMPGVGPITALAVETFAPPMEQFRRGRDFAAWLGLVPRQYSTGGKQKLGKTSKMGQRDIRRLLVIGATAVIRWASRRGAPKGSWLARMLERKPVPVVAVALANKMARGIWAMLTRGETYRGPVLIGA

SEQ ID NO: 13493 - protein, 277 aa, unidentified
  source 1..277: note = protein_3d0b6f8
  REGION 1..105: note = RuvC_domain
  SITE 4: note = RuvC_P2
  SITE 44: note = RuvC_P3
  SITE 46: note = RuvC_P4
  SITE 49: note = RuvC_P5
  REGION 216..259: note = Tnp_domain
  SITE 224: note = Tnp_P1
  SITE 254: note = Tnp_P2
MVFEATGVYSLSLQAFLEDHHIKYLRLNPLQAKKLMDNNLRHNKTDKLDAYHLALIQFSSPQKLQAPQPREYHELQAASRYYEELTRALIVNKNQLHRNLQSTFPQIEHILSNPSGKIYWTIVSLFPHAQYVLDMNEDQVKQRLLSISGIGRQRAQYLTARLYAFARQAYPYDRKDGITVRAIQRTISNLLSLSNERDQVINYMEKLTKVVNARALTIYLSIPGIARTTALRLIAELGDLRRFNTSAQIDAFVGMIQAVLNLVTKIVVWVLPNMVIT

SEQ ID NO: 13494 - protein, 392 aa, unidentified
  source 1..392: note = protein_c268729
  REGION 47..190: note = RuvC_domain
  SITE 50: note = RuvC_P1
  SITE 95: note = RuvC_P2
  SITE 130: note = RuvC_P3
  SITE 132: note = RuvC_P4
  SITE 135: note = RuvC_P5
  REGION 254..340: note = Tnp_domain
  SITE 262: note = Tnp_P1
  SITE 292: note = Tnp_P2
  SITE 300: note = Tnp_P3
  SITE 301: note = Tnp_P4
  SITE 313: note = Tnp_P5
MDSPPPRHHSATVAFEEANGSEGETMKKHSSKQASLSSTDVESCTTIAIDLAKQVFQLAGEDATGRVIYEDRIKSRQAFHDFLIRLPSTVAVLMECGPGAQAWARLLQTQGNPVRILPAQRVAEHRSGAKNDRNDTHAILRAGRDSSIAAIPIKSTAALAIQALHRVRRGSIKRHTALGNQMRGLLLEHGVSMPQGDAAIIKHVPRCLEDASLPLPDLLRELLDELLADWLSLGERIARLSKRLEATAREDKVAQRLITIRGVGAITATAIVAKQTEPSRFASGRMYSAFFGIVPDQHSSGNKVRLGRMSKRGDGYIRSLMIQGAHAVLSQLKPDSDQPDDRRLLRWLSRLGRKEAAIRLANRNLRIIWALLQSDQVYQRKPNSKPEAAMSL

SEQ ID NO: 13495 - protein, 338 aa, unidentified
  source 1..338: note = protein_b0e9998
  REGION 7..149: note = RuvC_domain
  SITE 10: note = RuvC_P1
  SITE 53: note = RuvC_P2
  SITE 88: note = RuvC_P3
  SITE 90: note = RuvC_P4
  SITE 93: note = RuvC_P5
  REGION 211..295: note = Tnp_domain
  SITE 219: note = Tnp_P1
  SITE 249: note = Tnp_P2
  SITE 257: note = Tnp_P3
  SITE 258: note = Tnp_P4
  SITE 270: note = Tnp_P5
MTKDTMIGVDLAKSVFQLHGASMTGQMQFRKKLSRQGFYKFIAGQPPAVVVMEACGSAHYWAREVTKLGHDVKLIAPHYVRPFVKRQKNDAADAEAIVIAAQRPEMRFVEPKSVEQQSRAILFRARERLVHQRTELVNALRAYLYEYGHVVPQGIHQIKRIEEILDAPNSDLPNLMREECRDLLEQIAEKTVRINVRTGKIKALAAQAGTARRLQTIPGVGPLTALAVEAFAPPMENFRCGRDFAAWLGLVPRQFSSGGKERLGRISKAGQSDIRKLLIIGAMSRLNWMGRKSIPEGSWLARISMRKPRMIVAIALANKMARTIWAMLTKNEDYRVPA

SEQ ID NO: 13496 - protein, 342 aa, unidentified
  source 1..342: note = protein_ef4de79
  REGION 9..151: note = RuvC_domain
  SITE 12: note = RuvC_P1
  SITE 55: note = RuvC_P2
  SITE 90: note = RuvC_P3
  SITE 92: note = RuvC_P4
  SITE 95: note = RuvC_P5
  REGION 214..302: note = Tnp_domain
  SITE 222: note = Tnp_P1
  SITE 252: note = Tnp_P2
  SITE 260: note = Tnp_P3
  SITE 261: note = Tnp_P4
  SITE 273: note = Tnp_P5
MKFITQPVIGVDIAKQVFQVHEVNTTTGEITSVKLKRAKFLEYFANRSSCLIGMEACGGAQHWARRLTALGHNVRLLPAQQVRPFAVGNKNDVADARAIWMAVQQPGIRAVVVKTETQQAVLALHRMRQQLVKFRTAQMNGLRGLLAEYGEVMPRGRFALAKAIPLVLERLIDRLPAVLIETLREQYARIGQMGSQITDIERRLHLWHRSDEDCQRIAAIPGVGLLTATAAVATMGDPHAFRSGREFAAWLGLVPRQVGTGGQVRLLGISKRGDTYLRTLLIHGARSVLVHSQKPSPWISAILQRRSLNVASVALANKIARTLWALIAHHRLYQSGYVSQPT

SEQ ID NO: 13497 - protein, 387 aa, unidentified
  source 1..387: note = protein_dd556c7
  REGION 4..159: note = RuvC_domain
  SITE 7: note = RuvC_P1
  SITE 57: note = RuvC_P2
  SITE 98: note = RuvC_P3
  SITE 100: note = RuvC_P4
  SITE 103: note = RuvC_P5
  REGION 262..347: note = Tnp_domain
  SITE 269: note = Tnp_P1
  SITE 299: note = Tnp_P2
  SITE 307: note = Tnp_P3
  SITE 308: note = Tnp_P4
  SITE 320: note = Tnp_P5
MYYIGIDISKYKHDCAVVDDLGDVVTPSWSFTNDCEGFSLFKQLLDDLEGEKKIGLESTGHYGQNLKLFLESNGFPFMEFNPLLISRFVRSKSLRNTKTDSIDAQSIARYVMTVEYKPYPPSFYHLDKLKSLTRFRDSLVRQRSRQLVELTNVLDKVFPEFKPFFKGRLSATALYILSHYQTPEKIASMNARSYEPLRKLSRGRFSMSDFVQLKALAKNTVGISNDYLLDQMNILLDIYSQMDAKVDELDCQIKECVRDIDPPILSLPGIGELSAAVILSEFGDFSKFDNPSKMLSYAGLEPGYYQSGQSEHTGHMVKHGSSQLRYALMNCCLPLVTNEPTFAEYYAKKRAEGKPHRVAMTHVAKKLLRVIYTLQTKDILYDPSLLR

SEQ ID NO: 13498 - protein, 452 aa, unidentified
  source 1..452: note = protein_3f76350
  REGION 26..185: note = RuvC_domain
  SITE 29: note = RuvC_P1
  SITE 84: note = RuvC_P2
  SITE 124: note = RuvC_P3
  SITE 126: note = RuvC_P4
  SITE 129: note = RuvC_P5
  REGION 300..394: note = Tnp_domain
  SITE 308: note = Tnp_P1
  SITE 338: note = Tnp_P2
  SITE 346: note = Tnp_P3
  SITE 347: note = Tnp_P4
  SITE 360: note = Tnp_P5
MPAGKDITMHYQKVLKMPESIPYLSVGFDVGADFTWMSIMLPNGILIGKPFKIIHSDPQSRELAISKIKEAQEMYSLESRCFLESTGIYHIPLLCFPRDKGFDCAVINPIITKNSTNMNVRKLHNDKFDSKKAAKVGLDASLKASIVPDDAIIDLRNLVRDYYYFKDLQSAIVLKLHAELKVSFPAYLNVFSKVTTQTSLKLLEAYPLAADMLAAPKDELVEIIRSTARFGETYALARYDAICTAAKDAAVFGRALPSNALRIRLYIKMYREYQAHLDSILEELHQAVGKLEGTPDYDRISFIQTLHGVGFLSAVVLIAEMGSFDLFSSPKKLYAYFGLDPGVNDSGKFHGDRVHMSKRGSSLARRILHMVAINNLKVDKATKTPVNPVIYDYYTRKCASKKKSVAVGAVMHKICNIIFAMLRDNKPFELITPEEHRERYAAEHPESVNPAA

SEQ ID NO: 13499 - protein, 344 aa, unidentified
  source 1..344: note = protein_47fe011
  REGION 4..149: note = RuvC_domain
  SITE 7: note = RuvC_P1
  SITE 51: note = RuvC_P2
  SITE 89: note = RuvC_P3
  SITE 91: note = RuvC_P4
  SITE 94: note = RuvC_P5
  REGION 208..295: note = Tnp_domain
  SITE 216: note = Tnp_P1
  SITE 246: note = Tnp_P2
  SITE 254: note = Tnp_P3
  SITE 255: note = Tnp_P4
  SITE 267: note = Tnp_P5
MEYLGIDVHKVESQICILTESGEIIERRIRTERERFAAVLGERPRAKILIEASTESEWVARCLEELGHEVVVADPNFAAMYATRSRKVKTDLRDARTLAEACRLGAYRPAHRTSNRQRHVRAQLSVREALVQTRARYISLIGALLRREGLRVASGNAVGFTKRVARVAMPGQLKSEIAPLLAVFESINRQLVWVDTRLEQLAKSDETVERLCTAPSVGPVTAAAFSSTVDDVQRFQSAHQVEAYLGLTPSEWSSGEKQCKGHITKAGNNRMRRLLVQVAVSILRLRSPRTEALRKWATGIAARRGKKIAIVALARRMAGVLFAMMRDRTRYFQAALPEPSAQVA

SEQ ID NO: 13500 - protein, 356 aa, unidentified
  source 1..356: note = protein_f14c517
  REGION 5..158: note = RuvC_domain
  SITE 8: note = RuvC_P1
  SITE 56: note = RuvC_P2
  SITE 97: note = RuvC_P3
  SITE 99: note = RuvC_P4
  SITE 102: note = RuvC_P5
  REGION 220..305: note = Tnp_domain
  SITE 228: note = Tnp_P1
  SITE 258: note = Tnp_P2
  SITE 266: note = Tnp_P3
  SITE 267: note = Tnp_P4
  SITE 278: note = Tnp_P5
MPVIIGMDPHKRSATIEVINELGNMITGGELGTDRVGYAEMLATGRRFSGRVWAVEGCNGVGRHIAHRLIHDGETVLDVPAKLSAQVRVFATGNGRKTDPIDAHSVALVALRTPNLVRLQADPELVVMGMLVDRRDELGRARTQTVNRLHRLLLELFPGGAKKFLSAMQARALVATIKPRDVVGKTRRRLAVELIAELETIDKKIKAADRDLRELVIARGSTLLDLHGIGPSGAARLLADVGDIHRFAGRDRFASWNGTAPLDASSGEQQRHRLSRAGNRRINRTLHIMGVVQLRNPTAGRVYFDGKKAAGKTSMEAMRALKRRLSNVVYARMLVDQKRREAAGPGGTRGRLCNPA

SEQ ID NO: 13501 - protein, 315 aa, unidentified
  source 1..315: note = protein_0edaf0f
  REGION 1..81: note = RuvC_domain
  SITE 20: note = RuvC_P3
  SITE 22: note = RuvC_P4
  SITE 25: note = RuvC_P5
  REGION 186..273: note = Tnp_domain
  SITE 194: note = Tnp_P1
  SITE 224: note = Tnp_P2
  SITE 232: note = Tnp_P3
  SITE 233: note = Tnp_P4
  SITE 246: note = Tnp_P5
MVLNPIQSHSLRELYIRKAKTDARDSLIIADLVRFGRCKASNVPQDKILALRELCRSRAYRVDMAADLKRKLIALLDRIFPEYESLFDSVFSKASIAVLSKYSTPQKVKNANLRKLTDILMESSNGHFGEWKAHQLKEAACSSFGIDDSDGVYSMLLGMFLEQILSLTAQADSLEKQISVFFQEFNNPLTSIPGVGTVLAATILSEIGDITRFSSADKLLAYAGLDPSVKQSGEFKSNQNRMSKRGSPYLRRAIWLASTVAVHRDPMFQTYYEKKISEGLHYMNVIGHVSRKMTAVIFAVLRDGQPYQPILQSAG

SEQ ID NO: 13502 - protein, 267 aa, unidentified
  source 1..267: note = protein_8a755ba
  REGION 1..79: note = RuvC_domain
  SITE 17: note = RuvC_P3
  SITE 19: note = RuvC_P4
  SITE 22: note = RuvC_P5
  REGION 138..224: note = Tnp_domain
  SITE 146: note = Tnp_P1
  SITE 176: note = Tnp_P2
  SITE 184: note = Tnp_P3
  SITE 185: note = Tnp_P4
  SITE 197: note = Tnp_P5
MQLIAAQHVKAYVTGNKNDFIDAEAICEAASRPRTRSVPVKTLEQQILSTEHKLRKSWVDNRTRIINQVHGVLLELRIIFPIGHAALEQVPALMERHELPIRLRNAVERMLLDIQRLTRDIKGIDVEIKQQLSEDAAGMRLLSIPGIGPLTTSALVADVGDASTYKRSRDFAASLGLVPRQYSSGGKTSLLGISKRGDKYLRCLLVQGAHALMIRIDKRDDALGAWVRNLLARKPPNKVACALANKTTRIVWAVLARGGSYNVKQMA

SEQ ID NO: 13503 - protein, 340 aa, unidentified
  source 1..340: note = protein_c22f637
  REGION 7..148: note = RuvC_domain
  SITE 10: note = RuvC_P1
  SITE 53: note = RuvC_P2
  SITE 88: note = RuvC_P3
  SITE 90: note = RuvC_P4
  SITE 93: note = RuvC_P5
  REGION 211..296: note = Tnp_domain
  SITE 219: note = Tnp_P1
  SITE 249: note = Tnp_P2
  SITE 257: note = Tnp_P3
  SITE 258: note = Tnp_P4
  SITE 270: note = Tnp_P5
MGEVSTVGIDLAKSVFQVHGSGPSGAVVFRKKLRRDQVLAFFSTLPRCVVAMEACASAHYWAREIAVAGHDTRLIPPAYVKPFVKRQKNDMADAEAICEAAQRPTMRFVQGKSAQAQAAAVVFRTRDLLVRQRTQLINALRGHLTEFGYVVRQGAGHVGQLVAIVRDPTSDVPAEARPVLAVIADSLQALQAQIARLDRAIAQRAKDDAVAKRLMTVPGIGPVVATALVALAPAASTFRRGRDFAAWLGLVPRQHSSGGKERLGRTTKMGERSLRRLLILGASSATKVAARAPDKAGAWLAGMLSRKPRMLITVALANKMARIVWALMARGGSYRAPATA

SEQ ID NO: 13504 - protein, 405 aa, unidentified
  source 1..405: note = protein_50246d0
  REGION 61..203: note = RuvC_domain
  SITE 98: note = RuvC_P2
  SITE 137: note = RuvC_P3
  SITE 139: note = RuvC_P4
  SITE 142: note = RuvC_P5
  REGION 274..380: note = Tnp_domain
  SITE 282: note = Tnp_P1
  SITE 311: note = Tnp_P2
  SITE 319: note = Tnp_P3
  SITE 320: note = Tnp_P4
  SITE 332: note = Tnp_P5
MGRRRGYCIHRRYEPMEPSMQTLNDLSRSPFALEAASTLIAVIEMSLSSWLVAGVVPGIERQPLKKLAVDESALLRLLHRWREEAEKAGCRIERIVVAFEAGRDGFWLARWLKARDIEAHVIHAASVAVSREHRRAKTDRLDTELLKRAFLGWLRGERDHCKVVAIPSLKEEDAKRPNRERESLVCEQSRIVNRMKAALIRLGIRGFNPKLKRAAGRLDSLRTPEGEPIPPNTLAELRRDMERRRFVSNQIRQIEDARLERLEQAPSDEPHAMVRLLARVIGVGIETADMLVHEVLSRNMRDRRAIARYAGLTGSPDESGRKRREKGLARSGNGRVRRGMVQLAWRFLTYQKESALAQWYRARTQNANSARKPLIVALARKLLIALWRFVRQGVVPDGVVLRPAQ

SEQ ID NO: 13505 - protein, 345 aa, unidentified
  source 1..345: note = protein_cf360e7
  REGION 6..147: note = RuvC_domain
  SITE 9: note = RuvC_P1
  SITE 52: note = RuvC_P2
  SITE 87: note = RuvC_P3
  SITE 89: note = RuvC_P4
  SITE 92: note = RuvC_P5
  REGION 211..297: note = Tnp_domain
  SITE 219: note = Tnp_P1
  SITE 249: note = Tnp_P2
  SITE 257: note = Tnp_P3
  SITE 258: note = Tnp_P4
  SITE 270: note = Tnp_P5
MKITTVGIDLAKNVFQVHAVDERGRAVLRKQLRRDQMTAFFANLTPSLIGMEACASAHHWARTLQRFGHTVHLMAPQFVKPYVKSNKNDVADAEAICEAVSRPNMRFVPIKSVEQQAVLALHRVRQSFVRARTAQGNQIRGLLGEFGLIMPKGIVNVAKRVPTLLEAAGDELPASLRQMIERLTDHLKELTRQVDELETQIKAWHRSSELSRKLEKIPGIGPLGASALVASIADANSFDNGRQLSAWLGLVPRQDSSGGKPKLLGISKRGDVYLRTLLIHGARSAILAAQRKAVNTNVWLASLLNRRHPNIAAVALANKNARTVWALLAHGREFRADYAPEVSAA

SEQ ID NO: 13506 - protein, 348 aa, unidentified
  source 1..348: note = protein_39c67c7
  REGION 6..148: note = RuvC_domain
  SITE 9: note = RuvC_P1
  SITE 52: note = RuvC_P2
  SITE 87: note = RuvC_P3
  SITE 89: note = RuvC_P4
  SITE 92: note = RuvC_P5
  REGION 212..298: note = Tnp_domain
  SITE 220: note = Tnp_P1
  SITE 250: note = Tnp_P2
  SITE 258: note = Tnp_P3
  SITE 259: note = Tnp_P4
  SITE 271: note = Tnp_P5
MKGTTIGLDLAKRVFQVHAVDCDTGEIDRQTLKRSQVLKYFVNQPASVVAMEACGSAHYWARELVKLGHEVRLIAAQFVRPFVKGNKTDAADAQAIWEAAQRPGMRFVALKTEEQQAVLGLHRLRAQRVKMRCMHVHQMHGLMGEYGIALPRGWAVMLKQALEVLGGSEGNPIPALLRPGLIEQIQQIRALSEQIKTLERQIGAWQRRAEDCQRIAAIPGVGLLTATAAVATMGDAHAFRSGREFAAFVGLVPRQSGTGGRVKLLGISKRGDRYLRTLLIHGARTVLSWQRQPGRELDPWLKGLLARRAPNVVVVALANKMARMIWALLAHGRTFQRGYGRAMAPTAA

SEQ ID NO: 13507 - protein, 311 aa, unidentified
  source 1..311: note = protein_e2d4d5b
  REGION 6..155: note = RuvC_domain
  SITE 9: note = RuvC_P1
  SITE 53: note = RuvC_P2
  SITE 92: note = RuvC_P3
  SITE 94: note = RuvC_P4
  SITE 97: note = RuvC_P5
  REGION 188..272: note = Tnp_domain
  SITE 196: note = Tnp_P1
  SITE 225: note = Tnp_P2
  SITE 233: note = Tnp_P3
  SITE 234: note = Tnp_P4
  SITE 245: note = Tnp_P5
MTDHNIGVDISKSHLDVFRLEDGAAQRFDNSTTGFRALTKWLGNASVARVVFEPTGAYHKAFEVALGGVLPLVKVNPLQARRFAQAYGTRAKTDAVDARMLARMGVAFDLEPQAPQSKNIRVLRDLHVARAGLIKDQTRLRNRAQTQDMSVLKRQTKARLTLVERQIAELDVEISALIAAQENTTRTCDILRSMPGIGAVSAAAMLTLMPELGTLDRKQVASLAGLAPITRQSGQWQGKSFIGSGRKPLRDALYMPALVALRWNPDLKEKYNRLRAAGKPAKVAIVAVMRNLIEIANALIKANRKWTPKAA

SEQ ID NO: 13508 - protein, 313 aa, unidentified
  source 1..313: note = protein_f74dc26
  REGION 8..151: note = RuvC_domain
  SITE 11: note = RuvC_P1
  SITE 53: note = RuvC_P2
  SITE 93: note = RuvC_P3
  SITE 95: note = RuvC_P4
  SITE 98: note = RuvC_P5
  REGION 189..273: note = Tnp_domain
  SITE 197: note = Tnp_P1
  SITE 226: note = Tnp_P2
  SITE 234: note = Tnp_P3
  SITE 235: note = Tnp_P4
  SITE 246: note = Tnp_P5
MIISSRCVGIDVSKHHLDIFDEAVGVSERIDNATHAITQLVARWRCDALVVFEATGVYDLELREALHRAGIRFARINPARARDFARASGQLAKTDPIDAQMLAAFARAMKPATEQAATPARNALAKLAKRRDQLVAMRAQEKNRRSEAEDRAMAERIARLIEVLNYEIAEIETEINALVKAEPELADDAQLMRSVPGVGPVACMQLLTQMPELGRLGPKEVAALAGLAPFNVDSGAYRGKRKIGGGRKRVRDALYMAALNAIRRADRFKAFYDRLRQAGKPAKLALIAVARKLLTILNAMLRDRKIYKVAPST

SEQ ID NO: 13509 - protein, 320 aa, unidentified
  source 1..320: note = protein_83ef993
  REGION 8..163: note = RuvC_domain
  SITE 11: note = RuvC_P1
  SITE 56: note = RuvC_P2
  SITE 96: note = RuvC_P3
  SITE 98: note = RuvC_P4
  SITE 101: note = RuvC_P5
  REGION 195..279: note = Tnp_domain
  SITE 203: note = Tnp_P1
  SITE 232: note = Tnp_P2
  SITE 240: note = Tnp_P3
  SITE 241: note = Tnp_P4
  SITE 252: note = Tnp_P5
MTESSVVVGIDVAKAQLDAAVVGASAVPARFANEADGHTALLAWIQPLAPQLVVMEATGGYESLIVCALQAAGLAVAVVNPRQAHAFAKALGHLAKTDRIDAAALAELGRTLLARDDLARYLRPLASAEQRVLVALVTRRRQLVTMLHMERQRLALALPEVQASVQALIKAIQKQLRDVDRDLNRHVTEHFAELDRLLRSMGGIGPVASATLLAELPELGHLGRRQIAALVGVAPMAHDSGTLHRRRRIGGGRFELRRTLYMATLTATRHNPIIHAHYRRLVDAGKYKKVALVACMRKLITILNAMARNHTEFNASYTHA

SEQ ID NO: 13510 - protein, 361 aa, unidentified
  source 1..361: note = protein_9042200
  REGION 13..160: note = RuvC_domain
  SITE 16: note = RuvC_P1
  SITE 65: note = RuvC_P2
  SITE 101: note = RuvC_P3
  SITE 103: note = RuvC_P4
  SITE 106: note = RuvC_P5
  REGION 233..315: note = Tnp_domain
  SITE 238: note = Tnp_P1
  SITE 269: note = Tnp_P2
  SITE 277: note = Tnp_P3
  SITE 278: note = Tnp_P4
  SITE 289: note = Tnp_P5
MPTIADAGRLVTGGVDTHAGMHVAGVTDQVGRVMGTREFPATTEGYAAALAWMRGHGELAKVGVEGTGSYGAGLARYLAAEGIEVAEVMRPNRQARRRRGKSDAADAIAAALAALNGEASGQPKSGDGAVESIRALQVARRGAVKARTQAGNQLRGLIITAPQALREKLAGLSAPEQIKLAARFRPGDLTSPAEAVKAAMATVARRHQALAAEIAQLDTALETLVAHAAPAGFRDRTGVGTRVAATLLVTVGDNPARLRTEASFAALCGASPVDASSGKQRRHRLNRGGDRQANSALWRIVFTRMATDPRTQAYMIRRTTEGKTTREIVRCLKRYVAREVYKTLAGPPPARPATPRISMIT

SEQ ID NO: 13511 - protein, 323 aa, unidentified
  source 1..323: note = protein_39633b8
  REGION 4..152: note = RuvC_domain
  SITE 7: note = RuvC_P1
  SITE 57: note = RuvC_P2
  SITE 97: note = RuvC_P3
  SITE 99: note = RuvC_P4
  SITE 102: note = RuvC_P5
  REGION 197..283: note = Tnp_domain
  SITE 205: note = Tnp_P1
  SITE 234: note = Tnp_P2
  SITE 242: note = Tnp_P3
  SITE 243: note = Tnp_P4
  SITE 256: note = Tnp_P5
MFYLGVDVCKKTLDCMLFDTSTNKSKSKSIPNTSAGFVQLLEWLGKQKALDAHVVLEPTGVYHEPAALALSDAGLTLSLVNPAQARQFALGLGVKTKTDKADSMVLARYGAALKPQAWEPPSKSARRLKALLARRDAIADDIQREENRQGAVEFGESPEEVRASIIKSIDFLEAELQALDAIIRKHIDDDPDLRGNKKLLESIPGVGSRVSTHMTALFAAKSFTSAEQLAAYLGLVPVQWESGSSVRGKPRMSKAGPKHLRKLLYMPAVTARRWNPHISAMSDRLLAKGKTLMAVIGACMRKLAHLCYGVIKSGKPYERNFGM

SEQ ID NO: 13512 - protein, 223 aa, unidentified
  source 1..223: note = protein_13182e8
  REGION 1..42: note = RuvC_domain
  REGION 148..213: note = Tnp_domain
  SITE 156: note = Tnp_P1
  SITE 186: note = Tnp_P2
  SITE 194: note = Tnp_P3
  SITE 195: note = Tnp_P4
MIDQDPDLVRNLAVLTGYRADLVADRVRMINRLRDLMTSVFPSLEREFDYSSHKGALVLLTGYASPDRLRRVGQTRLAGWLRHRKVRDYANIAARAVDAAKAQSITLPGQDLTTTIVAELAASILALDERLKTLDEQIEQTFNQHPQATIIQSMPGFGPFLGAVLLVGAGDLRAFPSASHLAAAAGLVPVPNDSGRRTGNLHRPHRYSRPPYHTCSTCQRKPA

SEQ ID NO: 13513 - protein, 339 aa, unidentified
  source 1..339: note = protein_cd7b0f8
  REGION 7..149: note = RuvC_domain
  SITE 10: note = RuvC_P1
  SITE 53: note = RuvC_P2
  SITE 88: note = RuvC_P3
  SITE 90: note = RuvC_P4
  SITE 93: note = RuvC_P5
  REGION 212..298: note = Tnp_domain
  SITE 220: note = Tnp_P1
  SITE 250: note = Tnp_P2
  SITE 258: note = Tnp_P3
  SITE 259: note = Tnp_P4
  SITE 271: note = Tnp_P5
MREVSTIGLDLAKNVFQVHGVDAAGETVVRRVLRRARVLVYFAQLPPCLIGMEACATAYYWGRELGKLGHRVKLIPPAYAKAYVRRNKNDAADAAAICEAVSRPSMRFVAIKSEAQQAAAGIHKVREMLMKQRTMLINALRGLIAEFGIVVGVGTRHVGELTAILVDPEDDRIPALLKDGLRRMAEMLRGLERQLQGIDKQIVDWGRGNTTCRHLITAPGYGPILSSAMAAIVVNPAVFRSGRDFSASLGLVPRQDSTGGKVKLGPISKRGNGYLRRLLVNGAMSVLNSKRAKQDPWLLKLLANKERKVAAVALANKMARIGWALMMRQEDFRATSTAA

SEQ ID NO: 13514 - protein, 349 aa, unidentified
  source 1..349: note = protein_271a792
  REGION 12..153: note = RuvC_domain
  SITE 15: note = RuvC_P1
  SITE 58: note = RuvC_P2
  SITE 93: note = RuvC_P3
  SITE 95: note = RuvC_P4
  SITE 98: note = RuvC_P5
  REGION 217..303: note = Tnp_domain
  SITE 225: note = Tnp_P1
  SITE 255: note = Tnp_P2
  SITE 263: note = Tnp_P3
  SITE 264: note = Tnp_P4
  SITE 276: note = Tnp_P5
MIRNAPKNAAVFGIDLGKNVFHIVGTDAQGSVIQRVKFRRDTLLQFFERASPTIVGMEACPGSQWLARRLGAMGHTVRIMPAQFVKPYLKANKSDTLEAEAIAEAVTRPTMRFVHVKTTDQVDIQSLHRIRDQLVRQRTGLINQMRAFCLEYGVAIRQGAGVFKLDLPRVLADEENDLTPAIRRLLTDMFEDLRHLEARIKTITVEIEALVARDDVARRLTTIPGIGPLGASALLAAVGDGRQFRRARDLAAWLGLTPREHSTGGKQKLLGISKRGNTYVRRLLIHGARSCIIHLDRSRHRLGEWLDALQKRKHINKVTVALANKMARMAWVIITRPGALYERRDPALG

SEQ ID NO: 13515 - protein, 391 aa, unidentified
  source 1..391: note = protein_c3951a2
  REGION 6..159: note = RuvC_domain
  SITE 9: note = RuvC_P1
  SITE 57: note = RuvC_P2
  SITE 98: note = RuvC_P3
  SITE 100: note = RuvC_P4
  SITE 103: note = RuvC_P5
  REGION 221..306: note = Tnp_domain
  SITE 229: note = Tnp_P1
  SITE 259: note = Tnp_P2
  SITE 267: note = Tnp_P3
  SITE 268: note = Tnp_P4
  SITE 279: note = Tnp_P5
MTAVMIGVDPAKRSHAMAVLDGNENEQAMLQVRNDNDGYREMLRLAKRWKQRTWAVEGAGGVGVQLAQRLVADGETVVDVPPKLATRAPIFDTGRGRKNDPGDARTVAVVAVRTKGLRQVVLDDERLALRLMSERRRELVQSRTKTVNHLHQLLMELLPAGADQKLTATKTKALLATVRPRHAAGKARRQLAVDFLDDLVILDRKIKDINGRIKTAVEATGTTLTDIKGVGITTAAVVLGEVGDVRRFPSKHHFASYTGTAPIEVSSGEVERHRLSRAGNRKLNSALHHAAMSHKHTDPAGIAYYGRKLADGKGKKGALRCMKRRLSDAVFRALVQDQAKTEAAGREGHSGATFQSSASDPTPMVSPSDKSLTRPAAADATPSRTRVKRAS

SEQ ID NO: 13516 - protein, 275 aa, unidentified
  source 1..275: note = protein_dda75f4
  REGION 1..39: note = RuvC_domain
  REGION 145..231: note = Tnp_domain
  SITE 153: note = Tnp_P1
  SITE 183: note = Tnp_P2
  SITE 191: note = Tnp_P3
  SITE 192: note = Tnp_P4
  SITE 204: note = Tnp_P5
MPAQLAADLALLTAHRSDLVADRVRMINRLRDVLTGVFPALERAFDFSSHKGALVLLTGYQTPAALRRRGRARLTAWLAGRSVRGADTVAATALEAAQAQQTSLPGEDVAAQIVADLAAQIPALDDRLKRVDQQIRETFRSHPQAEIIESLPGMGPILGAEFVVAAGDLTAYTDAGHLASAAGLVPVPRDSGRRTGNLHRPQRYSRRLRRVFYMSAQTSIIRDGPNRDFYLKKRAEGCKHVQAVIALARRRASVLWALLRDERVFTPTPPATQAA

SEQ ID NO: 13517 - protein, 324 aa, unidentified
  source 1..324: note = protein_50f9cf8
  REGION 5..158: note = RuvC_domain
  SITE 8: note = RuvC_P1
  SITE 58: note = RuvC_P2
  SITE 98: note = RuvC_P3
  SITE 100: note = RuvC_P4
  SITE 103: note = RuvC_P5
  REGION 196..282: note = Tnp_domain
  SITE 204: note = Tnp_P1
  SITE 234: note = Tnp_P2
  SITE 242: note = Tnp_P3
  SITE 243: note = Tnp_P4
  SITE 255: note = Tnp_P5
MTRVVGIDIAKHTFDIATLQANGKFRTKAKLANTQSGFELLQQWLNKHAEPKAWVVMEATGIYHEALAQWLHKRGYKVCVLNPAQTARYAGSQLQRVKTDKVDAKLIADYGLRHLDKLRSWEPEKPEIRRLRALVKRLRDLQELEQIEQNRLDVTHDAKAVALIESMLKHIRQQIQDTLDAIKKHFDDNDDLKGQRDLLTSIDGIADKTAALLLAELGDIRRFKSTRSVTAFAGLNPKLQESGKLKGHVCISRMGSASLRAGLYLPAVVSMTHNAAIRAMADRMRAKGKAGKQIVCAAMRKLLCIAYGVLKSGLPFDSKLAIAN

SEQ ID NO: 13518 - protein, 414 aa, unidentified
  source 1..414: note = protein_8f94aad
  REGION 4..165: note = RuvC_domain
  SITE 7: note = RuvC_P1
  SITE 62: note = RuvC_P2
  SITE 102: note = RuvC_P3
  SITE 104: note = RuvC_P4
  SITE 107: note = RuvC_P5
  REGION 273..359: note = Tnp_domain
  SITE 281: note = Tnp_P1
  SITE 312: note = Tnp_P2
  SITE 320: note = Tnp_P3
  SITE 321: note = Tnp_P4
MLLVGDDWAEDHHDVELMDPTGRVLARARLPEGVVGIAGLHAMIAEQVGEDADDGDVEVVIGIETDRGPWVAALIAAGYTVFAINPLQVARYRERHSVSGAKSDPADAHTIADMVRTDAHQLRPVAGDTAEAEAVKVVARAHKQLIMERTRHVLRWRHALREYFPAALKAFDRLEAADTLELLTRAPDPAAAAALTQAQIRAALKRARRRNIDAKAADIQAVLRTEQLGREDVITAAYAATTRSAAAVIGTLNEQITIMEGQVEAHFGRHPDAEIIVSQPGLGPILGARVLAEFGDDPHRYATAKGRKNYAGTSPITRASGKRKIVAARYVHNDRLIDALMAQAFAALKASPGARAYYDRQRARGVDHNPALRQVANRLVGILHGCLKTRTHYDEQTAWAAHQTDRPQKTATAA

SEQ ID NO: 13519 - protein, 344 aa, unidentified
  source 1..344: note = protein_e2b3f38
  REGION 4..157: note = RuvC_domain
  SITE 7: note = RuvC_P1
  SITE 55: note = RuvC_P2
  SITE 96: note = RuvC_P3
  SITE 98: note = RuvC_P4
  SITE 101: note = RuvC_P5
  REGION 219..304: note = Tnp_domain
  SITE 227: note = Tnp_P1
  SITE 257: note = Tnp_P2
  SITE 265: note = Tnp_P3
  SITE 266: note = Tnp_P4
  SITE 277: note = Tnp_P5
MIIIGIDPHKSSITAAAIDSSGCQLAVRRFVVNAGTARQLLAWAAQWPERRFAIEGANGLGRGTAQILVAHGEAVVDVPSTLAMKVRVLSTGGGRKSDPADAFAVALTGLRQKKLRVVVAEDQTTILRLLAERREDLGHERARLLNRLHRLLRELLPGGVDPGLSADKAAAVLRTIRPATATDAVRRELTKELLADLRRIDSSMKSNEAQTRTVLDAANTTLQELPGIGVVLAAKLLGHVGDITRFPSASHFASYTGTAPLEASSGNHNRHRLNTGGNRQLNSVLHTMAVCQSRDPGPGRDYYLKKISEGKTPREARRALKRRLSNVLYRQILHDHHHAEKTAA

SEQ ID NO: 13520 - protein, 358 aa, unidentified
  source 1..358: note = protein_b90331d
  REGION 12..165: note = RuvC_domain
  SITE 15: note = RuvC_P1
  SITE 67: note = RuvC_P2
  SITE 103: note = RuvC_P3
  SITE 105: note = RuvC_P4
  SITE 108: note = RuvC_P5
  REGION 232..317: note = Tnp_domain
  SITE 240: note = Tnp_P1
  SITE 270: note = Tnp_P2
  SITE 278: note = Tnp_P3
  SITE 279: note = Tnp_P4
  SITE 290: note = Tnp_P5
MSIVAHLYNFFIGVDTHARKHVYTIITNTGILVATGSFPTSRAGIKRALTWAGRWTKGDLDTLWVVEGTASYGAVLTGHIATTEYPVVEAGRMDAKARYGVGKSDELDSYRIAKSVLALHTDQLRWPRQGEGVRQGLRVLLAARDAMTTERTRMINSLTALVRTVDLGIDARNSLTDAQFVEISKWRSRKEDIGLATSRDEAVRLAKRVLDLDDDLQDNHDKLAELVEASPAAVLLAEPGIGTFTAAVFFTAWSHPGRVRNAAAFAALAGANPIPASSGNTQRHRLNRGGDRQLNRALHTVITNRMIHDQRTKDYVAQRFGEDPTKKSKRELKRKLKWYLARRVFKVLNGLETIPTSA

SEQ ID NO: 13521 - protein, 308 aa, unidentified
  source 1..308: note = protein_92a9cfd
  REGION 7..154: note = RuvC_domain
  SITE 53: note = RuvC_P2
  SITE 93: note = RuvC_P3
  SITE 95: note = RuvC_P4
  SITE 98: note = RuvC_P5
  REGION 189..273: note = Tnp_domain
  SITE 197: note = Tnp_P1
  SITE 226: note = Tnp_P2
  SITE 234: note = Tnp_P3
  SITE 235: note = Tnp_P4
  SITE 246: note = Tnp_P5
MIAQNYVGCDISKQWLDFFDETSGRLRRIDNQADTIAAYVAGLDPSRDFVVMEATGVHDRLLRHALAKAGVPFSRHNPAHTHHYSKSTRRRAKTDPLDARMLSDYGRRYQPDAEPAPREEGEQLQSLTGHRDQLVEMRATLKTQLSEAFEAIVITSLKDLIGSLDARIKALEGQIADIIRQAEDTARDYTLMVSVPGVSKVGAFSLLALLPELGKRSPKAIAALVGLAPFDNKSGKLSRRSQIQGGRSRVRRALYMAALTAIRTCERFKTFYTALATRSGSKKLAIIAVARKLLVVLNAIVRDKTAFA

SEQ ID NO: 13522 - protein, 398 aa, unidentified
  source 1..398: note = protein_45e6907
  REGION 10..164: note = RuvC_domain
  SITE 13: note = RuvC_P1
  SITE 61: note = RuvC_P2
  SITE 101: note = RuvC_P3
  SITE 103: note = RuvC_P4
  SITE 106: note = RuvC_P5
  REGION 271..356: note = Tnp_domain
  SITE 279: note = Tnp_P1
  SITE 308: note = Tnp_P2
  SITE 316: note = Tnp_P3
  SITE 317: note = Tnp_P4
  SITE 329: note = Tnp_P5
MNTTDIDIFLGLDVGKTDHWACAVTNDGKKIWNKTLPNDEAKLIVVYQNLTAQGTVLIVVDQPATIGALAVAVAQQLGIQVAYLPGLTMRRIADMYPGTAKTDEKDAFIIADAARTMPHTLRSLQLTDEEEAALGMLTGFDLDLARQITQTSNRIRGLFTQIHPPLERLLGPRLDYDAILEVLATWPTPAALKHAGTARIDAKLKKHGARRHTAWATAIRDALDEQSVTVVGTDAAGLVIPHMARQLISLHAQRADVANHLEAMVEAHPLYPVLTSMPGVAVRTAAIIIAEISGKTFASAAALASYAGLAPTTRQSGTSIKSERVSHSGNKRLKRALFLSAFASIRFDPTSREYYDRKRAQGKRHNQALIALAHRRLTVLFAMIRDGSLYDVPELKIA

SEQ ID NO: 13523 - protein, 340 aa, unidentified
  source 1..340: note = protein_1b4e15a
  REGION 6..147: note = RuvC_domain
  SITE 9: note = RuvC_P1
  SITE 52: note = RuvC_P2
  SITE 87: note = RuvC_P3
  SITE 89: note = RuvC_P4
  SITE 92: note = RuvC_P5
  REGION 211..300: note = Tnp_domain
  SITE 219: note = Tnp_P1
  SITE 250: note = Tnp_P2
  SITE 258: note = Tnp_P3
  SITE 259: note = Tnp_P4
  SITE 271: note = Tnp_P5
MKCTTYGVDIAKSVMQVYWVDGESGEIGQRAIKRSQLSAFFARRPVGRMVIEACGSGHHWARTLAELGHEVRLIHARHVRPYVRGNKNDVSDAQAIWSAAHAPGLRWVPIKSEEQQAVLSLHRARAQWVKVRTQTVNALRGLLYEFGVVLPGGRRAGVKAIGVHRAEIDDQLPAPMRELVDGQLQMLANVEQRIKALEVQLERLEGQMSSAQRVRRIPGVGPLGATALAAVLGEDGRGFRNGREFAACLGLVPRHAGTGGKVRIGHLSKRGDPYIRTLLMHGARSVIFHAKERSPWLEQMLARRPLNVVVAALANKMARTAWASVAHDRDYQAGGLASAA

SEQ ID NO: 13524 - protein, 399 aa, unidentified
  source 1..399: note = protein_f8df5d9
  REGION 4..160: note = RuvC_domain
  SITE 7: note = RuvC_P1
  SITE 57: note = RuvC_P2
  SITE 97: note = RuvC_P3
  SITE 99: note = RuvC_P4
  SITE 102: note = RuvC_P5
  REGION 274..362: note = Tnp_domain
  SITE 282: note = Tnp_P1
  SITE 312: note = Tnp_P2
  SITE 320: note = Tnp_P3
  SITE 321: note = Tnp_P4
  SITE 334: note = Tnp_P5
MISVGIDISKGKSTACAIKPYGKVVVSPFEFQHAETDLKSLCNMFRRMNDEVRIVMEATGIYHLPVATYLIEHGMFVSVVNPYEMKQYRTRGLRKVKTDRADSMMIARYGIDYWYSLKEFQVSQDVYAELRILSRQYRHHMQLRISALLGLTHLLDYTMPGIKRELKSWNEDNGKDKLGDFVDKYWHYDNITKMSESKFIEHYCKWTEKKGYHQNQSKAAKIYSMAKEGIPTLPANQTTKMLVHEAVEVLRRVNETLNTILARMKELAKSLPEYPVVRKMGGVGETLAPRLIADIGDVRRFHNSKALIAFAGIDAPPYQSGQFVGTERHISKRGSSAIRKTGYEVMRSLKSHKEPEDSAVYHFILKKEAEGKPKKVAKIAGLNKFLRIYYARVQEVYSE

SEQ ID NO: 13525 - protein, 357 aa, unidentified
  source 1..357: note = protein_a546a01
  REGION 6..162: note = RuvC_domain
  SITE 9: note = RuvC_P1
  SITE 59: note = RuvC_P2
  SITE 99: note = RuvC_P3
  SITE 101: note = RuvC_P4
  SITE 104: note = RuvC_P5
  REGION 276..357: note = Tnp_domain
  SITE 284: note = Tnp_P1
  SITE 314: note = Tnp_P2
  SITE 322: note = Tnp_P3
  SITE 323: note = Tnp_P4
  SITE 336: note = Tnp_P5
MTRISAGVDVSKNRSTVCIIDQDGKVIMRPFLVWHSTEELDFLADTLKRLNGEVRVIMESTSIYQYPIALHLKEKGIFISIVNAYKVKKFANTDFRGGKTDKKDSRTIASYGISYWYKLLEWQIPKDTYFNLDLLNRTYMNAKKHRQIILQELQHYIDCAMPGMDKELHSLNLNTKKDFMLDFVEKFWHRDEIVNMTEAEFTEVFTAWAKEKGYRPGKGKAAKIYAIAKSCIPYYPANPTVKTILQCIVDKLSGVNRTLVTIVTQMIEEAKKLPEYQIVREMPGVGDPLAARFFGSAGDIRRFKNSKALVAYAGIDSPPDESGDLSSTHRHITKKGSKVFRDTGYEIMMALRSQKRT

SEQ ID NO: 13526 - protein, 340 aa, unidentified
  source 1..340: note = protein_17ac832
  REGION 6..164: note = RuvC_domain
  SITE 9: note = RuvC_P1
  SITE 65: note = RuvC_P2
  SITE 103: note = RuvC_P3
  SITE 105: note = RuvC_P4
  SITE 108: note = RuvC_P5
  REGION 210..297: note = Tnp_domain
  SITE 217: note = Tnp_P1
  SITE 248: note = Tnp_P2
  SITE 256: note = Tnp_P3
  SITE 257: note = Tnp_P4
  SITE 270: note = Tnp_P5
MIKFFIGIDFSKKTFDATIIERNKLDDKGIHCTFTNSLSGMKRFLSWVAGHTYMATSDDLLFCAEDTGLYSRVISDALSESGYFIWLESALRIKRSLGISRGKNDKKDSRDIAVYASRYQDKATRYVVPDERLEAIKALFMRRRFLKEQLRALKCRNKEMQPILKRNKLLGKSFRSDDRLGEAYRKEITSIEKEIRELINSSKELKQTFLILTSMKGIALVNATALIVYTANFKKFDYDARRIASFWGVAPFGQASRTSLHVTPHVSHYADKYLKSLLTEAVLCAMKFCPIIKSYAEKLLARGKHPNIVKNNAKNKMLHILVAMVRDGKVFQDTNERKIA

SEQ ID NO: 13527 - protein, 359 aa, unidentified
  source 1..359: note = protein_1c2d134
  REGION 13..160: note = RuvC_domain
  SITE 16: note = RuvC_P1
  SITE 65: note = RuvC_P2
  SITE 101: note = RuvC_P3
  SITE 103: note = RuvC_P4
  SITE 106: note = RuvC_P5
  REGION 234..317: note = Tnp_domain
  SITE 239: note = Tnp_P1
  SITE 270: note = Tnp_P2
  SITE 278: note = Tnp_P3
  SITE 279: note = Tnp_P4
  SITE 290: note = Tnp_P5
MEQKNKPARHVVGGVDTHKDLHVAAVVDDYDRVLETRSFPTTRNGYRLMLAWMRTFGELQRVGVECTGSYGAGLLRYMQAAGVEVLEVTTPDRHDRRRRGKNDDLDAQAAAHAAFAKRRTVTPRSRDGMVESLRVLKACRKTAVNARRIALQLIQNTIIAAPDVLRDQLRRMTRMQLVRLLAAWRPDLTAYRDVEAAYRITLKSLGRRYLELHDEIADLDMMIAAIVEDLAPDLVERNSIGHNSAAQLLLTAGDNPERLKSEASFAALCGVSPVPASSGKTTRHRLNRGGDRLANSALHIIAIGRLRTDDKTKQYVARRMAAGHSKLDAIRALKRYIAREVFGIIMRRQKQINQTRIVA

SEQ ID NO: 13528 - protein, 343 aa, unidentified
  source 1..343: note = protein_6137b78
  REGION 6..147: note = RuvC_domain
  SITE 9: note = RuvC_P1
  SITE 52: note = RuvC_P2
  SITE 87: note = RuvC_P3
  SITE 89: note = RuvC_P4
  SITE 92: note = RuvC_P5
  REGION 210..295: note = Tnp_domain
  SITE 218: note = Tnp_P1
  SITE 248: note = Tnp_P2
  SITE 256: note = Tnp_P3
  SITE 257: note = Tnp_P4
  SITE 269: note = Tnp_P5
MKVTTIGVDLAKSVFQVHGVDERGYVVVRKQLRRDQVAVFFANLPACLVGMEACGSAHHWARKLQGFGHCVRLISPQFVKPYVKGNKNDAADAEAICEAVARPNMRFVPIKTVEQQAVLSVHRVRQGFVKARTAQANQIRGLLTEFGLVLPQGITNVLRRVPQLIDGAADLPASMRQLIERLLENMKVLDRQVKELEAQIKAWHQGSELSRKLEKIPGIGPLAASALVASIADARSFKNGRQVAAWLGLVPKQDSSGGKPKLLGMSKRGDTYLRTLLIHGARSAIVAAQRKDKPNVWLSGLLARRHPNIAAVALANKNARTIWALLAHEREFRPDYVPRPVIA

SEQ ID NO: 13529 - protein, 274 aa, unidentified
  source 1..274: note = protein_51f1c33
  REGION 1..81: note = RuvC_domain
  SITE 21: note = RuvC_P3
  SITE 23: note = RuvC_P4
  SITE 26: note = RuvC_P5
  REGION 145..229: note = Tnp_domain
  SITE 153: note = Tnp_P1
  SITE 182: note = Tnp_P2
  SITE 190: note = Tnp_P3
  SITE 191: note = Tnp_P4
  SITE 203: note = Tnp_P5
MGYAVRLIPTQYVKALCKNQKNDANDALAICETSCRPGIHFVPVKTVEQQDIKALRSARQLVVEQRTALVNQIRALLVEQGIVIPAGIQQLRHALPDILEEGNNALSFVLRRLLHSLQEDMQRFDVRIYDMDKEIQAVSSQQSGYAHLLTIPGVGPLIAAAFVSEVNAEQFQNGRQLSAWCGLVPRQYSSGGKNRLSGMTKQGNRHLRTLIIHGARAVMRCCQKREDVLGGWLRKLIARCGFMKATVALANKLVRIIWRILKDDVDFMMKKAVN

SEQ ID NO: 13530 - protein, 407 aa, unidentified
  source 1..407: note = protein_f5dc253
  REGION 5..164: note = RuvC_domain
  SITE 8: note = RuvC_P1
  SITE 61: note = RuvC_P2
  SITE 101: note = RuvC_P3
  SITE 103: note = RuvC_P4
  SITE 106: note = RuvC_P5
  REGION 272..358: note = Tnp_domain
  SITE 280: note = Tnp_P1
  SITE 311: note = Tnp_P2
  SITE 319: note = Tnp_P3
  SITE 320: note = Tnp_P4
MRLFVGDDWAEDHHDVEVMDASGRRLGKARLPEGVAGMTRLHAMIGEQVGDDPDAVEVLVGIETDRGPWARALVAAGYQVFAINPLQASRYRERHAVSGAKSDAADAHVLADMVRTDSHQLRPVAGDTALVEAVRVVTRTHKTLIWERTRHTQRLRHALLDYFPAALAAFDDLDAADTLELLAKAPTPAEAARLTASQIAAALKRARRRDVAAKTAAIQAALRAEHLGQPDVVTTAYAASTRALVAVLAVLDEQVKTLEERVEAHFGRHPAAKTVLSQPGLGPVLGARVLAEFGDDPDRYATAKARKNYAGTSPITRASGKKRTVAARFVHNDRLVDALMTQAFCSLRVSPGARAYYDRQRERGANHNAALRQLANRLVGILHGCLKTGTLYDETTAWSHHVEQIAA

SEQ ID NO: 13531 - protein, 344 aa, unidentified
  source 1..344: note = protein_e7b8092
  REGION 14..156: note = RuvC_domain
  SITE 17: note = RuvC_P1
  SITE 60: note = RuvC_P2
  SITE 95: note = RuvC_P3
  SITE 97: note = RuvC_P4
  SITE 100: note = RuvC_P5
  REGION 218..304: note = Tnp_domain
  SITE 226: note = Tnp_P1
  SITE 256: note = Tnp_P2
  SITE 264: note = Tnp_P3
  SITE 265: note = Tnp_P4
  SITE 277: note = Tnp_P5
MGKIITDFSSVTTVGLDLAKHVFQVHAVDAYGRVIVTKALERKDVFSFFAGLPHCLIGLEACGSAHHWARELIRLGHDARLMPPAYVKPYLRRQKNDAADAAAICEAVTRPSMRFVAVRGLENQAALMHHKARELLVAQRTQLLNALRGHLAEIGIIAAQGPNNARALAALVTNSKEAIPGCVREALVPLVRQLHALDHEIGGSDQTIKAMANADATARRLMSIPGLGPVTASALAASVPDVSAFSGPREFAAFLGLTPRQHSSGGKERLGRISKLGNRYLRKLLVVGAHAGLYHRKRHTDALRTWTNRLLETKPLKLVAVALANKLARIVFGIMRGKTTYNAA

SEQ ID NO: 13532 - protein, 388 aa, unidentified
  source 1..388: note = protein_959617d
  REGION 6..159: note = RuvC_domain
  SITE 9: note = RuvC_P1
  SITE 57: note = RuvC_P2
  SITE 98: note = RuvC_P3
  SITE 100: note = RuvC_P4
  SITE 103: note = RuvC_P5
  REGION 221..306: note = Tnp_domain
  SITE 229: note = Tnp_P1
  SITE 259: note = Tnp_P2
  SITE 267: note = Tnp_P3
  SITE 268: note = Tnp_P4
  SITE 279: note = Tnp_P5
MGRVIIGMDPHKRSATIEIIDERETVLAAGRFGTDRDGYKTMLAMGRRHPQRVWAVEGCNGIGRHIAQRLVADGEAVVDVPAKLSARVRVFATGQGRKTDPVDAHSVAVAALRTKGLRQVAVDDATVALRLLVDRRDGLGHARTDLLNRIHKLLLELLPGGAKKFLSAAQARAMLNTIRPRDLVGRTRRRLASELIGELVQVDKKIKAANKELTELVEQTGSSLQDLNGIGPSGAARLIGDVGDIHRFASRGHFASWNGTAPLDASSGDQQRHRLSRAGNRRINRVLHIMAVVQLRHDTPGRAYYRRRRAEGKTPMEAMRSLKRRLSDVVYRQMIRDSKAATGTSPGGHLGATLQSSAADPNPEVSTSEQSLPGPAEVQPRTQCPDAA

SEQ ID NO: 13533 - protein, 408 aa, unidentified
  source 1..408: note = protein_1eceaab
  REGION 4..165: note = RuvC_domain
  SITE 7: note = RuvC_P1
  SITE 62: note = RuvC_P2
  SITE 102: note = RuvC_P3
  SITE 104: note = RuvC_P4
  SITE 107: note = RuvC_P5
  REGION 273..359: note = Tnp_domain
  SITE 281: note = Tnp_P1
  SITE 312: note = Tnp_P2
  SITE 320: note = Tnp_P3
  SITE 321: note = Tnp_P4
MLFVGDDWAEDHHDVELMDASGRTLARARLPEGVAGIARLHAMIGARLGEDVEDVAGLVQVGIETDRGPWVQALVAAGYTVLAVNPLQAARYRERLGVSGAKSDAADAHMLADMVRTDAHQLRPVAGDSAEAEAVKVVTRMHKTLIWERTRASQRLRHALREYFPAALAAFEDLDAADTLELLAKAPDPASAARLSIAQISAALQRARRRDIAAKAATIQAVLRTEHLGQPAVVTAAYAVSVRALVAVLGTLNEQVKALQGQVEAHFGRHPDAEIILSQPGLGAVLGARVLAEFGDARDRYASAKARKNYAGTSPITRASGKKKTVAARFVHNDRLVDALMTQAFASLRNSPGARAYYDRQRNRGADYNAALRQLANRLVGILHGCLKTGTPYDETTAWSHHFTEAAA

SEQ ID NO: 13534 - protein, 342 aa, unidentified
  source 1..342: note = protein_c6f12b2
  REGION 6..148: note = RuvC_domain
  SITE 9: note = RuvC_P1
  SITE 52: note = RuvC_P2
  SITE 87: note = RuvC_P3
  SITE 89: note = RuvC_P4
  SITE 92: note = RuvC_P5
  REGION 211..297: note = Tnp_domain
  SITE 219: note = Tnp_P1
  SITE 249: note = Tnp_P2
  SITE 257: note = Tnp_P3
  SITE 258: note = Tnp_P4
  SITE 270: note = Tnp_P5
MEISTIGLDLAKSIFQVHAISTAGETVVRKALRRSQVLPFFTKLPPCRVGIEACGTSHHWARELTRLGHDVRLMPPAYVKPYVKRGKTDANDAEAICEAVTRPTMRFVPVKSPEQQAALALHRTRDLLVKQRTQLVNMIRGLLAEFGIEMARGLHHALELAKRLVDGRAPDVPELAQRVVTGLAQQIGNLQVQLAALEKELLAWHRSNELSQRLATIPGVGIISATALAASVTEPERFRSGRQFAASLGLTPLQNSSGGKQRMGRISRMGDRYLRRLLVVGMTSLIRRARTAPASVDPRIPAMLQRRPARVVTVAAANRTARVAWAIMTRGGTYRRPTLAAA

SEQ ID NO: 13535 - protein, 350 aa, unidentified
  source 1..350: note = protein_1ba8093
  REGION 13..154: note = RuvC_domain
  SITE 16: note = RuvC_P1
  SITE 59: note = RuvC_P2
  SITE 94: note = RuvC_P3
  SITE 96: note = RuvC_P4
  SITE 99: note = RuvC_P5
  REGION 218..304: note = Tnp_domain
  SITE 226: note = Tnp_P1
  SITE 256: note = Tnp_P2
  SITE 264: note = Tnp_P3
  SITE 265: note = Tnp_P4
  SITE 277: note = Tnp_P5
MPRTPQPRDAAVFGIDLGKNIFHVVSTDASGVVAQRLKFRRDKVLAFFETVAPALIGMEACPGSQWLARKLQAIGHTVRIMPTQFVKPYLKTNKSDTLDAEAIAEAVTRPSMRFVPVKSVDQVDIQGLHRIRDQMIRQRTALINQMRAFCLEYGVAMRQGAGQFKADFPRVVADEDNDLSPSMRRLLSDLFEDLQRLELRIKTETSGIEALVARDDVARRLTTIPGIGPLGASALLAAVGDGRQFRRARDLAAWLGLTPREYSTGGKQKLLGISKRGNTYVRRLLIHGARACLIHLDKSRHRLGDWLVSLQGRMHINKVVVALANKMARMAWVIITRPGATYQRQGPAFG

SEQ ID NO: 13536 - protein, 320 aa, unidentified
  source 1..320: note = protein_81bf5ca
  REGION 10..160: note = RuvC_domain
  SITE 13: note = RuvC_P1
  SITE 55: note = RuvC_P2
  SITE 95: note = RuvC_P3
  SITE 97: note = RuvC_P4
  SITE 100: note = RuvC_P5
  REGION 190..274: note = Tnp_domain
  SITE 198: note = Tnp_P1
  SITE 227: note = Tnp_P2
  SITE 235: note = Tnp_P3
  SITE 236: note = Tnp_P4
  SITE 248: note = Tnp_P5
MTILDSQVVVGVDVAKDEIVIYRSDLEKTLNIANKRSTLKQWLKTLPAHSAIALEATNIYHLDTTEMAHEMGHDVYVIDGSRLNKYRDGIGMRAKTDTLDAELLARYLSRESDRLRIWNPPPKAYTQMKSLLRRRAQLVRACVALKQSWKNESLLKEHFNQLLAAIAQFEKMIQKTLKEIAEEGGIDDQVKRCQAIEGVGLLTATAAATAFMRGEFANSDEYVAFLGMDPRVRQSGQKDQKRRLSKRGDSEFRRLFHNSAMAASRSPTWKPYYERYLARGLKGTQALVILARKLARVMFALMKNQTEYKPNSMFGCSPQT

SEQ ID NO: 13537 - protein, 323 aa, unidentified
  source 1..323: note = protein_b3fee31
  REGION 5..155: note = RuvC_domain
  SITE 8: note = RuvC_P1
  SITE 58: note = RuvC_P2
  SITE 98: note = RuvC_P3
  SITE 100: note = RuvC_P4
  SITE 103: note = RuvC_P5
  REGION 195..281: note = Tnp_domain
  SITE 203: note = Tnp_P1
  SITE 233: note = Tnp_P2
  SITE 241: note = Tnp_P3
  SITE 242: note = Tnp_P4
  SITE 254: note = Tnp_P5
MPSVIGIDIAKRTFDIATQQPNGKYRTKAKLPNEVAGFEALQQWLLKHANAQAWIVMEATGAYHEALAIWFHDKGYQVCVLNPAQVAYYARSQLQRVKSDKVDAKLIAEYGERHQGDLRAWQPEPRAVRRLKALVRRLEDLQEIQQMERNRLDLADASVQASIYSVLHHVERQIGETLRAIRDHIDDDPDLRNKRDLLTSIDSIGERSAALLLAELGDPLRFASSRAITAYAGLNPRLQESGSYKGQTRISRTGSSRLRAGLYMPAVCSLTHNPAISALRERLSAKGKSGKQIVCAAMRKLLHIAYGVLKSGQRFDPQLALAR

SEQ ID NO: 13538 - protein, 328 aa, unidentified
  source 1..328: note = protein_76d62d9
  REGION 5..159: note = RuvC_domain
  SITE 8: note = RuvC_P1
  SITE 62: note = RuvC_P2
  SITE 102: note = RuvC_P3
  SITE 104: note = RuvC_P4
  SITE 107: note = RuvC_P5
  REGION 204..288: note = Tnp_domain
  SITE 212: note = Tnp_P1
  SITE 241: note = Tnp_P2
  SITE 249: note = Tnp_P3
  SITE 250: note = Tnp_P4
  SITE 262: note = Tnp_P5
MKAFTGIDVSKDKLDVCWLRDVTTNKKKTKVLKNTSKGHEALAEWLLKNTGLTPQEIVITVEPTGVYSEPLMYFLHAKGFILQQANPGKAYKYAQALDLVHKTDKSDSIMLARYGHDRQYSLSHWQPEAKEFRELRAMLRRLEALEKDLQREENRFEAADFSSASKRVIESLENMISALKEEINKLTEEIDDHIDRHPDLGKNRDFLLTIKGVGPVISRIMVSLFASKDFKDAKQLSAYLGLIPKMKESGKRAGKTTLSKEGPGYIREKLYMAAVVASQHNPDIRAQKVRLLAKGKTKMEALGAAMRKLAQICFGVVKTQTNYQPQVT

SEQ ID NO: 13539 - protein, 339 aa, unidentified
  source 1..339: note = protein_7d4cd7b
  REGION 6..147: note = RuvC_domain
  SITE 9: note = RuvC_P1
  SITE 52: note = RuvC_P2
  SITE 87: note = RuvC_P3
  SITE 89: note = RuvC_P4
  SITE 92: note = RuvC_P5
  REGION 210..297: note = Tnp_domain
  SITE 218: note = Tnp_P1
  SITE 248: note = Tnp_P2
  SITE 256: note = Tnp_P3
  SITE 257: note = Tnp_P4
  SITE 269: note = Tnp_P5
MKLTTVGVDIAKNVMQLHYIDAETGEIVNKPVKRAAFLEHFSNRSPCLIGMEACGGSQHWARKLIVMGHQVKLMPGKFVKAFVMGNKNDAADARAIWMAAQQPGKSVAVKTETQQAVLGLHRMREQLVKFRTMQINSLRGLLTEYGEVMGKGRAALDKAIPAVLEQLVDRLPKILIDTLREQWNGLTELDKQIAEIERRLQAWMKEDKACKAIAAIPGVGLLTATAAIATMGDAKTFRSGREFAAWIGLVPRQTGSGGKIQLLGISKRGDTYLRKLLIHGARSVLFHAKEPGPWLEQIRTRRPMNVAIVAQANKMARTIWAILAHDRPYEKGYVSVKPA

SEQ ID NO: 13540 - protein, 389 aa, unidentified
  source 1..389: note = protein_17f6ef4
  REGION 4..163: note = RuvC_domain
  SITE 7: note = RuvC_P1
  SITE 60: note = RuvC_P2
  SITE 101: note = RuvC_P3
  SITE 103: note = RuvC_P4
  SITE 106: note = RuvC_P5
  REGION 266..353: note = Tnp_domain
  SITE 274: note = Tnp_P1
  SITE 304: note = Tnp_P2
  SITE 312: note = Tnp_P3
  SITE 313: note = Tnp_P4
  SITE 326: note = Tnp_P5
MIYVGIDVAKDKHDCFITNSDSEILFNVFTIPNNHEGFNTLFQRIESVSDDFTNVKVGLEATGHYSYNLLGFLLGKGLATFVINPLHTNLYRKSLSLRKTKTDKVDAHTIASMIMSDVDLKSYSDTSYHNEELKSLTRYRFDKVKERAKLKSSVSRLVCILFPELEKLVPSLHMVSVYALLSEFPSASAVASAHLTRLSNLLSDASKGRYGKDTAVIFRDAARSSIGSYMPAKSLELKHTIKLISKLDAEIKEIEKEIQSIMDKINSPILTIPGISYRMGAMIIAEIGDFSRFDSPDKILAYAGMSPSTYQSGQLDNCYSRMEKRGSRYLRYALYNATKYVCHWDSTFAAYLAKKRAEGKHYNVALSHAAKKLVRVIYHLEKSKQAYIK

SEQ ID NO: 13541 - protein, 403 aa, unidentified
  source 1..403: note = protein_09e72c7
  REGION 8..159: note = RuvC_domain
  SITE 11: note = RuvC_P1
  SITE 59: note = RuvC_P2
  SITE 96: note = RuvC_P3
  SITE 98: note = RuvC_P4
  SITE 101: note = RuvC_P5
  REGION 267..353: note = Tnp_domain
  SITE 275: note = Tnp_P1
  SITE 306: note = Tnp_P2
  SITE 314: note = Tnp_P3
  SITE 315: note = Tnp_P4
MTSFSYFAGIDWASQSHSVCVLDAAGRVELRLEIAHSQEGIERLIRQLKSFTGIVIAIERPSGLLVDALVEAGLRVVPIHPNVLKASRSRYRGAGKSDPGDAYMLADVLRTDGHRFRALEPQSDEIRALRALVRTRDDLVAERVALANQLRSLLESFWPGAAEIFSEIDSPIALAFVARYPTPDSTTRLGEKRLSGFLAQHSYCGRRPVGVLLERLRVAPTGRAGELEAEAKGELVRSLASILERLVAELAKLTARIEHTVASLADGQIVMSFPRSGRICAAQILAELGSVRERFPNEAQLAAEAGVTPVTYESGKHRSVVFRFACNHRLRRAITCLADQTRHAHPWAADVYQRARSRGCDHPHAIRILARAWVRVLWRAWFTRTPYQPHLHRSAAAFTATTG

SEQ ID NO: 13542 - protein, 413 aa, unidentified
  source 1..413: note = protein_8767d0d
  REGION 5..167: note = RuvC_domain
  SITE 8: note = RuvC_P1
  SITE 64: note = RuvC_P2
  SITE 104: note = RuvC_P3
  SITE 106: note = RuvC_P4
  SITE 109: note = RuvC_P5
  REGION 275..361: note = Tnp_domain
  SITE 283: note = Tnp_P1
  SITE 314: note = Tnp_P2
  SITE 322: note = Tnp_P3
  SITE 323: note = Tnp_P4
MRLFIGDDWAEDHHDVELMGGSGRRLGKARLPEGMAGMARLHAMIGEALGEDAADAGPGQVVIGIETGRGPWVQALIAAGYTVFAVNPLQAAQYRKRHAVSGAKSDAADAHVLADMVRTDSHQLRTVAGDSAQAEAVKVVARAHKTLIWERTRHMQRLRHALRDYFPAALEAFSDLTAPDTLELLARAPDPASAAKLTATQITAALKRARRRRIPARAAAIQAALRGKHLGQPAVVTGAYAATVRAAAAVLTVLNEQITVMEGQVEAYFGPHPDAEIITSQPGLGPVLGARVLAEFGDGPAQYANAKSRKNYAGTSPVTRASGKKKTVMARYIHNDRLIDALTRQAFAALNASPGARAYYDQQRARGASHYAALRQLANRLTGILHGCLKTRTPYNEATAWPQHAAKTGNAAA

SEQ ID NO: 13543 - protein, 372 aa, unidentified
  source 1..372: note = protein_b757708
  REGION 4..144: note = RuvC_domain
  SITE 7: note = RuvC_P1
  SITE 50: note = RuvC_P2
  SITE 85: note = RuvC_P3
  SITE 87: note = RuvC_P4
  SITE 90: note = RuvC_P5
  REGION 209..295: note = Tnp_domain
  SITE 217: note = Tnp_P1
  SITE 247: note = Tnp_P2
  SITE 255: note = Tnp_P3
  SITE 256: note = Tnp_P4
  SITE 268: note = Tnp_P5
MNVIGIDLGKMVFHLVTMDQDGKITDRKKLSRPQLLKHLATAPCSLVGMEASCGAHHLGRLFREQGHEVRLIPAQFVRPFVKSQKNDYVDAEAISEAVQRPRMRFVPIKTEDQLDLQAIHRVRDRLVLRRTSLVNQLRAFFLERGIALRTGRPRLRRMLPALLADAEQHLSPRMYRLLCLVAEEWRSVEEEIEQLDQEIETIASQDSACQRLITVPGIGVLIATAIVAAIGNGAAFSRGREFAAWLGLIPKQCSTGGKPKLLGISKTGNEYLRRLLIHGGRSIQHRVARDRHAFGPWLTELEARANTNVVAVAMANKLARIAWVVLNRQQEYRRGLPAAEQAGFGPEIPNEPVSSAGQGSPINSLRSALTGA

SEQ ID NO: 13544 - protein, 311 aa, unidentified
  source 1..311: note = protein_f12ba84
  REGION 5..152: note = RuvC_domain
  SITE 8: note = RuvC_P1
  SITE 55: note = RuvC_P2
  SITE 92: note = RuvC_P3
  SITE 94: note = RuvC_P4
  SITE 97: note = RuvC_P5
  REGION 212..299: note = Tnp_domain
  SITE 220: note = Tnp_P1
  SITE 250: note = Tnp_P2
  SITE 258: note = Tnp_P3
  SITE 259: note = Tnp_P4
  SITE 271: note = Tnp_P5
MEHHVGIDVSLELSSLCVLDATGKVIREAKVASEPEALVAFLRGLGVTIVRVGLEAGPLSQWLYDGLHKAGFEAVLLETRHVKAALSAMTIKTDRRDARGIAQLLRMGWYRPVHRKSMSSQEIRALLGARKQMQIKAMDLEQTLRGLLRGFGLKVGDVSRGRLAGRIRELVSGHVMLERIAEPMLTARDALWSEFAKLHREVLIIVKEDQVCRRLMTVPGVGAVVSLTYRAGVGDPDRFTKSKSVGAFFGLTPKRYQSGETDVTGSITKVGDAAVRTALHDAANALLTRATRFSTLKRWAEVVKVPAAKPL

SEQ ID NO: 13545 - protein, 345 aa, unidentified
  source 1..345: note = protein_0244740
  REGION 6..148: note = RuvC_domain
  SITE 9: note = RuvC_P1
  SITE 52: note = RuvC_P2
  SITE 87: note = RuvC_P3
  SITE 89: note = RuvC_P4
  SITE 92: note = RuvC_P5
  REGION 211..297: note = Tnp_domain
  SITE 219: note = Tnp_P1
  SITE 249: note = Tnp_P2
  SITE 257: note = Tnp_P3
  SITE 258: note = Tnp_P4
  SITE 270: note = Tnp_P5
MEITTLGLDLAKNVFQVHGISSTGEVVVRRALRRAQVIPFFSKLAPCLVGVEACGTSHHWARELTALGHEVRLMPPAYVKPYVKRGKTDASDAEAICEAVQRPTMRFVPIKSVEQQAALALHRTRDLLVRQRTQLVNMIRGVLGEFGIELPKGITYALAFVRRVVAGEAPDIPQLAAKAIGALAEQALETQARIRQLERELLAWHRSSELSQRIATVPGVGLLGATALAATATDPTQFRSGRQFAAWLGLTPLQNCSGGKERLGRISKMGDKYLRRLLINGMTSIVARNAHRPGVADARVTALLARKPLRVATVAMANHAARAIWAIMARGEIYRAPAPPEPVAA

SEQ ID NO: 13546 - protein, 340 aa, unidentified
  source 1..340: note = protein_e6da401
  REGION 6..148: note = RuvC_domain
  SITE 9: note = RuvC_P1
  SITE 52: note = RuvC_P2
  SITE 87: note = RuvC_P3
  SITE 89: note = RuvC_P4
  SITE 92: note = RuvC_P5
  REGION 210..300: note = Tnp_domain
  SITE 218: note = Tnp_P1
  SITE 248: note = Tnp_P2
  SITE 256: note = Tnp_P3
  SITE 257: note = Tnp_P4
  SITE 269: note = Tnp_P5
MTITTIGLDLAKSVFQAHGIDESGATVLVKKLHRKQMLPFFSKLPPCLIAVEACGTAHHWARTLAAMGHEVRLIPPSYVKAYVKRGKSDALDAEAICEAVQRPTMRFVPVKTIEQQGILMTHRARSLLVRQRTMLANALRAHLAELGHVANPGIGNLAKLAEQVMADRNALPSYARTALEILIRQIMAVSAEIAELDQQLAAWHTESEASRRLAAIPGLGIITATAIAATVTDAEQFSSGRQFAAWLGLTPQQHSTGGKTRLGGISKQGDRYLRRLLVVGATAVMRHVKDKPTPMADWIRKLSEKKPFRLVSVALANKLARIAWVVLTRKEAYHPYANLT

SEQ ID NO: 13547 - protein, 320 aa, unidentified
  source 1..320: note = protein_7adf34f
  REGION 10..153: note = RuvC_domain
  SITE 13: note = RuvC_P1
  SITE 57: note = RuvC_P2
  SITE 97: note = RuvC_P3
  SITE 99: note = RuvC_P4
  SITE 102: note = RuvC_P5
  REGION 193..278: note = Tnp_domain
  SITE 201: note = Tnp_P1
  SITE 231: note = Tnp_P2
  SITE 239: note = Tnp_P3
  SITE 240: note = Tnp_P4
  SITE 251: note = Tnp_P5
MSTATPTLYVGIDVSKATLDVAILPSGRHFVVSNDERGIDELLGGFEDPRPTLVVLEASGGYERPVAAAIAACGIAVAVVNPRQARDFARATGRLAKTDALDAKVLARFAEAVRPEPRALPDEEAREFSAILARRRQIIQMMSAEKNRLGAATSVAVARRIGAHVRWLEKELGRTDRDLDEAIEGSPAFKENEALLRSVPGVGPVFLCRTLMAELPELGSLPPRELSALVGVAPLNRDSGTLRGRRAVWGGRARVREALYMGALVATRYNPCIKEFYERLVAAGKPKKVALVACMRKLLVILNALLRDRTPWRCPHALNS

SEQ ID NO: 13548 - protein, 354 aa, unidentified
  source 1..354: note = protein_c287f91
  REGION 4..161: note = RuvC_domain
  SITE 7: note = RuvC_P1
  SITE 59: note = RuvC_P2
  SITE 100: note = RuvC_P3
  SITE 102: note = RuvC_P4
  SITE 105: note = RuvC_P5
  REGION 222..307: note = Tnp_domain
  SITE 230: note = Tnp_P1
  SITE 260: note = Tnp_P2
  SITE 268: note = Tnp_P3
  SITE 269: note = Tnp_P4
  SITE 280: note = Tnp_P5
MVTVGIDPHKRVHVAVAVDARGNRIGKPLTVKNDGLLIIALLTWIRSITDSKSVTWAVEDGRGFARRLADGLLLAGQEVVGVPSRLTAAHRKLHAATGSKSDVIDAIAAAHAAIATPDLTRHHIDERIRELRVLTDYRSDLVKRRTTMINQLKAQSHLWLDHTPGDLARTKALVTLTARLDAVQVGAHVRHVIVEMISELAEVNQRIHDLDAMIKELVSPLAPNLLAITGISHNSAAVLLAEIGDITRFSSSAKLARYTGCAPIPVYSSDEERHRLHRGGNRRLNSVLYTAAIVQKRFSPAAQHLIARQEPVKGARGARRILKRHLVDVIYRAMHTDQASWQHQITRYQPLALT

SEQ ID NO: 13549 - protein, 343 aa, unidentified
  source 1..343: note = protein_2609c74
  REGION 6..150: note = RuvC_domain
  SITE 9: note = RuvC_P1
  SITE 54: note = RuvC_P2
  SITE 89: note = RuvC_P3
  SITE 91: note = RuvC_P4
  SITE 94: note = RuvC_P5
  REGION 213..300: note = Tnp_domain
  SITE 221: note = Tnp_P1
  SITE 251: note = Tnp_P2
  SITE 259: note = Tnp_P3
  SITE 260: note = Tnp_P4
  SITE 272: note = Tnp_P5
MTIIRVGVDIAKSVFHVHGADRQGKTCWQGKYSRSKWLDAISKKVPANAEIGMEACASSHHWARELQKRGYRVRLIAAQFVKPYVKSNKNDRVDAEAICEAMSRPNMRFVTPKSVEQQDIQAMHRVREELIAQRTAKANQIRGLVGEYGIIAPVGIHQLRHNLPCWLEDTENGLTYPFRLLLSDLAEDLRYLDDRIQKLDEQILESVQHDPVAKHLMTLRGVGPLIASALIAALGDGKAFKKGRDFAASLGLTPKQHSTGGKDRLLGISKRGDSYLRKLLVHGARAVMRHMTNKDDGLSRWLKGLVSRKHHNVAVVALANKTARMAWALVYNNVDYNESLAAA

SEQ ID NO: 13550 - protein, 399 aa, unidentified
  source 1..399: note = protein_1f1629f
  REGION 5..163: note = RuvC_domain
  SITE 8: note = RuvC_P1
  SITE 62: note = RuvC_P2
  SITE 102: note = RuvC_P3
  SITE 104: note = RuvC_P4
  SITE 107: note = RuvC_P5
  REGION 273..362: note = Tnp_domain
  SITE 281: note = Tnp_P1
  SITE 311: note = Tnp_P2
  SITE 319: note = Tnp_P3
  SITE 320: note = Tnp_P4
  SITE 333: note = Tnp_P5
MNPVIGLDVAKEESQVQAYLRRKKPYKKSFKFKHNIQGLEKFYTFYQEVEQASGKYPTVILESTGHYHEPVVQFLERNQMVYFLVNPIVSFGAKQTGMRKVKTDAVDAAHLCELYYKEDLVPFRKKSVQILNLRHLTRQHDALTDSYVEVKLKFQTVLDQLFPEYKKVFGSIYSTVSLQQLLDFPTPATVLAADIDELAKGIKAHCHTRSYTWAVQKAEQLQEAALRDPFQQALYQSPVISLKMYIKLLLEYQEHLSTLKEEIDAQAKEVDDYDLIRSIPGIGDKIAATILSEIGGIDRFHHPKKLVAFSGIDPRVHESGKFKATQNRMTKRGSSKLRQALYTAVLCGLRKSRNTKLIAFYQNKRDEGKPHKVVMGACMNKLIHWIFYMLKRKEAFVEA

SEQ ID NO: 13551 - protein, 291 aa, unidentified
  source 1..291: note = protein_982f06a
  REGION 7..157: note = RuvC_domain
  SITE 10: note = RuvC_P1
  SITE 54: note = RuvC_P2
  SITE 94: note = RuvC_P3
  SITE 96: note = RuvC_P4
  SITE 99: note = RuvC_P5
  REGION 189..244: note = Tnp_domain
  SITE 197: note = Tnp_P1
  SITE 226: note = Tnp_P2
MAMLSFCGVDVSKDRLDVVVLPEGWFFSVSNDTAGWAELVARLRPLTVSAIGLEPSGGYERGIIRALLAAGLSVRRINPNKLRQFARARGVLAKNDRLDARLIAEYVAIMSTRVVQRDAAVERLAEIVTMRRQLCDEHVAAENQAAHLEDAMLRRLSKRRQMRLEADIRLLDKRLAEMVAANVALAQRYELLTSMPGVGPVLAFTLIALLPELGKMSRKQIAALVGLAMTSTAASSRDTAASTVVGCRSVMSSTWPPSAQADTVPPSKPSTIASPTPTKNPRSSSWPSCEK

SEQ ID NO: 13552 - protein, 276 aa, unidentified
  source 1..276: note = protein_5dde4a4
  REGION 7..149: note = RuvC_domain
  SITE 10: note = RuvC_P1
  SITE 53: note = RuvC_P2
  SITE 88: note = RuvC_P3
  SITE 90: note = RuvC_P4
  SITE 93: note = RuvC_P5
  REGION 212..276: note = Tnp_domain
  SITE 220: note = Tnp_P1
  SITE 250: note = Tnp_P2
  SITE 258: note = Tnp_P3
  SITE 259: note = Tnp_P4
  SITE 271: note = Tnp_P5
MEEISTVGLDIAKSVFQVHGIDTAGEVVVRRQLKRCQVLQFFAAMKPCLIGMEACATAHHWARELTKLRHEVRLMPPRYVKPYVKRNKNDAADAEAICEAVTRPTMRFVPVKTVDQQSVLMLHRTRQLFIRQRTTLINSIRAHLAEFGIVAGIGRNGVEVLLELIAKGDEDIVPAEARVCLLALATQLELVKRQILEMDRRVLAWHRASSLSRNLEAIPGVGPLISTALVASIPDPKVFRSGRDLSAWIGLVPKQNSTGGKEKLGSISKAGNRYLR

SEQ ID NO: 13553 - protein, 403 aa, unidentified
  source 1..403: note = protein_cba9bf5
  REGION 6..158: note = RuvC_domain
  SITE 9: note = RuvC_P1
  SITE 57: note = RuvC_P2
  SITE 95: note = RuvC_P3
  SITE 97: note = RuvC_P4
  SITE 100: note = RuvC_P5
  REGION 266..352: note = Tnp_domain
  SITE 274: note = Tnp_P1
  SITE 305: note = Tnp_P2
  SITE 313: note = Tnp_P3
  SITE 314: note = Tnp_P4
  SITE 325: note = Tnp_P5
MSEVFAGLDWASRLHAVCVIDERGVVRLQCEATHDAAGLVDLSRRLHAAGAERIAIERPAGLIVDALVEAGFAVVPIHPNIVKATRPRYRSHGGKSDASDAYLLADLLRTDGHRFKSLTEQCDDIRALRALVRGRDELVDARIQLANQLRDLLESFWPGAASVFADVDSPIALDFIQRYPTPGSARSLGPKRMAAFCAQHAYSGRRSPDELLERLHAAAQIALGDMETRVKGELALALARILARLVEQIRLITSRIEHEVAALDDGRILMSFPRAGRVCAAQILAELGSVRERFDSEEHLAAEAGVTPVTYASGKAKSVAFRWACNHRLRRAITCLADNSRHASAWAAATYANARARGCRHPHAIRILARAWLRVIWRAWLDRKPYDPASHGGLQAMLKTAEG

SEQ ID NO: 13554 - protein, 392 aa, unidentified
  source 1..392: note = protein_b71d62b
  REGION 1..144: note = RuvC_domain
  SITE 43: note = RuvC_P2
  SITE 83: note = RuvC_P3
  SITE 85: note = RuvC_P4
  SITE 88: note = RuvC_P5
  REGION 254..353: note = Tnp_domain
  SITE 262: note = Tnp_P1
  SITE 292: note = Tnp_P2
  SITE 300: note = Tnp_P3
  SITE 301: note = Tnp_P4
  SITE 314: note = Tnp_P5
MDKKIPYKGSFKVAHTLEGLDTLHQFLKEVESVTGIRPPVVLESTGHYHTPVVQYFEDRGYLLIIVNPLISYRAKSSSLRKVKTDVIDANHLCQLYYKEELEPYKKRGIQLLNLRNLTRQHENITGIYVQTKLQFQAVLDQVFPEYRGVFGDLYSVVSLLTLLEYPTSEDVLAVSEETIATKIDELCKSRSSKWTNTKAKELIAAAVQNPFQKTLYQSHILTLEMYIEMLLEYQKHLSKLEDEIDALAKEIEEYKIIQSIPGIGEKIAATIFSEISEIDRFNHPKKLVAFAGIDPSIFESGRFKGTVNRITKRGSSRLRHALYMAVRCAIRDCRKKKTTDDIIPRNKRLRGFYEKKREEGKPYKVAVIACANKLLQWIYALLKNNTTFQDLA

SEQ ID NO: 13555 - protein, 342 aa, unidentified
  source 1..342: note = protein_63195ee
  REGION 5..158: note = RuvC_domain
  SITE 8: note = RuvC_P1
  SITE 56: note = RuvC_P2
  SITE 97: note = RuvC_P3
  SITE 99: note = RuvC_P4
  SITE 102: note = RuvC_P5
  REGION 220..306: note = Tnp_domain
  SITE 228: note = Tnp_P1
  SITE 258: note = Tnp_P2
  SITE 266: note = Tnp_P3
  SITE 267: note = Tnp_P4
  SITE 278: note = Tnp_P5
MSVIIGVDPHKATHTAVAIDSSEAELARARVRATRKQAQQLLRWAEPLGKRTWAVESAGGLGYLLSQQLVAAGETVLDVPSTLAARIRVLGSGRSDKNDPNDALSVAVAALRTPALREVVAADHAQVLRLLAKRNIDVGSHRTRVVCRLHNVLMELVPGGIAKELNASDAVAVLERIEPTTPIELAKRDMALEILADVQRLDAQLKQSHRRIRTAVAASQTTVTELFGVGPVLACYLVGFTGDITRFATRDAYAGYNGTAPVERSSGGRVVHRVSQRGNRRLNHALHLAAICQIRQPHSDGRTYFERKLAEGRTKKDAIRSLKRHISNAVYRKLVEDQHRGG

SEQ ID NO: 13556 - protein, 316 aa, unidentified
  source 1..316: note = protein_98bd658
  REGION 6..141: note = RuvC_domain
  SITE 9: note = RuvC_P1
  SITE 49: note = RuvC_P2
  SITE 86: note = RuvC_P3
  SITE 88: note = RuvC_P4
  SITE 91: note = RuvC_P5
  REGION 193..279: note = Tnp_domain
  SITE 201: note = Tnp_P1
  SITE 231: note = Tnp_P2
  SITE 239: note = Tnp_P3
  SITE 240: note = Tnp_P4
  SITE 252: note = Tnp_P5
MEAPVAGIDVSKDKLIVYFQGKFYEFPNDKQGFEEVKKVLPRGCKVGIESTGVYHVNLAKCLMNEYEVRVINPLVIKKFKDFRGKKSDKNDAKKLAELVVNMGSEFTLSDARELTSQWDFIVKSIVRVKNRLRRDLILLGYSDSLSRKNLSEVLEGGDNIILSEVKFLLDELERLEARKREVEKRLEDVVPRDSLIFTIPGIGKTLGLIILARVGDVRRFDDKRKFVAYCGLDPVVESSGGSVVSRGISRRGDAVLRRAFYLAALTAIKVNPVIKRFYEEHKGRLKGKKLIVACARKLAVITWAVLYYNKPFDASE

SEQ ID NO: 13557 - protein, 341 aa, unidentified
  source 1..341: note = protein_fb5a1e3
  REGION 6..147: note = RuvC_domain
  SITE 9: note = RuvC_P1
  SITE 52: note = RuvC_P2
  SITE 87: note = RuvC_P3
  SITE 89: note = RuvC_P4
  SITE 92: note = RuvC_P5
  REGION 211..299: note = Tnp_domain
  SITE 219: note = Tnp_P1
  SITE 249: note = Tnp_P2
  SITE 257: note = Tnp_P3
  SITE 258: note = Tnp_P4
  SITE 270: note = Tnp_P5
MQITTIGIDLAKDVFQIHGVDGQGKIVLRKQLRRGQMASFFVNLPACLIGMEACGSAHYWARKLQEQGHVVRLMAPQFVKPYVKTNKHDAADAEAICEAVRRPNMRFVPIKNVEQQAILSVHRVRQGLIKARTAQANQIRGLLSEFGLVLPKGIRVVYQRVPALLDQTGDELPGLFRELVLRLLAHLKDLDRQVSELEQQINAWHRSNALSQKLEKIPGIGPMTASALVASVGDAKSFSNGRQLAAWLGLVPKQHATGGKTNLLGISKRGDTYLRTLLIHGGRAVIRSAEQKPPHANSWLARILARRHKNVVTVALANRNARIVWALLAHDREFHADYAPA

SEQ ID NO: 13558 - protein, 400 aa, unidentified
  source 1..400: note = protein_a83bc7b
  REGION 7..163: note = RuvC_domain
  SITE 10: note = RuvC_P1
  SITE 61: note = RuvC_P2
  SITE 101: note = RuvC_P3
  SITE 103: note = RuvC_P4
  SITE 106: note = RuvC_P5
  REGION 269..356: note = Tnp_domain
  SITE 277: note = Tnp_P1
  SITE 308: note = Tnp_P2
  SITE 316: note = Tnp_P3
  SITE 317: note = Tnp_P4
  SITE 329: note = Tnp_P5
MAQPLWAGVDAGKSDHYCVVIDGDGKRLLSRRVTNDEATLQELIADIAALADGGEITWAIDLNAGGAALLIALLIAAEQLLLYIPGRTVHHASGGYRGEGKTDAKDAAVIADQARMRRDLAPLRAGDDIAVELRILTSRRTDLVADRTRAINRLRAQLLEYFPALERAFDYSASKAALILLTGYQTPDGLRRAGAARLAAWLRKRKARNADGIAAAAIEAANAQHTVVPGQQLAAAMVARLAVEVMTLDTEIGDTDAMIEERFRRHRHAEIILSMPGFGIILGAEFLAATGGDIAAFGNPDRLAAVAGLAPVPRDSGRISGNLKRPRRYNRRLLRACYLAAHIAIRTDPASRAYYNRKRTEGKRHTQAVLALARRRLNVLWAMLRDHKTYQPTAPNAAAA

SEQ ID NO: 13559 - protein, 403 aa, unidentified
  source 1..403: note = protein_e072046
  REGION 4..160: note = RuvC_domain
  SITE 7: note = RuvC_P1
  SITE 57: note = RuvC_P2
  SITE 97: note = RuvC_P3
  SITE 99: note = RuvC_P4
  SITE 102: note = RuvC_P5
  REGION 274..361: note = Tnp_domain
  SITE 282: note = Tnp_P1
  SITE 312: note = Tnp_P2
  SITE 320: note = Tnp_P3
  SITE 321: note = Tnp_P4
  SITE 334: note = Tnp_P5
MNAVGIDVSKGKSTVAIFQPGEQVVLAPRDFHHTQSDINSLIGIIKGLDGETKVCMEHTGRYYEPMASWLSDAGIFVSAVNPILIKAFGDDSLRAPKTDKADAKKIARYTLDRWSKLRQYGHMDETRNQLKTMNRQFGFYMDQKTAMKNNLIALLDQTYPGANTFFDSPARSDGSQKWVDFVYTYWHVDCVRGKSLQAFTEHYKNWCKRKSYNFSSTKAKAVYDASTDLIAVFPKNANTKMLIHQAVEMLNQASKTVESLRTEMDSTAATLPEYPVVMAMNGVGATLGPQLIAEIGDVTRFAKRGSLTAFAGVDPGKNESGQYAQKSVPTSKKGSPHLRKTLFQIMDSLIQRSPADDPVYAFMDKKRAQGKPYYVYMTAGANKFLRIYYGRVNEYLSNLSESE

SEQ ID NO: 13560 - protein, 416 aa, unidentified
  source 1..416: note = protein_9448d44
  REGION 12..167: note = RuvC_domain
  SITE 15: note = RuvC_P1
  SITE 64: note = RuvC_P2
  SITE 104: note = RuvC_P3
  SITE 106: note = RuvC_P4
  SITE 109: note = RuvC_P5
  REGION 276..361: note = Tnp_domain
  SITE 283: note = Tnp_P1
  SITE 314: note = Tnp_P2
  SITE 322: note = Tnp_P3
  SITE 323: note = Tnp_P4
  SITE 334: note = Tnp_P5
MSFALPEALFFTGIDWAAETHAVCVMNAAGKIAAEFTIEHSADGIATLTRRLAKYGDPGEVPVAIERPDGRLVDLLLEAGHPVVPVKPNAIKTWRDGEVLSGAKSDAGDAAVIAEYLRLRAHKLKAAAPYSDQTKALRTVVRTRGDLVEMRVAATNQLSALLDAHWPGAKAIFADVESPISLEFLTRYPTPAAAAHLGEKRMAAFCVKHGYCGRRTAVELLTRLRSAPAGATGEALTEALRDAVLAAVSVLTALNASVKALDRSAAAHLGEHPDSVIFTSLPRSGQVNAAQVLAEWGDARQAYEHPDSVAALAGVTPVTRESGKHRAVHFRWASGKRFRVAITTFAGNSRHASPWAAEIYNHARASGKDHPHAVRILARAWIRVIWRCWLDGVPYDPALHGAAATLTKQTAEQIAA

SEQ ID NO: 13561 - protein, 397 aa, unidentified
  source 1..397: note = protein_6e11f3c
  REGION 10..164: note = RuvC_domain
  SITE 13: note = RuvC_P1
  SITE 61: note = RuvC_P2
  SITE 101: note = RuvC_P3
  SITE 103: note = RuvC_P4
  SITE 106: note = RuvC_P5
  REGION 271..356: note = Tnp_domain
  SITE 279: note = Tnp_P1
  SITE 309: note = Tnp_P2
  SITE 317: note = Tnp_P3
  SITE 318: note = Tnp_P4
  SITE 330: note = Tnp_P5
MSRPDYAVYIGLDVGKQTHHACALNVDGTRLHDKPLPQDESSLRGLLTKLGTHGRLLVVVDQPATIGALPVAVARAMGVDVAYLPGLAMRRIADLHPGNAKTDARDAYVIAEAARSMPHALRRVDVGDDTLADLEVIVGFDDDLAGQVTAQANRIRGLLTQVNPALERVLGPRIQHPAVLELLTRFGGPTGLRAAGRRRLLAVAKPRAPRSYQRLVDDIQTALTEQTVTVPGTRAAELVLPKLATGLARLLHDRADLGTQLEDMLDTHPLAAVLTSMPGIGVRTGARILLEVGDGSSFPTSGHLAAYAGLAPVTRRSGTSIRGEHPARGGNKHLKRAMFLAAFAALHDPTSRAYYDRKRGQGKKHNAALICLARRRCDVMYAMLRDGTLYQQKTPAA

SEQ ID NO: 13562 - protein, 391 aa, unidentified
  source 1..391: note = protein_9f76184
  REGION 4..163: note = RuvC_domain
  SITE 7: note = RuvC_P1
  SITE 60: note = RuvC_P2
  SITE 101: note = RuvC_P3
  SITE 103: note = RuvC_P4
  SITE 106: note = RuvC_P5
  REGION 266..353: note = Tnp_domain
  SITE 274: note = Tnp_P1
  SITE 304: note = Tnp_P2
  SITE 312: note = Tnp_P3
  SITE 313: note = Tnp_P4
  SITE 326: note = Tnp_P5
MISVGIDVAKDKHDCFIIDSEGEVLADVFTVPNSMDGFHRLLQRIRDCSSPQDKIKVGLEATGHYSCNILGFLLDNGLPTYVLNPLHTNMYRKSLSLRKTKTDRVDARTIAAMLLSDVGLKPYTDTAYHNEELKSLTRYRFDKVKERGKLKQSIARLVCILFPELEKLVPTLHIVSVYALLVEFPGAKQIAQAHLTRLKTLLHDASRGRYGRDLAVNIRDTARASVGSEMPAKSLELRHTIRLIRELDAEIAEIESAIRHIMDELHSPITTIPGIGTRMGAMILAEAGDFSRFDSPDKLLAYAGLSPSTYQSGQLRNCYAHMEKRGSRYLRYAIFNAAKYVCLWDPTFSAYLAKKRAEGKHYNVAISHAAKKLVRLIYALEKSGEPYRLAA

SEQ ID NO: 13563 - protein, 327 aa, unidentified
  source 1..327: note = protein_e477358
  REGION 1..86: note = RuvC_domain
  SITE 23: note = RuvC_P3
  SITE 25: note = RuvC_P4
  SITE 28: note = RuvC_P5
  REGION 200..287: note = Tnp_domain
  SITE 208: note = Tnp_P1
  SITE 238: note = Tnp_P2
  SITE 246: note = Tnp_P3
  SITE 247: note = Tnp_P4
  SITE 260: note = Tnp_P5
MFVSAVNPHLIKNFGNNSIRKVKSDPADAKKIARYTLDNWIELRQYSSMDNTRTQLKTLNSQFSFFMKQKVAAKANLIALLDNTYPGVNKLFDSPVRDDGSEKWVDYAYSFWHVDCVRKIGLKTFTERYQAFCKKHHYNFQPAKPAELFLASKDLIAVFPKEASYKLLIQQSIQQLNLASSHVEELRSKMNELASTLPEYATVMGMYGVGKTFGPQLIAEIGDISNFSHREALTAFAGVDPGVDQSGTHNSKSNKASKCGSNRLRKTLFQIMSTLLQTAPEDDKVYQFLVKKRAEGKPYYVYMTAGANKFLRIYYGKVKECIRNLEQ

SEQ ID NO: 13564 - protein, 341 aa, unidentified
  source 1..341: note = protein_51499f5
  REGION 6..148: note = RuvC_domain
  SITE 9: note = RuvC_P1
  SITE 52: note = RuvC_P2
  SITE 87: note = RuvC_P3
  SITE 89: note = RuvC_P4
  SITE 92: note = RuvC_P5
  REGION 211..295: note = Tnp_domain
  SITE 219: note = Tnp_P1
  SITE 249: note = Tnp_P2
  SITE 257: note = Tnp_P3
  SITE 258: note = Tnp_P4
  SITE 270: note = Tnp_P5
MEATIIGIDIAKNVFQFHGAGADGTTVFRRKLRRSAVLDFLKALPHCLVAMEACASSHYWGREIERLGHEVRLIPPQYVKPFVKRQKNDAADAQAIVEAATRPEMHFVAVKSAEQQGQSMLLKTRELFLMQRTQMINALRGHLAEYGIVAAQGASNVNKLEAFVLERDKDDLPQTMRNMCIRLFDHLRILDWQIDDLTSRIETAARNDETARRLMTIPGIGPMCAMAITTLAPPRESFRKGRDFAAWAGLTPKQHSTGGKTRLGRTSKMGQRDIRRLLILGAMSVIQSVERKGGAPEGSWLDRMLKRKPKLLVAVALANKLARMAWALMKNEDVYRVQLAA

SEQ ID NO: 13565 - protein, 339 aa, unidentified
  source 1..339: note = protein_0cfd883
  REGION 6..147: note = RuvC_domain
  SITE 9: note = RuvC_P1
  SITE 52: note = RuvC_P2
  SITE 87: note = RuvC_P3
  SITE 89: note = RuvC_P4
  SITE 92: note = RuvC_P5
  REGION 210..297: note = Tnp_domain
  SITE 218: note = Tnp_P1
  SITE 248: note = Tnp_P2
  SITE 256: note = Tnp_P3
  SITE 257: note = Tnp_P4
  SITE 269: note = Tnp_P5
MKYTPVGVDIAKHVIQVHFIDEHTGEVIDKQLRRQDFLMFFCNREPCLIGIEACGGSQHWARELTKLGHKVRLLQARFVKAFVTGNKNDVMDARAIWMAVQQPCKEIAVKTEEQQSFLVLHRTRMQLVKFRTAQINSLHGMLLEFGETIHKGRAAMDREFPEALERLKERLPPYVISVLDNQFNKLNELDLQIDDIEKQLTSVARQNETCRRLLDIPGVGPLIATAAVAIMGEASAFKSGREFAAYVGLVPRQTGSGGKIRLPGISKRGDKYLRTLFIHGARAAALLTKEPGPWITELKKRRPASVAIVAMANKLARTVWAIAAHGRKYNKNHVSIRPY

SEQ ID NO: 13566 - protein, 344 aa, unidentified
  source 1..344: note = protein_7f864aa
  REGION 7..149: note = RuvC_domain
  SITE 10: note = RuvC_P1
  SITE 53: note = RuvC_P2
  SITE 88: note = RuvC_P3
  SITE 90: note = RuvC_P4
  SITE 93: note = RuvC_P5
  REGION 211..297: note = Tnp_domain
  SITE 219: note = Tnp_P1
  SITE 249: note = Tnp_P2
  SITE 257: note = Tnp_P3
  SITE 258: note = Tnp_P4
  SITE 270: note = Tnp_P5
MSSIKVLGIDLGKSSFHVIGRDYSDNQVIRKKFSRSALIHYLHQLSPCTIAFEACGGAHWLGRQCESMGHKVKLIPPQYVKPFVKSNKNDFIDADAICEASTRPNMRFVSVKSEQAQIISAIHKTRHGYIKDRTACMSRIGALLLEFGVALPTGHSVMKQLFSWLAQQRQPLPPLLMQELVELHEHYLLLNANIEKQDKKLKQLVEGDPVAQLLKTIPGIGDMTASLCVANISSATDFKNGRNMAAWLGLVPAQYSTGGKPKLLGISKRGNKELRTLFIHAARAVMSRPEKTGKIYGEWLMNLRATKPFNVATVALANKLARIAWAVMKTKQAFSDKALAPGLQ

SEQ ID NO: 13567 - protein, 394 aa, unidentified
  source 1..394: note = protein_5324f4e
  REGION 4..164: note = RuvC_domain
  SITE 7: note = RuvC_P1
  SITE 59: note = RuvC_P2
  SITE 99: note = RuvC_P3
  SITE 101: note = RuvC_P4
  SITE 104: note = RuvC_P5
  REGION 267..354: note = Tnp_domain
  SITE 275: note = Tnp_P1
  SITE 305: note = Tnp_P2
  SITE 313: note = Tnp_P3
  SITE 314: note = Tnp_P4
  SITE 327: note = Tnp_P5
MKLVGIDIGKNKHFFCVMDKDTGELSVNPVSFSNNKEGFDFLINKLKPYSKESILIGMEDTGHYHFALLKYLLNDGFTVALINPKTTDFTRKMQGGITKNDELDTLTICDVLDTPERKKQYRITKVNSFDLYEQKQLTRHHHHLKEELNVYTNRLQKCIDIVFPEFNSLFKSKYGSVYMNVLKTFGSAESIANTDIRTIRKCFDSNGRGRYISLTPEQLKECARSSIGISSVAEVIQIKHLISQIELINEQITEIDKKIEEFSVKNNSPILTIPGISHFSGTSILAELGDISNYKKPSQIIKFAGVAPVHYESSQFTAQHTAITKKGSKYLRKTLYQIILPVIHNNPVFKQYYELKISQGKGHRCAQGHCVRKLLRIIYHLLSTGKKFDPKLLR

SEQ ID NO: 13568 - protein, 444 aa, unidentified
  source 1..444: note = protein_74c43db
  REGION 40..201: note = RuvC_domain
  SITE 43: note = RuvC_P1
  SITE 98: note = RuvC_P2
  SITE 143: note = RuvC_P3
  SITE 145: note = RuvC_P4
  SITE 148: note = RuvC_P5
  REGION 317..404: note = Tnp_domain
  SITE 325: note = Tnp_P1
  SITE 355: note = Tnp_P2
  SITE 363: note = Tnp_P3
  SITE 364: note = Tnp_P4
  SITE 377: note = Tnp_P5
MCPNTARLYLEIVIRGYHAVTNLRPVNLNERRPLPMKLFVGIDVSSTDLETVMMSSENNEVVFQGNFINDINGASDIKRTVLKLVTTNHFDQIIIGMEATSIYSFHPSFFFKNDDDLNQYNTETVVINPKETKRYHDIFEENKNDKLDAFYIADYLRIGRYTVGIVKQENYLALQRLTRSRYELVKSSVRAKQHFIENLYYKVNKLVTTDKPKTNVFGSTMMDMLTEDLSTDDLANLSIEDLTDYLSKKGHGRFSDPKALASAIQKAVRGSYRLGKVMADSVDTVLSVYATEIKTFKKMIAELDHAIADLVQTIPEERILQSIPGIGPVYAAGILAEIGQINRFDDETKLASYAGLSWRQKQSGNYNSSTTPLIRSGDNYLRYYLVEAANHVKLQDDVFKDYYNRKYHEVSNTPHKRALVLTARKLIRVIFFLLQNHQIYEERR

SEQ ID NO: 13569 - protein, 403 aa, unidentified
  source 1..403: note = protein_169fdd6
  REGION 3..158: note = RuvC_domain
  SITE 6: note = RuvC_P1
  SITE 55: note = RuvC_P2
  SITE 95: note = RuvC_P3
  SITE 97: note = RuvC_P4
  SITE 100: note = RuvC_P5
  REGION 266..352: note = Tnp_domain
  SITE 274: note = Tnp_P1
  SITE 305: note = Tnp_P2
  SITE 313: note = Tnp_P3
  SITE 314: note = Tnp_P4
MFVGIDWASEEHAVCVLDGEGRAVDRFTIAHSADGFDRLTARLARHGEPAVVPVAIERPDGRLVDRLLEAGHPVVPVKTNAIKAWREAEVLSGAKSDPGDAEVIADYLRQRRGRLRELLPFSTETRALRAVVRSRTDLVEQRVAAANQLEAVLDAFWPGAKAVFADIWSPIALDFLERYPTPASAARLGEARMAAFCTKHGYSGRRSPAELVERLRAAPAGIEAGPENEARRDVVLAMVRVLRALVRAIKDLDRSVTAHLDEHPDAEIFRSLPRSGQINAAQMLAEWGDCREAFDSPEAVAALCGATPVTKKSGKHEAVHFRWACNKRFRNAMTTFADNSRRASPWAQAIYQAALDRGHDHPHAVRILARAWIRVIYRCWIDHTPYDPQRHGAITRMEQPAAA

SEQ ID NO: 13570 - protein, 406 aa, unidentified
  source 1..406: note = protein_95b76c8
  REGION 9..163: note = RuvC_domain
  SITE 12: note = RuvC_P1
  SITE 61: note = RuvC_P2
  SITE 101: note = RuvC_P3
  SITE 103: note = RuvC_P4
  SITE 106: note = RuvC_P5
  REGION 270..358: note = Tnp_domain
  SITE 278: note = Tnp_P1
  SITE 310: note = Tnp_P2
  SITE 318: note = Tnp_P3
  SITE 319: note = Tnp_P4
  SITE 331: note = Tnp_P5
MALRQKIWIGIDVGRIGHHVCVVDENGKVCWSGKLANDQRAIEAVIDRARKTGIESQWAIELTSPLAALLITVLLAAGESVVYVPGRMVATMTGVFRGEGKTDAKDAHVIADTARMRGDLQPVTAPDELVAELTQLSSYRSDLMGDWVRGVNQLRAMLGAIFPALEAAFDYSARSPLILVAGMCTPAEIGDAGIDGVTAHLTENGAWRKGIDAMAAAAVAAAGTQDIAVPGEATTAILIKRLAVKLLELDREIKDLDKQITARFREHPPAAIIELLPGMGPHLGTEFLVSTGGDAVAEFHTPGRLASYAGLVPVPRDSGRISGNLHRPKRYNRRLRRVFFMAALSSIKNEGPSRTFYQRKRTERLIHTQALLASARRLVDVLWALLRDNRPFDTKPPSITGVPAAA

SEQ ID NO: 13571 - protein, 405 aa, unidentified
  source 1..405: note = protein_ee1108b
  REGION 6..164: note = RuvC_domain
  SITE 9: note = RuvC_P1
  SITE 59: note = RuvC_P2
  SITE 101: note = RuvC_P3
  SITE 103: note = RuvC_P4
  SITE 106: note = RuvC_P5
  REGION 278..365: note = Tnp_domain
  SITE 286: note = Tnp_P1
  SITE 316: note = Tnp_P2
  SITE 324: note = Tnp_P3
  SITE 325: note = Tnp_P4
  SITE 338: note = Tnp_P5
MNMNAIGIDVSKRKSMVAILRPGGEVVAKPFEVSHLSKDLRSLIHRIRSLDGESRIVMECTGHYYETIAHELVSAGLFVSAVNPQLIRHYQDEDNSLRKVESDKADSLKIARYTLDRWSKLKQYGLMDELRNQLKTMNRQFGFYMKHKTAMKNNLIGLLDQTYPGVNTYFDSPAREDGSQKWVDFADCYWHADCVRKISVDAFVDHYQKWCHRKKYNFSKTKAEEIYETAKEPVSVLPKDVFTKRIIKQAVEQLNTASRTVEQLRSLMNETAAQLPEYSVVMAMKGVGPSLGPQLIAEIGDVSRFTHRNAITAFAGVDPGVNESGDYSQKSIHASKHGSPALRKTLFQVMDVLIKTKPQDDPVYLFMDKKRAQGKAYYVYMTAGANKFLRIYYGRVKEYLASLPQ

SEQ ID NO: 13572 - protein, 399 aa, unidentified
  source 1..399: note = protein_a6e9a85
  REGION 6..159: note = RuvC_domain
  SITE 9: note = RuvC_P1
  SITE 57: note = RuvC_P2
  SITE 98: note = RuvC_P3
  SITE 100: note = RuvC_P4
  SITE 103: note = RuvC_P5
  REGION 221..306: note = Tnp_domain
  SITE 229: note = Tnp_P1
  SITE 259: note = Tnp_P2
  SITE 267: note = Tnp_P3
  SITE 268: note = Tnp_P4
  SITE 279: note = Tnp_P5
MEHVIIGVDPHKLSATIEVVDQREQLLGSGRFATDQAGYAAMRTYAKIWPHRVWAVEGANGVGRPLAQRLLESGEQVVDVPAKLAARVRLFDTGHNRKTDAHDAHSIAIVAVRTTTLRVLQVDGELEALRMLADRREALTRRRVQTVDRLQALLAELLPGQAKRDITTGQARAMLATVRPRDIAGKTRRRIAAEELAELVAVEAKIKKATAELREMVLARGSRLMDLHGVGPVVAARILADVGDVARFADRNRFASWTGTAPLDASSGEQNRHRLSRAGNRRMNHMIHIAAVTQLRLDTDGRAYYRRKRAEGKKPLEAIRCLKRRISDAIYRQLMADTGRAADGGAGTGPGGHCGASQESSAVDLPPHIDTSDQPLPGPATTTLRPATPSGNPSLRSTA

SEQ ID NO: 13573 - protein, 341 aa, unidentified
  source 1..341: note = protein_f8d9b32
  REGION 6..148: note = RuvC_domain
  SITE 9: note = RuvC_P1
  SITE 52: note = RuvC_P2
  SITE 87: note = RuvC_P3
  SITE 89: note = RuvC_P4
  SITE 92: note = RuvC_P5
  REGION 209..295: note = Tnp_domain
  SITE 217: note = Tnp_P1
  SITE 247: note = Tnp_P2
  SITE 255: note = Tnp_P3
  SITE 256: note = Tnp_P4
  SITE 268: note = Tnp_P5
MKITTIGIDLAKTVFQIHGVDSHGKTVLRKKLDRSRMLEFFIKLEPCLIGMEACGSAHYWARKLVEMGHTVKLMAPQFVKPYVKTNKNDVADAEAICEAVSRPNMRFVPIKTELQQAVLSLHRVRQGFVRARTAQCNQIRGLLSEFGVIIAPGRTSIAKRLPEIMERTDLPGSFRHLLQRLYDQLKGLDQQIDEMDANIEQWHRESEVSRKLTEIPGIGPITATALLASIGDAKNFKNGRQLAAWLGLVPRQHSSGGKSVLLGISKRGDTYLRTLLIHGARAVIRFADSKPSNCWINKLLARKNKNVAAVALANKNARIVWVLLTQQEQRFRPDYVPAVAA

SEQ ID NO: 13574 - protein, 392 aa, unidentified
  source 1..392: note = protein_d7219a4
  REGION 4..162: note = RuvC_domain
  SITE 7: note = RuvC_P1
  SITE 61: note = RuvC_P2
  SITE 101: note = RuvC_P3
  SITE 103: note = RuvC_P4
  SITE 106: note = RuvC_P5
  REGION 267..354: note = Tnp_domain
  SITE 275: note = Tnp_P1
  SITE 305: note = Tnp_P2
  SITE 313: note = Tnp_P3
  SITE 314: note = Tnp_P4
  SITE 327: note = Tnp_P5
MYYIGIDIAKKRHEVCFLNEEGDVLDGNSFNISNTASGLDKLQTALNKYGLKPDNSVVGMEATGHYWLVLYSWLIEQDFHVKVINPIVTDAYRNMLIRKTKNDRIDAEVVARVLKMGEYQETSVLEDDTMALRQLCRYRLSLIQTTGDLKRKVIAFLDQVFPEYNTIFSDVFGMSSKELLKSYTTPEEIASVHTKKLANILAKASKGHFGKEKALEIKAVARQSIGITIATDAFAFQIRQLIEQIEFVERQVESLDREIAGYMETLDSPITTIPGIGPVYGATILAELGDINRFPSGKQIVSYAGLDASVHESGDFIGLQAHMSKRGSAYLRIAIFGAAFIASWADPELSAYYKRLRARGKHHFVAMGAVARKLCYIIYAVLTENRPFENRS

SEQ ID NO: 13575 - protein, 345 aa, unidentified
  source 1..345: note = protein_578684c
  REGION 6..146: note = RuvC_domain
  SITE 9: note = RuvC_P1
  SITE 51: note = RuvC_P2
  SITE 86: note = RuvC_P3
  SITE 88: note = RuvC_P4
  SITE 91: note = RuvC_P5
  REGION 210..301: note = Tnp_domain
  SITE 218: note = Tnp_P1
  SITE 250: note = Tnp_P2
  SITE 258: note = Tnp_P3
  SITE 259: note = Tnp_P4
  SITE 272: note = Tnp_P5
MHSTRVGVDLAKDVIQVCVYKRKKVQSNIEMTPEEFLCWLNTNKPVSIIFEACSTSNYWKQKAIQAGHDARLISAKLVSVVRQNQKTDKNDALAIVQAALLPDVTFIGGKTVEQQQLQCIKRLRELAIKHRDASQNQIVALLSELNLRISKSRGSIVRSLEGILEDASNGLSLECRAAISTAKEQFSSLVDAVKRYDDCLEKTASMHPDCKKLLKLEGVGTLNAINLYLALGCAEIGAFSKGKDASACIGLTPVQRSSGGVVKLGSIGKFSRNSALRSQLVCGAMAAVIQIAKREAKTQKEVWLKALVERRGKKCAAVALANKTVRTAYALLTQGTEYKAELLTA

SEQ ID NO: 13576 - protein, 330 aa, unidentified
  source 1..330: note = protein_5084a4a
  REGION 5..155: note = RuvC_domain
  SITE 8: note = RuvC_P1
  SITE 55: note = RuvC_P2
  SITE 95: note = RuvC_P3
  SITE 97: note = RuvC_P4
  SITE 100: note = RuvC_P5
  REGION 196..283: note = Tnp_domain
  SITE 204: note = Tnp_P1
  SITE 234: note = Tnp_P2
  SITE 242: note = Tnp_P3
  SITE 243: note = Tnp_P4
  SITE 256: note = Tnp_P5
MSVFVGVDIAAKTFDLVNRKGGKASKVESFSQSPQGHAKAIKRLQNLKPTLITMEATGIYYFDLAVALVQAGLPVAVINPKSFHHFAKLKLAGSKTDGVDAALLAEYGERIEPSLWTPPDEVRLALRDIGRQINRLTGTRTQAKNRLHALQSKSSTRSLLVEDEQEGIAYLDRRIERLSQAALALIAECETLSRYLTHMCAAKGVGKATALIVLAELCVLPASLKAPQVSRFAGLDVRLTQSGSSVNRPARLSKAGNAYLRAALYMPAMSAIQHDPRVKAFYDALVSRGKKKIQALCAVMRKYLTGLWACIQTETAFDSAMLFSEEHLKA

SEQ ID NO: 13577 - protein, 346 aa, unidentified
  source 1..346: note = protein_993ffb0
  REGION 7..147: note = RuvC_domain
  SITE 10: note = RuvC_P1
  SITE 53: note = RuvC_P2
  SITE 88: note = RuvC_P3
  SITE 90: note = RuvC_P4
  SITE 93: note = RuvC_P5
  REGION 210..296: note = Tnp_domain
  SITE 218: note = Tnp_P1
  SITE 248: note = Tnp_P2
  SITE 256: note = Tnp_P3
  SITE 257: note = Tnp_P4
  SITE 269: note = Tnp_P5
MEQIIRIGMDTSKHVFQLHGVNAAEEPILRKKLRRKEMVAFFEKLPPTVIAIEACGGSHHWARLLQSFGHDVKLLPPQLVKPYVKRGKNDAADAEALCEAMSRPTMRFVPVKTADSQAALMLAGVRDRLVRNRTQLANAIRGYAAEFGLTAAKGMSKIEPLLERIAADETLPDLARELFALHGKEYAQLQVQLEKIDAKLMAWHRANECSRRLAQIPGVGPIGASLLVMKMPAPEAFQSARHFAAWLGLTPKDHSTAGKVRLGVITRAGDEALRSVLVVGATAVIRHTRSGRGTVSPWLVDLLKRKPPKLAAVALANKIARIAWKMMVTGEPYRKNAATLALAHAA

SEQ ID NO: 13578 - protein, 433 aa, unidentified
  source 1..433: note = protein_cee58db
  REGION 46..194: note = RuvC_domain
  SITE 91: note = RuvC_P2
  SITE 131: note = RuvC_P3
  SITE 133: note = RuvC_P4
  SITE 136: note = RuvC_P5
  REGION 301..377: note = Tnp_domain
  SITE 309: note = Tnp_P1
  SITE 338: note = Tnp_P2
  SITE 346: note = Tnp_P3
  SITE 347: note = Tnp_P4
  SITE 360: note = Tnp_P5
MCEVFRRRGCGGRLVHRLTLTHAARGGRRDGYRGHRGLHRYRASVRSEHWATALSRDGQKVLDRALPNDEERLRALYQKLADHGSLLVVVDQPATIGALAVAVAQDMGITVGYLPGLSMRRIADLTPGSAKTDAKDAAVIAGAARSMPHTLRAINASDEDAAALSMLTGFDLDLARQVNQSANRIRGLYTQIHPALEAVVGPWLEHDAVLEVIAAWPTPADLKRAGKARIDARLKKHGCRRHATWAGQIVSALEHQTVVVAGTDAAATVLPHLARQLISLHAQRADVAAQVEALVEAHPLYEVLISMPGIGVRTAAVFLAETLGKTFNTGAQLASYAGLAPVTRRSGSSIRGEVRLPRRQQEAQARHVPVRLRLPALRPRLPGLLPAQTRPRQTALGQAVLALAHRRILTLHAMIRDGALYDPQPATKLPAAA

SEQ ID NO: 13579 - protein, 408 aa, unidentified
  source 1..408: note = protein_b474fd8
  REGION 11..167: note = RuvC_domain
  SITE 14: note = RuvC_P1
  SITE 63: note = RuvC_P2
  SITE 104: note = RuvC_P3
  SITE 106: note = RuvC_P4
  SITE 109: note = RuvC_P5
  REGION 274..358: note = Tnp_domain
  SITE 282: note = Tnp_P1
  SITE 311: note = Tnp_P2
  SITE 319: note = Tnp_P3
  SITE 320: note = Tnp_P4
  SITE 332: note = Tnp_P5
MAEQPLPAVFVGLDVGKSEHHAVAVTTAGNTVYDKSLPNDEARLRAILEELATVHGPVLMVVDQPATIGALPVALAQATDGVHVAYLPGLAMRRIADLHPGAAKTDARDAAIIAEAARTMPHTLRDIRVDEEQIAELGVLAGFDDDLAAQITATSNRLRGILTQIHPALERVLGPRVTHPAVTDLLSRYPTPGKLQVAGRGHVRARLKKHAPRLAEALTEEIFTALGQQTVVVAGTEAAATVIPILAGQLAALTAQRTQVATQIEALVEAHPLSPVLTSMPGVGVRTAARILTEVVGKDFQDAGHLASYAGIAPVTRRSGTSIRGEHAPRGGNKRLKRALFLSAFASLSHGPSRAYYDRKRAQGKRHNQAIIALARRRTDVLYAMLRDGTLYQDPTESQTPSPVALAA

SEQ ID NO: 13580 - protein, 355 aa, unidentified
  source 1..355: note = protein_261d759
  REGION 4..158: note = RuvC_domain
  SITE 7: note = RuvC_P1
  SITE 59: note = RuvC_P2
  SITE 100: note = RuvC_P3
  SITE 102: note = RuvC_P4
  SITE 105: note = RuvC_P5
  REGION 222..308: note = Tnp_domain
  SITE 230: note = Tnp_P1
  SITE 260: note = Tnp_P2
  SITE 268: note = Tnp_P3
  SITE 269: note = Tnp_P4
  SITE 280: note = Tnp_P5
MVTVGIDPHKQMHLAVALADNGTRLGRPLKVPTGPEALERLLAWIRPLAQGRPVLWAIEGGPGLGRAVADALLLHGQQVVWVPVRAMAAQRRITATRGAKSDVIDAVAVARAAMADPHLARHRIDPRVRQIRLLVDLRADLVERRVAVANRLATMVHVELEHAPGGLSSGAALARVRQVVAAAAVEETVRWVLLALVGELEGLLARIREVERRLRELVEPVAPHLLAIAGVGVVSAAVLLSQVGDVERFASSAKLARYAGCAPIPVFSADRERHRLHRGGNRQVNRVLHTVAMVQAQRFGPAREYVAARVEAKGKRGAQRALKRHLVDVVYRAMVADRQQWRAEEALQEACQPAA

SEQ ID NO: 13581 - protein, 345 aa, unidentified
  source 1..345: note = protein_a92a41e
  REGION 6..148: note = RuvC_domain
  SITE 9: note = RuvC_P1
  SITE 52: note = RuvC_P2
  SITE 87: note = RuvC_P3
  SITE 89: note = RuvC_P4
  SITE 92: note = RuvC_P5
  REGION 212..298: note = Tnp_domain
  SITE 220: note = Tnp_P1
  SITE 250: note = Tnp_P2
  SITE 258: note = Tnp_P3
  SITE 259: note = Tnp_P4
  SITE 271: note = Tnp_P5
MEISTIGLDLAKNVFQVHGVSATGEVVLRKTLRRAQVLPFFAKLPPCLVGAEACGTSHHWARELTKLGHEVRLMPASYVKPYVKRGKNDAADAEAICEAVTRQTMRFVPIKSREQQAALSIHRARSLLIKQRTQLVNMMRCVLAELGIAIPVGVEKALQMARKIVDGEAELDLPDEAANVVGVLAGQVLQLHTQLRKLDLRLAALQRSDERARRLATIPGIGPVGATALAASVGDAAQFKSGRQFAAWLGLTPRQRSSGGKERLGRITKMGDNYLRQLLVVGATALIRSARSKPETVDPRFVALLARKPARVASVAIANKMARIAWAIMARGGVFERGHAPILAA

SEQ ID NO: 13582 - protein, 390 aa, unidentified
  source 1..390: note = protein_dc5e148
  REGION 4..162: note = RuvC_domain
  SITE 7: note = RuvC_P1
  SITE 60: note = RuvC_P2
  SITE 101: note = RuvC_P3
  SITE 103: note = RuvC_P4
  SITE 106: note = RuvC_P5
  REGION 265..352: note = Tnp_domain
  SITE 273: note = Tnp_P1
  SITE 303: note = Tnp_P2
  SITE 311: note = Tnp_P3
  SITE 312: note = Tnp_P4
  SITE 325: note = Tnp_P5
MFYAGIDVAMDKHDCVVLDSDGDVVVEVFTFENSRDGFKTLKKVLQSCSKNPKKIKVGLEATGHYSDNLLAFLNKIGYDPILFNPLHTNLFRKGLSLRKTKTDHVDAHTIATMLRTEDLKSYSQPSYHLNELKSLTRYRSNLVSDCSRCKVSLARLCQILFPELKAIVPTLHMSSVYTLLSELPSADKIAKCNLTHLTALLSSASKGHYGRDKAVEIRELARTSIGIKSLVKELELQQTIDLIQVYLQQIEVVEEEINELMDDIESPITSIPGIANRMAAVILAETNNFHDFERAEQVLAFAGLEPSVYQSGQLTSSHSKMVKRGSKYLRYAIFNATKYVCNWDPTFHAYLAKKRAEGKPYNVAVSHAAKKLTRVMFHLVKTNKEFVPQA

SEQ ID NO: 13583 - protein, 313 aa, unidentified
  source 1..313: note = protein_c64900f
  REGION 9..151: note = RuvC_domain
  SITE 12: note = RuvC_P1
  SITE 56: note = RuvC_P2
  SITE 94: note = RuvC_P3
  SITE 96: note = RuvC_P4
  SITE 99: note = RuvC_P5
  REGION 190..274: note = Tnp_domain
  SITE 198: note = Tnp_P1
  SITE 227: note = Tnp_P2
  SITE 235: note = Tnp_P3
  SITE 236: note = Tnp_P4
  SITE 247: note = Tnp_P5
MSDTLPQTIGIDISKATLDAHAYPAGSNQQFANTASGHKAWIAWLGRWSVERVAYEATGAYHRELEQALADLPCVKLNPARARRFAQAAGTLAKTDRIDAVMLARMASTMQPPVRPAINPEQARLAELISARDGLMRDRTALKNQEKNLTIPLLKRQHKLRLNQIDQHIIALDAELAASIAADPQLARRHEIISSIAGLGPRTANQLVAIMPSLGSLDNKQAASLAGLAPVARQSGQWKGRSFIQGGRANVRRALYMPALVAARFNPDLREKYQHLIASGKPAKIAIVAVMRKLLVTANALVKADRIWVEKRA

SEQ ID NO: 13584 - protein, 343 aa, unidentified
  source 1..343: note = protein_96f8bdb
  REGION 6..147: note = RuvC_domain
  SITE 9: note = RuvC_P1
  SITE 52: note = RuvC_P2
  SITE 87: note = RuvC_P3
  SITE 89: note = RuvC_P4
  SITE 92: note = RuvC_P5
  REGION 211..297: note = Tnp_domain
  SITE 219: note = Tnp_P1
  SITE 249: note = Tnp_P2
  SITE 257: note = Tnp_P3
  SITE 258: note = Tnp_P4
  SITE 270: note = Tnp_P5
MTISVLGIDIAKNTFQLHGADSSGNTVLKKRLSRNKLSAYVANLPRSLIVMESCGGANYWARVFQGSGHSVKLISPQFVKPFVKTNKNDANDAQAIVEAASRPSMNFVPIKQVEQQDIQSLHRVRSRVVKNRTALINEIRGLCLEYGVIVAPGAAKVKRSLCSIIADEANELTQSSRECMKDLCNELIENEARLKKLDKKVRQICQQNETCYRLLKIPGVGELTATAIVAAVPNANEFKNGRHMSAWLGLVPRQSSSGDKQVLLGISKRGDRYLRTLLIHGARAALSHYKKTDTDYGRWLVERKSTLSFNKAAVALANKNARIIWSLLHTGEEFNSNIQMASA

SEQ ID NO: 13585 - protein, 345 aa, unidentified
  source 1..345: note = protein_2e19f59
  REGION 6..147: note = RuvC_domain
  SITE 9: note = RuvC_P1
  SITE 52: note = RuvC_P2
  SITE 87: note = RuvC_P3
  SITE 89: note = RuvC_P4
  SITE 92: note = RuvC_P5
  REGION 211..298: note = Tnp_domain
  SITE 219: note = Tnp_P1
  SITE 249: note = Tnp_P2
  SITE 257: note = Tnp_P3
  SITE 258: note = Tnp_P4
  SITE 270: note = Tnp_P5
MEIRTIGIDLGKTVFHLVGVNARGEVVVRKKCSRTQLLRFTSNLHECLIGMEACGGSHFLGRALREQGHDVRLMPAQYVKPYVKTNKNDYIDAEAIAEAVTRPTMRFVPIKTDDQLDLQSLHRVRERWVVRRTAVINQIRGLLLERGITMRKGREHLEASLPPILEDADNKLSGGLRVLLTQLQIEMQYLHRQIEESNKLIVRIASELEPCRRLIAIPGIGPLIATATIAAIGNGAAFKKGRGFAAWLGVVPGEHSTGGKQQLTGTSRRGNKYLRKLFVLGAHTVLLQRTKQSSGLSTWLASLTARKRKQVATVALANKMARMVWAVLCKGEAYRPPLLPQPVTA

SEQ ID NO: 13586 - protein, 343 aa, unidentified
  source 1..343: note = protein_0422044
  REGION 6..148: note = RuvC_domain
  SITE 9: note = RuvC_P1
  SITE 52: note = RuvC_P2
  SITE 87: note = RuvC_P3
  SITE 89: note = RuvC_P4
  SITE 92: note = RuvC_P5
  REGION 212..299: note = Tnp_domain
  SITE 220: note = Tnp_P1
  SITE 250: note = Tnp_P2
  SITE 258: note = Tnp_P3
  SITE 259: note = Tnp_P4
  SITE 271: note = Tnp_P5
MQITTVGLDLAKHIFQVHAVDGSGQIVARKRLRRTEVLPFFASVPPCLIGMEACATSHHWARELTELGHTVKLMPPAYVKAYVKRGKTDAADAEAICEAVTRPSMRFVPVKSGEQQSVLMLHRARALLIRQRTMLVNALRGHLAEFGIIVAQGISRIRELIAILTDESADAVLPPLARRALSPLVDQLLDLQPRIRALEAELLAWHRQSQESRRLETIPGVGFITATAIAATVPDPSLFRSGREFAAWLGLTPRPNSSGGKERLGRISKMGDGYLRTLLVVGATAVIRYARTKTAADTAWINSLLSKKPARLVSVALANKTARIAWALLARGEVYRSVVVAAS

SEQ ID NO: 13587 - protein, 341 aa, unidentified
  source 1..341: note = protein_886baef
  REGION 7..149: note = RuvC_domain
  SITE 10: note = RuvC_P1
  SITE 53: note = RuvC_P2
  SITE 88: note = RuvC_P3
  SITE 90: note = RuvC_P4
  SITE 93: note = RuvC_P5
  REGION 211..295: note = Tnp_domain
  SITE 219: note = Tnp_P1
  SITE 249: note = Tnp_P2
  SITE 257: note = Tnp_P3
  SITE 258: note = Tnp_P4
  SITE 270: note = Tnp_P5
MTDVSIVGVDLAKQAFQLHAAARDGSVIFRRKLSRSKFVEVMAKLPRCVVALEACATAHHWGRVLGAQGHEVRLIPPVYVKPFVKRQKNDAADAEAIVEAAQRPTMRTVAVKSVDQQARAMLFRTREMLIGQRTQLANALRGHLAEHGHLVPQGLGNVARFAAIIASAENNLPDLVRDLARLYLDQIAHLSERIKTLEARMAAEAKKSAVAARLRRMPGIGPVTAMAIETFAPAMANFRRGRDFAAWLGLVPRQHSTGGKQRLGRTSKMGQRDIRRLLIVGAMSVVTWKGRRSSPGSWLARMLARKPRMLVAVALANKMARAIWAMITYERDYQEPAAAVC

SEQ ID NO: 13588 - protein, 387 aa, unidentified
  source 1..387: note = protein_ddd4b32
  REGION 53..185: note = RuvC_domain
  SITE 118: note = RuvC_P3
  SITE 120: note = RuvC_P4
  SITE 123: note = RuvC_P5
  REGION 255..342: note = Tnp_domain
  SITE 263: note = Tnp_P1
  SITE 292: note = Tnp_P2
  SITE 300: note = Tnp_P3
  SITE 301: note = Tnp_P4
  SITE 313: note = Tnp_P5
MSQVNDLSRCLAAFDQNTTLTVVVELSQESWLVAGLVPGVDRQPLKKQDPDPVTLLRLLERWRAEAETTGRAIERIALAFEAGRDGFWLARWLQARGIEVHVIHSTSVAVSREHRRAKTDRLDTAMLMRVFLGWLRGERGHCGMVAIPTLEEEDAKRPSRERESLVGERTRIVNRMKSALARLGIRGFKPELRKAPQRIEALRTPEDMPIPPNMLDELRRDMARLAVVREQIDAIERARLTRLEQAPATGPHAMVRLLARVIGVGVETADMLVQEVLSRKLRDRRAVARYVGLTGSPDESGKRRREKGLAKAGNARVRRGLIQLAWRFLRFQRDSALAQWYRARTEGPKGARKTTMIVALARKLLIALWRMVTTGETPAGVVLRQAA

SEQ ID NO: 13589 - protein, 344 aa, unidentified
  source 1..344: note = protein_9e06ba4
  REGION 6..147: note = RuvC_domain
  SITE 9: note = RuvC_P1
  SITE 52: note = RuvC_P2
  SITE 87: note = RuvC_P3
  SITE 89: note = RuvC_P4
  SITE 92: note = RuvC_P5
  REGION 211..297: note = Tnp_domain
  SITE 219: note = Tnp_P1
  SITE 249: note = Tnp_P2
  SITE 257: note = Tnp_P3
  SITE 258: note = Tnp_P4
  SITE 270: note = Tnp_P5
MNITTVGIDLAKNVFQVHAVNEAGRKVWNKQIRREQMAEFFAQLPPCLIGMEACGSAHHWARKLTSLGHTVKLMAPQFVKPYVKTNKNDAADAEAICEAVARPNMRFVPIKDIEQQSLLALHRVRQGFVKARTAQGNQIRGLMAEFGLIMPKGIRHVAQYLPELLEDASNELTGQFRQLMERLLQNLKELTRQIDETEALIRLWHRQSPACRQLETIPGIGPITATALVASIADAKSFASGRQLAAWLGLVPRQHSSGGKQTLLGISKRGDAYLRTLLIHGARAVICRRQKSAEQTDWLKGLLERKKPNVAAVALANKNARIVWALLTTGRTYEAQYCAGAAAI

SEQ ID NO: 13590 - protein, 332 aa, unidentified
  source 1..332: note = protein_7304582
  REGION 1..147: note = RuvC_domain
  SITE 2: note = RuvC_P1
  SITE 51: note = RuvC_P2
  SITE 87: note = RuvC_P3
  SITE 89: note = RuvC_P4
  SITE 92: note = RuvC_P5
  REGION 215..301: note = Tnp_domain
  SITE 223: note = Tnp_P1
  SITE 254: note = Tnp_P2
  SITE 262: note = Tnp_P3
  SITE 263: note = Tnp_P4
  SITE 274: note = Tnp_P5
MDTHADTHVAAALDSISGLPGVQEFAATAAGYADLLDWLRGFGTVCLVGIEGTGSYGAGLARHMAGAGVRVVEVDRPGRQARRRAGKSDPLDAVSAARAAQSGRPCGAPKGRDGAVEAIRALMVAKRSARAERTQTINQARALILTGPDDLRARFAKLPPATLVTEIALLRPRPGDAAAYAIRVALRELGRRAEFLDGQMERLDELIIPLVTARARGLLTLRGVGPETAALLLVTAGDHPGRLRSEAAWAHLCGTAPIPASSGKRTHHRLNRGGDRQANHALWRIVITRMSSHPPTRAYVTRRTTEGLSKKEIIRCLKRYVAREVYPYLRTR

SEQ ID NO: 13591 - protein, 344 aa, unidentified
  source 1..344: note = protein_39fcf7b
  REGION 6..147: note = RuvC_domain
  SITE 9: note = RuvC_P1
  SITE 52: note = RuvC_P2
  SITE 87: note = RuvC_P3
  SITE 89: note = RuvC_P4
  SITE 92: note = RuvC_P5
  REGION 211..297: note = Tnp_domain
  SITE 219: note = Tnp_P1
  SITE 249: note = Tnp_P2
  SITE 257: note = Tnp_P3
  SITE 258: note = Tnp_P4
  SITE 270: note = Tnp_P5
MKITTVGIDLAKNVFQVHGIDERGKVVLKKQLRRDQVAAFFVNLPPCLVGMEACGGAHHWARKLQGMGHAVRLMAPQFVKPYVKTNKNDAADAEAICEAVARPNMRFVPVKNVEQQAVLALHRVRQGFVRARTAQANQIRGLLAEFGLIIPQGIGYIATRVPELIEDGANELPGVFRLLVQRLLDHLKDLDRQVDELEAKIQAWHRGNDLSRKLAQVPGIGPITASALVASIGDAKNFDSGRQVAAWLGLVPKQNSSGGKTNLLGMSKRGDTYLRTLLIHGARSVIYRVSQKADACNWISAVVNRRNKNVAAVALANKNARIVWALLAHGRQFDEGYVRKAVMA

SEQ ID NO: 13592 - protein, 346 aa, unidentified
  source 1..346: note = protein_9d911df
  REGION 7..148: note = RuvC_domain
  SITE 10: note = RuvC_P1
  SITE 53: note = RuvC_P2
  SITE 88: note = RuvC_P3
  SITE 90: note = RuvC_P4
  SITE 93: note = RuvC_P5
  REGION 210..296: note = Tnp_domain
  SITE 218: note = Tnp_P1
  SITE 248: note = Tnp_P2
  SITE 256: note = Tnp_P3
  SITE 257: note = Tnp_P4
  SITE 269: note = Tnp_P5
MREIIRIGMDTSKHIFVLHGVDAEERVVLRKRLSRRQVLEFFAQLPPTAIGIEACGASQHWARELGKLGHEVKLMAPQLVKPYVMRNKNDGRDAEGLCEAMGRPSMRFVPVKTAEQQAALMLTGVRDGLIARRTQLGNTIRGHAAEFGLIAPKGTDKIEPLLARIAQDETLPTLARELFVMLGREYARLETELREIEAKLIAWHRADATGRRLAQIPSVGPIVATALVMKTPDPHAFRSGRHFAAWLGLTPKDHSTAGKTRLGKITRAGDEDLRRLLVIGATSVIQQARHGRGRHSRWLLALIKRKPPKLAAVAFANKVARIAWKLMVTGESYDAARINPIPTVAA

SEQ ID NO: 13593 - protein, 347 aa, unidentified
  source 1..347: note = protein_45d0df0
  REGION 9..169: note = RuvC_domain
  SITE 12: note = RuvC_P1
  SITE 68: note = RuvC_P2
  SITE 108: note = RuvC_P3
  SITE 110: note = RuvC_P4
  SITE 113: note = RuvC_P5
  REGION 209..295: note = Tnp_domain
  SITE 217: note = Tnp_P1
  SITE 247: note = Tnp_P2
  SITE 255: note = Tnp_P3
  SITE 256: note = Tnp_P4
  SITE 269: note = Tnp_P5
MTNILKQVAGIDVAQKELVVSMGRMDQELTLEIFAFKTFPNNEKGFKALIQWSATITDDKVKVRYVMEATGVYHESLAYYLADNGFELSIVLPNKISNYFRTLDINTITDKTASQTIARFGLERKLEVWLKPKKIFRDLKQLTRERDQLIAERTLLKNQLHAELAEAFPNQRSVNRINSRIRFLNEQEKEIKGDIAEIVKQDNELLKKVQTITSIPGVGKLTAIIVLAETNGFELIRNKRQLASYSGLDIREKQSGTLVKGKPRISKKGNRHLRKAMHLPALSAIKHNEQFKVIFTRLVSRHGIKMKAAVALQRKLLELIFVIWKTDKPFAKDHLESANKLTILQNT

SEQ ID NO: 13594 - protein, 338 aa, unidentified
  source 1..338: note = protein_b51eb84
  REGION 6..146: note = RuvC_domain
  SITE 9: note = RuvC_P1
  SITE 51: note = RuvC_P2
  SITE 86: note = RuvC_P3
  SITE 88: note = RuvC_P4
  SITE 91: note = RuvC_P5
  REGION 210..295: note = Tnp_domain
  SITE 218: note = Tnp_P1
  SITE 248: note = Tnp_P2
  SITE 256: note = Tnp_P3
  SITE 257: note = Tnp_P4
  SITE 269: note = Tnp_P5
MKLNVFGVDIAKDVFQIHWVDKAGKARSEKVKRQHFLEWFSNKTPSLIAMEACSGAHHWGRCFQQMGHQVRLIAAHKVKPFVIGNKNDMVDAQAIWTAVQQPQMRFVAVKSVEQQAALAAHRMREYLIKTRTGSINAVRGFLAEFGLVIAKGRAAFKREIAGCLETLSQSVPKEFVDRLYERLAYINKLDEDIAGLEQHITAYFKRCPQCQRLGKVPGIGVLSATAIVATVGDVSQFKSGRELSAWLGLVPKQTGSGGKVKLHGISKRGDTYVRTLLVHGARSAITHNKHPSEWLQGLLIRRPKNVVLLALANKTARVVWALLSKDVEYDENLYSQVS

SEQ ID NO: 13595 - protein, 406 aa, unidentified
  source 1..406: note = protein_22320d8
  REGION 5..163: note = RuvC_domain
  SITE 8: note = RuvC_P1
  SITE 58: note = RuvC_P2
  SITE 100: note = RuvC_P3
  SITE 102: note = RuvC_P4
  SITE 105: note = RuvC_P5
  REGION 277..363: note = Tnp_domain
  SITE 285: note = Tnp_P1
  SITE 315: note = Tnp_P2
  SITE 323: note = Tnp_P3
  SITE 324: note = Tnp_P4
  SITE 337: note = Tnp_P5
MLNAVGIDVSKGKSTVAILRPAGEVVRKPFSVSHSVKDLSDLVSYVGSLDGETKVVMEATGHYYEPVLKAFLDAGIFVSAVNPSLIKRHDSDENPLRKVKSDPADARKIGKYALDKWEYLRQHSAMDTTREQLKTLNTQFHFLMQQKVALKNNLISLLDLTYPGANDLFASPVRSDGSEKWIDYVHSFWHVDCVRKIGLKAFTERYRNFCLHHGYIFQPDKPEELFNAAKELVAVVPKDPVYKQLILGDIEQLNTVSKQIEAFRQTMNELASTLPEYDTVMSMHGVGTTYGPQLMAEIGDISRFDHRSAITAFAGVDPGVNQSGTMNQQSNRASKHGDPRLRKTLFQIMSTLLQLAPSDDPVYLFMMKKKSEEKPYQVYMTAGANKFLRIYYGKVKECITAQTSAQ

SEQ ID NO: 13596 - protein, 371 aa, unidentified
  source 1..371: note = protein_9c8d333
  REGION 9..159: note = RuvC_domain
  SITE 12: note = RuvC_P1
  SITE 63: note = RuvC_P2
  SITE 99: note = RuvC_P3
  SITE 101: note = RuvC_P4
  SITE 104: note = RuvC_P5
  REGION 224..311: note = Tnp_domain
  SITE 232: note = Tnp_P1
  SITE 262: note = Tnp_P2
  SITE 270: note = Tnp_P3
  SITE 271: note = Tnp_P4
  SITE 283: note = Tnp_P5
MADYREAFVGIDVAKLKNAIAIAECGRNGEIRYVGEVEASDASMRRIIQRIAAKFDHVHFCYEAGPTGYGLHRLIKSLGHDCMVVAPSLIPKKPGDRVKTNRRDALALARLLRAGELTAVWVPDEGHEAMRDLVRARSAAVETLRVHRQQVSAFMLKHGRVYPRKKGWTMRYLHWLQEQWFDHPAHQIALQEMVEAVRISKERVERLEKVIEEFVPNWSLGPVVRALQTLRGVDLIVAVTFATEVGDVTRFESPRQLMGYLGLVPGERSTGETVRRGAITKAGNGRVRHMLVESAWTYRHPPKLGVRKLYHLQAAPPAVREIAWKAQSRLTARYRLLAVRGKRTTVVCTAIARELAGFMWAVAREAQAIRT

SEQ ID NO: 13597 - protein, 316 aa, unidentified
  source 1..316: note = protein_77c7ac7
  REGION 6..140: note = RuvC_domain
  SITE 45: note = RuvC_P2
  SITE 83: note = RuvC_P3
  SITE 85: note = RuvC_P4
  SITE 88: note = RuvC_P5
  REGION 188..275: note = Tnp_domain
  SITE 196: note = Tnp_P1
  SITE 226: note = Tnp_P2
  SITE 234: note = Tnp_P3
  SITE 235: note = Tnp_P4
  SITE 248: note = Tnp_P5
MTLDICCAEQQLHIKIENSIKGFSDLKKWSKANKIDLQQTFVVMEFTGGYEYRFIQFCESISIAYCRISGLEIKRSMGMTRGKSDKVDSFRIGQYGEEKIKKLEQAKPLDNNVLQLKQLLSFRKRLVRETAGLSATVKERKHIYGSNQKDPIIKVASEKIKTNQKYVKLIEEEITTLITANPTMLFNYRILRSIKGIGPINAWMTIAYTENFVSFTDARKYAVFVGVVSFEHTSGTSVNGKKRISQMANKELKQELNQVAKAAITHDAEIRSYAERKLKNKHYKIILNNVKFKLILRMFSLVKRGELYVENYRKAA

SEQ ID NO: 13598 - protein, 342 aa, unidentified
  source 1..342: note = protein_d1792e4
  REGION 6..147: note = RuvC_domain
  SITE 9: note = RuvC_P1
  SITE 52: note = RuvC_P2
  SITE 87: note = RuvC_P3
  SITE 89: note = RuvC_P4
  SITE 92: note = RuvC_P5
  REGION 211..296: note = Tnp_domain
  SITE 219: note = Tnp_P1
  SITE 249: note = Tnp_P2
  SITE 257: note = Tnp_P3
  SITE 258: note = Tnp_P4
  SITE 270: note = Tnp_P5
MQISTIGIDIGKSSFHFVGFDARGGIVVRRQCSRTQLIRELAKVPPCLVGMEACCGAHHLGRILIAQGHDVRLIPPQYVKPFVKSQKNDLLDAEAIGEAVQRPTMRFVPLKTMEQLDLQAIHRLRTRLVARRTAVINQMRGFLLERGVTFPIGRRALVERFPEVLDNPALGLSVRFCRLLQQLRDEWRLLDSAIQEVDQEIHTLAHDDEACDRLMQVPGIGPLTATALVAAIGNGAAFAKGRDLAAWLGLVPRQHSTGGKTVLRGISKRGNAYLRCLFIHGARAVCRHHRQKPHRLGRWLANLEARAHPNVVVVALANKLVRTAWAVLQRNTHYDGRLLANA

SEQ ID NO: 13599 - protein, 332 aa, unidentified
  source 1..332: note = protein_8958388
  REGION 24..165: note = RuvC_domain
  SITE 27: note = RuvC_P1
  SITE 68: note = RuvC_P2
  SITE 108: note = RuvC_P3
  SITE 110: note = RuvC_P4
  SITE 113: note = RuvC_P5
  REGION 204..291: note = Tnp_domain
  SITE 212: note = Tnp_P1
  SITE 241: note = Tnp_P2
  SITE 249: note = Tnp_P3
  SITE 250: note = Tnp_P4
  SITE 262: note = Tnp_P5
MAYTPTLLIVRFGGAPMQTTVLYIGADVAKAELVISVAGQRPCIIANTATGITRWLKTVSEHALIAMESTGNYHALLAQLAYLHGLTVYILNARDVFYYARALGSRAKTDNIDAEVIVRYLQEHQSSLQAWQPLTPEQQQLRQLLSRRAQVITHQSALRQAFTDVDLSGVDTQALQHGFDVVLASMDQQIQHLIANDPHLEQGYQRLRSVSGIGQQTAALLTELLNRIPFANADALVAYSGLDPRPNDSGTKRGRRRISKRGPALLRRQLYLAAMSACRSAACKPLYEAYRARGLAGTESIVILARKLLRIAYAVWKSGQAFDPSKLSPKTA

SEQ ID NO: 13600 - protein, 331 aa, unidentified
  source 1..331: note = protein_f2a0662
  REGION 1..78: note = RuvC_domain
  SITE 15: note = RuvC_P3
  SITE 17: note = RuvC_P4
  SITE 20: note = RuvC_P5
  REGION 193..278: note = Tnp_domain
  SITE 201: note = Tnp_P1
  SITE 231: note = Tnp_P2
  SITE 239: note = Tnp_P3
  SITE 240: note = Tnp_P4
  SITE 253: note = Tnp_P5
MLIHDFSNNSIRKLKTDRADSLKIANYALTFWNELPPFNDEDETRLVLREQSRMYERLASTATSLRNGLIALADQTFPSIDQAFGHAIKNADGHEKWVDFFSIYWHRDCVLRLSIEKFTESYRKWCLRRNYKFRTNTAHKLYALAQDAVPTLPKNNGTKALVLQACKSLNAVCEAKQSTQEEMNRLASLLPEYEVVMQMEGTGPITGPALMAEIGDVRRFKNKKALVAFAGIDAPPFQSGNFESKSRHVSERGSPYLRRTVFLVANIILTLSHKDNSVFCFMDKKRAGGKHYYVYTIAGSAKFLRIYYARVTEYLRVQERPVAASCPNGNS

SEQ ID NO: 13601 - protein, 309 aa, unidentified
  source 1..309: note = protein_03ad14a
  REGION 8..150: note = RuvC_domain
  SITE 11: note = RuvC_P1
  SITE 54: note = RuvC_P2
  SITE 94: note = RuvC_P3
  SITE 96: note = RuvC_P4
  SITE 99: note = RuvC_P5
  REGION 190..274: note = Tnp_domain
  SITE 198: note = Tnp_P1
  SITE 227: note = Tnp_P2
  SITE 235: note = Tnp_P3
  SITE 236: note = Tnp_P4
  SITE 247: note = Tnp_P5
MKQSVVYIGIDVAKAHLDVAWQEQSRRFANDKCGQVALIKWLKQSAFPVQLICEASGGYEQALVESLEHTDITASVVQANRVRQYARAAGILAKTDKVDARVLAGFGAAMQPKPTPPLCPEQKRLRQYEAQRRHLSAVLVAEQNRLAQLSYAELRVLSRSLISKIKKQIATIDARINTLIAQDKQLCQKAQKLTSITGVGARTAALVLAQMPELGQLNRRQAAALGGLAPFNRESGTLRGKRTIFGGRRALRSGLYMAAMVAARHNPILCSFYQRLRAKGKPHKLALTAVMRKLLLALNQNLKPITSPA

SEQ ID NO: 13602 - protein, 344 aa, unidentified
  source 1..344: note = protein_4dfe501
  REGION 7..149: note = RuvC_domain
  SITE 10: note = RuvC_P1
  SITE 53: note = RuvC_P2
  SITE 88: note = RuvC_P3
  SITE 90: note = RuvC_P4
  SITE 93: note = RuvC_P5
  REGION 213..297: note = Tnp_domain
  SITE 221: note = Tnp_P1
  SITE 251: note = Tnp_P2
  SITE 259: note = Tnp_P3
  SITE 260: note = Tnp_P4
  SITE 272: note = Tnp_P5
MSQVITIGLDIAKNVFHAHGVDARGGMVFSRKLTRSKLLDFFATHARCVVALEACGGAHHWARELQSMGYDVRLIPPAYVKPFVKRHKNDAIDAEAICEAAQRPGMRFVAVKSEEQQAAGLVFRTRDLVVRQRTQLINAIRGHLTEYGWVAPRGTAHMTMLADLLDDEEMASTLPAAARPMFKLMVDLLAELNKRVAMLDREIAQRAKEDEAARRLMTIPGIGPIAATAILALAPPIGTFNKGRDFAAWLGLAPRQHSTGGKQRLGSISKMGERTIRRLLIIGGSSMVRQACRFGAPSGSWLERMLARKPRMLVSVALANKMARMVWALLTKKEDYRAPAAVTV

SEQ ID NO: 13603 - protein, 344 aa, unidentified
  source 1..344: note = protein_b1b1017
  REGION 7..149: note = RuvC_domain
  SITE 10: note = RuvC_P1
  SITE 53: note = RuvC_P2
  SITE 88: note = RuvC_P3
  SITE 90: note = RuvC_P4
  SITE 93: note = RuvC_P5
  REGION 212..299: note = Tnp_domain
  SITE 220: note = Tnp_P1
  SITE 250: note = Tnp_P2
  SITE 258: note = Tnp_P3
  SITE 259: note = Tnp_P4
  SITE 271: note = Tnp_P5
MEEITTIGIDIAKSVFQVHAVCATGTVLFRRQLKRRYVAQFFAGLKPCLIGIGACATAHHWGRELANLGHEVRLMPPGYVKPYVKRNKNDAADAEAICEAVTRPNVRFVPIKTQDQRSILMLHRTRMLFIRQRTMTINAVRAHLAEFGIIAGIGRNGLQALLDLIRKGEKAEISPEAWLCLIALADQIDLLKQRILNMERQILKWHSANDLSRKLEGILGVGPLVATALAASIPDPTAFRSGRDLSAWIGLVPKQNSSGGKEKLGSISKAGNRYLRQLLVLGALAVIKRAKLLGHTRHPWVVGLMERRPSKVAAVALANKMARVAWAMMSHNEPYRAKPAAAGT

SEQ ID NO: 13604 - protein, 287 aa, unidentified
  source 1..287: note = protein_2c9ca5c
  REGION 12..94: note = RuvC_domain
  SITE 34: note = RuvC_P3
  SITE 36: note = RuvC_P4
  SITE 39: note = RuvC_P5
  REGION 155..242: note = Tnp_domain
  SITE 163: note = Tnp_P1
  SITE 193: note = Tnp_P2
  SITE 201: note = Tnp_P3
  SITE 202: note = Tnp_P4
  SITE 214: note = Tnp_P5
MRRGARVARRIEALGHQAKLISPQFVKPFLPGNKNDFADAQAICEAASRPSMRFVSPRNETQQTLSALHRVREALVRERTGTVNQIHAFLLEFGVSLSRGPAVIGRLPAVLAEHDLPPRLIALLERLQVHFKYLDEQIAEIERELTLQLREDERSQRLLEIPGIGPITASVLTTELGDARQFASARQFAASVGLVPRQYSTGGKPTLLGISKRGDKNLRRLLVQCARAIMQHIERRHDQLGAWVRSLLGRRHSNVVACALANKLARIAWAILARGTHYQGEQAVAAA

SEQ ID NO: 13605 - protein, 344 aa, unidentified
  source 1..344: note = protein_79bc638
  REGION 7..148: note = RuvC_domain
  SITE 10: note = RuvC_P1
  SITE 53: note = RuvC_P2
  SITE 88: note = RuvC_P3
  SITE 90: note = RuvC_P4
  SITE 93: note = RuvC_P5
  REGION 210..296: note = Tnp_domain
  SITE 218: note = Tnp_P1
  SITE 248: note = Tnp_P2
  SITE 256: note = Tnp_P3
  SITE 257: note = Tnp_P4
  SITE 269: note = Tnp_P5
MREIIRIGMDTSKHIFVLHGVDAAEQVVLRKKLSRKQVLDFFAKLPPTVIGMEACGGSQHWARELGKLGHEVKLMAPQLVKPYVMRNKNDGRDAEGLCEAMGRPSMRFVPVKTAEQQAALMLTGIRDGLIARRTQLGNTIRGHAAEFGLIAAKGVDKVEPLLARIAQDETLPALARELFVVLGREYARLEGELGEIEAKLMAWHRSDATGRRLAQIPSIGPIIATMLVMKTPDPLAFRSGRHFAAWLGLTPQDHSTGGKTRLGKITRAGDEDLRRLLVIGATAVIQQARRGRGHHSRWLLALIRRKPPKLAAVALANKVARIAWKLMATGESYDVARMNPIPAT

SEQ ID NO: 13606 - protein, 344 aa, unidentified
  source 1..344: note = protein_0751734
  REGION 9..149: note = RuvC_domain
  SITE 12: note = RuvC_P1
  SITE 55: note = RuvC_P2
  SITE 90: note = RuvC_P3
  SITE 92: note = RuvC_P4
  SITE 95: note = RuvC_P5
  REGION 213..299: note = Tnp_domain
  SITE 221: note = Tnp_P1
  SITE 251: note = Tnp_P2
  SITE 259: note = Tnp_P3
  SITE 260: note = Tnp_P4
  SITE 272: note = Tnp_P5
MKRSSIAVIGIDLGKNSCSLAGQDATGAIVLRRKMSRQGIIAFTATLPPCVIAMEACCGAHFFGRTFETQGHEVRLMSPEYVQPYVKAQKTDDRDAEAIAEAAPRPTMRFVSLKSEAQLDLQALHRARERLVLARTALINQLRAVLFERGVILPKGRLLLMRRLGEIGVESLPISVRTKILVNDLLDECTALDKRIKGYDEEFAAVARNDLQARRLSGIPGIGVINATALIAAIGDGSAFARGRDLASWLGLTPRQHSTGGRTKILGISKRGNQYLRKQLIHGARAALPHLAAKPTRMGEWLREMLNRRHTNVVVVALAAKLARIIWALLRRETTYDQSAIIGV

SEQ ID NO: 13607 - protein, 255 aa, unidentified
  source 1..255: note = protein_cd8f907
  REGION 9..156: note = RuvC_domain
  SITE 12: note = RuvC_P1
  SITE 56: note = RuvC_P2
  SITE 96: note = RuvC_P3
  SITE 98: note = RuvC_P4
  SITE 101: note = RuvC_P5
  REGION 195..247: note = Tnp_domain
  SITE 203: note = Tnp_P1
  SITE 232: note = Tnp_P2
  SITE 240: note = Tnp_P3
  SITE 241: note = Tnp_P4
MSQPNPLCVGIDVSKATLDIAASSDVAQFTVSNDSDGFNAIITGLRRHSVALVLMEATGGLEVAVACSLQAEGFEVAVVNPRQARDFARAMGYLAKTDRIDARVLTQMAEVINRHPERKRFIRALPDAERQALAAMVVRRRQLIAMLVAERNRLYPSHPQNKKSINTIIKALEDELARLEKDMNSHIRNHFKEIAERLSSIKGVGTMTVSAMLAEIPELGTLSRREISALIGVAPVNRDSGLCVAGEPFLAAGLA

SEQ ID NO: 13608 - protein, 386 aa, unidentified
  source 1..386: note = protein_912a74a
  REGION 5..158: note = RuvC_domain
  SITE 8: note = RuvC_P1
  SITE 56: note = RuvC_P2
  SITE 97: note = RuvC_P3
  SITE 99: note = RuvC_P4
  SITE 102: note = RuvC_P5
  REGION 220..305: note = Tnp_domain
  SITE 228: note = Tnp_P1
  SITE 258: note = Tnp_P2
  SITE 266: note = Tnp_P3
  SITE 267: note = Tnp_P4
  SITE 278: note = Tnp_P5
MTVIIGMDPHKRSATIEALDPTSKILATGRYSTDNTGYAEMLTAGRQFPDRVWAVEGCNGIGRHLAHRLVHDGETVIDVPAKLSAQVRVFATGNGRKTDPVDAHSVALAALHAPNLRRVEADPELVALGMLADRRDELGRSRTETVCRLHRLLLELIPGGAKTFLSARQARELIAPITPSDAAARVRLRLVVELIEDLETIDRKTKAADKELRQLVAERGSTLMDLHGIGPSSAARLLADTGDIRRFRDRDRFASWNGTAPLDASSGDQQRHRLSRAGNRKINRVLHIMAIVQLRNRTPGRLYYDGRRAGGKTSMEAVRALKRRLSNVVYARMLADQRQRDLAGPGGQSGTTLDSSATGSNPHTDPSDKPHPGPNKQANPTTMPTS

SEQ ID NO: 13609 - protein, 341 aa, unidentified
  source 1..341: note = protein_d7ca775
  REGION 6..147: note = RuvC_domain
  SITE 9: note = RuvC_P1
  SITE 52: note = RuvC_P2
  SITE 87: note = RuvC_P3
  SITE 89: note = RuvC_P4
  SITE 92: note = RuvC_P5
  REGION 212..301: note = Tnp_domain
  SITE 220: note = Tnp_P1
  SITE 250: note = Tnp_P2
  SITE 258: note = Tnp_P3
  SITE 259: note = Tnp_P4
  SITE 271: note = Tnp_P5
MNSMAVGVDIAKNVFQVHYVAQGSGEIVNKPIKRAKFLEHFANRARCLIGMEACGGAHHWARELTRLGHEVRLMPAEFVKAFNIRNKNDAADARAIWLAVQQPCKPVAMKTEMQQAMLALHRMREQLVKFRTMQSNGLRGLLTEYGEVMSRGRAKLDKAIPAALDRLAERLPAALIDTLREQWSGSGLARLDGQIAEIERRMREWKKEDEAVAAISEIPGVGLLTATAAVAMMGDPKAFSSGREFAAWAGLVPKQTGSGGKVNLHGISRRGDTYLRTLLIHGARSVLSHAKEPGPWVEQMKKRRPANGVIVALANKMARTIWAVLAHDRPYRKDYVSVKPA

SEQ ID NO: 13610 - protein, 337 aa, unidentified
  source 1..337: note = protein_f8e3350
  REGION 16..164: note = RuvC_domain
  SITE 19: note = RuvC_P1
  SITE 66: note = RuvC_P2
  SITE 106: note = RuvC_P3
  SITE 108: note = RuvC_P4
  SITE 111: note = RuvC_P5
  REGION 213..295: note = Tnp_domain
  SITE 220: note = Tnp_P1
  SITE 247: note = Tnp_P2
  SITE 255: note = Tnp_P3
  SITE 256: note = Tnp_P4
  SITE 268: note = Tnp_P5
MKNASSAKVFKDCLGIGIDVSKAELAVVGITLNQSYLKRVCNDMKAIKAFIQRLHQSGYRDKVVCESTGHYHLKLALVCHQIGVELIVLNPLQSSKHSKAKIRKTKTDPEDALMLATMCITEPNLPKPMQLTPSKALIRLKMGQLASIEKQLQQFHQSLRQYEETYAGLGLALSEYQQALCAHGSSLKRLRKQLEKELEGLLSHAVADDQSLADLRALPGFSNVVAGLVGILDRQVKGADSWTAYVGLDVSVRRSGTWQGRGRLTKRGNAYMRKRLFQAAWGACLNYDYVRAYYDQLKTQGRKHAEAVCIIARKLLRIAYYVVVNKVQFDPKIAFPN

SEQ ID NO: 13611 - protein, 343 aa, unidentified
  source 1..343: note = protein_0aca156
  REGION 6..149: note = RuvC_domain
  SITE 9: note = RuvC_P1
  SITE 54: note = RuvC_P2
  SITE 89: note = RuvC_P3
  SITE 91: note = RuvC_P4
  SITE 94: note = RuvC_P5
  REGION 213..302: note = Tnp_domain
  SITE 221: note = Tnp_P1
  SITE 251: note = Tnp_P2
  SITE 259: note = Tnp_P3
  SITE 260: note = Tnp_P4
  SITE 272: note = Tnp_P5
MKLTRVGVDLAKQVFQVHGVDRAERPAWCKRLKRSRWIADVERDVEPGCEIGMEACGGAHHWARVLQSKGYRVKLIAPQFVKPYVKTNKTDANDAEAICEAMSRPSMRFVAVKTVEQQDLQAVHRVRSSLIRERTAKANQLRGLVYEYGLVAPRELSSLRRAVPEWLEDAENGLTVRFRSLLAGLYRDLQQLDERVRELDREIAAIVREHEPVGRLEQLTGIGPLTASALYALVGDGRQYRSGRELAVALGLTPRQHSSGGKEKLFGISKRGDKYVRTLLIHGARSALRTAAGKPDRLSRWAVALAERSHPNVATVALANKLARIAWAMLRHGTNYEPEHVAA

SEQ ID NO: 13612 - protein, 339 aa, unidentified
  source 1..339: note = protein_adc9df6
  REGION 6..147: note = RuvC_domain
  SITE 9: note = RuvC_P1
  SITE 52: note = RuvC_P2
  SITE 87: note = RuvC_P3
  SITE 89: note = RuvC_P4
  SITE 92: note = RuvC_P5
  REGION 210..299: note = Tnp_domain
  SITE 218: note = Tnp_P1
  SITE 248: note = Tnp_P2
  SITE 256: note = Tnp_P3
  SITE 257: note = Tnp_P4
  SITE 269: note = Tnp_P5
MTHTIVGVDIAKSVMQVHWVDPETGEIVNRPVKRAAFLEYFANRSPCLIGMESCSGSQHWARRLIEMGHRVKLMPAKFVKAFNIRNKNDAADARAIWMATQMDSKEVAVKTEAQQAVLALHRMRQQLVKFRTMQINNLRGLLTEYGEVMGVGRAALDKAIVGVLEKLSGRLPAILIDTLREQWKGLEDLDRQIGQIERRLQEWMKDDQAAKLIAAIPGVGLLTATAAVATMGHAKTFKSGREFAAWLGLVPAQTGSGGKIELQGISKRGDTYLRTLLVHGARSIIYRVKDPGPWVTQMKQRRPLNVVIVAMANKLARIIWAILAHQLPYKKDYESVRPT

SEQ ID NO: 13613 - protein, 364 aa, unidentified
  source 1..364: note = protein_18ae8b2
  REGION 54..162: note = RuvC_domain
  SITE 97: note = RuvC_P3
  SITE 99: note = RuvC_P4
  SITE 102: note = RuvC_P5
  REGION 233..318: note = Tnp_domain
  SITE 241: note = Tnp_P1
  SITE 270: note = Tnp_P2
  SITE 278: note = Tnp_P3
  SITE 279: note = Tnp_P4
  SITE 291: note = Tnp_P5
MTHLGPHGPLSVPILARSLFPWNCLAQTGWSHPCPPVPGRRCPSIRLRRAMSRACASGSPGSSRRRWIHRVLESEGIESHVVDAASILTSRRRRRAKTDKIDGETLVRTLLAYKRGEPRVCSMVKAPTPEEEDRRRICRERKILVAERIEHVNRIKGLLFAQGIFDYQPLRRNRRERLEVLKTGDGRPVPPRLKVQISRELDRLENVLTQLEAVETERDALIEQASQDASAPAAMLTQLKGIGPEFAAILWSEGLFRSFDNRRQVAAYAGLAPTPWQSGSVDREQGVSKAGNPRLRTAMIQLAWLWLRHQPGSALSCWFHERVKRNGGRLRKTTIVALARKLLIALWKYATTGVVIEGALAKAA

SEQ ID NO: 13614 - protein, 343 aa, unidentified
  source 1..343: note = protein_e8de034
  REGION 7..149: note = RuvC_domain
  SITE 10: note = RuvC_P1
  SITE 53: note = RuvC_P2
  SITE 88: note = RuvC_P3
  SITE 90: note = RuvC_P4
  SITE 93: note = RuvC_P5
  REGION 211..295: note = Tnp_domain
  SITE 219: note = Tnp_P1
  SITE 249: note = Tnp_P2
  SITE 257: note = Tnp_P3
  SITE 258: note = Tnp_P4
  SITE 270: note = Tnp_P5
MTNDTMIGVDLAKSVFQVHGASMTGELRFRKKLSRQNFPKFMADQPPAVVVMEACGSAHHWAREMVRLGHEVRLIAPHYVKPFVKRQKNDEADAEAIVIAAQRPEMRFVQPRTADQQSSAILYRSRQRLVRQRTELVNALRASLYEYGHVVPLGIQHIKRIREIVEAPNSDLPALMREECVEMLDQISEQTDRIAGRTAKIKALAAATDSARRLQTVPGVGPLTAMAVEAFAPPMESFRKGRDFAAWLGLVPRQFSSGGKERLGRITKAGQADIRQMLIIGAMSRLNWMGRKSIPEGSWLAGMLGRKPRMLVAIALANKMARQIWAMLTRNENYRDPALAMTA

SEQ ID NO: 13615 - protein, 343 aa, unidentified
  source 1..343: note = protein_221db8a
  REGION 5..152: note = RuvC_domain
  SITE 8: note = RuvC_P1
  SITE 55: note = RuvC_P2
  SITE 92: note = RuvC_P3
  SITE 94: note = RuvC_P4
  SITE 97: note = RuvC_P5
  REGION 212..300: note = Tnp_domain
  SITE 220: note = Tnp_P1
  SITE 250: note = Tnp_P2
  SITE 258: note = Tnp_P3
  SITE 259: note = Tnp_P4
  SITE 271: note = Tnp_P5
MDHFAGLDVSVKETSVCIVDDTGRIVREVKVASEPECLLAVLTNPAYHFKRIGLEAGPLSQWLFSALAEAGLPVICVETRHMRAVLKAQINKTDRNDARGMAQMMRAGLYRPVHVKTLRSQKLRMLLTHRKLLQSKAIAVDNDLRGTLRNFGLKVGMVGTLKFEARIKELVENLPDLAVLVEPLLIVRRVLREQIGILHRRLLAIVRDDEVCRRLMTIPGVGPVVALTYRATVDVPARFRKSKAVGAVFGLTPTQHQSGESDRPGGISRCGDEMMRVMLYEAAQITLTRTNKWSWLKAWAMKIARHRGMKKAIVALARRLAVIMHRIWVDGTEFRWTREAAAA

SEQ ID NO: 13616 - protein, 346 aa, unidentified
  source 1..346: note = protein_3bce2bc
  REGION 14..156: note = RuvC_domain
  SITE 17: note = RuvC_P1
  SITE 60: note = RuvC_P2
  SITE 95: note = RuvC_P3
  SITE 97: note = RuvC_P4
  SITE 100: note = RuvC_P5
  REGION 218..303: note = Tnp_domain
  SITE 226: note = Tnp_P1
  SITE 256: note = Tnp_P2
  SITE 264: note = Tnp_P3
  SITE 265: note = Tnp_P4
  SITE 277: note = Tnp_P5
MGKSITDLSAVTTVGLDLAKHVFQVHGVDAWGRVVVAKSIRRNKLLQFFASLPSSVVGLEACSSAHHWARELITLGHDARMMPPAYVKPYIRRQKNDAADAAAICEAATRPSMRFVGVRSLENQAASMRHKTREMLVSQRTQLLNALRGHLTEVGVIAPQGLRYARGLAELIEACDETIPFEVCEALAPLVVQLRNLDEAIARLDRTIAKMAQKDETARRLMSIPGFGPITASAMAATIPDTSSFAGPREFAAFLGLTPKQNSSGGKPKLGRISKMGNRYLRKLLVVGAHAVLFHRKPHTDPLRMWAKKLIEKKPFKLVAVALANKMARIAFAILRGKTVYREIPA

SEQ ID NO: 13617 - protein, 336 aa, unidentified
  source 1..336: note = protein_0e05277
  REGION 4..155: note = RuvC_domain
  SITE 7: note = RuvC_P1
  SITE 60: note = RuvC_P2
  SITE 100: note = RuvC_P3
  SITE 102: note = RuvC_P4
  SITE 105: note = RuvC_P5
  REGION 200..286: note = Tnp_domain
  SITE 208: note = Tnp_P1
  SITE 237: note = Tnp_P2
  SITE 245: note = Tnp_P3
  SITE 246: note = Tnp_P4
  SITE 259: note = Tnp_P5
MFQLGIDVSKKTLDLCLLREGVKGRVKTRKLKNDFNAVGTVVSWLRKQHCEPGDVHIIMEATGVYHESLAYGLHDAGAKVSLSNPHRSRAFARGMDILTKNDKVDAYMLACYGALKEPEPWEPPPENVRYLSALLRRRDALVTDSSREKNRLEKCRATDTPAAVAESIENVLRNLSAELQRLDTLIQGHLGQHPELKKDFDLLTSIKSVGFLLGLNMLVILRCHHFETAEQAAAFLGVVPVEKNSGTSVRGRGRLSKIGPPEIRAKLYLASLCGMRFNPTMKAMYERLCQRGKAKMCAIGALMRKLVHWCYGVLKTQKTFDAKYLVSDEHSACKVT

SEQ ID NO: 13618 - protein, 345 aa, unidentified
  source 1..345: note = protein_7b73709
  REGION 7..147: note = RuvC_domain
  SITE 10: note = RuvC_P1
  SITE 53: note = RuvC_P2
  SITE 88: note = RuvC_P3
  SITE 90: note = RuvC_P4
  SITE 93: note = RuvC_P5
  REGION 210..298: note = Tnp_domain
  SITE 218: note = Tnp_P1
  SITE 248: note = Tnp_P2
  SITE 256: note = Tnp_P3
  SITE 257: note = Tnp_P4
  SITE 269: note = Tnp_P5
MDKITRIGIDTSKHVFQLHGVNAAEKPVLRKKMRRKESIDFLTTCPPTVIAIEACGGSHHWARLLTSLGHEVKMIAPQLVKPYVKRSKNDAADAEALCEAMSRPTMRFVPVKTVDEQAALMVVGVRGRLIRNRTQLANAIRGYAAEFGISAAKGLAHIPLLLERIQADATVPELARELFASQAEEYAQLEEKIADVDAKLKAWQRTDERSKRLNRIPGIGPIGAALLIMKTPAPELFRSGRQFAAWIGLTPKDHSTGGKLRLGRITRAGDEALRAVLVVGATTVIQHARRSGKASPWLTELLKRKPPKLAAVALANKMARIAWKIMVSGETYNVKLAPALMVNAA

SEQ ID NO: 13619 - protein, 339 aa, unidentified
  source 1..339: note = protein_a6e8011
  REGION 5..158: note = RuvC_domain
  SITE 8: note = RuvC_P1
  SITE 56: note = RuvC_P2
  SITE 97: note = RuvC_P3
  SITE 99: note = RuvC_P4
  SITE 102: note = RuvC_P5
  REGION 220..305: note = Tnp_domain
  SITE 228: note = Tnp_P1
  SITE 258: note = Tnp_P2
  SITE 266: note = Tnp_P3
  SITE 267: note = Tnp_P4
  SITE 278: note = Tnp_P5
MSVLIGVDPHKRSHQAVAVDRDERRLAELNVRAAKDQTQRLLAWAAQFPDRRWAIESAAGLGYLLSQQLVAAGEEVLDVPATLAARVRVLGSGRSQKNDPNDAFSTAIAALRQRGLRQVRADDHRAILRMLATRHHDLGALRTQAACRLHASLAALIPGGFSGRLSAKRAGSLLRGIRPTEGVTAERKAQASELVADLRRLDAAIAATRKRIEVAVAASKTSVTDVYGVGPVVAAIVVGHAGDVRRFWTRNHFASYNGTAPLEASSGPRKRHRLNPRGNRQLNHAIHMAAVTQIRNDTPGRAYYERKIAEGKTKKEALRALKRRISDAVYRQLLVDADR

SEQ ID NO: 13620 - protein, 347 aa, unidentified
  source 1..347: note = protein_188df72
  REGION 7..148: note = RuvC_domain
  SITE 10: note = RuvC_P1
  SITE 53: note = RuvC_P2
  SITE 88: note = RuvC_P3
  SITE 90: note = RuvC_P4
  SITE 93: note = RuvC_P5
  REGION 211..296: note = Tnp_domain
  SITE 219: note = Tnp_P1
  SITE 249: note = Tnp_P2
  SITE 257: note = Tnp_P3
  SITE 258: note = Tnp_P4
  SITE 270: note = Tnp_P5
MAEVTIIGVDLAKRVFQAHGAAADGSVIFRRKLPRDRFLSFLADQPRCIVAMEACATSHDWGREIKRLGHSVRLIPPVYVKPFVKRQKNDAADAEAIAEAASRPTMRFVTIKTEAQQARAMLFRTRDMLVRQRTQTINALRGHLAEHGVVAPQGAVQVKRLADAINEDTSRLPTMVRDLGQLYLEQISSLTAKIVDLDKRLRTAAFQAETTRRLQTMPGVGPITAVAMETFAPPMEEFRRGRDFAAWLGLVPRQHSTGGKARLGKTSKMGQRDIRRLLIIGAMAVVKAAVRRGGASDTQGENAWLSRMLAKKPRMLVAIALANKMARGLWAMMTKEQNYRNPAVTAA

SEQ ID NO: 13621 - protein, 315 aa, unidentified
  source 1..315: note = protein_f2fbcf8
  REGION 7..150: note = RuvC_domain
  SITE 10: note = RuvC_P1
  SITE 53: note = RuvC_P2
  SITE 93: note = RuvC_P3
  SITE 95: note = RuvC_P4
  SITE 98: note = RuvC_P5
  REGION 189..273: note = Tnp_domain
  SITE 197: note = Tnp_P1
  SITE 226: note = Tnp_P2
  SITE 234: note = Tnp_P3
  SITE 235: note = Tnp_P4
  SITE 247: note = Tnp_P5
MSEVNCFAADVSKRELVIAVYPGEVGVKRIANQDAAISAWLDTLPAGSVIAMEATGTYHRRLADLAHGRGLVVYVVNPRNVYYYVRGMGARGKTDPSDAKLLARYVAHERAQLHPYVPPSALCERLTTLLERRAVLVRSRQALTQSLAELPALGREKRNLFKAIATLLSGIDRELAALTSSDASTATLVTRLKTISGVGPLVASLLCALFKRFAFRHADALIAYLGLDPRPDESGQHRGRRRLSKRGHPEWRRLLIAAAMSAARTKIWRDYVTLQRAKALPATAVHVILARKMLRTAFALFKNGQEFIPPRVRPT

SEQ ID NO: 13622 - protein, 344 aa, unidentified
  source 1..344: note = protein_a762c67
  REGION 1..142: note = RuvC_domain
  SITE 44: note = RuvC_P2
  SITE 82: note = RuvC_P3
  SITE 84: note = RuvC_P4
  SITE 87: note = RuvC_P5
  REGION 206..292: note = Tnp_domain
  SITE 214: note = Tnp_P1
  SITE 244: note = Tnp_P2
  SITE 252: note = Tnp_P3
  SITE 253: note = Tnp_P4
  SITE 265: note = Tnp_P5
MAKRVIQVHAVDATGQVVVAKALPRDGFMPWCAQLPPGTLIAMEACSGAHHWTCKLRALGLDARMMAAHFVTPYRMQGKGGKNDANDAAAVCEAASRPSMRFVPLKTPAQQAMLAIHRLREVYKEERTACINRIRGLLTEFGLVFAQRPEVLRRDLSDVLEDATNELPALLRMALRQARLHWLELECHMAWCDERIEAHVRTDEQAKAAAQLCGVGPVTASALVAMVGDFKQFRSGNQFGAWLGLVPRQNSSGGKATLGQITKRGDDYLRTLLIQGAKAAMVHAKKRSDRISLWLVSLIDRIGRQKAVVAMANKNARILWAVLTKGTAYDPNHVSINPGLPTTV

SEQ ID NO: 13623 - protein, 330 aa, unidentified
  source 1..330: note = protein_016d258
  REGION 6..147: note = RuvC_domain
  SITE 9: note = RuvC_P1
  SITE 52: note = RuvC_P2
  SITE 87: note = RuvC_P3
  SITE 89: note = RuvC_P4
  SITE 92: note = RuvC_P5
  REGION 200..290: note = Tnp_domain
  SITE 208: note = Tnp_P1
  SITE 238: note = Tnp_P2
  SITE 246: note = Tnp_P3
  SITE 247: note = Tnp_P4
  SITE 259: note = Tnp_P5
MNVTTIGIDLAKTVFSIHGTDQHGKVVVRKRLNRPKLLAFFAQLPPCLIGMEACSGAHYWAREMTKLGHDARIIAPRFVAPYRKSSKNDDNDAEAICEAVSRPNMRFVPIKTEDQQATLSLHRIRRGLTKERTAQINQIRGLLAEFGLIIPQGRYAARRRVPEILEDAENGLPMLARRLLNNINQRILQLDEEILAYEQAKRLMAIPGIGPQTATALLASAPDPRQFKSGRHFAAWLGLVPRQYSTGGKPRLGRITKRGDKYLRTLLIHGTRAVIATIDTKEDRLSAWAKELKERRGYKRAAVAMAAKNARIVWALLMNQTEFKTQPVEG

SEQ ID NO: 13624 - protein, 340 aa, unidentified
  source 1..340: note = protein_e932fb6
  REGION 14..161: note = RuvC_domain
  SITE 17: note = RuvC_P1
  SITE 66: note = RuvC_P2
  SITE 106: note = RuvC_P3
  SITE 108: note = RuvC_P4
  SITE 111: note = RuvC_P5
  REGION 208..294: note = Tnp_domain
  SITE 215: note = Tnp_P1
  SITE 245: note = Tnp_P2
  SITE 253: note = Tnp_P3
  SITE 254: note = Tnp_P4
  SITE 267: note = Tnp_P5
MSKESVSSHVTVYAGIDVSAATLAVAVQREDRTGFEQRQLANSAMGHKQLIGWLLKCGGIVRVSLEATGIYSLDVALALDLAENIEVAVLNPKIANRFAQTLRRSKTDPADAVALAEYSRRMPFVAWQRPGRIELELRAISRHIVTLTDEHTRLSNRLHAAEASDTTPRCVRQDLKHSIDALKKRIVRLRKAALALVEQNETLAMKFKQLIEIPGIAEASALQLLGELAPLDPQMTARQWVAHSGLDPAHQVSGSSVHKPSRISRHGNRYLRRALYMPALVGVRFDPHMKAFYLQLQVRHKTKLQALMAVARKLLHAIHGIFKSRTHYDGRKLFPQLGVA

SEQ ID NO: 13625 - protein, 300 aa, unidentified
  source 1..300: note = protein_9a6d859
  REGION 1..104: note = RuvC_domain
  SITE 9: note = RuvC_P2
  SITE 44: note = RuvC_P3
  SITE 46: note = RuvC_P4
  SITE 49: note = RuvC_P5
  REGION 168..253: note = Tnp_domain
  SITE 176: note = Tnp_P1
  SITE 206: note = Tnp_P2
  SITE 214: note = Tnp_P3
  SITE 215: note = Tnp_P4
  SITE 227: note = Tnp_P5
MQTSLIGMEACSGAHFLGRALREQGHDVKLIPAQFVKPFVKSNKNDFLDAEAIAEAVDRENMRFVPIKTDDQLDLQALHRVRDRLIARRTSVINQLRSFLLERGMTFSKTPARLKLAMPEILENADVNLTPRMRNLVSLLWSEWQDLEQQILVMNAEVEQIASSDPACRRLRQIPGVGPLVATAIVAAIGNGAAFHKGREFSSWLGLVPRQHSTGDKARLFGISKRGNNYLRKILVHGARSAVLRVKREKSPFGPWLDALEQRAPINVVITAAANKLARIAWAVLSSGQDYRAVPDAMTA

SEQ ID NO: 13626 - protein, 347 aa, unidentified
  source 1..347: note = protein_a022488
  REGION 6..147: note = RuvC_domain
  SITE 9: note = RuvC_P1
  SITE 52: note = RuvC_P2
  SITE 87: note = RuvC_P3
  SITE 89: note = RuvC_P4
  SITE 92: note = RuvC_P5
  REGION 211..298: note = Tnp_domain
  SITE 219: note = Tnp_P1
  SITE 249: note = Tnp_P2
  SITE 257: note = Tnp_P3
  SITE 258: note = Tnp_P4
  SITE 270: note = Tnp_P5
MKVTTVGIDLAKNVFQIHGVSEFGKPLIKKQLRRNQMAEFFVNLPPCLVGMEACGSAHHWARKLQAMGHTVKLMAAQFVKPYVKTNKNDAADAEAICEAVTRPNMRFVPIKNVEQQSVLLLHRARQGFVKARTAQANQIRGMLSEFGLIIPLGIRHIANHVPELIEDASNVLPGSFRLLIERLLNHLKELDRQVDELESQIVAWHRQSEASSKLARIPGIGPITASALVASLGDAKSFDSGRQVAAWLGLVPKQHSSGGRQNLLGISKRGDSYLRTLLIHGARSVVLRASLKSDPNRTCSWINDVVNRRNKNVAAVALANKNARIAWALLTHDRRYEAGYIASKASA

SEQ ID NO: 13627 - protein, 348 aa, unidentified
  source 1..348: note = protein_7609010
  REGION 9..151: note = RuvC_domain
  SITE 12: note = RuvC_P1
  SITE 55: note = RuvC_P2
  SITE 90: note = RuvC_P3
  SITE 92: note = RuvC_P4
  SITE 95: note = RuvC_P5
  REGION 214..304: note = Tnp_domain
  SITE 222: note = Tnp_P1
  SITE 252: note = Tnp_P2
  SITE 260: note = Tnp_P3
  SITE 261: note = Tnp_P4
  SITE 273: note = Tnp_P5
MNATPKSVVGVDTAKSVFQLYTVDKETGEVINQQIKRAQFLQWFANRAPCLVGMEACGGSQHWARKLQALGHEVKLMSGKMVKAFVCGNKNDSADARAIYMAAQQLEVKAVAVKSEGQQAVLAMHRIRQQLVKVRTAQINELRGLLGEYGEVFGTGRKAFDSGMKAALDRLAERLPAPLIDTLRDQWNELARLDERIVRIEASLLAWMRQDRVANAIFAIPGVGLLTATAAVAAMGDAKAFRSGREFAAWIGLIPGQTGSGGKIRLLGMSKRGDVYLRTLLIHGARAVLRHAKEPGPWLKQLSQRRPPNVVIVALANKMARMIWAVLAHERAYDKDHVSVRPHAAAAA

SEQ ID NO: 13628 - protein, 401 aa, unidentified
  source 1..401: note = protein_6ed1f38
  REGION 10..164: note = RuvC_domain
  SITE 13: note = RuvC_P1
  SITE 62: note = RuvC_P2
  SITE 102: note = RuvC_P3
  SITE 104: note = RuvC_P4
  SITE 107: note = RuvC_P5
  REGION 270..356: note = Tnp_domain
  SITE 278: note = Tnp_P1
  SITE 308: note = Tnp_P2
  SITE 316: note = Tnp_P3
  SITE 317: note = Tnp_P4
  SITE 329: note = Tnp_P5
MTVVRDKAWIGIDVGKTHHWACVVDANGRTLSSVKLANDETDLVAFVDRAGSLAQQLIWAVDIIGAPSALLLGVLARAGHSVHYASGRVVAAMSAAYTGEGKTDAKDAYVIAETARLRRDLTVIDAGTDLVRNLAVLTGHRTDLIADRVRMINRLRDLLTSVFPSLERAFDYSAHKGALVLLTRYASPDRIRRLGQTRLTQWLRNRKVRGADDVAARALAAAEAQSIVLPGQELTATIVSELAGAILALDERVKALDEKIRHEFSRHPQAEIIESMPGFGPFLGAALLVGAGDLRAFPTAGHLAAAAGLVPVPNDSGRRTGNLHRPLRYSRPLRHVFYLSAQTSMMRAGPNRDYYLKKRARGATHTQAVIALARRRIDVLWALLRENRTWTATPPPAAQAA

SEQ ID NO: 13629 - protein, 401 aa, unidentified
  source 1..401: note = protein_70f53b7
  REGION 9..163: note = RuvC_domain
  SITE 12: note = RuvC_P1
  SITE 60: note = RuvC_P2
  SITE 100: note = RuvC_P3
  SITE 102: note = RuvC_P4
  SITE 105: note = RuvC_P5
  REGION 270..355: note = Tnp_domain
  SITE 278: note = Tnp_P1
  SITE 308: note = Tnp_P2
  SITE 316: note = Tnp_P3
  SITE 317: note = Tnp_P4
  SITE 329: note = Tnp_P5
MNSEYGVFLGLDVGKGEHHAVGLDPAGKRLHDAPLPNSEPKLRAVFDKLARHGRLLVVVDQPATIGALPVAVARACGHQVAYLPGLAMRRIADLYPGHAKTDARDAFIIADAARSLPHTLRQVDVGDDTLAELEVLVGFDDDLAGEATRIGNRIRGLLTGIHPALEGAIGPKIAHPAVLEILSRCGGPTGIRRAGRRTLTAIATTHAPRIGEKLVTAIWAALDEQTVIVPGTTAADTVLPRLADSLKTVLAQREQVKHEVEEILDAHPLAAVLTSMPGIAVRTAARILLEIGDASAFASSAHLAAYAGIAPVTRASGSSIKGEHPARSGNRKLKRAFFLSAFAALHDPISRAYYDRKRAEGKKHNAALICLARRRCDVLYAMLRNKTQFRHPQPATVATAA

SEQ ID NO: 13630 - protein, 340 aa, unidentified
  source 1..340: note = protein_e0d03bc
  REGION 5..158: note = RuvC_domain
  SITE 8: note = RuvC_P1
  SITE 56: note = RuvC_P2
  SITE 97: note = RuvC_P3
  SITE 99: note = RuvC_P4
  SITE 102: note = RuvC_P5
  REGION 220..306: note = Tnp_domain
  SITE 228: note = Tnp_P1
  SITE 258: note = Tnp_P2
  SITE 266: note = Tnp_P3
  SITE 267: note = Tnp_P4
  SITE 278: note = Tnp_P5
MTVIIGIDPHKASHTAVAIGCDERPLAEVRVRATCQQTEKLLAWAKPLGPRTWAVESAGGMGYLLSQQLVSAGEDVVDVPATLASRIRVLGTGRSNKNDPNDALSVAIAALRSPGLRSVRVADHGELLRLLAKRNHEIGRLRNIIVSRLHAALQNLSPGGIAKELNASDAIALLGAYEPVTPVEHTRYELALELLEDVKRLDVQLKASHKRIKTAVQASGTTLTELYGVGPILAAELIGFSGDIRRFTSRDQFASYAGVAPVELSSGGRTVHRLSRRGNRQLNHAIHMVAICQIRQTNSEGRIYFEKKVAEGKTKREAIRSLKRHVANAVYRQLLLDATK

SEQ ID NO: 13631 - protein, 398 aa, unidentified
  source 1..398: note = protein_cd32405
  REGION 10..164: note = RuvC_domain
  SITE 13: note = RuvC_P1
  SITE 61: note = RuvC_P2
  SITE 101: note = RuvC_P3
  SITE 103: note = RuvC_P4
  SITE 106: note = RuvC_P5
  REGION 271..356: note = Tnp_domain
  SITE 279: note = Tnp_P1
  SITE 309: note = Tnp_P2
  SITE 317: note = Tnp_P3
  SITE 318: note = Tnp_P4
  SITE 330: note = Tnp_P5
MDQHRFDVFVGLDVGKEHHHATALNAGGKRLHDKALPQDETALREVFAKLTAHGLVLVIVDQPATIGALPVTVARAMGIEVAYLPGLAMRSIADLHPGNAKTDARDAYIIAEAGRTMPHALRRVGGDDDLIADLAVIVGFDDDLAGEVNRVSNRIRGLLTQIHPALERAIGGNISHPAVLALLAKYCGPTGLADAGRRRLTTTAKALAPRMHERLVEAIVKALTEQTVTVPGTRAAELVLPQLAAQLQGLLTQRAEAAKQVEEALDAHPLSQLLMSMPGVGIRTAARLLLDVGDGSAFPTAGHLAAYAGLAPVTRRSGSSIRGEHPSRGGNKHLKRALFLSAFAALHDPDSRAYYDRKRAAGKKHNAALVCLARRRVDVLHAMLRNGTYYQPRTPAAA

SEQ ID NO: 13632 - protein, 353 aa, unidentified
  source 1..353: note = protein_9e4be2d
  REGION 14..154: note = RuvC_domain
  SITE 17: note = RuvC_P1
  SITE 60: note = RuvC_P2
  SITE 95: note = RuvC_P3
  SITE 97: note = RuvC_P4
  SITE 100: note = RuvC_P5
  REGION 219..305: note = Tnp_domain
  SITE 227: note = Tnp_P1
  SITE 257: note = Tnp_P2
  SITE 265: note = Tnp_P3
  SITE 266: note = Tnp_P4
  SITE 278: note = Tnp_P5
MSSNLQKHADVSAIGIDIGKNTFHLIGQDRRGKIIMRARVSRAQLMERLVNVPKCLIGMEAGAGAHHIARRLIELGHDVRLIPAQYVKPFLKGHKNDYRDAEAIIEAVQRPTMSFVAVKTAEQCDLQAIHRVRSRLVRLRTGAINQIRGLLLERGVVIGQRTAPLRKALPVILADPPKHLSPRVLRLIMALIDELNMLEARIDALTEEIKALAAEDDACQRLMSVPGIGVIISSAVVSAIGTGGTFKQGRDFAAWLGLVPRQVSTGGRTKLAGLSKRGNCYLRHLFVQAAHVILVKKPVAAQAALWPWIERAAKRMAHRNLLATALANKLARIAWAVLARGHSYRPIANPGQV

SEQ ID NO: 13633 - protein, 402 aa, unidentified
  source 1..402: note = protein_e5c7fa2
  REGION 8..164: note = RuvC_domain
  SITE 11: note = RuvC_P1
  SITE 60: note = RuvC_P2
  SITE 101: note = RuvC_P3
  SITE 103: note = RuvC_P4
  SITE 106: note = RuvC_P5
  REGION 270..356: note = Tnp_domain
  SITE 278: note = Tnp_P1
  SITE 308: note = Tnp_P2
  SITE 316: note = Tnp_P3
  SITE 317: note = Tnp_P4
  SITE 329: note = Tnp_P5
MAAGQLWAGVDVGKEHHWVAVVDSAGTMVLSRKLANDEQQISKLVAEVDRLGAQVSWTVDLTTVYATLLLAVLAEAGKSVRYLSGRSVWQASVIYRGGEAKTDANDAQVIADQSRMRGDDLPVLHPDDDLVTELRMLTAHRADLVADRTRTINRLRQQLVAVCPALERAAQPAQDRGWVALLARYQRPNAIRHSGITRLTRVLADAGVRNAPVIAQAAVTAAKTQTVRLPGEEVAAALVAQLAQGVIALDERIKQIDADIEDRFRRHPLAEVITSLPGIGFRLGAEFLAAVGDPALINSADQLAAWAGLAPVPKDSGKRTGRMHTPQRYSRRLRRVMYMSALTAIRCDPHARSYYQRKRNEGKRAVPATICLARRRTNVLYALIRDNRTWQPDSPPITTTAA

SEQ ID NO: 13634 - protein, 338 aa, unidentified
  source 1..338: note = protein_b4dc62d
  REGION 6..147: note = RuvC_domain
  SITE 9: note = RuvC_P1
  SITE 52: note = RuvC_P2
  SITE 87: note = RuvC_P3
  SITE 89: note = RuvC_P4
  SITE 92: note = RuvC_P5
  REGION 211..297: note = Tnp_domain
  SITE 219: note = Tnp_P1
  SITE 249: note = Tnp_P2
  SITE 257: note = Tnp_P3
  SITE 258: note = Tnp_P4
  SITE 270: note = Tnp_P5
MEPTTIAIDLAKRVFQIHFVEPGTGVIHSKALKRAQLTPFFANRAQCRIVMEACGSAHHWARQLAALGHDVRLIAAQFVRPFVKSNKNDAADAAAIWEAAQRPGMRFVAIKSEDQQAMLALHRMRQQLVRFRVMQVNQLRGLLYEFGVILPQGRRASIDAAKASLASIADQVPAMLIDSLQDQLSRLLALDEQILHIEQRITEWRRGDEACRRISEIPGVGLLTATAAVAVIGNAHAFRSGREFAAYLGLVPRQNGSGGKVKLGGISKRGDVYLRTLLIHGARSVISSSKHLPERMRSMLARRPTNVVAVALANKVARIIWALLAYGRTYQCPTAAPA

SEQ ID NO: 13635 - protein, 344 aa, unidentified
  source 1..344: note = protein_a34bc12
  REGION 6..147: note = RuvC_domain
  SITE 9: note = RuvC_P1
  SITE 52: note = RuvC_P2
  SITE 87: note = RuvC_P3
  SITE 89: note = RuvC_P4
  SITE 92: note = RuvC_P5
  REGION 211..297: note = Tnp_domain
  SITE 219: note = Tnp_P1
  SITE 249: note = Tnp_P2
  SITE 257: note = Tnp_P3
  SITE 258: note = Tnp_P4
  SITE 270: note = Tnp_P5
MKVTTVGIDLAKNLFQVHGVNEFGKVVIKKQIRRDQLAEFFVNLPACLIGMEACGGAHHWARKLQGFGHTVKLMAPQFVKPYVKTNKNDAADAEAICEAVTRPNMRFVPIKNVEQQAVLALHRVRQGFVRARTAQANQIRGLMAEFGLIIPQGIGYVTARAPALIEDASNDLPGAFRILVQRLLDHLKELDRQVDELESQIVKWHRQSDASSKLAHVPGIGPITASALVASLGDAKNFDGGRQVAAWLGLVPKQHSSGGKQTLLSISKRGDTYLRTLLIHGARSVIYRAQQKPDACTWINGVVSRRNRNVAAVALANKNARIVWALLAHDREFRSDYTTTNVAL

SEQ ID NO: 13636 - protein, 340 aa, unidentified
  source 1..340: note = protein_3007d0c
  REGION 7..149: note = RuvC_domain
  SITE 10: note = RuvC_P1
  SITE 53: note = RuvC_P2
  SITE 88: note = RuvC_P3
  SITE 90: note = RuvC_P4
  SITE 93: note = RuvC_P5
  REGION 211..303: note = Tnp_domain
  SITE 219: note = Tnp_P1
  SITE 249: note = Tnp_P2
  SITE 257: note = Tnp_P3
  SITE 258: note = Tnp_P4
  SITE 270: note = Tnp_P5
MEDVSIIGLDIAKNSFQAHGASAAGVVVFRKKLPRGKVLEFLSRQPTCVVALEACATSHYWGREIIRLGHEVRMIPPIYVKPFVKRQKNDAADAEAIAEAAVRPTMRSVAVKSEQKQALGMAFRARDLLVRQRTQTINALRGHLAEFGVIAPIGTAHLKRLRASIEDPDGVLVPEVLEIANIFLRQIDAQQTEIDALGARLRARAPADNTASRLMTIPGIGPIGAAAIIAFAAPMEGFRKGRDFAAWLGLPPRQYSTGGKTVLGRMSRMGQRDIRRLLITGAMAVVRWAGIRGTNEPWLQRMLDRKPRMLVAVALANKMARIVWALMTQGGEYRVPAPAA

SEQ ID NO: 13637 - protein, 342 aa, unidentified
  source 1..342: note = protein_10f31e0
  REGION 7..149: note = RuvC_domain
  SITE 10: note = RuvC_P1
  SITE 53: note = RuvC_P2
  SITE 88: note = RuvC_P3
  SITE 90: note = RuvC_P4
  SITE 93: note = RuvC_P5
  REGION 212..299: note = Tnp_domain
  SITE 220: note = Tnp_P1
  SITE 250: note = Tnp_P2
  SITE 258: note = Tnp_P3
  SITE 259: note = Tnp_P4
  SITE 271: note = Tnp_P5
MVQPVTAGLDIAKNVFHAYGVDANGEKVFSRKLRRAQVESFFAKLEPCLIGIEACATAHHWARTIEKMGHQVRLMPPAYVKPYVKTQKNDEADAEAICEAVTRPNMRFAETKTVEQQSVLVLHRTRAMLIKHRARMGNTIRAHLAEFGITESIGRIGLHRLIEVVVSGEDDRITEVARRAMMCLVEQYRLLQDQILDLDRQVMVCHRSNDASRRLATIPGIGPLAASALVASVGDASSFKNGRSFAAFIGLVPKQSSSGGKERLGKISKRGDHYLRWLLVVGGLAVIRYAQRHGTRRPWLVKLLQRRTAKIAAVAMANKMARIAWVLMARGGAYREPEAQAA

SEQ ID NO: 13638 - protein, 340 aa, unidentified
  source 1..340: note = protein_846e88e
  REGION 6..148: note = RuvC_domain
  SITE 9: note = RuvC_P1
  SITE 52: note = RuvC_P2
  SITE 87: note = RuvC_P3
  SITE 89: note = RuvC_P4
  SITE 92: note = RuvC_P5
  REGION 211..297: note = Tnp_domain
  SITE 219: note = Tnp_P1
  SITE 249: note = Tnp_P2
  SITE 257: note = Tnp_P3
  SITE 258: note = Tnp_P4
  SITE 270: note = Tnp_P5
MQVSTIGLDIAKNVFQVHGIDAGEKVVVRRQLRRGQMPGFFEALPACLIGMEACASAHHWARELTKLGHEVRLMPAKDVKAYVKRNKNDAADAEAICEAVRRPTMRFVRVKSAEQQGQMMQHRTRDLLMRQRTQVINALRAHLAELGIAAAQGREGIKELLAIIADDRDERLPIDARASLLVLAAQLQALQTLIGSIEKRIIAQHRANADSKRLQTIPGVGLIGATAIAATVTDPKAFRSGRDFAAWVGLVPREDSTGGKRKLGPISKQGDRYLRRILVVGAHSVLRRAKLHPEKYPWLTRLLARRPFKVVAIALANKMARIAWALLVKGGTYRPRLAAA

SEQ ID NO: 13639 - protein, 400 aa, unidentified
  source 1..400: note = protein_6b7b678
  REGION 10..164: note = RuvC_domain
  SITE 13: note = RuvC_P1
  SITE 62: note = RuvC_P2
  SITE 102: note = RuvC_P3
  SITE 104: note = RuvC_P4
  SITE 107: note = RuvC_P5
  REGION 270..356: note = Tnp_domain
  SITE 278: note = Tnp_P1
  SITE 308: note = Tnp_P2
  SITE 316: note = Tnp_P3
  SITE 317: note = Tnp_P4
  SITE 329: note = Tnp_P5
MSKRKAQVWAGVDAGKGHHWAAVVDETGATLWSKQVDNDESAILTALGEILELADQVHWAVDISGTSSALLLALLAAHGQRAVYVPGRTVNRMSGAYRGEAKTDARDAYVIAETSRQRRDFATIDVPAQLAADLALLTAHRSDLVADRVRMINRLRDVLTGVFPALERAFDYSSHKGALVLLTGYQTPAAIRRRGRARLTAWLANRTVRGADTVAVTALEAAQAQQTSLPGEDVAAQIVADLATQILALDDWLKRVDKQIRETFRGHPQAEIIESLPGMGPILGAEFVVAAGDLTTYADAGHLASAAGLVPVPRDSGRRTGNLHRPKRYSRRLRRVFYMSAQTSIIRDGPNRDFYLKKRGEGCKHVQAVIALARRRASVLWALLRDNRVFTPTRPVPQTA

SEQ ID NO: 13640 - protein, 341 aa, unidentified
  source 1..341: note = protein_ef5bf53
  REGION 7..149: note = RuvC_domain
  SITE 10: note = RuvC_P1
  SITE 53: note = RuvC_P2
  SITE 88: note = RuvC_P3
  SITE 90: note = RuvC_P4
  SITE 93: note = RuvC_P5
  REGION 210..294: note = Tnp_domain
  SITE 218: note = Tnp_P1
  SITE 248: note = Tnp_P2
  SITE 256: note = Tnp_P3
  SITE 257: note = Tnp_P4
  SITE 269: note = Tnp_P5
MDEVSIVGVDLAKQVFQVHGAAADGRVLFRKKLSRPQFLKFMAGLPQCVVAMEACGTAHYWGRELTRHGHEVRLIPPIYVKPFVKRQKNDAADAEAIAEAAQRPTMRGVTVKTAEQQAQAMLFRTRDLLVGQRTQLVNALRGHLAEHGIVLGKGIGNVHHLAVRIEEDKSLPGLVRDMARLYLDRIAGLSAEIDNLNTRIAAAAKESDVARKLQTMPGVGPICAMAITTFAPDLREFRRARDFSAWLGLVPRQHSSGGKQKLGRTSKMGQRDIRRLLIVGAMSVVHWRGRDGGRPGSWLSRMLARKPRMLVAIALANKMARMVWAMLVRNEEYRDPAGAVC

SEQ ID NO: 13641 - protein, 320 aa, unidentified
  source 1..320: note = protein_2d254e8
  REGION 8..163: note = RuvC_domain
  SITE 11: note = RuvC_P1
  SITE 56: note = RuvC_P2
  SITE 96: note = RuvC_P3
  SITE 98: note = RuvC_P4
  SITE 101: note = RuvC_P5
  REGION 195..279: note = Tnp_domain
  SITE 203: note = Tnp_P1
  SITE 232: note = Tnp_P2
  SITE 240: note = Tnp_P3
  SITE 241: note = Tnp_P4
  SITE 252: note = Tnp_P5
MSASSVVVGIDVAKEHVDIAVLGAERVALRWANDADAHSALAAALQPLNVALVVMEATGGYEAALACALQAAGLPVAVSNPRQARDFAKSMGRLAKTDTIDAHMLAEFASVLVRRKDLANFIRPLADTQQQALAAMVTRRRQLLGMLLSERQRLQLAIPVVRPSIEAMIDAIREQLDDVDAQMVTHVREHYSALDELLRSASGIGPVASATLIAELPELGRLNRRQIAALVGVAPMAWDSGTTRGRRRIQGGRFDIRRVLYMAALTASRRNPPIAAFYQRLIAAGKPPKVALVACMRKLLTVLNAMVKTSTPWDSSLHSA

SEQ ID NO: 13642 - protein, 317 aa, unidentified
  source 1..317: note = protein_4ac0e89
  REGION 9..154: note = RuvC_domain
  SITE 12: note = RuvC_P1
  SITE 57: note = RuvC_P2
  SITE 97: note = RuvC_P3
  SITE 99: note = RuvC_P4
  SITE 102: note = RuvC_P5
  REGION 195..279: note = Tnp_domain
  SITE 203: note = Tnp_P1
  SITE 232: note = Tnp_P2
  SITE 240: note = Tnp_P3
  SITE 241: note = Tnp_P4
  SITE 252: note = Tnp_P5
MVTSYQNFIGIDIGKFKNVAAVYNQNYIIKFDNNADGWQLLFKKFSDILPNSLVTLENTGKYELDLSHFLVDKNIAVHRANTRKVRSFILSHGTLAKSDKSDAMALAQYGCERHRTLSLFVPTSKEQSTLAALCQRRDDITQMRTQEKCRLEAPENDHTRESCQKTIEFFNSQINELNDTIQKIIDESHELQQRQKILKTVPGIGKKLSQDFLCLMPELGYLSRKEVASLAGVAPHPKESGKAVGYRRIMGGRSNVRSKLFISAIAATKSKSVLGAFYSKLVESGKKKMVAIAALMRKIIVIANARLKAAITSHSSN

SEQ ID NO: 13643 - protein, 325 aa, unidentified
  source 1..325: note = protein_6e6f882
  REGION 4..156: note = RuvC_domain
  SITE 7: note = RuvC_P1
  SITE 61: note = RuvC_P2
  SITE 101: note = RuvC_P3
  SITE 103: note = RuvC_P4
  SITE 106: note = RuvC_P5
  REGION 200..286: note = Tnp_domain
  SITE 208: note = Tnp_P1
  SITE 237: note = Tnp_P2
  SITE 245: note = Tnp_P3
  SITE 246: note = Tnp_P4
  SITE 259: note = Tnp_P5
MMIIGIDVGKAKLDALWLKDTTTGANKTKMFANTAQGHAALIEWALHQTQSPLESLHFIMEATGVYSDAIAHALYQAGAQVSVLNPAHVRDYAKSIGVRTKTDKKDSGVLARYGATQQPRLWRPEPTEIRYLKALLSRYEAINEDIQREKNRREKAEVIQAVDVVTSIDTVLEQLIKEKKRLEQLINQHIDQHPRLKQDREFLESIPGVGPVVSRYMLSVLRSRAFESGPQSAAFLGLVPVHHESGSSVRGRARLSKTGNATVRAKLYMAAVVAIQHNPDIKKQYERLLKNGKTKMSALGAAMRKLVQICFGVLKHQKSYRAQAV

SEQ ID NO: 13644 - protein, 336 aa, unidentified
  source 1..336: note = protein_b583aee
  REGION 2..142: note = RuvC_domain
  SITE 44: note = RuvC_P2
  SITE 82: note = RuvC_P3
  SITE 84: note = RuvC_P4
  SITE 87: note = RuvC_P5
  REGION 212..298: note = Tnp_domain
  SITE 220: note = Tnp_P1
  SITE 250: note = Tnp_P2
  SITE 258: note = Tnp_P3
  SITE 259: note = Tnp_P4
  SITE 271: note = Tnp_P5
MKSWSVTILSETSVLKKMSQGADPDALHRFLTSHYPEAEYYSVYEAGFCGFWIHDRLTELGIHNIVVNPADVPTMSSEKLRKTDAVDSRKLAVSLRAKQLKGIYTPDSEALEIRSLIRLKNSITKDMTRQKNRIKSQLRYLGIEIPTEYLEPHSNWSKRFLNWLREVEMRTPSGRQTLDILIMQFEALRKQKAEMTRRLRALSHTDRFEEMLGLLMTVPGIGQTTGLALMAEIVDITRFDNAEQLAAYVGMIPMCHSSGEHEGVGDITLRKHAILRSNVIEAAWVAIRKDEAMQLCYLNNCKRMVPSKAIVKVARKLVNRIYFVLKRHQPYVNAVA

SEQ ID NO: 13645 - protein, 306 aa, unidentified
  source 1..306: note = protein_51edd55
  REGION 7..149: note = RuvC_domain
  SITE 10: note = RuvC_P1
  SITE 53: note = RuvC_P2
  SITE 88: note = RuvC_P3
  SITE 90: note = RuvC_P4
  SITE 93: note = RuvC_P5
  REGION 212..296: note = Tnp_domain
  SITE 220: note = Tnp_P1
  SITE 250: note = Tnp_P2
  SITE 258: note = Tnp_P3
  SITE 259: note = Tnp_P4
  SITE 271: note = Tnp_P5
MEKIMTVGLDLAKTVFQVHAIDAAGVSIVRRSLRRSQVLAFFEKLPPCVVGMEACGTSHFWAREITALGHDVRMMPPIYVKAYVKRGKTDAADAEAICEAVTRPTMRFVPVKTANQQGAGMILKTRELLIRQRSQTANALRAHMSELGIVTTTGMASVAKLIGLIRNESESHMPEGARFALKELAEQIEALNVRVERLDRQIIAAVKDDEDARRLTSIPGVGPIIAATVRAAVPDPSGFRSGRDFAAWIGLTPRANSSGGKERVGSISKRGNRQLRMLLIVGATSILKLGKWGLKMPQWVGALMLR

SEQ ID NO: 13646 - protein, 283 aa, unidentified
  source 1..283: note = protein_2b4ce52
  REGION 4..84: note = RuvC_domain
  SITE 23: note = RuvC_P3
  SITE 25: note = RuvC_P4
  SITE 28: note = RuvC_P5
  REGION 146..244: note = Tnp_domain
  SITE 154: note = Tnp_P1
  SITE 184: note = Tnp_P2
  SITE 192: note = Tnp_P3
  SITE 193: note = Tnp_P4
  SITE 205: note = Tnp_P5
MAFGHDVRLIPPAYVKPYLRRQKNDAADAAAICEAVTRPSMRFVPVKSPQQQSTLMLHGARDLLIAQRTALINALRGHFAELGIVVAQGARNSRQLLAFLQEGNPDVPTTARIALQPLAAMLLGIEAQIARLDKAILAAHRSDPISVRLAAIPGIGPIVASCLSASIPDASLFQGSREFAAYLGVVPRQHSTGGKARLGSISKMGNRHLRRLLVVGAHAALYSMKSGKTRTALADWARSLLAKKPFKVVAVALANKMARIAWAVMARSVAYEPGSTGAGASAA

SEQ ID NO: 13647 - protein, 392 aa, unidentified
  source 1..392: note = protein_13e1b9f
  REGION 5..164: note = RuvC_domain
  SITE 8: note = RuvC_P1
  SITE 61: note = RuvC_P2
  SITE 102: note = RuvC_P3
  SITE 104: note = RuvC_P4
  SITE 107: note = RuvC_P5
  REGION 267..354: note = Tnp_domain
  SITE 275: note = Tnp_P1
  SITE 305: note = Tnp_P2
  SITE 313: note = Tnp_P3
  SITE 314: note = Tnp_P4
  SITE 327: note = Tnp_P5
MTVVIGIDVAKDKHDCFILNSMGVILEDVFTIPNTLEGFNLMLSKIRTHTTPQDKIKVGLEATGHYSYNLLGFLLNNGLTTYVLNPLQTNLYRKSLTLRKTKTDRVDARMIASMLLSDVGLKPYTDTAYHNEELKSLTRYRLDKVQDRAKLKSSVSRLVCILFPELEKLVSTLHMASIYALLEEFPGAKQIANANLTHLKNLLATASKGRYGREKAVEIRDTARASIGSHMPAKSLELRHTIHLIRELDREINDIEAEIQKIMDELDSPITTIPGVGLQMGAMILAEVGDFYNFDSPDKVLAYAGLSPSTYQSGQLKNCYPHMEKRGSRYLRYALFNAAKYVCIWNPTFAAYLAKKRSEGKHYFVAVSHAAKKLVRLIFALERSGQSYRQAA

SEQ ID NO: 13648 - protein, 341 aa, unidentified
  source 1..341: note = protein_017daa5
  REGION 7..149: note = RuvC_domain
  SITE 10: note = RuvC_P1
  SITE 53: note = RuvC_P2
  SITE 88: note = RuvC_P3
  SITE 90: note = RuvC_P4
  SITE 93: note = RuvC_P5
  REGION 209..295: note = Tnp_domain
  SITE 217: note = Tnp_P1
  SITE 247: note = Tnp_P2
  SITE 255: note = Tnp_P3
  SITE 256: note = Tnp_P4
  SITE 268: note = Tnp_P5
MKPAALIGIDLGKHSFHLHAQDSSGREVFRKKTTRQQLMRLLVNQPACTVVMEACAGSHCLAREITALGHEAKLISPQFVRPFVQGNKNDFIDAQAICEAASRPSMRFVTPKNEAQQTLSVLHRLRESLIRDRTKAINQLHGFLLEFGISLPVGKAVIRRLPSVLTEHELPVRLSALLQRLHEHFTYLDEQIKALDKEVASQLGEDDLGSRLLTIPSVGPITASVLVAEMGDGKQYASSRDFAASVGLVPRQYSTGGRANLLGISKRGDKNLRRLLVQCARVYMLRLEHQRGALADWVRSLLCRRHSNVVACALANKLARIAWAIATQHSRYETGAGDYAA

SEQ ID NO: 13649 - protein, 322 aa, unidentified
  source 1..322: note = protein_62403f0
  REGION 7..156: note = RuvC_domain
  SITE 10: note = RuvC_P1
  SITE 54: note = RuvC_P2
  SITE 94: note = RuvC_P3
  SITE 96: note = RuvC_P4
  SITE 99: note = RuvC_P5
  REGION 190..274: note = Tnp_domain
  SITE 198: note = Tnp_P1
  SITE 227: note = Tnp_P2
  SITE 235: note = Tnp_P3
  SITE 236: note = Tnp_P4
  SITE 247: note = Tnp_P5
MAMLSFGGIDVSKDRLDVMVLPEEQCSSVPNDAAGWAKLVEQLRGFSISAIGIEASGGYERGAVRALLAAGMSVRQVNPFKLRQFARASGVLAKNDPLDARMIASFVAVMPTRPAQRQTPAAERLAEMLAVRRQLSAEKVAAENASRLLEDAMLQRLSRRRIARLAADIDMLDGHLVEVVGTDAPLAHRYRLLTSMTGVGTVLACTLIALLPELGGMTRKQVAALVGVAPYAFESGTLKGRRCIWGGRANVRQVLYMAAMSASNWTPGLKAFHDRLKAAGKKPKVTIVAVMRKMITTLNGMLRDDVVWADRLRGRHSVPTVR

SEQ ID NO: 13650 - protein, 345 aa, unidentified
  source 1..345: note = protein_3a35b83
  REGION 5..152: note = RuvC_domain
  SITE 8: note = RuvC_P1
  SITE 55: note = RuvC_P2
  SITE 92: note = RuvC_P3
  SITE 94: note = RuvC_P4
  SITE 97: note = RuvC_P5
  REGION 212..300: note = Tnp_domain
  SITE 220: note = Tnp_P1
  SITE 250: note = Tnp_P2
  SITE 258: note = Tnp_P3
  SITE 259: note = Tnp_P4
  SITE 271: note = Tnp_P5
MKYYAGLDVSVKETSVCIVDETGAISHEIKVLSHPEDLAQVLKNPAWELVRIGLEAGPLSQWLFSGLAEAGLPAICIETRHAKAFLKAQVNKTDRNDARGIAQMMRVTLFRPVHVKTLRSQKRRALLTARKLLQEKAIAIENDIRGLLRNFGLKVGVIGTIRFDARNRDLIEGLPDLVEITTPLLAARQKLREEFSRLHRRVLEIARDDTVCNRLMTIPGVGPVTSLAFISTIDVPARFRNSRAVGPALGLTPVLNQSGESHRVGRVSLCGDAMMRALLYEAAQVMLTRVQKWSWLKAWAMNVAKWGGLRKAIVALARRLAVIMHRIWTDGTNFRWTRETTAVAI

SEQ ID NO: 13651 - protein, 342 aa, unidentified
  source 1..342: note = protein_8c95cab
  REGION 6..151: note = RuvC_domain
  SITE 9: note = RuvC_P1
  SITE 53: note = RuvC_P2
  SITE 91: note = RuvC_P3
  SITE 93: note = RuvC_P4
  SITE 96: note = RuvC_P5
  REGION 211..296: note = Tnp_domain
  SITE 219: note = Tnp_P1
  SITE 249: note = Tnp_P2
  SITE 257: note = Tnp_P3
  SITE 258: note = Tnp_P4
  SITE 270: note = Tnp_P5
MAVVTVGIDLAKNLFAVHGVDKNGNTVLVKPKVTRAALPELIANLPPCTVGMEACSGAHYWARLFRQYGHDVKLMAPKFVSPYRLAGKAGKNDAADALAICEAVRQPHMRFVPVKDEEQQSMQCLHRTRQGFIEERTASYNRLRGLISEFGLIAPQSTEQLRRLAREHRKNLPGWVSQCVDDLLSHIDNIELKIAEYDRILAKIAARDSRSQNIMKLRGVGSITVRALIASIGSGHDFKNGRQLAAWLGLTPSQYCSGGKTRLGKITKAGDAYLRTLLVQGARSVMIGVEHKQDPFSRWVCSLINRRGYWRAAVAIAAKNARLCWASLNYGDDFKLYSSPNS

SEQ ID NO: 13652 - protein, 398 aa, unidentified
  source 1..398: note = protein_f23c3ec
  REGION 10..164: note = RuvC_domain
  SITE 13: note = RuvC_P1
  SITE 61: note = RuvC_P2
  SITE 101: note = RuvC_P3
  SITE 103: note = RuvC_P4
  SITE 106: note = RuvC_P5
  REGION 271..356: note = Tnp_domain
  SITE 279: note = Tnp_P1
  SITE 309: note = Tnp_P2
  SITE 317: note = Tnp_P3
  SITE 318: note = Tnp_P4
  SITE 330: note = Tnp_P5
MAPSDYAVFVGLDVGKEAHHACALDPGGARVHDKVLPQSEAQIRQVLTRLADRGRVLVVVDQPASIGALAVTVAREVGIDVAYLPGLAMRRIADLHPGNAKTDARDAYVIADAARSMPHALRRVDAGDEALADLEVIVGYDDDLAGEVTRVSNRIRGLLTQIHPALERVLGPKIQHQAVLELLIRFGGPQGLASASRRQLLAATKGRAPRSYEALISALTTALEEQTVTVPGTRAAELVLPKLATTLRELLQQREQAAGQIEEMLDAHPLSTVLTSMPGIGVRTGARILLEVGDGSSFATSGHLAAYAGLAPVTRRSGTSIRGEHPARGGNKQLKRAFFLSAFASLSDPASRAYYDRKRAEGKKHNAALICLARRRTDVLHAMLRNGTLYEARTPAAA

SEQ ID NO: 13653 - protein, 284 aa, unidentified
  source 1..284: note = protein_acd512f
  REGION 6..148: note = RuvC_domain
  SITE 9: note = RuvC_P1
  SITE 52: note = RuvC_P2
  SITE 87: note = RuvC_P3
  SITE 89: note = RuvC_P4
  SITE 92: note = RuvC_P5
  REGION 211..254: note = Tnp_domain
  SITE 219: note = Tnp_P1
MKYSVIGMDIAKQVFQLHRVEVETGEVERIKLRRDDVLPYFARQAPAMVALEACGSAHWWARKLSALRHQVRLLHPKSVRPFVLRNKTDAADARAIWTAAQQPDARFVAAKTETQQAILALHRLRAQLLKFRIMQTNALRGLLYEFGEVLPEGHAALSKALPAALANLDTHLPAVLLDSLREQWTRVMSVDKEIAAIERRLATILRDTPSCQAVAEIPGVGLLTATAAVASIGEAKAFKSGREFAAWPDWCPDSEAQVDGSGNWAFPNGAMSICVPCSCMAHGR

SEQ ID NO: 13654 - protein, 411 aa, unidentified
  source 1..411: note = protein_ac434de
  REGION 5..164: note = RuvC_domain
  SITE 8: note = RuvC_P1
  SITE 61: note = RuvC_P2
  SITE 101: note = RuvC_P3
  SITE 103: note = RuvC_P4
  SITE 106: note = RuvC_P5
  REGION 272..358: note = Tnp_domain
  SITE 280: note = Tnp_P1
  SITE 311: note = Tnp_P2
  SITE 319: note = Tnp_P3
  SITE 320: note = Tnp_P4
MRLCVGDDWAEDHHDIEVMDEAGTVLAAGRLPEGVAGIGQLHELIGRFVPAAGGDAEVQVGIETDRGPWVAALIAAGYVVFAVNPLQASRYRGRRGVSGAKSDGGDAHMLADVVRTDAHQLRPAAGDSPQAEGIKVLARTHKTLIWQRSAVVLRLRAQLLEYFPAAVAAFEDLDAPDVLELLGKAPDPARAAKLTRAQVSAVLKRAGRRKITERAGAILAALRSPQLARPPALTAAYAATVRSLTAVIATLNEQVASLQGQVEAHFGQHPDAEIYLSQPGLGAITGARVLGEFGDDPHRYATAKNRRNYAGTSPITRASGKKKIVQARYVRNDRLTDALMLQAFAALRVSPGARAFYDQQRASGRQHNEALRRLASRLAGILHGCLKTRTCYDEATAWGHRENTPQSDAAA

SEQ ID NO: 13655 - protein, 391 aa, unidentified
  source 1..391: note = protein_9d7a65d
  REGION 4..163: note = RuvC_domain
  SITE 7: note = RuvC_P1
  SITE 60: note = RuvC_P2
  SITE 101: note = RuvC_P3
  SITE 103: note = RuvC_P4
  SITE 106: note = RuvC_P5
  REGION 266..353: note = Tnp_domain
  SITE 274: note = Tnp_P1
  SITE 304: note = Tnp_P2
  SITE 312: note = Tnp_P3
  SITE 313: note = Tnp_P4
  SITE 326: note = Tnp_P5
MIYVGIDVAKDKHDCFITNSDGEVLFKAFSISNNLDGFTELYQKIKSVMDDVTKIKVGLEATGHYSYNLLGYLIDKGLPAYVINPLHTNLYRKSLSLRQTKTDKVDARTIASMLMSDVNLKSYSDTSYHNEELKSLTRYRFDKVKERANLKTSISRLVCILFPELEKLVPQLHMASVYAMLSEFPGAKQVASAHLTRLTNLLSESSKGHYGKETAITFRDAARASIGSYMPAKSLELKHTIKLIQELDSEINEIENEIKIIMDKINSPILSIPGISYRMGAMIIAEIGDFSRFDSPDKILAYAGFSPSTYQSGQLNGAYAHMEKRGSRYLRYALYNATKYVCHWDPTFTAYLAKKRAEGKHYNVAISHAAKKLVRVIYHLEKTKQQYITAA

SEQ ID NO: 13656 - protein, 344 aa, unidentified
  source 1..344: note = protein_fe9b122
  REGION 5..152: note = RuvC_domain
  SITE 8: note = RuvC_P1
  SITE 55: note = RuvC_P2
  SITE 92: note = RuvC_P3
  SITE 94: note = RuvC_P4
  SITE 97: note = RuvC_P5
  REGION 212..298: note = Tnp_domain
  SITE 220: note = Tnp_P1
  SITE 250: note = Tnp_P2
  SITE 258: note = Tnp_P3
  SITE 259: note = Tnp_P4
  SITE 271: note = Tnp_P5
MYHYAGIDVSLECSSVCLVDGTGKILREAKVASEPEALIGWFRSLGLVLERIGLEAGPLSQWLYAAMRDAGLAVELLETRHVRDAFKAMPVKSDRNDARGIAQLMRLGWFRPVHCKSIEAQETRAVLTARKLLQSKLRDIENSLRGVLRGFGLKVGPTTERTFAERIRELVAGHPGLEVVAQALLEAHAVLRREFNGLDKHTQRLARSHPQAKLLMTTPSVGPIVALTYASAIDDPKRFRSSKATGAHFGLTPKKYQSGETDYTGRISKIGDASVREALYQAAHVMLTKPVRNCSALKGWAMRIARRAGMRKAKVALARKLAVILHRMLADAKPFNPMAKASAT

SEQ ID NO: 13657 - protein, 392 aa, unidentified
  source 1..392: note = protein_8b39d85
  REGION 5..164: note = RuvC_domain
  SITE 8: note = RuvC_P1
  SITE 61: note = RuvC_P2
  SITE 102: note = RuvC_P3
  SITE 104: note = RuvC_P4
  SITE 107: note = RuvC_P5
  REGION 267..354: note = Tnp_domain
  SITE 275: note = Tnp_P1
  SITE 305: note = Tnp_P2
  SITE 313: note = Tnp_P3
  SITE 314: note = Tnp_P4
  SITE 327: note = Tnp_P5
MVISVGIDVSKDKHDCFIVSSEGEVLADVFTIPNTIEGFHCLLQRIRDCTAPQDKIKVGLEATGHYSYNLLGFLLDNGLATYVLNPLRTNLYRKSLSLRKTKTDRVDARTIASMLLSDAGLKPYTDTAYHNEELKSLTRYRFDKVKERAKLKSSIARLVCILFPELEKIVPSLHIASVYALLEEFPGAKQIAAAHLTRLKALLVTASKGRYNRDMAFEIRDAARNSIGSRMPAKSLELQHTIRLIRELDDEIEEIEEQIHSIMDELHSPITTIPGLGFRMAAMILAEVGDFTRFDSPDKLLAYAGMSPSTYQSGQLKNCYPHMEKRGSRYLRYALYNAAKYVCQWDPTFSAYLAKKRAEGKHYNVAISHAVKKLVRLIFAMEKSGVPYLLAA

SEQ ID NO: 13658 - protein, 379 aa, unidentified
  source 1..379: note = protein_32a9a16
  REGION 11..160: note = RuvC_domain
  SITE 14: note = RuvC_P1
  SITE 60: note = RuvC_P2
  SITE 100: note = RuvC_P3
  SITE 102: note = RuvC_P4
  SITE 105: note = RuvC_P5
  REGION 258..343: note = Tnp_domain
  SITE 266: note = Tnp_P1
  SITE 295: note = Tnp_P2
  SITE 303: note = Tnp_P3
  SITE 304: note = Tnp_P4
  SITE 316: note = Tnp_P5
MPAAETPVAYLGIDVGKSSHSACALDAGGGVAFRAELANRPDDIDRLLERAGSGALVVVDQKRNIGALVLARAHAHGNPCAYLPGYAEKQARGMFPGIAKTDAIDAEVIARTALGVPRALRPAPEEPEGTASLRILSSQREFASSARTRAKNRLRARARSTRRAAGRCRCWPSSAGPPGARPPAGAGSRTPPGARAPPRRGPGGSGRRCWPPPRSGRRLPAGEDVAVRILAREIASLDADIEELDSLVADSLAGDEVYECLLTVPGIGPKTAAALVTSIDISAFRGHDELASYCGVAPSDRRSGSSIRSTSPQHGGNRRLKNLLIFSCNSLIGTDNRFGRYYGECRARGMRHSKALKAVARKRLKVIYAIMRDAVPYAA

SEQ ID NO: 13659 - protein, 254 aa, unidentified
  source 1..254: note = protein_8c602b2
  REGION 1..56: note = RuvC_domain
  SITE 2: note = RuvC_P5
  REGION 121..206: note = Tnp_domain
  SITE 129: note = Tnp_P1
  SITE 159: note = Tnp_P2
  SITE 167: note = Tnp_P3
  SITE 168: note = Tnp_P4
  SITE 180: note = Tnp_P5
MDAEAIAEAVERKNMRFVPIKTDDQLDLQAIHRVRDRLISRRTAVINQLRAFLLERGLVFAKTPAKLRAALPDILENADLDLTTQMRNLIGLLWNEWKTVEDQIEGLSLELERISAADPGCSRIRQIPGIGPIVATAIVAAIGNGAAFRKGRDFAAWLGVVPRQYSTGGKARLLGISKRGNVYLRKILIHGARAAVLRIKRDRAPIGAWLDALDARAPKNVVVVAMANKLARIAWAVLSSGENYRPISNMVTAS

SEQ ID NO: 13660 - protein, 411 aa, unidentified
  source 1..411: note = protein_7697203
  REGION 25..179: note = RuvC_domain
  SITE 28: note = RuvC_P1
  SITE 77: note = RuvC_P2
  SITE 117: note = RuvC_P3
  SITE 119: note = RuvC_P4
  SITE 122: note = RuvC_P5
  REGION 285..371: note = Tnp_domain
  SITE 293: note = Tnp_P1
  SITE 324: note = Tnp_P2
  SITE 332: note = Tnp_P3
  SITE 333: note = Tnp_P4
  SITE 345: note = Tnp_P5
MEDWPEALPVFFILPWEVSVMSFFVGIDVSKEKFDARCIEKQGEKAFSLTCSMNRGGFEKLILNLPADKASLLLGMESTASYHIPLFSYLTAQGYNVVIINPLLINNFAKRSLRKTKTDKKDAFTIAQFLMHEKGSFSAQTHDHMVTELKDLASRREKLADHVTSLKGNMKNILSVTFPELEDLTGVFTKSTLRLLTEYPSAHALREADHTTVADILITRSRGRKPLASVKALMALAASSVGVASPAKELVLKQEASLLLHVQEQMKETTKLLMSLLNKKIKQDMEILCSMKGIGENTAVNFLIEMGGEVEVYENDKKLIAASGLDPSTYQSGKYEGKSRISKRGNRHLRRVIWLMATKVIINNNLFRTYFFKRRKEGLPYKKAVLATAHKLIRVMFAMLSRKTCFVEGGN

SEQ ID NO: 13661 - protein, 345 aa, unidentified
  source 1..345: note = protein_54eb39d
  REGION 7..149: note = RuvC_domain
  SITE 10: note = RuvC_P1
  SITE 53: note = RuvC_P2
  SITE 88: note = RuvC_P3
  SITE 90: note = RuvC_P4
  SITE 93: note = RuvC_P5
  REGION 212..304: note = Tnp_domain
  SITE 220: note = Tnp_P1
  SITE 250: note = Tnp_P2
  SITE 258: note = Tnp_P3
  SITE 259: note = Tnp_P4
  SITE 272: note = Tnp_P5
MNKVTIIAIDLAKNSFQVCKFNKNNNVAYNKAINRKALIELLGKHEPVLVAMEACGGAHYWARLAQRYGHQVKILQARAVKGLQLKQKTDKNDAYAIGIAAQLPHIRSCCVMSEEEQGLQSLERVRTLQIEQRTALVNQIRGLLSEFGIVISKGIRNLIKSLSDILEDGENGLPMNYRQALHAQSELLKQYTEQIEGYDKLITEHTRDNPTCQKLSKLEGVGPLAALGLTVRLGNAQEFDTGRDASSCIGLTPKQHSTGGKEHIGHISKFSADKRLRSLLYQGAMSVVHKVALRKPKTVKEQWLKKLIERRGKKVAAIAMANKTVRTAVALIKNNDDYQPALLAG

SEQ ID NO: 13662 - protein, 320 aa, unidentified
  source 1..320: note = protein_d9b0e8d
  REGION 10..150: note = RuvC_domain
  SITE 13: note = RuvC_P1
  SITE 55: note = RuvC_P2
  SITE 95: note = RuvC_P3
  SITE 97: note = RuvC_P4
  SITE 100: note = RuvC_P5
  REGION 190..274: note = Tnp_domain
  SITE 198: note = Tnp_P1
  SITE 227: note = Tnp_P2
  SITE 235: note = Tnp_P3
  SITE 236: note = Tnp_P4
  SITE 248: note = Tnp_P5
MAMTVSQSIIGVDVAKAEVVVYQSETAETKIVSNKKSELKAWLKSLPAGSAIAIEATNIYHVDTVNLAHSMGHIVYVIDGYRLSHYRKGTGGRAKTDFSDAQLLARYLKNEQADLRAWNPPPKIYTKLQSLLRRRAALVKMRVALNQSWAGEPSLKASSKSISACLDRHEGLIEKRILDAVTEAGLLHQVKRCQAVEGIGFLTAVALVMAFQRGEFESADAYIAFLGMDLRVSDSGQMSGRRSLSKKGDSEIRRLLHNAASAGIRSEAWKPLYEGYLARGLKTTQALVIIGRKLARIAFSLMKNLSEYQSKAVLGASPKP

SEQ ID NO: 13663 - protein, 323 aa, unidentified
  source 1..323: note = protein_92d475c
  REGION 9..151: note = RuvC_domain
  SITE 12: note = RuvC_P1
  SITE 56: note = RuvC_P2
  SITE 96: note = RuvC_P3
  SITE 98: note = RuvC_P4
  SITE 101: note = RuvC_P5
  REGION 191..276: note = Tnp_domain
  SITE 199: note = Tnp_P1
  SITE 228: note = Tnp_P2
  SITE 236: note = Tnp_P3
  SITE 237: note = Tnp_P4
  SITE 248: note = Tnp_P5
MAKRITMCAGIDTGKRKLDVALDGGSERFQADNTPDGHKVLVEWLRQHKIKRVGIEASGGYEQAVVAELRRQRFVVVVFQPAQVRAYGVFQLQRAKNDKIDAALIAACTAAVKKIHAAPDPRLQPFAEHLTMIDQITEDIARLKNRIESCRNMRLQKLWKEDIARLAKRERVELKALAAAIREHRDLAKRLALINSIDGIGLKTAMVILVRMPEIGQITREQAAALAGIAPYDDDSGDRSGARQIAGGRDRLRRALFAAAFPASFRWNPQLIAFYGRLTRAGKEHKRALIACARKLLIFANTVVARGTPWQKKLPEVAGIPAT

SEQ ID NO: 13664 - protein, 399 aa, unidentified
  source 1..399: note = protein_d9c62e1
  REGION 10..164: note = RuvC_domain
  SITE 13: note = RuvC_P1
  SITE 62: note = RuvC_P2
  SITE 102: note = RuvC_P3
  SITE 104: note = RuvC_P4
  SITE 107: note = RuvC_P5
  REGION 270..356: note = Tnp_domain
  SITE 278: note = Tnp_P1
  SITE 308: note = Tnp_P2
  SITE 316: note = Tnp_P3
  SITE 317: note = Tnp_P4
  SITE 329: note = Tnp_P5
MNDQRAHVWVGIDAGKAHHWVTAIDDQGAMLWTKKVSNDEGEILDSIAEVLALGENFTWAVDIVGTTSALLLALLASHGQSALYVPGRIVNRMAGAYRGEAKTDARDAYVIAETARHRHDLTPIRMPVEIIADLKLLIAHRGDLVADRVRMLNRLRDVLTGIFPRLDRAFDYAKHKGALVLLTGYQTPIALRRMGQARLTKWLSRRGVQGAPSVAEAALEAASGQQTQIGNERIAAQIIADLATQILALDTRLRALKNQITTIFRAHPQAEIVESMPGMGPILGAEFLAAAGPLDNYADDGHLAAAAGLIPVPRDSGRRTGNMHRPKRYNRQLRRSLYLSAQTSVIREGPNRDFYLKKRGEGYKHTQALLALSRRRVSVLWALLRDNRTFTQAPPSRVA

SEQ ID NO: 13665 - protein, 341 aa, unidentified
  source 1..341: note = protein_6e1b3fc
  REGION 7..148: note = RuvC_domain
  SITE 10: note = RuvC_P1
  SITE 53: note = RuvC_P2
  SITE 88: note = RuvC_P3
  SITE 90: note = RuvC_P4
  SITE 93: note = RuvC_P5
  REGION 209..295: note = Tnp_domain
  SITE 217: note = Tnp_P1
  SITE 247: note = Tnp_P2
  SITE 255: note = Tnp_P3
  SITE 256: note = Tnp_P4
  SITE 268: note = Tnp_P5
MDPISLIGIDLGKHCFHLHAQSASGRMVWRKKLTRSQMFTLLGNVPSCTVVMEACAGAHWVARRVEALGHQAKLISPQFVKPFLQSNKNDFADAQAICEAASRPSMRFVSARNEAQQTLSALHRVREGLVRDRTGTVNQIHAFLLEFGVSLPTGMAVIRRLPAVLGAHDLPPRLIALLERLQAHFKYLDAQIGEIEGDLMRQLREDERSQRLLEIPGIGPITASVLASELGDARQFASARQFAASVGLVPRQYSTGGKPTLLGISKRGDKNLRRLLVQCAKAVMQHIERRTDRLGAWVRGLLSRRHANVVACALANKLARIAWAILARGTHYQGAQAVAAA

SEQ ID NO: 13666 - protein, 318 aa, unidentified
  source 1..318: note = protein_3a28b94
  REGION 7..155: note = RuvC_domain
  SITE 10: note = RuvC_P1
  SITE 54: note = RuvC_P2
  SITE 94: note = RuvC_P3
  SITE 96: note = RuvC_P4
  SITE 99: note = RuvC_P5
  REGION 193..277: note = Tnp_domain
  SITE 201: note = Tnp_P1
  SITE 230: note = Tnp_P2
  SITE 238: note = Tnp_P3
  SITE 239: note = Tnp_P4
  SITE 250: note = Tnp_P5
MSDSVFVGIDVSSQILEVASSDQAKTWQVSNDVAGLEDLVSQLSTLGPALTVLEATGGYEFEAACALQAAGLAVAVVNPRTARDFARAMGALAKTDALDARMLAAFARVLHQHPERERFVKPLADTELQRLQALVLRRRQLVQMITSERQRMRISHVAARPSIERVIGFLKTELGDSDADVAAHVQRHHAELAAALASVPGIGAASVAVLLAELPELGKLDRRRVAALVGVAPLNRDSGQMRGQRTIWGGRANVRRILYMATLTAVRHNPILKTHYERLLAVGKRKKVALVACMRKLLTMLNAIAKHGSQWDPTLHSA

SEQ ID NO: 13667 - protein, 348 aa, unidentified
  source 1..348: note = protein_a98a6db
  REGION 6..147: note = RuvC_domain
  SITE 9: note = RuvC_P1
  SITE 52: note = RuvC_P2
  SITE 87: note = RuvC_P3
  SITE 89: note = RuvC_P4
  SITE 92: note = RuvC_P5
  REGION 212..298: note = Tnp_domain
  SITE 220: note = Tnp_P1
  SITE 250: note = Tnp_P2
  SITE 258: note = Tnp_P3
  SITE 259: note = Tnp_P4
  SITE 271: note = Tnp_P5
MKRTTIGLDLAKRVFQVHAVEVNTGEMVRVALKRSQVLRFFANREPAVVAMEACGSAQYWARELLKLGHEVRLITAQFVRPFVKTNKTDAADAEGIWEAAQRPGMRYVALKSEEQQAVLGLHRLREQRVKMRNMLVNQLHGLMAEFGVALPKGWTVMLKQAGELLADSERSPIPALLRGALLEQIEQVRALSDQVKGLERQIGAWQRRAEDCQRIAAIPGVGVLTATAAVATIGDARSFRSGREFAAFLGLVPRQSGTGGRVKLLGISKRGDRYLRTLLIHGARTVLSWQRRPGRELDPWLKGLLARRAPNVVIVALANKMARTIWALLAHGRTFQRGFGQAAACTAA

SEQ ID NO: 13668 - protein, 320 aa, unidentified
  source 1..320: note = protein_09f1a10
  REGION 10..151: note = RuvC_domain
  SITE 13: note = RuvC_P1
  SITE 55: note = RuvC_P2
  SITE 95: note = RuvC_P3
  SITE 97: note = RuvC_P4
  SITE 100: note = RuvC_P5
  REGION 191..274: note = Tnp_domain
  SITE 198: note = Tnp_P1
  SITE 227: note = Tnp_P2
  SITE 235: note = Tnp_P3
  SITE 236: note = Tnp_P4
  SITE 248: note = Tnp_P5
MTILTSPTVIGVDVAKAEIVAYREDLKNIQVINNDRTSIGRWLKTLPAQSSISLEATNLYHLDTAELAYGMGHRVYVVDPYRVSHYRESIGQRAKTDPCDARLLARYLTSEQHRLRVWSPPPRHYTVLKSLLNKRAQLMKARVSIMLSWSNEPLLEDLLAHGLEHFKQLDQAIQELLRKVSQEAGISENIRRCKAIEGIGELTATGLATTYMRGEFASADAFIAFLGMDLKAKDSGKKHSPRHLSKKGDGELRRLAHNAAMAACRSPVWKPFYESYLARGLARTQALVILARKLCRVAFALMKNQSEYQPNLRLQGSPAT

SEQ ID NO: 13669 - protein, 344 aa, unidentified
  source 1..344: note = protein_6a774d5
  REGION 7..149: note = RuvC_domain
  SITE 10: note = RuvC_P1
  SITE 53: note = RuvC_P2
  SITE 88: note = RuvC_P3
  SITE 90: note = RuvC_P4
  SITE 93: note = RuvC_P5
  REGION 212..303: note = Tnp_domain
  SITE 220: note = Tnp_P1
  SITE 250: note = Tnp_P2
  SITE 258: note = Tnp_P3
  SITE 259: note = Tnp_P4
  SITE 271: note = Tnp_P5
MKEVTTIGVDLAKNVFQVHGIDGSGDTVIRRQFRRRQLLPFFAKQPPCLVGMEACATSHHWAREIAALGHEVRLMPARYVKPYVKRNKNDAADAAAICEAVTRSTMRFVAVKSTEQQSVLMEHRTRELLVRQRTMLVNAIRAHMAEFGIVAPVGIPRVKELLAVIADGDDDRLPPIARACLEALARQFMSLHQEIAIAERRIHAWHRSNQASRRLETIPGIGPITATALAATITDPAVFKSGRELAAWIGLVPRQNSTGGKERLGRISKQGDQYLRWLLVAGAMSVIRHAKRRGATNLPWLANLMTSKPTKVAAVALANKIARIAWAVLRQGGTYQKLAAAPAA

SEQ ID NO: 13670 - protein, 342 aa, unidentified
  source 1..342: note = protein_d0d787b
  REGION 6..148: note = RuvC_domain
  SITE 9: note = RuvC_P1
  SITE 52: note = RuvC_P2
  SITE 87: note = RuvC_P3
  SITE 89: note = RuvC_P4
  SITE 92: note = RuvC_P5
  REGION 211..297: note = Tnp_domain
  SITE 219: note = Tnp_P1
  SITE 249: note = Tnp_P2
  SITE 257: note = Tnp_P3
  SITE 258: note = Tnp_P4
  SITE 270: note = Tnp_P5
MEITTIGLDLAKSIFQVHAVDAAGTVVVCKALRRSQVVPFFTKLPPCLVGIEACGTSHHWARALAKLGHEVRLMPPAYVKPYVKRGKTDANDAEAICEAVTRPTMRFVPVKSPEQQAALALHRTRDLLVKQRTQLVNMIRGLLAEFGIEIVRGLHHAIELAARIAKGDAPEVPDLAVRVITGLAGQIGDVQVRLAALEKELLAWHRSNELSQRLGTIPGVGLISATALGASVTDPGRFRSGRQFAASLGLTPLQNSSGGKERMGRISRMGDRYLRRLLVIGMTSLVRRARAKPDSVDPRIATMLARKPARVVTVAAANRTARIAWAIMARGGTYRAPIGMAA

SEQ ID NO: 13671 - protein, 410 aa, unidentified
  source 1..410: note = protein_f240c13
  REGION 5..164: note = RuvC_domain
  SITE 8: note = RuvC_P1
  SITE 61: note = RuvC_P2
  SITE 101: note = RuvC_P3
  SITE 103: note = RuvC_P4
  SITE 106: note = RuvC_P5
  REGION 272..358: note = Tnp_domain
  SITE 280: note = Tnp_P1
  SITE 311: note = Tnp_P2
  SITE 319: note = Tnp_P3
  SITE 320: note = Tnp_P4
MVLFVGDDWAEDHHDVEVMDAAGRRLAKARLPEGVAGIARMHAMIAEQLGDRVDETEVLVGIETDRGPWVAALVAAGYTVYAINPLSVARYRERHSVSGAKSDPADAHTIADMVRTDSHQLRPVAGDSAQAEAVKVVSRAHKTLIWERTRHTQRLRHALREYFPAALEAFDDLDAPDTLELLAKAPDPASAARLSISQIRAALKRARRRKIDEKAERIQAALRAEQLGRAEVITAAYAATTRSVAAVLATLNEQVKALQGQVDAHFGQHPDAEIIGSQPGMGPILGARVLAEFGDDPHRYTTAKNPKNYAGTSPITRASGKKKTVLARFVHNDRLIDALMTQAFSALQASPGARAYYDQQRARGAGHNPALRQLANRLVGIQHGCLKTRTHYDEATAWSHHTAKPLAAAA

SEQ ID NO: 13672 - protein, 344 aa, unidentified
  source 1..344: note = protein_f7c8199
  REGION 6..148: note = RuvC_domain
  SITE 9: note = RuvC_P1
  SITE 52: note = RuvC_P2
  SITE 87: note = RuvC_P3
  SITE 89: note = RuvC_P4
  SITE 92: note = RuvC_P5
  REGION 211..297: note = Tnp_domain
  SITE 219: note = Tnp_P1
  SITE 249: note = Tnp_P2
  SITE 257: note = Tnp_P3
  SITE 258: note = Tnp_P4
  SITE 270: note = Tnp_P5
MEITTVGIDLAKNVFQVHAISGTGEVLARRALRRAQVIPFFRRLSPCLVGMEACGTSHHWARELTSLGHTVRLMPPAYVKPYVKRGKTDAADAEAICEAVTRRTMRFVPVKSVEQQAALALHRTRDLLVRQRTQLINMIRGLLAEFGIDIPKGITHALAFVRRAVAGGAHEVLDLAAKVISALAEQAIEVQNRIRQLERDLLVWYRSNDLARRIATVPGVGLLGASALAATVTDPTQFRSGRQFAAWLGLTPLNNSSGGKERLGRISKMGDQYLRRLLVTGMTSLVRRNKHHPDAADPRVNALLTRKPIRLVTVALANRAARAIWAIMVRGEIYRMPAPSVAAA

SEQ ID NO: 13673 - protein, 318 aa, unidentified
  source 1..318: note = protein_da7e9dc
  REGION 7..155: note = RuvC_domain
  SITE 10: note = RuvC_P1
  SITE 54: note = RuvC_P2
  SITE 94: note = RuvC_P3
  SITE 96: note = RuvC_P4
  SITE 99: note = RuvC_P5
  REGION 193..277: note = Tnp_domain
  SITE 201: note = Tnp_P1
  SITE 230: note = Tnp_P2
  SITE 238: note = Tnp_P3
  SITE 239: note = Tnp_P4
  SITE 250: note = Tnp_P5
MPEAVFIGIDVSRDTLEIGSSTASSTWQYANDSDGIEAMTAELAKLAPALVVLEATGGYEFEAACALQAAGLSVAVVNPRQARDFARAMGTLAKTDSLDARMLAAFARVLHQHPQRERFIKQLPDAQLQRLHALVLRRRQLVTMPTAERARLTMAHASARPSIEQTIKFLKSQIDDVEHDCADHVRAHHAELAQALSSVKGIGPATVATLLAELPELGSLCRRRIAALVGVAPLNRDSGQMRGQRSIWGGRTEVRRALYMTTLVAVRHNTVFKSFYARLTALGKPKKVALVAAMRKLLTILNAMAKSGSHRNDSIQLA

SEQ ID NO: 13674 - protein, 389 aa, unidentified
  source 1..389: note = protein_0118d1a
  REGION 4..163: note = RuvC_domain
  SITE 7: note = RuvC_P1
  SITE 60: note = RuvC_P2
  SITE 101: note = RuvC_P3
  SITE 103: note = RuvC_P4
  SITE 106: note = RuvC_P5
  REGION 266..353: note = Tnp_domain
  SITE 274: note = Tnp_P1
  SITE 304: note = Tnp_P2
  SITE 312: note = Tnp_P3
  SITE 313: note = Tnp_P4
  SITE 326: note = Tnp_P5
MIVVGIDVAKDKHDCFIMNSEGEVLFNPFVIQNNREGFDSLYEKICSASDDFTKVKVGLEATGHYSYNILGYLLDKGLPTYVINPLHTNLYRKSLSLRKTKTDKVDAHTIAAMLLSDVNLKSYSNTLYHNEELKSLTRYRFDKVKERAKLKTSVARLVNILFPELEKLVSTLHMASVYELLSQYPSAKQIASVHLTKLTNLLSTASKGRYGKERAEEIRIAAKNSIGSDMPAKSLELKHTIKLIRELDAEIEEIEFHIEIIMDEINSPILTIPGISYRMGAMIIAEIGDFDNFNSPNKILAYAGLSPSTYQSGQLTSSCSHMEKHGSRYLRYALFNATKFVCNWDNTFAEYLAKKRSEGKHYNVAISHACKKLVRVIYHLETTGESYRR

SEQ ID NO: 13675 - protein, 360 aa, unidentified
  source 1..360: note = protein_8392726
  REGION 14..160: note = RuvC_domain
  SITE 17: note = RuvC_P1
  SITE 66: note = RuvC_P2
  SITE 102: note = RuvC_P3
  SITE 104: note = RuvC_P4
  SITE 107: note = RuvC_P5
  REGION 235..318: note = Tnp_domain
  SITE 271: note = Tnp_P2
  SITE 279: note = Tnp_P3
  SITE 280: note = Tnp_P4
  SITE 291: note = Tnp_P5
MAKTKAVHSSYVIGGVDTHKDLNVAAVVDQNNCVLGSEFFATTRQGYRQLLAWMASFGTVKRIGVECTGSYGAGLLRYLQSAGVDVLEVTAPDKMERRRRGKSDTIDAESAAHAAFSLIRTVTPKTRGGMIEALRVLKVCRKTAVAARRTALQMIQMNIVSAPDELRDQIRSLTRMQLIRTLASWRPDVTAYRNVQDAYRIALKSLARRYLELHDEIADLDVMLASIVDELAPELIKRNSVGYECASQLLITAGDNPLRLHSEAGFAALCGVSPVPASSGKKNRHRLNRGGDRAANSALHIIAIGRLRTDTKTQEYIGKRVAEGHSKMEALRCLKRYISREVYTLLRNQNRQINSTQITT

SEQ ID NO: 13676 - protein, 346 aa, unidentified
  source 1..346: note = protein_c6c61c8
  REGION 7..147: note = RuvC_domain
  SITE 10: note = RuvC_P1
  SITE 53: note = RuvC_P2
  SITE 88: note = RuvC_P3
  SITE 90: note = RuvC_P4
  SITE 93: note = RuvC_P5
  REGION 210..295: note = Tnp_domain
  SITE 218: note = Tnp_P1
  SITE 248: note = Tnp_P2
  SITE 256: note = Tnp_P3
  SITE 257: note = Tnp_P4
  SITE 269: note = Tnp_P5
MEQIIRIGMDTSKHIFQLHGVDAAERPVLRKRFGRKQMVAFFAELPPTVIGIEACGAAHYWARTLGEFGHEVKLIAPQHVKPYVKRNKNDRRDAEGLCEATGRPTMRFVPVKTAEQQAALMLTGLREQMVARRTQLSNAIRGYAAEFGVTAAKGLDKIEPLLADIAQDESVPALARELFAVQGRECAQLQVELKAIEAKLRAWHRANADSRRLAKIPGVGPIGATALVMKTPDPRAFASGRHFAAWLGLTPKDHSTAGKTRLGKITRAGDERLRSVLVAGATAVIQQAKHGRGRPSPWLLALLKRKPPKLAAVALANKIARIAWKLMVTGESYDGARMPAASASAA

SEQ ID NO: 13677 - protein, 343 aa, unidentified
  source 1..343: note = protein_c174885
  REGION 7..149: note = RuvC_domain
  SITE 10: note = RuvC_P1
  SITE 53: note = RuvC_P2
  SITE 88: note = RuvC_P3
  SITE 90: note = RuvC_P4
  SITE 93: note = RuvC_P5
  REGION 212..303: note = Tnp_domain
  SITE 220: note = Tnp_P1
  SITE 250: note = Tnp_P2
  SITE 258: note = Tnp_P3
  SITE 259: note = Tnp_P4
  SITE 271: note = Tnp_P5
MHAVTTIGLDIAKSIFQVHGVDAEGNVVVRRKLKRRYIVAFFQKLPPCLVGIEACASSHYWSRELQALGHTVRLMPPAYVRPYVKRHKNDAADAEAICEAVTRTNMRFVATKTPEQQSCLMLHRTRHLFIRQQTAVINATRAHLAEFGIVAPVGRNGVEELLNVVADSTDKRVPEIARACLAALGAQLRMLKTQVLEFDRLIMAWHRSNETSKRLDEIPGVGPALATALVASVGDPRAFRSGRDFSAWIGLVPKQNSSGGKEKLGNISKRGDRYLRSLFTIGALAVIRYAKLHGAKHRPWLTALLARRPTKVAAIALANKIARMAWAMMAKGERYKEPVALAM

SEQ ID NO: 13678 - protein, 389 aa, unidentified
  source 1..389: note = protein_69a18b6
  REGION 4..159: note = RuvC_domain
  SITE 7: note = RuvC_P1
  SITE 57: note = RuvC_P2
  SITE 98: note = RuvC_P3
  SITE 100: note = RuvC_P4
  SITE 103: note = RuvC_P5
  REGION 264..351: note = Tnp_domain
  SITE 272: note = Tnp_P1
  SITE 302: note = Tnp_P2
  SITE 310: note = Tnp_P3
  SITE 311: note = Tnp_P4
  SITE 324: note = Tnp_P5
MFYLGIDIGKNTHVASLIDDKKKVVFKAFSFSNSVKGAESLISKLSNFKNELEVGMEATGHYWLSIYSYLVKNNFTVRVINPIQTDGWRQGIEIRKRKTDIIDSLLIADLLRYGDFVESSLLSEDFMSLRNLSRFRSYLISSIGDLKRKTIALLDQVFPEYASSFSDIFGKTSKQILETFSSPSDFENISSDDLSAFLESVSRKNYASRKIDELSRKASTSFGINFSLDSFSLQIKMLIQQISFIQNQVSDIDKEIEELFKKINSPITTIPGIGPVNGATILGEIGDISRFSNPSKLVAYSGIDASVSQSGDYESIHNHMSKRGSPYLRRALFQAALIAEFNDSVFSAYYQKKISEGKHHLVATNAVARKLCHTIFAVLTKNEPYQIQS

SEQ ID NO: 13679 - protein, 367 aa, unidentified
  source 1..367: note = protein_0d58049
  REGION 22..165: note = RuvC_domain
  SITE 25: note = RuvC_P1
  SITE 70: note = RuvC_P2
  SITE 105: note = RuvC_P3
  SITE 107: note = RuvC_P4
  SITE 110: note = RuvC_P5
  REGION 229..314: note = Tnp_domain
  SITE 237: note = Tnp_P1
  SITE 267: note = Tnp_P2
  SITE 275: note = Tnp_P3
  SITE 276: note = Tnp_P4
  SITE 288: note = Tnp_P5
MKKHTTTTKPMSAVDVSACTTVAVDLAKQVFQVAGEDAQGQLVYEQRIKSREAFQVFLQKLPRGVTVLVETGPGAQAWARLLQMQGNPVRILPAQRVAEHRSGAKNDRNDAHAILRAGRDCSIASVPVKSVAALAMQACHRIRRGYVRRRTATGNQIRGLLLEQGIALAQGEAALSQGVPRVLEDASQPLPDLLRELIDEMLSEWRRLGERITALTERLEACANADQAAKRLMTVRGIGPITATALLAKQTEPERFANARQFAAYFGIVPDQHSSGQKVRLGKMTKRGDAYVRSLMVVGAHAVLKQLRPDSEHPDDRRLQRWLQRLGRKGAAVRLANRNLRIAWVLLRSEQTYQRKPNACQEIEMSH

SEQ ID NO: 13680 - protein, 389 aa, unidentified
  source 1..389: note = protein_d7dfead
  REGION 4..159: note = RuvC_domain
  SITE 7: note = RuvC_P1
  SITE 57: note = RuvC_P2
  SITE 98: note = RuvC_P3
  SITE 100: note = RuvC_P4
  SITE 103: note = RuvC_P5
  REGION 264..351: note = Tnp_domain
  SITE 272: note = Tnp_P1
  SITE 302: note = Tnp_P2
  SITE 310: note = Tnp_P3
  SITE 311: note = Tnp_P4
  SITE 324: note = Tnp_P5
MFYLGIDIGKNTHVASLIDDKKKVIFKAFSFSNSVDGAESLICKLEPFKSELEVGMEATGHYWISLYSYLSEKNFTVHVINPIQTDGWRQGIEIRKRKTDIIDSLLIADLLRYGDFVETSLSNEDYFSLRNLSRFRSYLISSIGDLKRKTIALLDQVFPEYASSFSNIFGKTSKQILENFSSPSDFEDISSEDLQSFLDNVTIKKFATRKLEELSKKASTSFGVNFCIDSFSFQIKMLIQQISFIQNQVSDVENEIEILLEKLNSPITTIPGIGSVNAATILGEIGDIKRFSNPSKLVAYAGLDASISQSGEFESTSNHMTKRGSPYLRRALFQSALRAEFCDPVFSAYYQKKIAEGKHHLVATNAVARKLCHTIFAVLTKNEPYQVQS

SEQ ID NO: 13681 - protein, 344 aa, unidentified
  source 1..344: note = protein_afc69d5
  REGION 6..148: note = RuvC_domain
  SITE 9: note = RuvC_P1
  SITE 52: note = RuvC_P2
  SITE 87: note = RuvC_P3
  SITE 89: note = RuvC_P4
  SITE 92: note = RuvC_P5
  REGION 211..297: note = Tnp_domain
  SITE 219: note = Tnp_P1
  SITE 249: note = Tnp_P2
  SITE 257: note = Tnp_P3
  SITE 258: note = Tnp_P4
  SITE 270: note = Tnp_P5
MEITTIGLDLAKNVFQVHAVNGASEVVVKKTLRRVQMRRFFEQLDPCLVGIEACGTSHYWAREITRLGHEVRLMPPAYVKPYVKRGKSDASDAEAICEAVTRPTMRYVAIKSPEQQAALALHRTRDLFVKQRTQLVNMIRSLLAEFGIEIPRGIGQALMLAKRIAADDVPNIPPLASKVIAGLAGQVLDLQARLREIELELLAWLRSNDIAKRLATIPGIGTVCATALAASVTDPHQFRSGRQFAAWLGLTPLQHSSGGKERLGRISKMGDKYLRRLLVVGMTSLIRRAKYKPEAVDPWLAGLLSRKPARLVTVALANKAARVVWAIMVRGGVYRMPAGVATPL

SEQ ID NO: 13682 - protein, 341 aa, unidentified
  source 1..341: note = protein_9f7b671
  REGION 7..149: note = RuvC_domain
  SITE 10: note = RuvC_P1
  SITE 53: note = RuvC_P2
  SITE 88: note = RuvC_P3
  SITE 90: note = RuvC_P4
  SITE 93: note = RuvC_P5
  REGION 211..294: note = Tnp_domain
  SITE 219: note = Tnp_P1
  SITE 249: note = Tnp_P2
  SITE 257: note = Tnp_P3
  SITE 258: note = Tnp_P4
  SITE 270: note = Tnp_P5
MGEVTTIGLDIAKSVFQAHGADAAGSVVFRKKLGRTRLLAFFAAQPRCVVAMEACAGAHHWGRELTKLGHTVRLIPPAYVKPFVKRQKNDAADAEAICEAAQRPTMRFVPVKSAEQQASGVVFRARDLLVHQRTQIMNALRGHLAEYGHVAPKGVMYVDRLVVEIENPDSEIPEAARTSLKATVRMLDRLDTEIAVLDAEIARRAKEDPVARRLMTIPGIGPVSAAALVALAPAPEAFRCGRDFSAWVGLTPVQRSTGGKPKLGQITKAGERTLRRLLVIGASAVIKQALLKGAPPGSWLAQMLARKPRMLVAVALANKTARIVWALLAKGGIYRAPALAA

SEQ ID NO: 13683 - protein, 316 aa, unidentified
  source 1..316: note = protein_13862ac
  REGION 6..150: note = RuvC_domain
  SITE 9: note = RuvC_P1
  SITE 54: note = RuvC_P2
  SITE 94: note = RuvC_P3
  SITE 96: note = RuvC_P4
  SITE 99: note = RuvC_P5
  REGION 188..272: note = Tnp_domain
  SITE 196: note = Tnp_P1
  SITE 225: note = Tnp_P2
  SITE 233: note = Tnp_P3
  SITE 234: note = Tnp_P4
  SITE 245: note = Tnp_P5
MISYYVGLDVSKATVDVGFLPATFPQFKISNDPDGFAQLIACLDELEVERVLLEATGGYERALFKTLQLRGLNVIRVNPKRARDYMRSMGTYAKTDRIDAQKLAKFARDIEDLPPVEPNQARDELGELIKLRGNLVKDRDSNKRRMQQTTYRKAISDYANHITYLNKKIKALEASIEKASNALDQEKASRLRSVKGIGAITCGTLMASLPELGRVTGRKIAALAGLAPYNNDSGKKSGPRSIEGGRHAVRCALYMSTWSVVRHDPEVKAEYEALRARGKLAKVAVVACMRKLLVRLNAMLRDGSKWKEPRSQVPAT

SEQ ID NO: 13684 - protein, 315 aa, unidentified
  source 1..315: note = protein_49f120b
  REGION 12..162: note = RuvC_domain
  SITE 15: note = RuvC_P1
  SITE 57: note = RuvC_P2
  SITE 97: note = RuvC_P3
  SITE 99: note = RuvC_P4
  SITE 102: note = RuvC_P5
  REGION 192..276: note = Tnp_domain
  SITE 200: note = Tnp_P1
  SITE 229: note = Tnp_P2
  SITE 237: note = Tnp_P3
  SITE 238: note = Tnp_P4
  SITE 250: note = Tnp_P5
MAMRVTLEKPIIGVDVAKNELVIYHDQYDRLEAIPNTKVAITQWLKALASSCAIAIEATNVYHVLFADAAHEAGCDIYMVDGYQLSHYRKGVNIRAKTDAQDARLLARYLKNELDELRPWIPASPLYRQLLSLFRRRAALVQARTGLVQSWTNEPFLRTAFANQVNSMKRFEALVEKKIRDVLQEAGLMRQVNRCMKVEGIGFLTAARLVTSFQRGEFSGANAFIAFLGLDLRVSKSGQSDGPRRLTKRGDPEARRLLHNAAMSGSRTPAWKPFYEEQRKRGFSTTQALVMLSRKLARVVFALLKNQSEYQTKVA

SEQ ID NO: 13685 - protein, 352 aa, unidentified
  source 1..352: note = protein_c77a486
  REGION 5..158: note = RuvC_domain
  SITE 8: note = RuvC_P1
  SITE 56: note = RuvC_P2
  SITE 97: note = RuvC_P3
  SITE 99: note = RuvC_P4
  SITE 102: note = RuvC_P5
  REGION 221..305: note = Tnp_domain
  SITE 228: note = Tnp_P1
  SITE 258: note = Tnp_P2
  SITE 266: note = Tnp_P3
  SITE 267: note = Tnp_P4
  SITE 278: note = Tnp_P5
MTVIIGMDPHKRSATIEVVDERGRVLATGRYGTDKAGYAQLLVAGRRFGQRVWAVEGCNGVGRHIAHRLVHEGETVLDVPAKLSAQVRVFATGNGRKTDPVDAHSAAMVALRTPDLVRVQVDPDLVVLGLLVDRRDELGRARTQTVNRLHRLLLELFPGGAKQFLSARQARALIATIKPRDLVGKTRRRLAVELIGEVETIDKKIKAADKDLTELVTARGCTLMDLHGIGPSGAARLLVDVGDIRRFADRNRFASWNGTAPLDASSGQQQRHRLSRAGNRRINRTLHIMAVVQLRNRTPGRAYFDAKKAAGKTSMEAMRALKRRLSNVIYARMVNDQHKRQAAGPGRLCNPA

SEQ ID NO: 13686 - protein, 320 aa, unidentified
  source 1..320: note = protein_b7771ec
  REGION 8..163: note = RuvC_domain
  SITE 11: note = RuvC_P1
  SITE 56: note = RuvC_P2
  SITE 96: note = RuvC_P3
  SITE 98: note = RuvC_P4
  SITE 101: note = RuvC_P5
  REGION 195..279: note = Tnp_domain
  SITE 203: note = Tnp_P1
  SITE 232: note = Tnp_P2
  SITE 240: note = Tnp_P3
  SITE 241: note = Tnp_P4
  SITE 252: note = Tnp_P5
MSASSVVVGIDVAKAHLDVSVLGAKLDAQRFDNQAEGRSALTAALKPLDVALVVMEATGGYETELACALQAAGLAVAVVNPHQARDFAKSMGRLAKTDAVDARMLAEFAAVLLRREDLARFLRPLADPQQQWLAALVTRRRQLLTMLHSERQRLQITPKGLHPSIEAIVTAIKAQLDDIEGQMVGHVREHFSELDRLLQSASGIGPVTSATMIAQLPELGRLNRREIAALVGVAPMANDSGSSRGRRRIQGGRFDVRRVLYMAALTASRRNPVIKPFYERLIAAGKLPKVALVACMRKLLTTLNAMVRTKQPWDNLLHGA

SEQ ID NO: 13687 - protein, 337 aa, unidentified
  source 1..337: note = protein_e7bfec1
  REGION 7..149: note = RuvC_domain
  SITE 10: note = RuvC_P1
  SITE 53: note = RuvC_P2
  SITE 88: note = RuvC_P3
  SITE 90: note = RuvC_P4
  SITE 93: note = RuvC_P5
  REGION 211..297: note = Tnp_domain
  SITE 219: note = Tnp_P1
  SITE 249: note = Tnp_P2
  SITE 257: note = Tnp_P3
  SITE 258: note = Tnp_P4
  SITE 270: note = Tnp_P5
MEAAAVIGLDLAKNVFQVHGVAADGGVVIKRQLRRAQMLPFFASLPPCLVGMEACASAHHWAREQMALGHEVRLMAPAYVKAYVKRGKTDAADAEAIAEAVTRPTMRFVAVKTKAQQAALMLHKTRDLLVRQRTMLINALRGHLGEFGIVAPQGAAGVRATLKALHLEQDQLPGLARAALHGLASQLEALGAEIDRLETRIIAWHRDDETSRRLATIPGIGPITASAIAASAPDPSLFRTGRQFAAWLGLTPRANSSGGKERQVGISKMGDGYLRRLLVIGATAVLRMRRQRGGDPWLSGLIARKKPKVAAVALANKTARIAWALMARNQSYVPATV

SEQ ID NO: 13688 - protein, 416 aa, unidentified
  source 1..416: note = protein_9acd098
  REGION 18..170: note = RuvC_domain
  SITE 21: note = RuvC_P1
  SITE 69: note = RuvC_P2
  SITE 107: note = RuvC_P3
  SITE 109: note = RuvC_P4
  SITE 112: note = RuvC_P5
  REGION 277..363: note = Tnp_domain
  SITE 285: note = Tnp_P1
  SITE 316: note = Tnp_P2
  SITE 324: note = Tnp_P3
  SITE 325: note = Tnp_P4
  SITE 336: note = Tnp_P5
MTSAMNTLPDEPLNGVSGGLDWARDDHAVSVVDNRGRELVRHTVEHSAAGLRELIAVLGDAGCFEVGIQRPDGPVVEALLAAGMTVVVINPNQVKNLRSRYGSAGNKDDRFEVFVLADTLRTDRARLRPLTPDSPQTATLRQACRARKDLITHRVGVANQLRAHLRTVSPGAVGLFAEIDSVISLAFLARFTTQDQADWLTPTPLGAWLSKLGYSGKVDPAVLHTRLRAPPQNVVGDQTITSAAITRSFTAVLTTLLEQIKTLTSQIETALAAHADAHIFTSLPRAGGVRAARLLAEIGDCRAKFPTPESLACLAGVAPSTRPSGKIRAVGFRWAWNKQLRDAVTDFAGDSPRANPCAEDLYQRARGRGHDHPHTVRILARAWLHIIWHCWQNNTAYDPTRHGALQRLQQDQQATA

SEQ ID NO: 13689 - protein, 398 aa, unidentified
  source 1..398: note = protein_c578059
  REGION 8..160: note = RuvC_domain
  SITE 11: note = RuvC_P1
  SITE 59: note = RuvC_P2
  SITE 97: note = RuvC_P3
  SITE 99: note = RuvC_P4
  SITE 102: note = RuvC_P5
  REGION 267..353: note = Tnp_domain
  SITE 275: note = Tnp_P1
  SITE 306: note = Tnp_P2
  SITE 314: note = Tnp_P3
  SITE 315: note = Tnp_P4
  SITE 326: note = Tnp_P5
MKDTCRFGGVDWATDAHAIAVVDEGGGVVDQFDVDHSAAGLGELCRRLSKLEVRRVAIERPDGPVVDALLDSGFEVVVVSSRSVKALRERYGTSGNKSDRSDAYVLADCLRTDGHRWASLVPDSPATVTLRSHVRARKDLVETRVALANQLRSHLRVAFPGAVGLFRDIDSPISLRFLERFPSGARAAWLSEKRLAAWLGANGYCGRKTPAELYRRLTEAPRGPGVDDGDTRGAVVVAMVEVIKAVRVQIDELTRRMAEQLEAHPDGAIFTSLPRVGTVRAATLLAEIGDCRARFPDAESLAALAGVVPSTRASGRHRAVTFRWSADKKLRDALCDFAGDSWRENAWAEQRYRQLRASGKRHPHAERILARSWRTSSGAAGRTTCPMTRPVTVPPSAS

SEQ ID NO: 13690 - protein, 341 aa, unidentified
  source 1..341: note = protein_c8c5d0b
  REGION 6..147: note = RuvC_domain
  SITE 9: note = RuvC_P1
  SITE 52: note = RuvC_P2
  SITE 87: note = RuvC_P3
  SITE 89: note = RuvC_P4
  SITE 92: note = RuvC_P5
  REGION 211..296: note = Tnp_domain
  SITE 219: note = Tnp_P1
  SITE 249: note = Tnp_P2
  SITE 257: note = Tnp_P3
  SITE 258: note = Tnp_P4
  SITE 270: note = Tnp_P5
MTISVLGIDLGKNSCSVVGLNEAGAVVVRRRMRREGVIAFAAKQPACVVAMEACCGAHHMGRILAEQGHTVRLMSPEYVRPYVKAQKNDDRDAEAIAEAATRPTMRFVELKSEEQLDMQTLHRVRDRLICDRTSLMNQMRSLLLERGHIIPQGRAKLREHLARLLDLEGSPLTPRIRELLLDMRQRCEALNKRIADLDAEFVEAARADERTQRLLTIPGIGALNATALVAAVGDARTFNRGRDLTAWLGLVPRQATTGGKPRLLGITKRGSRYLRKNLIQGARASLPALSKSQTRLGAWLRALAARAHHNAVVVALAGKIARIAWALLRHERRYEATPLAA

SEQ ID NO: 13691 - protein, 404 aa, unidentified
  source 1..404: note = protein_3bd568b
  REGION 12..166: note = RuvC_domain
  SITE 15: note = RuvC_P1
  SITE 63: note = RuvC_P2
  SITE 103: note = RuvC_P3
  SITE 105: note = RuvC_P4
  SITE 108: note = RuvC_P5
  REGION 273..358: note = Tnp_domain
  SITE 281: note = Tnp_P1
  SITE 310: note = Tnp_P2
  SITE 318: note = Tnp_P3
  SITE 319: note = Tnp_P4
  SITE 331: note = Tnp_P5
MTISISDIDVFIGIDVGKAEHWATALDSAGKTLFDKVLPNNESRLRDLYKRLGEHGRLLVVVDQPATIGALAVAVARDTGIAVGYLPGLSMRRIADLTPGSAKTDRRDAAVIAQAARTMPHTLRDVTAADEEAASLTMLTGFDLDLARQVNQTANRIRGLYTQIHPALEAVLGPHLEHDAVLEAIAAWPTPTALRKAGKARIDARLKKHGARRHAAWAQQVCEALKKQTVTVAGTDAAGAVLPHLARQLISLHAQRADIADRVETLVEAHPLYPVLTSMPGIGVRTAAVFLAETLGRTFTTGAQLASYAGLAPVTRRSGSSIRGEHVSHAGNKRLKRAMFLSAFASLRSDPVSRAYYQRKRDQGKRHNQAVIALAHRRVLTLHAMIRNGTLYDPQPAAQLPTAA

SEQ ID NO: 13692 - protein, 398 aa, unidentified
  source 1..398: note = protein_ae99bad
  REGION 6..162: note = RuvC_domain
  SITE 9: note = RuvC_P1
  SITE 60: note = RuvC_P2
  SITE 100: note = RuvC_P3
  SITE 102: note = RuvC_P4
  SITE 105: note = RuvC_P5
  REGION 267..354: note = Tnp_domain
  SITE 275: note = Tnp_P1
  SITE 306: note = Tnp_P2
  SITE 314: note = Tnp_P3
  SITE 315: note = Tnp_P4
  SITE 327: note = Tnp_P5
MSRIWVGTDCGKSHHHCLVMDTDGDTLLSRRVPNDEPELLELIGDVLDIASGDQATWAMDMTGGEPALLIELLLNHGQELVYIPGIAVNRATDSYRGVGKTDARDAKVIADQARMRRDLQPIRPADEAAIELRLLTEHRSDLVADRTRTVNRLKSLLTGMFPALERAFDMGTTGALVLLTGYQTPVAIRRAGKRRLATWLRNRKVRTPDAVAAKALDAADRQHTAVAGEKAIARMVHTLAKEVMTLNEKIAETDQLIEGRFREHELAEVIASMPGIGPILGAEFLAAAGGSLDAFPTADRLATFAGVAPAPKDSGQISENHHRPRRYHRRLQRVFFQSAMVSIRWDPNSRRFYDRKRAEGKHHVQAVLALARRRVNVLWALIRDRRCYTVTPPVTHAA

SEQ ID NO: 13693 - protein, 402 aa, unidentified
  source 1..402: note = protein_9ea9abf
  REGION 10..164: note = RuvC_domain
  SITE 13: note = RuvC_P1
  SITE 61: note = RuvC_P2
  SITE 101: note = RuvC_P3
  SITE 103: note = RuvC_P4
  SITE 106: note = RuvC_P5
  REGION 271..356: note = Tnp_domain
  SITE 279: note = Tnp_P1
  SITE 308: note = Tnp_P2
  SITE 316: note = Tnp_P3
  SITE 317: note = Tnp_P4
  SITE 329: note = Tnp_P5
MQVDDIGVFIGIDVGKSEHWATALDRDGRRIHDRALPNDESRLRDLYKHLAEHGRVLVVVDQPATIGALAVAVAQDMGVTVGYLPGLSMRRIADLSPGNAKTDARDAAVTAQAARTMPHTLRAISTSDEDTAALGMLTGFDLDLARQVNQTANRIRGLYTQIHPALETVLGSLLEHDAILEAIAAWPTPTALKKAGKARIDARLNKHGARRHAAWAQQICDALDKQTVTVAGTDAAGAVLPHLARQLIALHAQRADIAGRVEALVEAHPLYPVLASMPGIGVRTAAVFLAETLGKTFTTGAQLASYAGLAPVTRRSGSSIKGEHVSHAGNKRLKRAMFLSAFASLRSDPISRACYQRKRDQGKRLGQAVLALAHRRILTLNAMIRDGALYDPQPAAQLPTTA

SEQ ID NO: 13694 - protein, 418 aa, unidentified
  source 1..418: note = protein_a9af473
  REGION 11..160: note = RuvC_domain
  SITE 14: note = RuvC_P1
  SITE 66: note = RuvC_P2
  SITE 100: note = RuvC_P3
  SITE 102: note = RuvC_P4
  SITE 105: note = RuvC_P5
  REGION 256..344: note = Tnp_domain
  SITE 264: note = Tnp_P1
  SITE 295: note = Tnp_P2
  SITE 303: note = Tnp_P3
  SITE 304: note = Tnp_P4
  SITE 315: note = Tnp_P5
MVMKIVRFNCCGMDVHKNLVVATIGITDRKTNITEYFQRSFSTLNSDLYRLKDWLRSHHCSDVCMESTGKYWIPIFNILEDETNVHLTHPKYVKAIKGKKTDKKDSKWICDLFKHDLIKFSFIPPKEIREMREIARYRYKLVCMRSSERNRYQNCMTISNVGLASVVSDPFGKTASNIMKEVMKSNVIDDDKILKLVHKNCKNKDKILDSLHGYHIESDQRFKMEKSLDHMEYLDQLIDSCEVELIKRAYPFRRSFQHITQIKGISALSAILIISEIGIDMSQFESDKQLVSWAGLSPANNESAGKKKSVRISKAGQYLKPLLVQCALSAIKDKTSYFGRKYSNIKKRRGHKKAIIAIARMMLVSIYHMILTGEEFNPCDHESFMDPKPNANPSLTVEKALNFLKQSGIDISSIPVNL

SEQ ID NO: 13695 - protein, 253 aa, unidentified
  source 1..253: note = protein_c77fcfd
  REGION 13..155: note = RuvC_domain
  SITE 16: note = RuvC_P1
  SITE 59: note = RuvC_P2
  SITE 94: note = RuvC_P3
  SITE 96: note = RuvC_P4
  SITE 99: note = RuvC_P5
  REGION 218..253: note = Tnp_domain
  SITE 226: note = Tnp_P1
MAERNKPKDAAVFGVDIGKNVFHVVGIDASGAPIQRASFRRDTLLQFFERAKPTVVGMEACPGSQWLARKIMAFGHRVRIVPARFVKPYVKSNKNDIIDAEAIAEAVSRPTMRFVEVRSPEQIDLQALHRVRDRMVAQRTRLVCQMRAFCLEYGIAMHQGVGRFKADLPKVLTNEENDLTPAMRKLLASLFEDVRQLEARISEISREIEATAAADDTARRLMTIPGIGPLAATALLAAAGKGAQFKKARDMAA

SEQ ID NO: 13696 - protein, 392 aa, unidentified
  source 1..392: note = protein_9b24117
  REGION 5..163: note = RuvC_domain
  SITE 8: note = RuvC_P1
  SITE 62: note = RuvC_P2
  SITE 102: note = RuvC_P3
  SITE 104: note = RuvC_P4
  SITE 107: note = RuvC_P5
  REGION 267..356: note = Tnp_domain
  SITE 275: note = Tnp_P1
  SITE 305: note = Tnp_P2
  SITE 313: note = Tnp_P3
  SITE 314: note = Tnp_P4
  SITE 327: note = Tnp_P5
MEPVVGVDVAKGSSVVQAFRKRNEPYGKAVDIEHETSGFEKFVEMLGMLQAETGLAPVVVLEATGHYHRALVSYLDRSGYTCYIVNPLQSKRAKGTQLRKVKTDALDAWHLAEMYYRGDVKPHRTWDETFTELQHWTRQHEFVTGIFVQAKLNSRALLEQVFPEYEQVFYNVFSATSLTVLAHCLEGDAEEWNEVIQGSAGRSHSKRWANEKARKLEKVLGHWRESRHSPSQSKALLGMVSLLLTMIRQLDELEKQMEDMAASLPEVELVKSIPGIGTKLAAAIIAEVGDVRQFSDAKQLVAFAGLDPGIFSSGKFTATSTRITKRGSKRLRRSLYLAVQCGMRKNANARIRSYYEKKRKEGKPYKVVVIACAKKLLHHIFAILQKGQSYQA

SEQ ID NO: 13697 - protein, 408 aa, unidentified
  source 1..408: note = protein_ce67849
  REGION 6..165: note = RuvC_domain
  SITE 9: note = RuvC_P1
  SITE 62: note = RuvC_P2
  SITE 102: note = RuvC_P3
  SITE 104: note = RuvC_P4
  SITE 107: note = RuvC_P5
  REGION 273..359: note = Tnp_domain
  SITE 281: note = Tnp_P1
  SITE 312: note = Tnp_P2
  SITE 320: note = Tnp_P3
  SITE 321: note = Tnp_P4
MLQLFVGDDWAEDHHDVEVLDAAGRRLARVRLPEGVAGIARLHAIIGDLVGEDDEDVEVKVGIETDRGPWVDALVAAGYQVFGVNPLRAARYRQRHTVSGAKSDVADAHVLADMVRTDSHQLPPVAGDSAQAEGIKVVTRTHKTLIWERTRHTQRLRHALRDYFPAAVEAFEDLDAADTLALLAKAPDPASAAKLTIAQISAALKRARRRDVAVKAARIQAVLRADQLGRPPVVTAAYAASVRALIAVLSVLNEQVKTLQEQVEAHFGQHPAAEILTSQPGLGPILGARVLAEFGDDPDRYVCAKARKNYAGTSPITRASGKKKIVVARYVHNDRLIDALMSQALSALTASPGARAYYDQLKARGAGHNAALRQLANRLVGILHGCLKTGTLYDEATAWSHHSKTLAA

SEQ ID NO: 13698 - protein, 316 aa, unidentified
  source 1..316: note = protein_d229014
  REGION 8..152: note = RuvC_domain
  SITE 11: note = RuvC_P1
  SITE 55: note = RuvC_P2
  SITE 95: note = RuvC_P3
  SITE 97: note = RuvC_P4
  SITE 100: note = RuvC_P5
  REGION 190..274: note = Tnp_domain
  SITE 198: note = Tnp_P1
  SITE 227: note = Tnp_P2
  SITE 235: note = Tnp_P3
  SITE 236: note = Tnp_P4
  SITE 247: note = Tnp_P5
MEDVLTFVGIDVSKARLDIASHPAGATHCGANDATGIKALVEQLRAVNPTLIVLEATGGIERFVVRALVAAELPVTVANPRQVRDFARATGQLAKTDVLDAQILARFAEAVRPALRPLPDEMTLELRALIGRRRQITEMLTAEKNRLSRAPRRVQKRIEAHIHWLQSELERYHEDLDQMIRQSPIWREQEDLLKSVPGIGSVISRTVLAELPELGSLNRKQIAALVGVAPLNWDSGLLRGRRVIWGGRAHVRTALYMAALTASRCNPVLRDFYKRLRAAGKAPKVALVACMRKLLVILSAILRHRVPWRPVVAQIP

SEQ ID NO: 13699 - protein, 319 aa, unidentified
  source 1..319: note = protein_575950e
  REGION 5..161: note = RuvC_domain
  SITE 8: note = RuvC_P1
  SITE 58: note = RuvC_P2
  SITE 98: note = RuvC_P3
  SITE 100: note = RuvC_P4
  SITE 103: note = RuvC_P5
  REGION 275..319: note = Tnp_domain
  SITE 283: note = Tnp_P1
  SITE 313: note = Tnp_P2
MYNAVGIDVSKGKSTIAVLQPGGATIRKPFDVSHTSAAMNELSKYLGTLEGDTKIVMECTGRYHEPIANTLHEAGFFVTVVNPHHIKNFGNNSLRKVKSDPADAKKIARYTLDNWAELRQYSSMDNIRTQLKTLNSQFSFFMRQKVGAKSNLIALLDNTYPDVNKLFNSPVRENGSEKWVDYVSSFWHVDCVRKIGLKAFTERYRAFCKKNQYNFQPSKPEILFKASKELVAVFPKEKTYKLLIQQSIQQLNLASQHIEQLRKEMDSLASSLPEYTTVMSIYGVGKTYGPQLIAEIGDVSRFTRREALTAFAGVDPGVN

SEQ ID NO: 13700 - protein, 340 aa, unidentified
  source 1..340: note = protein_e6b27a0
  REGION 7..149: note = RuvC_domain
  SITE 10: note = RuvC_P1
  SITE 53: note = RuvC_P2
  SITE 88: note = RuvC_P3
  SITE 90: note = RuvC_P4
  SITE 93: note = RuvC_P5
  REGION 209..293: note = Tnp_domain
  SITE 217: note = Tnp_P1
  SITE 247: note = Tnp_P2
  SITE 255: note = Tnp_P3
  SITE 256: note = Tnp_P4
  SITE 268: note = Tnp_P5
MGEISIVGVDLAKQVLQVHGATADGQVLFRKKLSRAQFAKFMASLPPCVVAMEACATAHYWGRELSRLGHEVRLIPPIYVKPFVKRQKNDAADAEAVAEAAQRPTMRTVAVKTADQQARAMLFRTRDLLVGQRTRLVNALRGHLAEHGIIIGQGVGNIARFAACLDQDTLPDLVRDLGRLYLDQIAQISDEIGKLDKRITTAARENSTARRLQTMPGIGPVCAMAIASFAPEMREFRRSRDFAAWLGLVPRQHSSGGKQKLGRTSKMGQRDIRRLLIIGAMSVVHWRGRHGGRPGSWLSRMLARKPRKLVAIALANKMARMIWAMLAGETDYRDPTGAIC

SEQ ID NO: 13701 - protein, 407 aa, unidentified
  source 1..407: note = protein_2b28b3f
  REGION 9..163: note = RuvC_domain
  SITE 12: note = RuvC_P1
  SITE 60: note = RuvC_P2
  SITE 100: note = RuvC_P3
  SITE 102: note = RuvC_P4
  SITE 105: note = RuvC_P5
  REGION 271..357: note = Tnp_domain
  SITE 279: note = Tnp_P1
  SITE 309: note = Tnp_P2
  SITE 317: note = Tnp_P3
  SITE 318: note = Tnp_P4
  SITE 330: note = Tnp_P5
MDTRFAVVIGLDVGKSGHHACALSPDGERLFDKPLPQDEAQLRELFTGLQEGGEVLMVVDQPNTIGALPIAVARDVGCAVAYLPGLAMRKAADLYPGRAKTDARDAFIIADTARTMPHTLRSVDRDSEVLSALKVLAGFDEDLAHETTRALNRIRSLLTQIHPALERVFTGGVLSTSLVLDLLEKYGGPTGLAAAGRGKVLRFARSRSRRDPADLVDRIFTALREQTVIVPATTAVELVLPRVAGQVKELKHQRATVAGEVEAMLEDFPLASVLMSMPGIGIKTAASILLAIGDGTAFATAGHLAAYAGIAPVTRRSGTSIRGEFPARSGNKRLKNALFYSAWIATRCDPVSKAYFDRKRAEGKRHNAAVICLARRRCNVIFAMLRDGTYYQTPTTTPTPEPAALAA

SEQ ID NO: 13702 - protein, 347 aa, unidentified
  source 1..347: note = protein_6d8229d
  REGION 7..143: note = RuvC_domain
  SITE 10: note = RuvC_P1
  SITE 53: note = RuvC_P2
  SITE 88: note = RuvC_P3
  SITE 90: note = RuvC_P4
  SITE 93: note = RuvC_P5
  REGION 210..296: note = Tnp_domain
  SITE 218: note = Tnp_P1
  SITE 248: note = Tnp_P2
  SITE 256: note = Tnp_P3
  SITE 257: note = Tnp_P4
  SITE 269: note = Tnp_P5
MEQIIRIGMDTSKHVFQLHGVNAAEQPVLRKKLRRKEMQDFFTKLPPTVVAFEACGGSHYWARQLQRLGHEVKMLPPQYVKPYVKRGKNDAADAEALCEAMSRPTMRIVPVKTAEQQAALMLVGMRDRLIRNRTQLANAIRGYSAEFGYTAAKGVRHIVPLLDRISADETLPEMARDLFAIHAREYVQLQAEIEKVETRLMAWHRADECSRRLAQIPGVGPIGASLLIMKTPAPELFRSGRDFAAWLGLTPKDHSTAGKVKLGVITRAGDEALRRTLVVGSTSLLQQIRAGRARNASPWLVNMLRRKPPKLVAVALANKIARIAWKMMITGAVYNSRSAGPAAASAI

SEQ ID NO: 13703 - protein, 400 aa, unidentified
  source 1..400: note = protein_b5f1653
  REGION 5..159: note = RuvC_domain
  SITE 8: note = RuvC_P1
  SITE 60: note = RuvC_P2
  SITE 100: note = RuvC_P3
  SITE 102: note = RuvC_P4
  SITE 105: note = RuvC_P5
  REGION 266..356: note = Tnp_domain
  SITE 274: note = Tnp_P1
  SITE 304: note = Tnp_P2
  SITE 312: note = Tnp_P3
  SITE 313: note = Tnp_P4
  SITE 329: note = Tnp_P5
MSVSVGVDIGAYKHAAAVCRQGEREAERKALKISANRQGFEELEAWMTRQPEPVGTVVMESSGHYWFNLASHLRRRGYEVAVVNPLEAKYFAKSRLQRSKSDPADARTLAALGMRDQPRTSDPLGGAELKQASRFAMRLVREQAQACQRIQRLVDIGFPELREAWDDPTCMSALAVLRKAPSAKAVVRLRLDTLAKVKRPGDGARAIGAAKATQLKQLATESVAAPELEAQVTFEMQVLISQYDLYEQQIAAAEKNLQSLLDGETARRLLTIPGVGPATAATLMAEIGDIWRFEDVDQLLAYAGVHPKEQSSGKKGANPETSWTMAKTGNAYLRAAAYRMAVVGIQHNPIIREHYARKRAAGKSKMNAVGHCMSKSLSLVWGVWRGGKDFDPANRPGLRA

SEQ ID NO: 13704 - protein, 339 aa, unidentified
  source 1..339: note = protein_84c6006
  REGION 7..148: note = RuvC_domain
  SITE 10: note = RuvC_P1
  SITE 53: note = RuvC_P2
  SITE 88: note = RuvC_P3
  SITE 90: note = RuvC_P4
  SITE 93: note = RuvC_P5
  REGION 211..296: note = Tnp_domain
  SITE 219: note = Tnp_P1
  SITE 249: note = Tnp_P2
  SITE 257: note = Tnp_P3
  SITE 258: note = Tnp_P4
  SITE 270: note = Tnp_P5
MQEVAVVGLDLAKNVFQVHGVAADGSVVFRRQLRRGQVLSFFDELNRCLVGIEACASANHWARGLTSLGHEVRLMPPAYVKAYVKRGKTDAADAEAIAEAVTRPTMRFVAVKTTAQQAVLMLHKTRDLLVRQRTMLINALRGHLGEFGVVTPQGSAGVQAALRLIILERDGLPELAQAALRGLAGQLEVLGREIEALERRILNWHRTDETSRRLATIPGIGPITASAMAASAPDPSLFRSGRQFAAWLGLTPRAHSSGGKELQAGISKMGDGYLRRLLVVGATAVLRMARQRSTGSDWIRGLLDRKKPKAAAVALANKTARIAWVLMARKEIYAPPAAA

SEQ ID NO: 13705 - protein, 309 aa, unidentified
  source 1..309: note = protein_18ec16f
  REGION 5..148: note = RuvC_domain
  SITE 8: note = RuvC_P1
  SITE 52: note = RuvC_P2
  SITE 91: note = RuvC_P3
  SITE 93: note = RuvC_P4
  SITE 96: note = RuvC_P5
  REGION 186..270: note = Tnp_domain
  SITE 194: note = Tnp_P1
  SITE 223: note = Tnp_P2
  SITE 231: note = Tnp_P3
  SITE 232: note = Tnp_P4
  SITE 243: note = Tnp_P5
MSVFVGIDVAKATLAVALRPNGEVFEVANSSAGHRSLAQRLRKLPVERVLLEATGGYERAVMAALQDEWPVVRVPPHRARSFATAMGRTAKTDPIDAAMLAHMAEVTEMPPAAAETPQQQRLQALVQRRAQVVQQRDDDRRRLQQVQGQPLVVASLKRLLRAQQAEIALLDKAITQAVADADSERSAQLRAVPGIGPVTAATLIAFLPELGQIERRQIAALVGVAPYNADSGGKRGLRRIQGGRAGIRRVLYMATWSAIRAQPALKRRYEALRSRGKCAKVALVACMRAFLGQINAMLRDGKPWQPASV

SEQ ID NO: 13706 - protein, 271 aa, unidentified
  source 1..271: note = protein_aa27613
  REGION 2..74: note = RuvC_domain
  SITE 14: note = RuvC_P3
  SITE 16: note = RuvC_P4
  SITE 19: note = RuvC_P5
  REGION 139..222: note = Tnp_domain
  SITE 147: note = Tnp_P1
  SITE 177: note = Tnp_P2
  SITE 185: note = Tnp_P3
  SITE 186: note = Tnp_P4
  SITE 198: note = Tnp_P5
MSPEYVRPYIKAQKNDDRDAEGIAEAVTRPTMRFVELKSQDQLDMQTLHRSRDRLVGERTALINQLRAILLERGMVAPQGKWKLEQFLAVLMDEQGGAGLSSRMIVLVADARAQWAELDRRISAFDAEFVRWVKENEEARRLTTIPGVGPIVASALAAAVGRAESFDRGRNLAAWLGLVPRQFTTGGKPKLLGISKRGNKYLRRQLIHGARAALPYVAERDTPLGRWVKGLMSRTHRNVVVVALANKLARIAWAVLQRGKPFDASAVSVAA

SEQ ID NO: 13707 - protein, 323 aa, unidentified
  source 1..323: note = protein_74af2ef
  REGION 1..143: note = RuvC_domain
  SITE 41: note = RuvC_P2
  SITE 81: note = RuvC_P3
  SITE 83: note = RuvC_P4
  SITE 86: note = RuvC_P5
  REGION 249..313: note = Tnp_domain
  SITE 257: note = Tnp_P1
  SITE 287: note = Tnp_P2
  SITE 295: note = Tnp_P3
  SITE 296: note = Tnp_P4
  SITE 308: note = Tnp_P5
MAIDGDGETVFSTKVINDEPQILALIETARERADDVRWAVDISGRASTLLLALLFAHSQQVVYVPGRTVNRMSGAYKGEGKTDAKDARVIADQARMRRDFAPLDTPPELVTTLRVLTHHRADLIADRVRLINRLRDLLVGICPALERAFDYSSAKGPVVMLTEYQTPAALRRIGVKRLTTWLERRKVRGAGDVAGKAVEAAQSQQIALPGEKSAAKLVCDLAHQLLTLDERIKDNDREIREVFRADDRAEIIESMPGMGPILGAEFVAIVGDLSGYLDAGRLASHAGLAPVPRDSGRRTGNHHRPKRYNRRCAGCSTCPPRPR

SEQ ID NO: 13708 - protein, 352 aa, unidentified
  source 1..352: note = protein_67eb8be
  REGION 4..159: note = RuvC_domain
  SITE 7: note = RuvC_P1
  SITE 59: note = RuvC_P2
  SITE 100: note = RuvC_P3
  SITE 102: note = RuvC_P4
  SITE 105: note = RuvC_P5
  REGION 222..307: note = Tnp_domain
  SITE 230: note = Tnp_P1
  SITE 260: note = Tnp_P2
  SITE 268: note = Tnp_P3
  SITE 269: note = Tnp_P4
  SITE 280: note = Tnp_P5
MVTVGIDPHKHVHVAVAIDASGRQIGKPLTVKNGPHLIIGLLTWVRSISDGASVTWAIEDGRGFARRLADGLLLAGQEVIWVPTRLMMAHRKLLAATGAKSDPVDAAAAAHAAIATPDLDRHRIDERVRELRVLVDHRADLVKRRTMVINQLKSQLHLWLDYTPGDLLRVKSVASLTALLHDVPLGSQVRHALGDMLGEVADLNRRVRELDITIKQLVGPLAPTLLQITGISYNSAAVLVAEIGDITRFSSSAKLARYCGCAPIPVYSSDKERYRLHRGGNRRLNSVLYTAALVQKRHNRAAQKLLEHHQPAKGTRGARRILQRHLVDVVYRAMQADQATWTHHIARCQQAA

SEQ ID NO: 13709 - protein, 401 aa, unidentified
  source 1..401: note = protein_92a2785
  REGION 1..155: note = RuvC_domain
  SITE 52: note = RuvC_P2
  SITE 92: note = RuvC_P3
  SITE 94: note = RuvC_P4
  SITE 97: note = RuvC_P5
  REGION 267..353: note = Tnp_domain
  SITE 275: note = Tnp_P1
  SITE 306: note = Tnp_P2
  SITE 314: note = Tnp_P3
  SITE 315: note = Tnp_P4
MLDDTGRRLGRARLGDGMAGMTRLHEMIAEHLDDADVDPETGMFAAGAVVVGIETDRGPWVAALVAAGYEVFAINPLSAARYRERHSTSGAKSDPGDAHVLAEIVRLDRAHHRPVAGDSAQVEGLKMIARTHQSLVWDRTRHAQRLRQALREYFPAALDVITAGRLELTDPDALELIERAGDPDRAARLSRSKIAAILKRARRRDVEARAELIQTALRAPALRQPAALESAYAVVAGTQIRLLAGIIAQLPPLEAVLGEGFGRHPDAEIYTSQPGLGAILGARVLAEFGDDPHRYRDAKARKNYAGTSPITRASGRRTVVLARYARNKRLGDAVHQWAFYALTNSPGARAYYDQLRARKVGHHAALRQLGNRLVGILHGCLKTRTTYDETTAWAHRFTAAA

SEQ ID NO: 13710 - protein, 249 aa, unidentified
  source 1..249: note = protein_dfd223a
  REGION 17..151: note = RuvC_domain
  SITE 54: note = RuvC_P2
  SITE 91: note = RuvC_P3
  SITE 93: note = RuvC_P4
  SITE 96: note = RuvC_P5
  REGION 211..249: note = Tnp_domain
  SITE 219: note = Tnp_P1
  SITE 249: note = Tnp_P2
MKHYAGLDVSVKRRPFASWMKEAEFAERCVASHPDDLVEALKNPAWNLARIGLEAGPLSQWLFSGLAGAGLPAICIETRHAKAFLKAQVNKTDRNDARGIAQMMRVNLFRPVHVKTLMSQKRRALLTARKLLQEKAIAIENDIRGLLRNFGLKVGIVGAAKFADRIQDLSGDIPELRDIMEVLLAARQKLREQFTVLHERLLSIVKGDTVCRRLMTVPGVGPVVALAFKATVDIPARFKNSKAVGRLSG

SEQ ID NO: 13711 - protein, 317 aa, unidentified
  source 1..317: note = protein_05aa055
  REGION 8..154: note = RuvC_domain
  SITE 11: note = RuvC_P1
  SITE 55: note = RuvC_P2
  SITE 95: note = RuvC_P3
  SITE 97: note = RuvC_P4
  SITE 100: note = RuvC_P5
  REGION 190..274: note = Tnp_domain
  SITE 198: note = Tnp_P1
  SITE 227: note = Tnp_P2
  SITE 235: note = Tnp_P3
  SITE 236: note = Tnp_P4
  SITE 247: note = Tnp_P5
MKAPLIFVGIDVSKAQLDIAIRPTAQIVSVPNDKAGIKTLVKHLEKLRPTLVVLESTGGLERQVMHGLVGAEISVVMANPRQVRDFAKSTGQLAKTDRIDAAVLAHYAEAIRPQPRPLPDELTLKLRALTVRRRQLIDMIVAEKNHLATASKAIKKRITAHISYLEQELDDADQDLDRFIEKNPLWKQNQEILCSTPSIGPVSSRTMLAELPELGTLGRKQISALVGVAPFPRDSGTLKGRRTIWGGRASVRNALFMAALVATRFNPVIRDFYKRLKAKGKPTKVALVACMHKLLTILNAMIKNQTRWSETFSLKAT

SEQ ID NO: 13712 - protein, 402 aa, unidentified
  source 1..402: note = protein_89ad8b8
  REGION 5..160: note = RuvC_domain
  SITE 8: note = RuvC_P1
  SITE 59: note = RuvC_P2
  SITE 97: note = RuvC_P3
  SITE 99: note = RuvC_P4
  SITE 102: note = RuvC_P5
  REGION 268..354: note = Tnp_domain
  SITE 276: note = Tnp_P1
  SITE 307: note = Tnp_P2
  SITE 315: note = Tnp_P3
  SITE 316: note = Tnp_P4
MRFFVGIDWATQAHAVCILDQTSRVQWQGSVPHTADGLAALLARLRRVRQRGPLRVALERPSGLLVDTLVEAGVEVVPIHPNALKASRPRYSAAGGKSDPGDAFILADLLRTDGHRFRPLHAPSDETRALRTLVRGRDDLVAQRVAVTNQLRALLERFWPGAVAIFADVDSPIALAFLSRYPTPHSAARLGEERLAQFLRQYAYCGRRPVGELLARLRSVPVSQVGEADAEASGDVVRALVAVLSPLVTHIQQLSAGIEAALSQHPDGPLLQSLPRSGAVNAAQILAELGDDRARFPTDEQFAAEAGLAPVTHASGQHHAVVFRWACNKRLRRALTTFADNSRHASRWAALVYQRARARGCRHQHAIRILARAWARILWRCWQDRAPYDVSRHRAALALAVA

SEQ ID NO: 13713 - protein, 356 aa, unidentified
  source 1..356: note = protein_eff4ef5
  REGION 12..152: note = RuvC_domain
  SITE 15: note = RuvC_P1
  SITE 58: note = RuvC_P2
  SITE 93: note = RuvC_P3
  SITE 95: note = RuvC_P4
  SITE 98: note = RuvC_P5
  REGION 217..304: note = Tnp_domain
  SITE 225: note = Tnp_P1
  SITE 255: note = Tnp_P2
  SITE 263: note = Tnp_P3
  SITE 264: note = Tnp_P4
  SITE 276: note = Tnp_P5
MSQKSSSAIAVVGIDIGKNSFHVVGHDRRGAIVLRQKWSRGQVDARLANLPPCLVGMEACVGAHHLSRKLQLLGHNARLMPAKYVRPYSKGQKNDFRDAEAIAEAVQRPTMKFVATKTADQLDLQALHRVRERLVSQRTGIINQIRAFLLERGVAVRQGLRFLRSELPGILATCTDVLSPRIVRILEDLSADWRHLDARIEGLSGEIETLAHQDQHCERLMTVPGIGPIISSAMVAAIGTGEVFSKGRDFGAWLGLVPKQISTGDRTILGSISRRGNRYLRTLFVQAAWVVLVKLGPKHWERYGLKSWIEAAKKRLHHNVLAIALANKLARIAWVVLHKGRAFTCDKTDAMASRPA

SEQ ID NO: 13714 - protein, 406 aa, unidentified
  source 1..406: note = protein_6bdc36d
  REGION 21..178: note = RuvC_domain
  SITE 24: note = RuvC_P1
  SITE 76: note = RuvC_P2
  SITE 117: note = RuvC_P3
  SITE 119: note = RuvC_P4
  SITE 122: note = RuvC_P5
  REGION 282..366: note = Tnp_domain
  SITE 288: note = Tnp_P1
  SITE 318: note = Tnp_P2
  SITE 326: note = Tnp_P3
  SITE 327: note = Tnp_P4
  SITE 339: note = Tnp_P5
MEDNSATNFIQEVLPMSLYFVGIDISKYKHDCCILSAVDQKVVSKFTFKNDLQGFEQFLSALSSLSYPEDIRIGFESTAHYALNLELFLENAHHSFMEINPVLIKEYKKSTSLRRTKTDSVDCESIAHWLMTVEYKPHSKGFYHAYSLKSLTRLRDKLVRQRSFYLVKITNVLDHTFPEFKPFFHERLSKTALYLLETYGSAERMSRMDSASYDKLRSLSRGKFSPRQFLRLKELAANTVGVNNSIFDTELNSLLTLYKSLVKEICILEEEINRLIREVHPHYMSVPGIGTISAAVIYSEYGDISNFSSPAQMLAFAGIEPGINDSGTESHKGRMVKHGSSQLRYVLINCCLPLIRFDMTFAAYYAKKRAEGKPHRVAITHVAKKLVRVIYALEKQGIDFNAQKLR

SEQ ID NO: 13715 - protein, 344 aa, unidentified
  source 1..344: note = protein_71f30f7
  REGION 6..150: note = RuvC_domain
  SITE 9: note = RuvC_P1
  SITE 54: note = RuvC_P2
  SITE 89: note = RuvC_P3
  SITE 91: note = RuvC_P4
  SITE 94: note = RuvC_P5
  REGION 213..300: note = Tnp_domain
  SITE 221: note = Tnp_P1
  SITE 251: note = Tnp_P2
  SITE 259: note = Tnp_P3
  SITE 260: note = Tnp_P4
  SITE 272: note = Tnp_P5
MQITRVGVDIAKSVFHLYAVDRHDQVQWEVKLKRTNWIAELCARVKPGAVIAMEACASAHHWARELQRRGYVVRLIAAQFVKPYVKSNKNDRVDAEAICEAASRPGMRFVGVKSVEQQDLQASHRVRSELIKQRTAKANQIRGLVGEYGVVAPVGIGQLRRAIPCWLEDAENGLGESFRVLLHELQEDLLRLDERVSVLDTRIERFAREDEVARRLMSLRGVGPLTATALSVALGDGSSFRCGRDFAASLGLVPRQHSTGGRDRLLGISKRGDAYLRTLLVHGARTVLQHAKTREDELSRWVIQLSERKHANVAIVALANKTARMAWALTHAGVDYDPARAAAA

SEQ ID NO: 13716 - protein, 456 aa, unidentified
  source 1..456: note = protein_819d616
  REGION 25..171: note = RuvC_domain
  SITE 28: note = RuvC_P1
  SITE 75: note = RuvC_P2
  SITE 110: note = RuvC_P3
  SITE 112: note = RuvC_P4
  SITE 115: note = RuvC_P5
  REGION 306..391: note = Tnp_domain
  SITE 312: note = Tnp_P1
  SITE 343: note = Tnp_P2
  SITE 351: note = Tnp_P3
  SITE 352: note = Tnp_P4
  SITE 365: note = Tnp_P5
MDKVKSKKAKTKNVIEMPVVNPYSAGIDVSDKEHVVAVPEGLATERVKNFGAMTCDIVEVIKWLQECEIETVAMESTGVYWKPLFSMLVRNGFEVYLVNAAHVKNVTGRKTDENDAMWIQKLHSCGLLKSSYLPDDEQEALRTLVRYRRTLVQDSSRFINRMQKSLELMNIKFHTVISDITGQTGKAVIEAILKGERNSVNFLPYIGKRIKADKRTIVKSLEGNWREEHLFTLKESYEMYKIYRLRIAACDAEVEKHLQHYEAKQNEGVIDVKPVNAKKSTTKKKKDKNHPRFDVRRYLEKIHGVDVLNIYGLSETGGLELLAETGTDLSKWKNENHFVSWLNLCPNNKISGGKLISSTLLKKRPNPASLAFRQAANGVQKSNNSLGDYFRRMKAKGGNKYAIIATANKIARIYYKMVRYKQEFNPMELEAYQQKYKQAKIAYLERKLSQLKKDVA

SEQ ID NO: 13717 - protein, 320 aa, unidentified
  source 1..320: note = protein_34f9729
  REGION 10..156: note = RuvC_domain
  SITE 13: note = RuvC_P1
  SITE 55: note = RuvC_P2
  SITE 95: note = RuvC_P3
  SITE 97: note = RuvC_P4
  SITE 100: note = RuvC_P5
  REGION 191..276: note = Tnp_domain
  SITE 198: note = Tnp_P1
  SITE 227: note = Tnp_P2
  SITE 235: note = Tnp_P3
  SITE 236: note = Tnp_P4
  SITE 248: note = Tnp_P5
MTILNSPTVVGIDVAKAEIVAYREDLETIQIVANDRGTLGRWLKTLPAQSSIALEATSIYHLDTVELAHEIGHRVYVVDAYRLSHYRESVGQRAKTDPCDARLLARYLSSEQARLRLWSPPPHAYKVLKSLLHRRAELIRWRVSLTLSWSSEPLLKDELAKQLKSFKQAEQAIQKLLHKVSKEAGIVENIKRCKAIEGVGDLTATGLATAFMRGEFANGDAFIAFLGMDLRSKDSGKKNGTRRLSKKGDSELRRLAHNAAMAACRSATWKPFYESYLARGLAKTQALVILARKLCRVAFALMKNQSEYQPDLRSQGCPAT

SEQ ID NO: 13718 - protein, 305 aa, unidentified
  source 1..305: note = protein_7e21908
  REGION 4..155: note = RuvC_domain
  SITE 7: note = RuvC_P1
  SITE 60: note = RuvC_P2
  SITE 100: note = RuvC_P3
  SITE 102: note = RuvC_P4
  SITE 105: note = RuvC_P5
  REGION 200..286: note = Tnp_domain
  SITE 208: note = Tnp_P1
  SITE 237: note = Tnp_P2
  SITE 245: note = Tnp_P3
  SITE 246: note = Tnp_P4
  SITE 259: note = Tnp_P5
MFFIGIDVSKAKLDCSLLLEVARSKRRAKTVANSKAGITDLLAWCTKQQVANHELHAILEGTGVYHEQAASALTEAGVTVSIVNPAQVKDFGRSLGIRTKTDGVDSLILARYGALLNPRPWQPPSREARILQALLSRREAIAQDLQRERNRLEKADATETCQLIHQSLTDSIAFLETQLAKLQQDIDDHIQQHPGLKDDRELLTSIPAVGPQVGNHLLSIMHNHRFQSAEQLAAYLGLVPVERQSGTSILGRPRLSKAGPARIRAILFMAAVVGTRHNPHLKDLYQRLQERGKTKMSALGAVMRK

SEQ ID NO: 13719 - protein, 344 aa, unidentified
  source 1..344: note = protein_2f8aecc
  REGION 6..147: note = RuvC_domain
  SITE 9: note = RuvC_P1
  SITE 52: note = RuvC_P2
  SITE 87: note = RuvC_P3
  SITE 89: note = RuvC_P4
  SITE 92: note = RuvC_P5
  REGION 212..298: note = Tnp_domain
  SITE 219: note = Tnp_P1
  SITE 249: note = Tnp_P2
  SITE 257: note = Tnp_P3
  SITE 258: note = Tnp_P4
  SITE 270: note = Tnp_P5
MKLTTIGIDLAKTLFQVHGVDERGKAVLKKQIKRDQMATFFANLPACLIGMEACASAHHWARKLEGFGHTVRLMAPQFVKPYVKTNKNDLADAEAICEAVARPNMRFVPVKSVEQQAVLSLHRVRQGFVKARTAQANQIRGLLGEFGLVMPQGITNVRKRVPEVIENASNELPAAFRHLIARLLDHLKELDRQVDEIEAQIKAWHRSSPLSLKLEKIPGIGPLGASALVASIADAKSFDNGRQVSAWIGVVPRQHSSGGKSTLLGISKRGDVYLRTLLIHGARSAIVAAQRNAKVNPWLAGLLHRRHPNIAAVALANKNARTVWALLAHDREFRPDYVPTPVAA

SEQ ID NO: 13720 - protein, 422 aa, unidentified
  source 1..422: note = protein_2e25c89
  REGION 4..157: note = RuvC_domain
  SITE 7: note = RuvC_P1
  SITE 57: note = RuvC_P2
  SITE 94: note = RuvC_P3
  SITE 96: note = RuvC_P4
  SITE 99: note = RuvC_P5
  REGION 285..371: note = Tnp_domain
  SITE 292: note = Tnp_P1
  SITE 323: note = Tnp_P2
  SITE 331: note = Tnp_P3
  SITE 332: note = Tnp_P4
  SITE 344: note = Tnp_P5
MLGIGIDWAEEFHDIALGTHEKGVIEQFRSDHGPAGVASLIERALRLEPDPAEIRVVLQTRHGLLVEALVDAGFTVVPVHPDVVARRRGPARKKDDAEDARICCLLALDRHAALKTLIPHGEIGGELRAIGRDDERAARDQRRLLNRLRADLQTTYPAALVLAGKDLGAPTVLRLLERWPTQPELVGASHDELVEFARLGRHGRPDRFAERVATALAAPMLPTRDYLVRAKAAGIRPAAVQLLALHEARRGGQARMAELLLGGPRTGRDHTVKNPDPGKAFPGGESYLSMPGLGDLLAARIAGEIGEHINQFDHPSGLQCYAGSAPVTRRSGKSDFVVARRLAHNHYLGAAVHQWAFCSLLRSAWAREFYDGKIAAGKNHHAALRALSNRWLEVLWHCLTKGVLYDEAVHVANRSRALGRAA

SEQ ID NO: 13721 - protein, 343 aa, unidentified
  source 1..343: note = protein_d18e067
  REGION 7..148: note = RuvC_domain
  SITE 10: note = RuvC_P1
  SITE 53: note = RuvC_P2
  SITE 88: note = RuvC_P3
  SITE 90: note = RuvC_P4
  SITE 93: note = RuvC_P5
  REGION 211..294: note = Tnp_domain
  SITE 219: note = Tnp_P1
  SITE 249: note = Tnp_P2
  SITE 257: note = Tnp_P3
  SITE 258: note = Tnp_P4
  SITE 270: note = Tnp_P5
MNEIKVLGIDLGKDVCSVVGFDGAGKVLLRRRMRRDSILKLASGMPTCVMAMEACCGAHHLGRLLREQGHDVRLMSPEYVRPYVKAQKNDDRDAEAIAEAATRPTMRFVDLKSDEQLDMQSLHRARDRLVGERTTLINQLRAILLERGIVMAKGRRKLELRLDQLFSGEVTISRRIRLLVEDMRAQWRALDERIGAFDAEFVAIAREDAATKLLSTIPGVGPLNATAFVASVGRAETFGRGRDLAAWLGLVPRQMTTGGKPRLLGISKRGNGYLRRMLIHGARAALPSLAKGRTLLGEWLRGLLARTHMNTAVVALAAKMARIIWAVLRSGRPFQVEATPPAG

SEQ ID NO: 13722 - protein, 286 aa, unidentified
  source 1..286: note = protein_a10b7cc
  REGION 4..157: note = RuvC_domain
  SITE 7: note = RuvC_P1
  SITE 55: note = RuvC_P2
  SITE 96: note = RuvC_P3
  SITE 98: note = RuvC_P4
  SITE 101: note = RuvC_P5
  REGION 219..283: note = Tnp_domain
  SITE 227: note = Tnp_P1
  SITE 257: note = Tnp_P2
  SITE 265: note = Tnp_P3
  SITE 266: note = Tnp_P4
  SITE 277: note = Tnp_P5
MITIGIDPHKRTLTAAALDPHSRLLGQLRLAASSQAASQLLAWAAAWPERRWAVEGASGLGRGIAQLLVAAGEQVVDVPAKLAARARLLGTSSARKTDLADAASVAAAAIHHRQLRPVALEDHTVTFRLLSDRRDDLVAERTRTLSRLHVLLADLQPGGAARELSATRAAALLRKIRPITAVDIERKRIARELLADVRRLDRQVKTASQAIRTAVCEHGTTLTQVYGVGSVLAAKLLGHTGDITRFPDRDHFASYTGTAPVEASSGDIRRHRLNRGGTASSTRPCM

SEQ ID NO: 13723 - protein, 359 aa, unidentified
  source 1..359: note = protein_28a1506
  REGION 13..159: note = RuvC_domain
  SITE 16: note = RuvC_P1
  SITE 65: note = RuvC_P2
  SITE 101: note = RuvC_P3
  SITE 103: note = RuvC_P4
  SITE 106: note = RuvC_P5
  REGION 233..317: note = Tnp_domain
  SITE 239: note = Tnp_P1
  SITE 270: note = Tnp_P2
  SITE 278: note = Tnp_P3
  SITE 279: note = Tnp_P4
  SITE 290: note = Tnp_P5
MAVIEGRERHIVGGVDTHKDLHVAAVVDEQDRILGTRSFPTTRQGYRQMLAWMLSFGELQRIGIESTGSYGAGLLRFMQQAKVVVLEVTTPDKQDRRRRGKNDDLDAQNAAHAALAGQRTVTPRSRDGMIESLRILMACRKTAVSARRIALQMIHNTIVCAPDALRDQLRNLTRMQLVRTLASWRPDLTAYRDLDSAYRIGLKSLARRYLELHDEIADLDVMIAAIVNELAPNLVARNSIGHIGAAQLLLTAGDNPERLRSEASFASLCGVSPVPASSGKTVRHRINRGGDRAANSALHIIAIGRLRTDQRTKDYVARRIAEGHSKLDAIRALKRYLAREVFTLITQRRKEINATRIAA

SEQ ID NO: 13724 - protein, 316 aa, unidentified
  source 1..316: note = protein_5e52a49
  REGION 6..152: note = RuvC_domain
  SITE 9: note = RuvC_P1
  SITE 57: note = RuvC_P2
  SITE 97: note = RuvC_P3
  SITE 99: note = RuvC_P4
  SITE 102: note = RuvC_P5
  REGION 192..276: note = Tnp_domain
  SITE 200: note = Tnp_P1
  SITE 229: note = Tnp_P2
  SITE 237: note = Tnp_P3
  SITE 238: note = Tnp_P4
  SITE 249: note = Tnp_P5
MDIKAVGIDVSKTTLDVDTLPERGARQFTNDEAGIDALLAYLAQHNGQGQIERVVLEATGGFETRVSIALAGAGLPVVVVNPKQVRDFAKACGILAKTDKLDAHVLARFGQQIRPPVRALPSEAQREFADLLDRRSQLVAMRAQEKARVVTAPVVAIKSLKEHIEWLDARIKALDIDMTHALRTSEAWKQKVELLDSMPGVGKVTVFTLLGRLPELGQLNRQQIAALVGVAPFNDDSGKRRGQRYIRGGRTEVRNVLYMAAVTAIRHNPAIREFHQRLKAVGKPSKLAITACMRKILTILNSMVKTGQPWENRLPA

SEQ ID NO: 13725 - protein, 347 aa, unidentified
  source 1..347: note = protein_23ba56a
  REGION 7..147: note = RuvC_domain
  SITE 10: note = RuvC_P1
  SITE 53: note = RuvC_P2
  SITE 88: note = RuvC_P3
  SITE 90: note = RuvC_P4
  SITE 93: note = RuvC_P5
  REGION 210..293: note = Tnp_domain
  SITE 218: note = Tnp_P1
  SITE 248: note = Tnp_P2
  SITE 256: note = Tnp_P3
  SITE 257: note = Tnp_P4
  SITE 269: note = Tnp_P5
MDQISRIGMDTSKHIFQLHGVNAAEEPILRRKLRRKDMIAFFERLTPTRVAIEACGASHHWARRLRSFGHDVQLIAPQLVKPYVKRGKNDAADAEGLCEAMSRPTMRFVPVKTAEQQAALMMIGLRDRLIRNRTQIVNAIRGYAAEFGITAAQGIAHVAPLLVRIQADQALPKLARELFALQAIEYEQVQAKIVAIDVKLAAWQRADACSTRLVRIPGIGPIGAAMLMLKTPAPEAFRSGRQFAAWIGLTPKDHSTAGKVRLGVITRAGDEALRRVLVAGATALVRRVREGRCGWGLALWIKELLQRKAPKLVAVAVANKLARIAWKMMRTGEAYAGARAPATTCAV

SEQ ID NO: 13726 - protein, 320 aa, unidentified
  source 1..320: note = protein_421c148
  REGION 5..151: note = RuvC_domain
  SITE 8: note = RuvC_P1
  SITE 57: note = RuvC_P2
  SITE 97: note = RuvC_P3
  SITE 99: note = RuvC_P4
  SITE 102: note = RuvC_P5
  REGION 194..279: note = Tnp_domain
  SITE 202: note = Tnp_P1
  SITE 231: note = Tnp_P2
  SITE 239: note = Tnp_P3
  SITE 240: note = Tnp_P4
  SITE 252: note = Tnp_P5
MEAILGIDIAKATFVVALLTPEGRLRRKSCANTPAGYAGLAGWLTRQHVTHVHATLEATGPYGEALATWLHEAGHVVSVVNPAVIHAYARTQLTRSKTDRIDAALIAQYTATQRPAAWTPPAPEIRQLQALVRRLDALHGMRTQELNRRGAGALVADVRASIEAVLAQLEAQIAHVQQLIRQHLDQHPGLRAQRDLLTTIPGIGETTAAVLLAELFDKPYSSARQAAAFAGLVPRLVESGTRRGRARLSKIGPGRLRKALYFPAVTALRCNPTIRAVRARLQAAGKPPMVIIGAAMRKLIHLAFGVLKSRRAFESRCAHP

SEQ ID NO: 13727 - protein, 342 aa, unidentified
  source 1..342: note = protein_2686ff5
  REGION 7..148: note = RuvC_domain
  SITE 10: note = RuvC_P1
  SITE 53: note = RuvC_P2
  SITE 88: note = RuvC_P3
  SITE 90: note = RuvC_P4
  SITE 93: note = RuvC_P5
  REGION 211..296: note = Tnp_domain
  SITE 219: note = Tnp_P1
  SITE 249: note = Tnp_P2
  SITE 257: note = Tnp_P3
  SITE 258: note = Tnp_P4
  SITE 270: note = Tnp_P5
MSEVSMIGLDLAKNTFQAHGENADGSVAFRKKLRRDKVMMFFDSQPRCTVAMEACASAHFWARSLQELGHEVRLVPPRYVKPFVKRQKNDAADAEAIAEAASRPTMRFVAIKSEAKQAQGMAFKTRDLMVRQRTQMINALRGNMAEFGVIAPQGVANVERLRSVVDDPEAALPAPVVALAQMALEQIDEVTKRIDAIEHDIKKLARQQDTSKRVMTIPGVGPICATAVEAFAPPMESFNSGRDFAAWLGLTPRQHSTGGKERLGKMSKMGQRDLRRLLVGGAMAVVRWAAKHGAPAGSWLGRMLERKPRMVVAVALANKNARIIWALLTQGGVYKDPAVAAA

SEQ ID NO: 13728 - protein, 257 aa, unidentified
  source 1..257: note = protein_c27390e
  REGION 1..96: note = RuvC_domain
  SITE 37: note = RuvC_P3
  SITE 39: note = RuvC_P4
  SITE 42: note = RuvC_P5
  REGION 161..245: note = Tnp_domain
  SITE 169: note = Tnp_P1
  SITE 199: note = Tnp_P2
  SITE 207: note = Tnp_P3
  SITE 208: note = Tnp_P4
  SITE 220: note = Tnp_P5
MEACSGAHHIARRLEALGHDVRLIPAQYVKPFLKGHKNDYRDAEAIAEAVQRPAIRFVAIKTPEQMDLLALHRVRSRLVRLRTGVINQIRGFLIERGIAVRQRPTPLSKALSDILRSGSEALSPRLARLIADLVEDWRRLNDRIAIVSAETEARAKQDGHCQRLMAVPGIGPIISSGVVAAIGNGNGFRQGRDFGAWLGLVPTQEPTGDRTILGKISKRGDKYLRTRFVQAGHVILARRPSAAMGSVALDRAGIEAA

SEQ ID NO: 13729 - protein, 410 aa, unidentified
  source 1..410: note = protein_e341d90
  REGION 5..163: note = RuvC_domain
  SITE 8: note = RuvC_P1
  SITE 60: note = RuvC_P2
  SITE 100: note = RuvC_P3
  SITE 102: note = RuvC_P4
  SITE 105: note = RuvC_P5
  REGION 271..357: note = Tnp_domain
  SITE 279: note = Tnp_P1
  SITE 310: note = Tnp_P2
  SITE 318: note = Tnp_P3
  SITE 319: note = Tnp_P4
MRLCVGDDWAEDHHDIEVMGEAGTVLARKRLPEGVAGIGQLHELIGRFLPAGGDAEVQVGIETDRGPWVAALIAAGYTVFPVNPLQASRYRGRYGVSGAKSDGGDAHMLADVVRTDAHQLRPAAGDSAAAEAVKVLARTHKRLIWERAAVVLRLRAQLREYFPAAVAAFEDLDAPDALELLGKAPDPARAAKLTRAQVSAVLKRAGRYKIAERADAILAALRSPQLGQPPALTAAYAATVRSLIAVITTLNEQVNSLQGQVEAHFGQHPDAEIYLSQPGLGAITGARVLGEFGDDPCRYTSAKARRNYAGTSPITRASGKKKTVAARFVRNDRLIDALMIQAFAALRVSPGARAFYDAQRAKGLEHNDALRRLASRLVGILHGCLKTSTCYDEATAWGHRENIPQSEAAA

SEQ ID NO: 13730 - protein, 343 aa, unidentified
  source 1..343: note = protein_2980967
  REGION 7..148: note = RuvC_domain
  SITE 10: note = RuvC_P1
  SITE 53: note = RuvC_P2
  SITE 88: note = RuvC_P3
  SITE 90: note = RuvC_P4
  SITE 93: note = RuvC_P5
  REGION 211..296: note = Tnp_domain
  SITE 219: note = Tnp_P1
  SITE 249: note = Tnp_P2
  SITE 257: note = Tnp_P3
  SITE 258: note = Tnp_P4
  SITE 270: note = Tnp_P5
MAKDMMIGVDLAKNSFQVHGATMNGQVKFRRKLSRAQFLSFMAAQPPAIVVMEACPGAHHWARELLALGHEAKLIAPIYVKPFVKRQKNDAADAEAIVEAAQRPGKRFVEPKGPEQQARALLFRTREQLVHQRTELVNALRSYLYEFGYALPIGIASLRRIEAIIEDAATDLPEMVREICRDLRQQIAEKTVRIDALMKRIKSTAEDTETARRLQTMPGVGPVTSLAVEAFAPPLETFRCGRDFAAWLGLVPRQNSTGGKQRLGRVTKAGQADIRRLLIVGAMSRLTWLGRKSIREGSWLARMLERKPKMLVAIALANKMARAIWAMLTRNEDYRDPLPVAAT

SEQ ID NO: 13731 - protein, 369 aa, unidentified
  source 1..369: note = protein_648aac8
  REGION 14..168: note = RuvC_domain
  SITE 17: note = RuvC_P1
  SITE 65: note = RuvC_P2
  SITE 105: note = RuvC_P3
  SITE 107: note = RuvC_P4
  SITE 110: note = RuvC_P5
  REGION 275..359: note = Tnp_domain
  SITE 283: note = Tnp_P1
  SITE 312: note = Tnp_P2
  SITE 320: note = Tnp_P3
  SITE 321: note = Tnp_P4
  SITE 333: note = Tnp_P5
MTESSDYESIQVFIGVDVGKDTHHAVAVNRSGKRLFDRALPNDENKLRALISDLKQHGQILLVVDQPATIGALPVAIARSEGVLVGYLPGLAVRRIADLHAGEAKNDARDAAAIAEAARTLAHALRTLKVADEQIAELSMLCGFDDDLAAQTMQASNRIRGLLNQIHPALERVLGPCLDHPAVLELLQRYPSPEKLASLSEKKLAAQLSKLAPRLGKSLAADITRALTEQSVVVSGTNAAIVVLPRLALQLITLRKQRDEVALEVEQRVLVHPLYPVLTSMPGVGVRTAARLLTEVACRAFASAAHLAAYAGLAPITRRSGSSIRGEHLSRRGNKTLKGALFLLAFAALRDPISKAYYTRKINQGKRHN

SEQ ID NO: 13732 - protein, 425 aa, unidentified
  source 1..425: note = protein_464bfb5
  REGION 4..157: note = RuvC_domain
  SITE 7: note = RuvC_P1
  SITE 59: note = RuvC_P2
  SITE 94: note = RuvC_P3
  SITE 96: note = RuvC_P4
  SITE 99: note = RuvC_P5
  REGION 284..371: note = Tnp_domain
  SITE 292: note = Tnp_P1
  SITE 323: note = Tnp_P2
  SITE 331: note = Tnp_P3
  SITE 332: note = Tnp_P4
  SITE 344: note = Tnp_P5
MLGVGIDWSEEFHLVALGRPGEDVIEVTRVEHSPKAVDALVAKIAELEPDPGEVRVVIETRHGLLVERLVDAGYTVVPVNPDLVARRRGPAKCKDDAEDARIACLIALDRHERLRPLIPHGEIAGELRAIARDDERAARDERRLGNRLRQDLISAFPAALQIGGDDLGAPTFLRMLERWPTTNALVGASRAELVVFARSCRHGWPERFADKVEVSLAAEHFRPKDYLVRAKADAIRLAASQLLLIGQQRRSWERRMGELLLGGPRRGRDRGPRGDELGKGFPGGEIYLSFPGLGDRLAARIAGEIGDHPEQFDTPNSLACYAGKAPVTRRSGKSELVVACRLAHNRYLGGAVQQWAFCSLRCSVWAREFYDLQRARGKGHHAALRALGNRWLEILWHCLHKGALYDEAVHVGNRNRALGRTAQAA

SEQ ID NO: 13733 - protein, 396 aa, unidentified
  source 1..396: note = protein_0271b29
  REGION 4..160: note = RuvC_domain
  SITE 7: note = RuvC_P1
  SITE 57: note = RuvC_P2
  SITE 97: note = RuvC_P3
  SITE 99: note = RuvC_P4
  SITE 102: note = RuvC_P5
  REGION 274..361: note = Tnp_domain
  SITE 282: note = Tnp_P1
  SITE 312: note = Tnp_P2
  SITE 320: note = Tnp_P3
  SITE 321: note = Tnp_P4
  SITE 334: note = Tnp_P5
MLAIGIDVSKSKSAAAILNQDGSVHTEPFEFHHDKPEMDALIKFIKNQNQSVTILMENTGHYHYPVLKAFQAADLPVCLINPYQMKKYGDMELRKAKTDKKDALRIAHYALEKGYSLVPYTPMDQKYEDLRFLARQYDQRMGTLKANKTFLINLLDETMPGITKVLSLTTRDPETSLSVQFIKRFKSFDRIRKMGRTRFLESYDKLSRKSRNRCAGSCGLIIYEMALNSITTRGENEYTLAAQDQCVDLVSESQKAADSIIQKMKTLAETLPEYEVLRAMAGVGDRLGPLILAEIGDIRRFHSGKALNAYAGNDAPPYQSGMFESHNRHISKRGNAALRKYCFEVMQALKLARPQDDPVYLFLVKKEQEGKPYNVAKMAGVNKFLRIYYARAMEVL

SEQ ID NO: 13734 - protein, 413 aa, unidentified
  source 1..413: note = protein_761c096
  REGION 9..165: note = RuvC_domain
  SITE 12: note = RuvC_P1
  SITE 62: note = RuvC_P2
  SITE 102: note = RuvC_P3
  SITE 104: note = RuvC_P4
  SITE 107: note = RuvC_P5
  REGION 281..367: note = Tnp_domain
  SITE 288: note = Tnp_P1
  SITE 318: note = Tnp_P2
  SITE 326: note = Tnp_P3
  SITE 327: note = Tnp_P4
  SITE 340: note = Tnp_P5
MAYQPITAVGIDVSKGKSTVAVRRPGGEVVLTPFDVCHTTEDLKRLAATLHSVGGEMRIVMEHTGMYWRPIALELKRAGFFVSVVNAMLIHDFSDNSIRKVKTDKADSLKIANYALTYWAELREYTSEDETRQMLKIQSRHYERTMNTSVALRNGLISLLDQTFPGANSLFGSEVRTVSGHIKWVDFVKRFWHKDCVATVSLSSFADTFQKWCKRTGYRFSLADAERIHSIARNSVATFPKNDSTKLLITQAVDSLNAVYDALQMIRKEMLRLAALLPEFDVVMSMFGAGNITGPQLMAEIGDVRRFTHKGALVAFAGVDAPPYQSGMFDSKTRHVSKRGSPHLRKTLFTVCSVILQHSNANDPVYLFMDKKRSEGKHYYVFMVAGAAKFLRIYYARVKEALLAQETEDTSAA

SEQ ID NO: 13735 - protein, 317 aa, unidentified
  source 1..317: note = protein_3d5cdec
  REGION 8..172: note = RuvC_domain
  SITE 11: note = RuvC_P1
  SITE 53: note = RuvC_P2
  SITE 93: note = RuvC_P3
  SITE 95: note = RuvC_P4
  SITE 98: note = RuvC_P5
  REGION 189..273: note = Tnp_domain
  SITE 197: note = Tnp_P1
  SITE 226: note = Tnp_P2
  SITE 234: note = Tnp_P3
  SITE 235: note = Tnp_P4
  SITE 247: note = Tnp_P5
MQQQSVFIGVDVAKAELVISIHGQAQHQSIANDATSITTWLASLTPQAHLAMESTGKYHGLLAHLAQQAGLHVYVLNARDVYFYAKALGFRGKTDRLDCQVIARYLAEHHASLHEHSFGSTLQRRLHELLCRRAQVAVHQSALRQVLRDLPELDAAKKSLQESFKAFLDQVDEQIERLISSDAQLEQGCARLRTVTGIGPQAAALLGALFSRINFTNSDALVAYSGLDPRPQDSGTKRGRRRLSKRGPALLRRQIWLVGFAASHSTALKPLYQSLRAKGLSTTAAIVVLARKLLRVAYAVWRGSKPFDVALLGPAKA

SEQ ID NO: 13736 - protein, 444 aa, unidentified
  source 1..444: note = protein_02f7caa
  REGION 18..177: note = RuvC_domain
  SITE 21: note = RuvC_P1
  SITE 76: note = RuvC_P2
  SITE 116: note = RuvC_P3
  SITE 118: note = RuvC_P4
  SITE 121: note = RuvC_P5
  REGION 292..387: note = Tnp_domain
  SITE 300: note = Tnp_P1
  SITE 330: note = Tnp_P2
  SITE 338: note = Tnp_P3
  SITE 339: note = Tnp_P4
  SITE 352: note = Tnp_P5
MHYQKVLKMLESIPYLSVGLDVGADFTWMSIMLPNGLLTGKPFKIIHSDPQSRELAVTKIKEAQETYSLKSRCFLESTGIYHIPLLCFLRDKGFDCSVINPIITKNSTNMNVRKLHNDKFDSKKAARVGLDASLKTSIVPDDEIIDLRNLVRDYYYFKDLQSAVVLKLHAELKVSFPAYLQVFSKITTQTSLNLLYAYPLARDMLAAPKDDIIKTIRSTARFGEMYALARYDALYTAAKDSELFGRALPSNALRIRLYIDSYREYQGHLDSILQELHKAVDRLQGNPAYNRIRLLQSLRGIGFLSAVVLIAEMGSFDLFPSPKKLYAYFGLDPGVNDSGKLRGDRVHMSKRGSGLARRILHMIAINNLKMEKGIKTPVNPVIYDYYTRKCASKKKRVAVGAVMHKICNIIFAMLRDNKPFEIITPEEHCKRYVTEQSAKTETAA

SEQ ID NO: 13737 - protein, 408 aa, unidentified
  source 1..408: note = protein_400e921
  REGION 5..165: note = RuvC_domain
  SITE 8: note = RuvC_P1
  SITE 62: note = RuvC_P2
  SITE 102: note = RuvC_P3
  SITE 104: note = RuvC_P4
  SITE 107: note = RuvC_P5
  REGION 273..359: note = Tnp_domain
  SITE 281: note = Tnp_P1
  SITE 312: note = Tnp_P2
  SITE 320: note = Tnp_P3
  SITE 321: note = Tnp_P4
MRLLVGDDWAEDHHDIELMDASGRRLAKARLPEGVAGMARLHMMIGHQLGETDDEDAEVVIGIETDRGPWVAALVAAGYTVMAVNPLQAAEFRRRLGVSGAKSDAGDAHVLADMVRTHSHELRPVAGDSARAEAVKVVARTHKTLIWERTRHTQRLRHALRDYFPAALEAFEGLDAAEALELLAKAPTSAQAARLTITQISAALKRARRRNVAEKAAAIQAALRTEHLGQPEIVAAAYAASIQSLIAVISVLTDQVKTLQGQVEAHFGQHPAAEIIASQPGMGAVLGARVLAEFGDDPHRYTTAKARKNYAGTSPITKASGKRKVALARFIHNDRLIDALMTQAFAALKASPGARAYYDRQRARGVGHNPALRQLANRLVGILHGCLKSATLYDETTAWSHHVENVAA

SEQ ID NO: 13738 - protein, 425 aa, unidentified
  source 1..425: note = protein_3f4b536
  REGION 23..175: note = RuvC_domain
  SITE 26: note = RuvC_P1
  SITE 74: note = RuvC_P2
  SITE 112: note = RuvC_P3
  SITE 114: note = RuvC_P4
  SITE 117: note = RuvC_P5
  REGION 282..368: note = Tnp_domain
  SITE 290: note = Tnp_P1
  SITE 321: note = Tnp_P2
  SITE 329: note = Tnp_P3
  SITE 330: note = Tnp_P4
  SITE 341: note = Tnp_P5
MKHAPDNSNRTTLPPNPARGLTAGLDWVKDDHVVCVVDGAGRAVDRFTVTHTGSGLAELLQRLRKTGCQEIAIERPDGPVVAALLEADLTVVVISPNQLKNLRSRYGSAGNKDDRFDAYVLADTLRTDRARLRPLLPDSPATLTLRATCRARKDLIGHRVALANQLRAHLHTALPGAVGLFAELDSAISLKFVGRFDTQDKLDWLSAKRLAGWLRNAGYSGRVDPAVLHARLTAAPRGLTGPPGAAHAHTTRALLTVLASLVEQIRALSEQIGEQLDLHTDQHIFTSLPRSGTVRAARLLAEIGDCRARFPTPEALACLAGVAPSTRQSGKHRGVSFRWSADKQLRDAVCDFAGDSRRANPWADKLYRDAITRGHDHPHAVRILARAWLYIIWHCWQDRVAYQPARHGALQRHLATQNKITNQAA

SEQ ID NO: 13739 - protein, 403 aa, unidentified
  source 1..403: note = protein_bdf0232
  REGION 4..160: note = RuvC_domain
  SITE 7: note = RuvC_P1
  SITE 57: note = RuvC_P2
  SITE 97: note = RuvC_P3
  SITE 99: note = RuvC_P4
  SITE 102: note = RuvC_P5
  REGION 274..361: note = Tnp_domain
  SITE 282: note = Tnp_P1
  SITE 312: note = Tnp_P2
  SITE 320: note = Tnp_P3
  SITE 321: note = Tnp_P4
  SITE 334: note = Tnp_P5
MNAVGIDVSKGKSMVAALRPFGEIVTKPFEVHHTSSDIHQLIDHLNAFEGDTRIIMEHTGRYYEPMARWLADAGFFVSTINPKLIKDYGNNTLRKVKTDKADAVKIARYALDNWQDLRQYTSMDIIRNQLKTMNRQFGFYMKQKTSYKNNLISLLDQTYPGINDLFDSPARSDGSQKWVDFVSSFWHVDCVRNLGLTTFTDRYQKWCKRHGYNFQPEKPAQIYSFSKELIAVFRKDPVTKLLVKQAVEQLNTVSFTVEQLRLEMNHLSAQLPEYQVVMDMKGVGPSLGPQLIAEIGDLSRFSHREALTAYAGVDPGANQSGAYEAHSVRTSKRGSPQLRKTLFQVMDVLIKSAPSDDAVYRFMDKKRSEGKPYYVYMTAGANKFLRIYYGRVKEYLATLPKPE

SEQ ID NO: 13740 - protein, 397 aa, unidentified
  source 1..397: note = protein_c9ec8c8
  REGION 7..161: note = RuvC_domain
  SITE 10: note = RuvC_P1
  SITE 58: note = RuvC_P2
  SITE 98: note = RuvC_P3
  SITE 100: note = RuvC_P4
  SITE 103: note = RuvC_P5
  REGION 268..355: note = Tnp_domain
  SITE 276: note = Tnp_P1
  SITE 307: note = Tnp_P2
  SITE 315: note = Tnp_P3
  SITE 316: note = Tnp_P4
  SITE 328: note = Tnp_P5
MSYDVVIGLDVGKHRHHACALDPDGKRLLDQEVENTETALREVFAQAAAEGRALVVVDQLHSIGALPVTVAQAMGLDTAYLPGLSMRRLADLHPGNAKTDARDAFVIANAALTVPHTLRRLDVPSEAQADLAMLLGYDDDLAAQVTAAVNRLRGLLVQIHPSLEKALGDNVSHDAVLHLLIKAGGPDGLRKMGRARIDKELAKHAPRIHDRLAGEIWAGLGAQTVVVPGTTAAAKVLPGLAAQILQLRDQRKEIGKDVEKVLDAHPLARVLTSMPGVGVKIAARLLAEIGGDVSAFPTAAHLAAYAGLAPVTKRSGTSIRGEHVNRGGNKRLKNALFMAAFTSLRADPASRAYYDRKRAEGKKHNAALICLARRKTDVLFAMIRDHKPYTPAQPAAA

SEQ ID NO: 13741 - protein, 356 aa, unidentified
  source 1..356: note = protein_8b4665d
  REGION 15..163: note = RuvC_domain
  SITE 18: note = RuvC_P1
  SITE 67: note = RuvC_P2
  SITE 103: note = RuvC_P3
  SITE 105: note = RuvC_P4
  SITE 108: note = RuvC_P5
  REGION 234..319: note = Tnp_domain
  SITE 241: note = Tnp_P1
  SITE 272: note = Tnp_P2
  SITE 280: note = Tnp_P3
  SITE 281: note = Tnp_P4
  SITE 292: note = Tnp_P5
MPPITPDQAEIEVAGGVDTHQDTHTAAVIDLVGRVLGTQQFPTTGAGYAALLAWMRGFGRVWRVGVEGTGAYGVGLARRLRGEGVEVIEVDRPHRKTRRFQGKSDPIDAIAAAKAALAGERTGIPKQRDGRVEALRNLRVARRSAVDQRADAQRQIKALIVTAPDELRARLRGLTVTRLIATCANLRPDRTDAATPATAVKIALRSLARRHQQLSTEIADLDELLEPLVAAINPSLVAVNGVGADVAGQLLVTAGENHDRLTSEAGFAMLCGAAPIPASSGKTTRHRLNRSGDRQANAALYRVVLCRLRWDPRTRAYAERRTKEGLSKKEIIRCLKRYIARELYQLITTNDLQLAA

SEQ ID NO: 13742 - protein, 385 aa, unidentified
  source 1..385: note = protein_f563c6b
  REGION 11..162: note = RuvC_domain
  SITE 14: note = RuvC_P1
  SITE 59: note = RuvC_P2
  SITE 99: note = RuvC_P3
  SITE 101: note = RuvC_P4
  SITE 104: note = RuvC_P5
  REGION 264..349: note = Tnp_domain
  SITE 272: note = Tnp_P1
  SITE 301: note = Tnp_P2
  SITE 309: note = Tnp_P3
  SITE 310: note = Tnp_P4
  SITE 322: note = Tnp_P5
MAPPARPRVVIGLDVGKSAHWACVVTREGELLASRPIPNRENAIDGLYARYPGALVVVDQVRNIGSLALSRAKLAGMPRAYLPGLAAHGASRLFAGDAKTDERDAMVIAKTALGIPDALLAVADRPPEVEAARSLAAQRDFLTCENTRSKNRLRSILLESCPEFEAQADLSDPATLKLMAAVGGPWSISEASPQSVGALTRGCRRAKVAALAGSVESSSRPHPAAVACEDRAVRLLARRISENDAEIGSLTSEISALLSADETYRCLLTVPGIGPRTASELVISIDIADFPSHDRLASYCGLAPRNRRSGTSISSVSASRQGNKRLKNLLIFSCNCLARSRNRWGEYYARCRDRGMPHGKALKAVARKRLKVIYAVMRDKVPYAA

SEQ ID NO: 13743 - protein, 360 aa, unidentified
  source 1..360: note = protein_aeecc8f
  REGION 14..162: note = RuvC_domain
  SITE 17: note = RuvC_P1
  SITE 66: note = RuvC_P2
  SITE 102: note = RuvC_P3
  SITE 104: note = RuvC_P4
  SITE 107: note = RuvC_P5
  REGION 233..318: note = Tnp_domain
  SITE 240: note = Tnp_P1
  SITE 271: note = Tnp_P2
  SITE 279: note = Tnp_P3
  SITE 280: note = Tnp_P4
  SITE 291: note = Tnp_P5
MDGKEEADARIVIGGVDTHKDLHVAAVVDVHDRVLGTRSFATTRQGYRQMLAWMRSFGSVQRVGVESTGSYGAGLLRFLQQAGVTVLEVTTPDRQDRRKRGKSDDLDAQSAAHAAFAGQRTVTPRSRDGMIEALRVLVACRKTAVTARRIALQMIHNTIVAAPDGLRDQLRTLTRMQLVRMLAAWRPDLTAYREVEAAYRISLKSLARRYLELHDEIADLDAMIAAIVEELAPNLIERNSIGHVGAAQLLLTAGGNPERMRTEASFAALCGVSPVPASSGKTIRHRLNRGGDRSANSALHIIAIGRLRTDQRTKDFVARRIAGGHSKLDAIRSLKRYLAREVFTLIMQRQRQINATRIAA

SEQ ID NO: 13744 - protein, 345 aa, unidentified
  source 1..345: note = protein_819fc40
  REGION 7..149: note = RuvC_domain
  SITE 10: note = RuvC_P1
  SITE 53: note = RuvC_P2
  SITE 88: note = RuvC_P3
  SITE 90: note = RuvC_P4
  SITE 93: note = RuvC_P5
  REGION 212..301: note = Tnp_domain
  SITE 220: note = Tnp_P1
  SITE 250: note = Tnp_P2
  SITE 258: note = Tnp_P3
  SITE 259: note = Tnp_P4
  SITE 272: note = Tnp_P5
MEQCNVIAIDLAKDIFQVCIMTSNGKIILNKAMNRTKLKEWLAKQKLSLVAMESCGGAHYWARFAQSLGHNVMVIPPKQVKPFRTGQKTDANDAVAIAVASRAANIKPARILSIEEQGLQSIERMRSILDKQKLQISNQVRSLLLEFGIVINKSIKSFKERMPDILEDGENDLPFMMRKTLLTMWELYSRLEKDFEAINNELIQLTEQDIDCQRLMKLEGVGPITAIRLKIQLGNGEHFKSGRQVAACIGLTPKQHSSGGKVKLGSVGKSSCDRPLRSCIFLGARAVVSKLKSRAPKTEKERWLKTLIERRGVNCASMALANKTARTAFALLKNNTHYTPVLIAT

SEQ ID NO: 13745 - protein, 407 aa, unidentified
  source 1..407: note = protein_52aae89
  REGION 4..160: note = RuvC_domain
  SITE 7: note = RuvC_P1
  SITE 59: note = RuvC_P2
  SITE 97: note = RuvC_P3
  SITE 99: note = RuvC_P4
  SITE 102: note = RuvC_P5
  REGION 269..355: note = Tnp_domain
  SITE 277: note = Tnp_P1
  SITE 308: note = Tnp_P2
  SITE 316: note = Tnp_P3
  SITE 317: note = Tnp_P4
  SITE 328: note = Tnp_P5
MIFVGNDWAEAHHDVWVMDETGSQVAYRRLSEGIEGVSGFHGLVGGFVSDPADVVVGIETDRGLWVHALVAAGYQVYVINPFAASRYRDRHHVSGAKSDRGDAKMLADLVRTDRHLHRQVAGDTPEAETIKVLARTHQTMVWEKRRHTNRLRSMMREYYPAALEAFKDLAHRDAIAVLSAAPTPMAGARLTKPQIRAALKKGGRQRNLDRRTAEIQDVLRSRHLATGPRLEEGFGTAATAILEVIATIDTQIAELETELAEVFHTHPDAAIYLSMPGLADVLGARILGEFGDDPNRYATAKCRRNYAGTSPLTRASGNTKTVTARYIGNDRLKDVALRWAFTSLKASEGSRNYYDERRAKGDHHRKALRALANRLVGILHGCLEHHATYNEDIAWAHRQPAIEAIAA

SEQ ID NO: 13746 - protein, 347 aa, unidentified
  source 1..347: note = protein_79570f0
  REGION 5..152: note = RuvC_domain
  SITE 8: note = RuvC_P1
  SITE 55: note = RuvC_P2
  SITE 92: note = RuvC_P3
  SITE 94: note = RuvC_P4
  SITE 97: note = RuvC_P5
  REGION 212..311: note = Tnp_domain
  SITE 220: note = Tnp_P1
  SITE 250: note = Tnp_P2
  SITE 258: note = Tnp_P3
  SITE 259: note = Tnp_P4
  SITE 271: note = Tnp_P5
MDHYAGIDVSLEYSSVCVVDASGKIVREGKVATEPEVLMAWLGSLGFDMARVGLEAGPLSQWLYAAMQKTGLAVELLETRHVRAAFEAMPVKTDRNDARGIAQLMRLGWFRPVHCKSLPAQEVRALLTARKLVQSKLFDVEMSLRGILRGFGLKVGRTTPKRFAGRIRELVAGHATLEVVAASLLAVHEVMRREFGSLEKRVRSMAREDARARLLMSAPGVGAIVALTYVSAVDNPRRFTSSKGIGAHFGLTPKRYQSGERDVTGRISKIGDASVRAALYEAAHVILTRPVRGSALKSWAAKLVKRAGMKKAKVALARKLAVILHRMWVDGREFIFTTPRNAAAAAA

SEQ ID NO: 13747 - protein, 401 aa, unidentified
  source 1..401: note = protein_bc97e0d
  REGION 4..160: note = RuvC_domain
  SITE 7: note = RuvC_P1
  SITE 57: note = RuvC_P2
  SITE 97: note = RuvC_P3
  SITE 99: note = RuvC_P4
  SITE 102: note = RuvC_P5
  REGION 274..361: note = Tnp_domain
  SITE 282: note = Tnp_P1
  SITE 312: note = Tnp_P2
  SITE 320: note = Tnp_P3
  SITE 321: note = Tnp_P4
  SITE 334: note = Tnp_P5
MNCVGIDVSKGKSMIAVMRPLGEMVIPPFEVGHTDAELCELSRRLGGLEGETRIVMEATGNYHLPVASFLYDSGFYVSVVNAMLVHGYGNNNLRRVKTDKKDAVKLANYGLDHWLTLPRYIPEDEVRLMLKTTYRQYQQCTKVQTMLKNNLISLLDTAFPDANRLFTSPTRADGSEKWVDFISTFWHCECVCGLSEKAFTAKYQKWCKRHGYNFSQDKALDIYASACGHFSVMPKNDTTKILVEQAVSQLQATSAALAALRNEMQSLAASLPEYPIVMGMFGVGPALGPQLMAEIGDVRRFHSKKALVAFAGIDAPPYQSGQMEIRSRSISKRGSAVLRRTLFLVMSAILRCSPADEPVYQFMDRKRTEGKPYRVYMMASANKFLRIYYATVKQYLDSLEA

SEQ ID NO: 13748 - protein, 337 aa, unidentified
  source 1..337: note = protein_f9f0b9a
  REGION 6..148: note = RuvC_domain
  SITE 9: note = RuvC_P1
  SITE 52: note = RuvC_P2
  SITE 87: note = RuvC_P3
  SITE 89: note = RuvC_P4
  SITE 92: note = RuvC_P5
  REGION 210..274: note = Tnp_domain
  SITE 218: note = Tnp_P1
  SITE 248: note = Tnp_P2
  SITE 256: note = Tnp_P3
  SITE 257: note = Tnp_P4
  SITE 268: note = Tnp_P5
MQITTIGLDLAKNVFQVHGIDQEGKVGVRRSLRRSEVVEYFAKPPPCLVGIEACATAHHWAREIGRFGHTVRLMPPAYVKPYVKRNKNDIADAEAICEAVTRPNMRFVAVKTAAQQSVLMLHRCRVLLVRQRTMLANAIRAHLAEFGIAMPQGIRTLLTALNVPKNEMNNLPDLVRIALTPMTASLIELGQRIKALEIEIAREHRGNETSRRLETIPGFGVITSTAMAATVADPTAFKSGREFAAWLGLTPRESSSGGKQRLGSIQDGRRVSSNVARCRSDGGDPLRSRGRVRQDGVIRKLMEKKPAKVVAVALANKMARIAWALMTRGEIYRAIPA

SEQ ID NO: 13749 - protein, 343 aa, unidentified
  source 1..343: note = protein_e4ffc66
  REGION 8..148: note = RuvC_domain
  SITE 11: note = RuvC_P1
  SITE 54: note = RuvC_P2
  SITE 89: note = RuvC_P3
  SITE 91: note = RuvC_P4
  SITE 94: note = RuvC_P5
  REGION 211..304: note = Tnp_domain
  SITE 219: note = Tnp_P1
  SITE 249: note = Tnp_P2
  SITE 257: note = Tnp_P3
  SITE 258: note = Tnp_P4
  SITE 270: note = Tnp_P5
MKTIPIRIGMDTSKSVFQLHGVDANENTVVRRQLRRAEMIRYFEKLPPALVAIESCGSSHHWARVLSSFGHDVKLIPPQYVKPYVKRGKNDAADAEALCEAVTRPNMRFVPIKSTEQQAACMLMTVRERLVSVKSQLSNAFRSYAAEFGIVGPAGRQNVNALIKRVLEDDTLPELARDLFRFQAKEYAAVEARLEEIETRLMAWHRDDDVSRRLATIPGIGPIGSAMLSMKAPPAKSFRSGRDFAAWIGLTPRDHSTGGRMRHGGITKAGDAGLRSVLVVGATALLRHIRAGRHKPTPWLAALLERKPPKLVAVALANKFARIAWRLMVSGGIYSRPPDRMAA

SEQ ID NO: 13750 - protein, 339 aa, unidentified
  source 1..339: note = protein_e514a45
  REGION 6..147: note = RuvC_domain
  SITE 9: note = RuvC_P1
  SITE 51: note = RuvC_P2
  SITE 86: note = RuvC_P3
  SITE 88: note = RuvC_P4
  SITE 91: note = RuvC_P5
  REGION 208..298: note = Tnp_domain
  SITE 216: note = Tnp_P1
  SITE 246: note = Tnp_P2
  SITE 254: note = Tnp_P3
  SITE 255: note = Tnp_P4
  SITE 267: note = Tnp_P5
MSLKLLAIDLGKRSFHCHGVDSDGVIISRKTSRSKLLETIKDLAPEIIAMEACASAHYWGRRFLADGRRVLLINPWFVKPFVKGSKNDAADADGIYEAALRPTMRFVPVKSPEQQDLQSLHRARERVVCARTALINHMRGLLGEYGVILPQGAWRFLAQAQDAIADAELSDLTRELFGDLLEELRALDLRLDKLDRQLVSLCRTNEACRRLSKLPGVGPVIATALVAAVDDGRHFRSGRELAAWIGLVPRQYTTGGKPRLGGIGRRANHYLRRQMIHGARAVMFRLTKHDDHRSQWLKALAARRGFNRAIVALANKTARIAWAVLTRKEDYMALHDLPH

SEQ ID NO: 13751 - protein, 344 aa, unidentified
  source 1..344: note = protein_50947e2
  REGION 6..148: note = RuvC_domain
  SITE 9: note = RuvC_P1
  SITE 52: note = RuvC_P2
  SITE 87: note = RuvC_P3
  SITE 89: note = RuvC_P4
  SITE 92: note = RuvC_P5
  REGION 211..298: note = Tnp_domain
  SITE 219: note = Tnp_P1
  SITE 249: note = Tnp_P2
  SITE 257: note = Tnp_P3
  SITE 258: note = Tnp_P4
  SITE 270: note = Tnp_P5
MQITTIGIDLAKNVLQVHGANERGKMVLRKQLRREQVAAFFANLPSCLIGMEACGSAHHWARKLQALGHTVRLMAPQFVKPYVKSNKNDAADAQAICEAVTRPTMRFVPIKNIEQQTVLSLHRVRQGFIKARTAQANQIRGLLAEYGLVVPQGIAYIALRVPDLIEDATNDLPGTFRQLIDRLLEHLKLLDQQVKEIEAQIKAWHRDDEISRRLEQVPGIGPITASALAATVGDAKNFDNGRQLAAWLGLVPRQHSSGGKAKLLGMSKRGDAYLRTLLIHGARSVIYRATQRNDRDSWLVKLTTRRNANVAAVALANKTARIVWALLAHDRQFRPDYTPAIAAA

SEQ ID NO: 13752 - protein, 321 aa, unidentified
  source 1..321: note = protein_5a4625f
  REGION 8..150: note = RuvC_domain
  SITE 11: note = RuvC_P1
  SITE 53: note = RuvC_P2
  SITE 93: note = RuvC_P3
  SITE 95: note = RuvC_P4
  SITE 98: note = RuvC_P5
  REGION 189..273: note = Tnp_domain
  SITE 197: note = Tnp_P1
  SITE 226: note = Tnp_P2
  SITE 234: note = Tnp_P3
  SITE 235: note = Tnp_P4
  SITE 247: note = Tnp_P5
MQEPTLFIGVDVSKVELVVSLGPEHRPRSVGNDAVSIANWLREVPPGALIAMESTGRYHGLLAHLASQAGLTVYVLNARDVYFYARALGTRAKTDGVDAGVIARYLAEHHEHLHRWQPASSVQQRLQDLLTRGAQLATQRSALKQIVSGVDVRDIDASGVHDALDALLGAMDEKVQELIASDAQLRSGCQRLRTITGIGAQTSALLATLFSRFEFANADALVAYCGLDPRPNDSGTKRGRRRLSKKGPSLLRRQIYLVGFSASHSKALKPLYESIRAKGFASTEAFVILGRKLLRVAFALWKGDGAFDPARLMPTNDLQKT

SEQ ID NO: 13753 - protein, 265 aa, unidentified
  source 1..265: note = protein_f485f3d
  REGION 2..76: note = RuvC_domain
  SITE 17: note = RuvC_P3
  SITE 19: note = RuvC_P4
  SITE 22: note = RuvC_P5
  REGION 147..230: note = Tnp_domain
  SITE 153: note = Tnp_P1
  SITE 183: note = Tnp_P2
  SITE 191: note = Tnp_P3
  SITE 192: note = Tnp_P4
  SITE 203: note = Tnp_P5
MLEIERRAREPRRAGAKSDRIDALRAARAALAHARLAVPRAAGQREPLRALLSTREGAVGARRAALNQLRALLVTAPEPLRARLRGLSEARLLAACTRLRPATSRHPGQRGLAIALRACARRVRSTSAEAGELKRELELLVGELAPQLLAEEAVGPICAAQLVVSWSHAGRFASEAGFARHAGAAPIPASSGQVVRSRLDRGGDRQLNRALHTILVARHKRHAPTIAYIERRRSEGKSVREALRCLKRFLARHLFRVLEAGPLAT

SEQ ID NO: 13754 - protein, 345 aa, unidentified
  source 1..345: note = protein_8fd6476
  REGION 5..152: note = RuvC_domain
  SITE 8: note = RuvC_P1
  SITE 55: note = RuvC_P2
  SITE 92: note = RuvC_P3
  SITE 94: note = RuvC_P4
  SITE 97: note = RuvC_P5
  REGION 212..300: note = Tnp_domain
  SITE 220: note = Tnp_P1
  SITE 250: note = Tnp_P2
  SITE 258: note = Tnp_P3
  SITE 259: note = Tnp_P4
  SITE 271: note = Tnp_P5
MKHYAGLDVSVKETSVCIVDEAGKVCREVKVSSHPEDLVQVLKDPSWRLERVGLEAGPLSQWLFSGVAEAGLPVVCIETRHTKAFLKAQVNKSDRNDARGIAQMMRVNLFRPVHVKTLTSQKRRALLTARKLLQEKALAIENDIRGLLRNFGLKVGVVGLIKFEERIFELVEGMPELAEIMASLLDARRKLREQVAKLHRKLLSIVREDEACRRLMTIPGVGPVVSLAFTATIDIPARFKTSKAVGPALGLTPILNQSGESNRVGRISQCGDGMMRTLLYEAAQVMLTRTIKWSWLKAWAMNIAKRRGRQKAIVALARRLAVIMHRIWSDGTKFLWTTERAPAAV

SEQ ID NO: 13755 - protein, 342 aa, unidentified
  source 1..342: note = protein_461dd5d
  REGION 6..148: note = RuvC_domain
  SITE 9: note = RuvC_P1
  SITE 52: note = RuvC_P2
  SITE 87: note = RuvC_P3
  SITE 89: note = RuvC_P4
  SITE 92: note = RuvC_P5
  REGION 210..295: note = Tnp_domain
  SITE 218: note = Tnp_P1
  SITE 248: note = Tnp_P2
  SITE 256: note = Tnp_P3
  SITE 257: note = Tnp_P4
  SITE 269: note = Tnp_P5
MKDTMIGVDLAKNVIVLHGTSLTGEMRFRKKLSRGQFIQFMQRQPAAVFVLEACGSAHYWSRELMAYGHEVKLIAPQYVRPFVKRQKNDAADAEAIAIAARQPEMRFVEPKTPDQQAKAVLFRARERVVRQRTELVNALRAVLYEFGQTVPQGIVHIKRLEAVITDDAIDLPDLVREECRDLLAQIDAKTNRIEAKTKQLAELSRTNVTARRLQTVPGVGPMIALAIEAFVPAMGTFRCGRDFAAWLGLVPRQFSSGGKERLGRVSKAGQADIRRLLIIGAMSHVRAASRKPPAPGSWLARMLARKPKMLVAVALANKMARRLWAMVAKQEDYREQALMGVV

SEQ ID NO: 13756 - protein, 367 aa, unidentified
  source 1..367: note = protein_e6addf0
  REGION 53..133: note = RuvC_domain
  SITE 70: note = RuvC_P3
  SITE 72: note = RuvC_P4
  SITE 75: note = RuvC_P5
  REGION 240..325: note = Tnp_domain
  SITE 248: note = Tnp_P1
  SITE 278: note = Tnp_P2
  SITE 286: note = Tnp_P3
  SITE 287: note = Tnp_P4
  SITE 299: note = Tnp_P5
MAADDGIDVYLGLDVGKGEHHATAVNQAGKKVFDKPLPNSELRLRELFEKLQVKHGTVRRIADLYPGEAKTDARDAFVIADAARAMPHTLRTIDPADETVAELAMITGFDDDLAGESTRIANRLRGLLTQIHPSLERVLGPRIQHPAVLRLLDQFGSPAQIRKAGRRRLVALIRPKAPRMAERLVEDIFTALDEQTVIVPGTDAAALIVPSLAGSLQSVLDQRKLLAARIEELLEAHPLSQVLTSMPGIGIRTAARILIDVGDGSGFATAGHLAAYAGLAPVTRNSGTSIRGEHPSRRGNKQLKRAFYLAPFASLSQPESRAYDDRKRREGKHHIAALVALARRRIDVLFAMLRDGTFYQPPTPATA

SEQ ID NO: 13757 - protein, 340 aa, unidentified
  source 1..340: note = protein_dbb55f3
  REGION 7..149: note = RuvC_domain
  SITE 10: note = RuvC_P1
  SITE 53: note = RuvC_P2
  SITE 88: note = RuvC_P3
  SITE 90: note = RuvC_P4
  SITE 93: note = RuvC_P5
  REGION 212..299: note = Tnp_domain
  SITE 220: note = Tnp_P1
  SITE 250: note = Tnp_P2
  SITE 258: note = Tnp_P3
  SITE 259: note = Tnp_P4
  SITE 271: note = Tnp_P5
MGTVTTIGLDIAKSVFQVHGVDAAGGVVLRQRLTRSRMLKFFAQLPSCLIGIEACASSHYWARELVALGHDVKLMPAQYVKPYVKRSKNDAADAEAICEAVTRPTMRFVGIKSPEQQSAMMLHRVRLILSRQRTQLSNALRAHLAEFGIVAPIGRNGIDQLLLVIADTSDDRVPADARMCLEMLVAQLCIVKEQILENDRRIMASARETELGRRLMEIPGVGPLVASAIVATVPDPKVFRSGRDLSAWIGLVPRQNSSGGKERLGSISKAGHGYLRQMLIVGAMAVVRYAERNGTKRPWLVQLLARRKAKVAAVALANKTARTIWAMMASGERYREPLVA

SEQ ID NO: 13758 - protein, 372 aa, unidentified
  source 1..372: note = protein_6106874
  REGION 32..172: note = RuvC_domain
  SITE 35: note = RuvC_P1
  SITE 78: note = RuvC_P2
  SITE 113: note = RuvC_P3
  SITE 115: note = RuvC_P4
  SITE 118: note = RuvC_P5
  REGION 235..320: note = Tnp_domain
  SITE 243: note = Tnp_P1
  SITE 273: note = Tnp_P2
  SITE 281: note = Tnp_P3
  SITE 282: note = Tnp_P4
  SITE 294: note = Tnp_P5
MVWTAPYGINCARMRLLKSQTREPSVKQIIRVGMDTSKNIFELHGVDAAEQPVLRKGLGRKQMIEFFAKLPPTVVGMEACGASHYWARKLGELGHEVKLIAPQLVKPYVMRNKNDGRDAEGLCEAMSRPRMRFVPVKTTEQQAALMLAGIREGLIARRTQLSNTIRGYAAEFGITAAKGLDKIEGLLAQIAQDESVPGLARDLFAMQGRDYARLQVEVKAIEARLMAWHRADAGSRRLARIPGVGPIGATTLVMKTPDPRAFPSGRHYAAWLGLTPKDHSTAGKTRLGKITRAGDERLRSVLVAGATAVIQQARKGRGHPSPWLLALLKRKPPKHAAVALANKIARIAWKLMTTGESYDGARMPIASANAAS

SEQ ID NO: 13759 - protein, 343 aa, unidentified
  source 1..343: note = protein_18bb14b
  REGION 6..149: note = RuvC_domain
  SITE 9: note = RuvC_P1
  SITE 54: note = RuvC_P2
  SITE 89: note = RuvC_P3
  SITE 91: note = RuvC_P4
  SITE 94: note = RuvC_P5
  REGION 213..301: note = Tnp_domain
  SITE 221: note = Tnp_P1
  SITE 251: note = Tnp_P2
  SITE 259: note = Tnp_P3
  SITE 260: note = Tnp_P4
  SITE 272: note = Tnp_P5
MKLSRIGIDLAKNVFQLHGVDRHGKAVWKRRLSRNKWLTALLDQAEPGCVIGMEACGGAHHWARELQSRGYTVKLIPPQFVKPYVKSNKNDANDAEAICEAMSRPNMRFVAVKSVAQQDIQATHRIRSELMTQRTAKANQTRGLVAEYGLVAPLTMCALRAAIPCWLEDADNGLTAHFRSLLQGVWADLVALDGRLLELDRQIDKLANSDEVTRRLQQLRGVGPMVATALVATVGDARQYHKGRQMAAALGLTPRQHSSGGKDRLLGISKRGDVYLRSLLIHGARSVVSHAKHKDDRLSRWATSIAQRRHPNVAAVALANKTARMAWAMLRNETDYDPDFAIN

SEQ ID NO: 13760 - protein, 420 aa, unidentified
  source 1..420: note = protein_8288960
  REGION 5..171: note = RuvC_domain
  SITE 8: note = RuvC_P1
  SITE 68: note = RuvC_P2
  SITE 108: note = RuvC_P3
  SITE 110: note = RuvC_P4
  SITE 113: note = RuvC_P5
  REGION 279..365: note = Tnp_domain
  SITE 287: note = Tnp_P1
  SITE 318: note = Tnp_P2
  SITE 326: note = Tnp_P3
  SITE 327: note = Tnp_P4
MLLMIGDDWAEDHHDIEIEDDTGRRLSRARLPEGLDGIAKLHALVAEHAPADWVDLTPEQTADRVFVGIETDRGSWVVALRASGYHVYAINPMSSARYRDRYSTSGAKSDAGDAHVLAEIVRLDRAHHREIAGDTNLADAVKLLGRAHQNLIWERVRHVLRLRSALLDFFPVAVQAFSDLAATDALILLSRAPDPARSARLTRSQVVSALAAARRHHIQDKAGPLLTLLHTPGLRQPAAVEAAYAAIVLGQVKILTAINEQITAMQSVMAENFDRHPAAQIYRSQPGLGPVLAARVLGEFGDDPQRFANSRARKNYSGQSPITRASGKKSVVLARHATNRRLGVALHLQAYGSLNGSPGTRAYYDAIRARGTGHHAALRQVANRLVGILHGCLESGTLYDETVAWNSSASVTQTAMAPAA

SEQ ID NO: 13761 - protein, 340 aa, unidentified
  source 1..340: note = protein_94e5517
  REGION 6..148: note = RuvC_domain
  SITE 9: note = RuvC_P1
  SITE 52: note = RuvC_P2
  SITE 87: note = RuvC_P3
  SITE 89: note = RuvC_P4
  SITE 92: note = RuvC_P5
  REGION 211..299: note = Tnp_domain
  SITE 219: note = Tnp_P1
  SITE 249: note = Tnp_P2
  SITE 257: note = Tnp_P3
  SITE 258: note = Tnp_P4
  SITE 270: note = Tnp_P5
MKITTVGFDLAKNVFQAHGVDERGQVKLKKTLKRAQVLPFFANLPPCRIGMEACAGAHYWARELAKQGHEVKLIAPQFVKPYVKGNKNDANDAEAICEAVGRPNMRFVPVKTVEQQDLQALHRVRSGLVKERTATVNQTRGLLGEYGIVIGKGITQARRRLPEILEDAENNLSDPARELFAELRQQIVHLDEQVAKYQSQIEAICRESAACRKLLKVNGIGPLSATAMVASVGDGSAFERARQVPAWLGLTPRQASSGGKERLLGISKRGDSYLRTLLIHGARAVVKAARNKDDAQSRWINDLVQRRNQNIAAVAVANKNARIAWALLTGDADYRAPVAA

SEQ ID NO: 13762 - protein, 428 aa, unidentified
  source 1..428: note = protein_ade7867
  REGION 20..181: note = RuvC_domain
  SITE 23: note = RuvC_P1
  SITE 79: note = RuvC_P2
  SITE 120: note = RuvC_P3
  SITE 122: note = RuvC_P4
  SITE 125: note = RuvC_P5
  REGION 288..377: note = Tnp_domain
  SITE 296: note = Tnp_P1
  SITE 326: note = Tnp_P2
  SITE 334: note = Tnp_P3
  SITE 335: note = Tnp_P4
  SITE 347: note = Tnp_P5
MNCNTQNAKIASITEKTLIVGIDVGSETHYARAFDWRNYEYTKKPLEFSNTETGFQTFKAWVEELAERHGKTAVIPGMEPTGHYWFALGKFLQDNGMKPVHVNPHHVKKSKELDDNNPNKNDRKDPKTIAALVNEGRFSYPYMPVGIYAEIRSLSNLRFQTQEELTRIKNRLARWFSIYFPEYKDVYGDLKAVSGRMVLKVAPLPEDILKLGAEGVNQIWRDRKLRGAGMKRAKALLSAAEHSVGSKEAPEAARMELENLLSDMDVHASRMEELLRRIEEKLKEIPYIDNLLAIKGIGMVTVSGFIAEVGDIGRFDNPKQLQKLAGYAVVANDSGKHNGESRISYRGRKRLRYVLYEAAISLVGKNAEFREIHEYYRTRKENPLKKMQSVVAVACKALRIFYAVLTKGIQYDPERLLGDIRRPQVQTA

SEQ ID NO: 13763 - protein, 337 aa, unidentified
  source 1..337: note = protein_2bad09f
  REGION 6..147: note = RuvC_domain
  SITE 9: note = RuvC_P1
  SITE 52: note = RuvC_P2
  SITE 87: note = RuvC_P3
  SITE 89: note = RuvC_P4
  SITE 92: note = RuvC_P5
  REGION 211..297: note = Tnp_domain
  SITE 219: note = Tnp_P1
  SITE 249: note = Tnp_P2
  SITE 257: note = Tnp_P3
  SITE 258: note = Tnp_P4
  SITE 270: note = Tnp_P5
MDITTVGIDLAKSVFQLHGIDANGNIVLQKTLRRGRVLAFLTKIPPCLIGMEACATAHYWAREITSLGHKVRLIPPAYVKPYVKRQKNDAADAEAICEAVTRPNMHFVPVKTKEQQGVLVLHRSRDLLMRQRTMLLNAVRAHLSEFGYITAQGPKRTLDLLQRLEEGDDIELPDTVITALLSLGEQLSTLQRAITGIEKRLMIWHRQNTASQRLETIPGIGLITATALAASVPDPTVFKSARQFSAWLGLVPRQNSSGGKTRLGRISKMGNGYLRKLLVVGATSVTRRAANNETRTGAWVRSLLERKPTRLVTVAIANKTARTAWALMIKGEVYKAY

SEQ ID NO: 13764 - protein, 350 aa, unidentified
  source 1..350: note = protein_f9868e0
  REGION 12..153: note = RuvC_domain
  SITE 15: note = RuvC_P1
  SITE 58: note = RuvC_P2
  SITE 93: note = RuvC_P3
  SITE 95: note = RuvC_P4
  SITE 98: note = RuvC_P5
  REGION 215..301: note = Tnp_domain
  SITE 223: note = Tnp_P1
  SITE 253: note = Tnp_P2
  SITE 261: note = Tnp_P3
  SITE 262: note = Tnp_P4
  SITE 274: note = Tnp_P5
MREPAVEQITRIGMDTSKNVFQLHGVDAAERPVLRKRLTRREMIRFFEKLQPTVVAIEACGSAHYWARLLGSFGHAVKLIAPQLAKPYVKRGKNDAADAEALCEAMNRPSMRFVPAKDAEQQAALMLVGMRTRLIKKRTQLANAIRGFAAEFGIAAATGMCRIEPLRERIAAEETIPELARDLFALHRQEYAQLQHEIERIEAKVMEWHRNDECSQRLARIPGVGPIGASLLKMKAPDPRMFKSGRDFAAWIGLTPRDHSTAGKLRLGSITRAGDELLRSTLVVGANAVVQHARRTGGRNASPWLLGLLERNKPKLVAVALANKIARIAWKLMVSGDQYRKADTSLAVAA

SEQ ID NO: 13765 - protein, 396 aa, unidentified
  source 1..396: note = protein_ad1d2cc
  REGION 4..160: note = RuvC_domain
  SITE 7: note = RuvC_P1
  SITE 57: note = RuvC_P2
  SITE 97: note = RuvC_P3
  SITE 99: note = RuvC_P4
  SITE 102: note = RuvC_P5
  REGION 271..358: note = Tnp_domain
  SITE 279: note = Tnp_P1
  SITE 309: note = Tnp_P2
  SITE 317: note = Tnp_P3
  SITE 318: note = Tnp_P4
  SITE 331: note = Tnp_P5
MISVGIDVSKSKSTVCILKPCGEVVKPPFEMNHTADELDSLVSLINSFDEETRVVLEDTGHYHLPVASYLASHNIFVCCVNALRMKKYCAQSIRRAKTDKIDAAHIASFGITYWSELTQAYDAPDTYDELRFLARQYYQFTSILVKAKVNFSNLLDQVMPGISDLLQNQKDNHKLTEFVDRYIHFQTILDMGEKRFTADYCKWAKKMGYRCNERKASEIFALAQNGIPSLPNSQSVKIAVREAIKMIHSTEESRNTILAQMQDLCKTLPEYYIVREMNCIGDVLAPRIIAEIGDVRRFRNKHALIAYAGIDAPPYQSGAFSASERKISKRGNSYLRKTGYEIMQSLIKHKPAADPVYDFIQKKRSEGKSGKEAMIAGLNKFLRVYYGKVMELYSET

SEQ ID NO: 13766 - protein, 402 aa, unidentified
  source 1..402: note = protein_44facc5
  REGION 4..160: note = RuvC_domain
  SITE 7: note = RuvC_P1
  SITE 57: note = RuvC_P2
  SITE 97: note = RuvC_P3
  SITE 99: note = RuvC_P4
  SITE 102: note = RuvC_P5
  REGION 274..361: note = Tnp_domain
  SITE 282: note = Tnp_P1
  SITE 312: note = Tnp_P2
  SITE 320: note = Tnp_P3
  SITE 321: note = Tnp_P4
  SITE 334: note = Tnp_P5
MNSVGIDISKGRSTVAVMRPFGEVVISPFEVRHTDSELSELARRLKSLDGETRVVMEATGNYHAPVAWLLHDAGLYVSVVNAKLVHGYGNNDLRHVKTDRKDAVKLANYGLDRWLTLPRYVPEEDTRLLLKSCYRQYRQYSKVQTVLKNNLISLLDTTFPNANRLFNSPVRADGSEKWVDFVAEFWHCGCVCERSEKAFLNKYQRWCRKNGYNFSEEKALYIYSEAGGHIGVMPKSETTKLLVEQAVSQLRATSAALATLRQEMQSLASQLPEYPVVMEMFGVGPALGPQLMAEIGDVRRFYSKKALVAYAGIDAPPNDSGDVTGRHKNMSKVGASSLRRTLFLVMSVYLQTAPLDEPVYQFMDRKRAEGKPYRVYMMASANKFLRIYYATVKTYLDTLEQI

SEQ ID NO: 13767 - protein, 405 aa, unidentified
  source 1..405: note = protein_3eabde9
  REGION 6..162: note = RuvC_domain
  SITE 9: note = RuvC_P1
  SITE 58: note = RuvC_P2
  SITE 99: note = RuvC_P3
  SITE 101: note = RuvC_P4
  SITE 104: note = RuvC_P5
  REGION 271..357: note = Tnp_domain
  SITE 279: note = Tnp_P1
  SITE 310: note = Tnp_P2
  SITE 318: note = Tnp_P3
  SITE 319: note = Tnp_P4
MGKVFVGHDWAEDHHDVFIEDDTGRRLGGGRVPEGVDGIGRFHAMLAGLVADPAEVVIATETDRGLFVNTLVAAGYTVIAVNPMSTSRYRERHSTSGAKSDPGDAKILADLARTDAHNHRQIAGDSELGEAIKVLARAHQSMIWTRQRQTNQLRSTLREFYPAALEAFDELAGRDALAVLSIAATPTQGRHLSLSRIQAALRRGGRQRRIEQRAVEIQTALRAEQLTAPDLIADAMGAAVAALVAVIVELNTQIDGLEAKLADRFEQHPDAKIFRSLPGLGMTLGARVLAEFGDAPNRYADAKSRKNYSGMSPITRSSGKHHVVLARYARNKRLSDACYLWAFATLTASPGARAFYDEHRARGDTHNRALRALANRLVGILHGCLRHQARYDEHTAWAHRQQQAA

SEQ ID NO: 13768 - protein, 398 aa, unidentified
  source 1..398: note = protein_1fde3dc
  REGION 6..162: note = RuvC_domain
  SITE 9: note = RuvC_P1
  SITE 60: note = RuvC_P2
  SITE 100: note = RuvC_P3
  SITE 102: note = RuvC_P4
  SITE 105: note = RuvC_P5
  REGION 267..354: note = Tnp_domain
  SITE 275: note = Tnp_P1
  SITE 306: note = Tnp_P2
  SITE 314: note = Tnp_P3
  SITE 315: note = Tnp_P4
  SITE 327: note = Tnp_P5
MRRIWAGIDCGKTHHHCVVVDAESKTLLSRRVANDEEELLKLLGDVLALVDDSQATWAVDMTGGEPGLLIALLVNHGQELLYVPGRIVNRASDAYRGEGKTDARDARVIADQARMRRDLQPVRAGDEATIELKLLTGHRIDLVAERTRTVNRLRSTLTSMFPALERALDLTNAGPLVLITGYQTPASLRRMGRNRLATWLRNRKVRRAEALAEAALNAAERQHTAVIGEKAVAKMVHTLAKEVMALNEKVAEIDKLIEGRFREHQLAEVIASMPGIGPLLGAEFLAAIGGDLSAFPTPDSLAAFAGLAPAPRDSGKTSGNLRRPQRYHRRLQRVFYTSALFSIRSDPNSRQFYDRKRAEGRRHIQVVLALARRRVNVIWALIRDRRSYQVTPPVAVAA

SEQ ID NO: 13769 - protein, 416 aa, unidentified
  source 1..416: note = protein_5cf6bd9
  REGION 12..167: note = RuvC_domain
  SITE 15: note = RuvC_P1
  SITE 64: note = RuvC_P2
  SITE 104: note = RuvC_P3
  SITE 106: note = RuvC_P4
  SITE 109: note = RuvC_P5
  REGION 275..361: note = Tnp_domain
  SITE 283: note = Tnp_P1
  SITE 314: note = Tnp_P2
  SITE 322: note = Tnp_P3
  SITE 323: note = Tnp_P4
MSLALPPAEFFVGVDWAAEVHAVCVINIEGKVLSQFTVAHSADGIALLLRRLAKFGEPIDIPIGSERRDGRLVDLLLEAGHPVVPVSPNAIKTWREGEVLSGAKSDAADAAVIAEYLRLRRHRLTAAAPYSAETKAVRTVVRTRDDLVQMRVAAVNQLAALLDAYWPGATAIFADLESKIALEFLSRYPTPTAAAHLGEKRIAGFCAARGYSGKRSAAELLTRLRAAPAGTTEPHLTVALHDAVLALVGVVKAVNTAIKDLDKSVAARLGEHPDGKIFTSLPRSGQINAAQMLAEWGDCRQAYEAPDSIAALAGCTPVTKASGKHKAVHFRWACNKRFRVAITTFADNSRHASPWTAKIYNDARTAGKDHPHAVRILARAWIRVIWRSWHNNTPYDPTRHGAAQPLSAHSSVNLAA

SEQ ID NO: 13770 - protein, 378 aa, unidentified
  source 1..378: note = protein_7ef603f
  REGION 6..159: note = RuvC_domain
  SITE 9: note = RuvC_P1
  SITE 57: note = RuvC_P2
  SITE 98: note = RuvC_P3
  SITE 100: note = RuvC_P4
  SITE 103: note = RuvC_P5
  REGION 221..306: note = Tnp_domain
  SITE 229: note = Tnp_P1
  SITE 259: note = Tnp_P2
  SITE 267: note = Tnp_P3
  SITE 268: note = Tnp_P4
  SITE 279: note = Tnp_P5
MGQVIIGMDPHKRSATIEIINDREKVLAQGRFGTDRDGYQTMLKLGRQHKDRIWAVEGCNGIGRHIAQRLVADGETVVDVPAKLSARARVFDTGQGRKTDPVDAHSVAVAALRSKGLRQVTVDDTTVALRLLVDRRDGLGHARTDLLNRIHKLLLELLPGGAKKFLSAPQARALLNTIRPRDLVGRTRRRLASELITELVQVDKKIKAADKELTELVETTGSSLQDLNGTGPSGAARLIGDVADISRFATRGHFASWNGTAPLDASSGDQQRHRLSRAGNRRINRALHIMAVVQLRHDTEGRAYYRRKLAAGKTPMEAMRTQAPAVRHRLQANDQRRQESRDGPGRTRGGDSSIQRGRPDPHDRHFGTVTSRTRRTPA

SEQ ID NO: 13771 - protein, 399 aa, unidentified
  source 1..399: note = protein_f22619b
  REGION 5..160: note = RuvC_domain
  SITE 8: note = RuvC_P1
  SITE 57: note = RuvC_P2
  SITE 97: note = RuvC_P3
  SITE 99: note = RuvC_P4
  SITE 102: note = RuvC_P5
  REGION 268..354: note = Tnp_domain
  SITE 276: note = Tnp_P1
  SITE 307: note = Tnp_P2
  SITE 315: note = Tnp_P3
  SITE 316: note = Tnp_P4
MPFYVGLDWASEAHAICVLDDTGRVRWQGTVAHSADGLAELIRRLTRFAAPAALQVALERPSGLLVDTLVEAGFAVVPIHPNALKATRPRYSAAGAKSDPGDAFILADVLRTDGRRFRPLTVPSDATRAVRALVRGRDDLVAQRVALGNQLRALLDRFWPGAAAIFADVTSPIALAFLSRYPMPQSAARLGERRLAQFLAQHAYSGRRTPAELLARLQAAPTSCVGDAEAEASAEVVRALVAILAPLVLHIAQLGAAITAALVQHPDGPVVMSLPRSGHINAAQILAELGDDRARFPSADHLAAEAGVAPVTRASGKSRGVCFRWACNKRLRQGVTTFADNSRHASPWAAAVYARARQRGCDHPHAIRILARSWLRVLWRCWQDRLPYDLTRHRGAVAA

SEQ ID NO: 13772 - protein, 262 aa, unidentified
  source 1..262: note = protein_6c85f80
  REGION 1..100: note = RuvC_domain
  SITE 4: note = RuvC_P2
  SITE 43: note = RuvC_P3
  SITE 45: note = RuvC_P4
  SITE 48: note = RuvC_P5
  REGION 139..223: note = Tnp_domain
  SITE 147: note = Tnp_P1
  SITE 176: note = Tnp_P2
  SITE 184: note = Tnp_P3
  SITE 185: note = Tnp_P4
  SITE 196: note = Tnp_P5
MVFEPTGPYHRDFEAAFSGRLQLVKVNPLQARRFAQSQGTRAKTDAVDAAMLARMGRALELVPDRPAEEIQIVLRELRVARSGLVRDRTALMNRLSAARLPLVRRLVKARLAQAERQIATLDAEIEARLEACPKRRRAAQILTSIPGIGRITARSILAECPEIGTLRHKQIAALAGLAPMTRQSGTWCGKARIEGGRRHLRQALFMPALVAMKKNPDLSAKYHALRAAGKPHKVALTALMRKLLILANTLLKENRLWQPKSA

SEQ ID NO: 13773 - protein, 273 aa, unidentified
  source 1..273: note = protein_a684a83
  REGION 1..100: note = RuvC_domain
  SITE 2: note = RuvC_P2
  SITE 42: note = RuvC_P3
  SITE 44: note = RuvC_P4
  SITE 47: note = RuvC_P5
  REGION 141..228: note = Tnp_domain
  SITE 149: note = Tnp_P1
  SITE 179: note = Tnp_P2
  SITE 187: note = Tnp_P3
  SITE 188: note = Tnp_P4
  SITE 201: note = Tnp_P5
MEATGYYHYQLAYYLLESSIKLSVENPLSVKRFIQMKLSKIKTDKSDSKLICEYAQKVELKLWQGNSKNEIECFQITRALSIYTKQSTMIKNKLHGETVLGAPSKAVVRSLKRSLKYLGKEKKNLEDKLLALVNLTHQDLLTRLKTIPSIGPKTSIMLIVLTGGFDRFKSASELCSYAGLTPVIKQSGSSVKGRPRISKMGNQKLRNLLFMCSLNACKCNKACRELYERIVAKGKSKKLALIAICNKLLKQAFAIAKSGLIYDESYRSVLVKN

SEQ ID NO: 13774 - protein, 399 aa, unidentified
  source 1..399: note = protein_7bcc94e
  REGION 12..166: note = RuvC_domain
  SITE 15: note = RuvC_P1
  SITE 63: note = RuvC_P2
  SITE 103: note = RuvC_P3
  SITE 105: note = RuvC_P4
  SITE 108: note = RuvC_P5
  REGION 273..357: note = Tnp_domain
  SITE 281: note = Tnp_P1
  SITE 310: note = Tnp_P2
  SITE 318: note = Tnp_P3
  SITE 319: note = Tnp_P4
  SITE 331: note = Tnp_P5
MIENYDSVDVFIGVDVGKSEHHAVALDRTGKRLYDKALPNDEAKLRAVIQKFKVRGTVLPVVDQPETVGALPVAVAYAEGILVAYLPGLALRRIADLHAGEAKTDARDAAIIAEAARTLPHALRPIRLEDEQVAELSMLCGFDDDIVGQMTATSNRIRGLLMQIHPALERVLGPHLDHPAVLDLLQKYPTPTALTAAGKVRVGNRLLTLAPRMGRRLAEEIFQALSEQTVIVGGTHATRAVLPRLAEQLSMLHRQRAEIAVEVAEVVDANPLEPIITSMPGVGVGTAARVITEISGKESATAGHLASYAGLAPVTRRSGSSIRGEHPSRRGNKVLKRTLFLSAFAALSDPVSRTYYDRKIAQGKRHNQALIALARRRCDVLYAMLRNGTLYENKTSIRT

SEQ ID NO: 13775 - protein, 344 aa, unidentified
  source 1..344: note = protein_c3ab03e
  REGION 7..149: note = RuvC_domain
  SITE 10: note = RuvC_P1
  SITE 53: note = RuvC_P2
  SITE 88: note = RuvC_P3
  SITE 90: note = RuvC_P4
  SITE 93: note = RuvC_P5
  REGION 212..298: note = Tnp_domain
  SITE 220: note = Tnp_P1
  SITE 250: note = Tnp_P2
  SITE 258: note = Tnp_P3
  SITE 259: note = Tnp_P4
  SITE 271: note = Tnp_P5
MGEVSTIGLDIAKSVFQIHGVDVEGAVVIRKRVNRAKVFEFFAALPSCLVGIEACPTAHHWSRRLQALGHTVRLMPPSYVKGYLKRSKNDANDAAAICEAVTRPSMRFVPTKSEQQQSILMLHRSRQLLVRQRTMLSNAIRGHMAELGIISAKGRNGTTELLDILANERDGRIPTAARFSLDVLARQYAVLMTEISVIEKRIHAWHRSCEENRRLQEIPGVGPIVATALIAEVGDWKAFSSGRGLAAWIGLVPRQHSTGGKERLGRISKQGNRHLRWLLVAGAMAVIRYARRHGTKRMWLVRLMGRRPTKVAAVALANKIARMAWAMMVRGERFKEQKLLPAAA

SEQ ID NO: 13776 - protein, 343 aa, unidentified
  source 1..343: note = protein_2686298
  REGION 6..147: note = RuvC_domain
  SITE 9: note = RuvC_P1
  SITE 52: note = RuvC_P2
  SITE 87: note = RuvC_P3
  SITE 89: note = RuvC_P4
  SITE 92: note = RuvC_P5
  REGION 211..297: note = Tnp_domain
  SITE 219: note = Tnp_P1
  SITE 249: note = Tnp_P2
  SITE 257: note = Tnp_P3
  SITE 258: note = Tnp_P4
  SITE 270: note = Tnp_P5
MEMKVIGIDLGKSVFHLVGMDQHGKVVARKRLSRSQMMVLTAKIPHCLIGMEACCGSHFVGAALTAQGHEVRLIPAQFVKPFLKSNKNDYLDAEAIAEAVQRPNMRFVPIKTDDQLDLQALHRVRDRLVSRRTSVINQMRAFLLERGITFRQGRAYLRKQIPELLGDAEQKLSPRMRQLVDRLWQEWKALEEQIEALSREIESIASQDAACQRLLDVPGVGPLVATALVAAIGNGAAFTKGRDFAAWLGLVPRQHSTGGKAWLLGISKRGNAYLRRLFIHGARSIVMSLNRDNHAIGKWMSQSGARTHRNVLVVAVANKLARIAWAVLARGEVYRSTPAFVAS

SEQ ID NO: 13777 - protein, 426 aa, unidentified
  source 1..426: note = protein_df4dab8
  REGION 6..159: note = RuvC_domain
  SITE 9: note = RuvC_P1
  SITE 61: note = RuvC_P2
  SITE 96: note = RuvC_P3
  SITE 98: note = RuvC_P4
  SITE 101: note = RuvC_P5
  REGION 286..373: note = Tnp_domain
  SITE 294: note = Tnp_P1
  SITE 325: note = Tnp_P2
  SITE 333: note = Tnp_P3
  SITE 334: note = Tnp_P4
  SITE 346: note = Tnp_P5
MLLLAVGIDWAESFHDVALGRPAQGVIEQFRIDHTAAGVARLVARCMELEPDPGEVRVVLETRHGVLVESMVDAGFTLLPVNPDLVARRRGPARKKDDAEDARICCLLALDQFLDLRKLVPHGDLAGELRAIARDDERAARDQRRLLNRLRADLLATFPAAVTIAGDDLGSPIMLKLLAAWPTHAQLAELDRDQLAAFARANRHGWPDRFAARVLAALAVEQLPVRDYLIRAKATTIALAATQLLALREARKAWQRRMGELLLGARREGRAKQPRNPDPGKAVPGGEIYLSFPGLGDVLAARVAGEIGDHIEQFGTPNALQCYGGTAPVTRRSGRSEYVVARRLAHNRYLGAAVHQWAFCSLRASGWARDFYDAKIAKGKSHHSALRALANRWLELLWHCLTRGVAYDEEIHANNRRNAIPATTAA

SEQ ID NO: 13778 - protein, 302 aa, unidentified
  source 1..302: note = protein_670c342
  REGION 4..150: note = RuvC_domain
  SITE 7: note = RuvC_P1
  SITE 50: note = RuvC_P2
  SITE 90: note = RuvC_P3
  SITE 92: note = RuvC_P4
  SITE 95: note = RuvC_P5
  REGION 182..266: note = Tnp_domain
  SITE 190: note = Tnp_P1
  SITE 219: note = Tnp_P2
  SITE 227: note = Tnp_P3
  SITE 228: note = Tnp_P4
  SITE 239: note = Tnp_P5
MNGIGIDVCKAMLDVAVHHGPFARFHNTPAGHRKLVSWLAAQQAGQIVLEASGGYEQRLLDTLFEAGHRVVRANAHRCHAFAAAIGLSAKTDRLDATNLACMAAKLELRAYQPMEPWRRRLREFVRARQQLMGLAISAQNQLEQVTNAALRRTLQANIAQLKKTCARLDAQIAEQVGQQPQLQAMRAFKGVGATLQAVMASYLPELGTLSGKAIAKLVGVAPIARDSGTLRGIRRICGGRVEVRNVLYMACLSAIQHEPRIREFYRALRARGKPGKVAVVAAMRKMLVILNARARDAQAATT

SEQ ID NO: 13779 - protein, 341 aa, unidentified
  source 1..341: note = protein_5e3687d
  REGION 7..149: note = RuvC_domain
  SITE 10: note = RuvC_P1
  SITE 53: note = RuvC_P2
  SITE 88: note = RuvC_P3
  SITE 90: note = RuvC_P4
  SITE 93: note = RuvC_P5
  REGION 209..296: note = Tnp_domain
  SITE 217: note = Tnp_P1
  SITE 247: note = Tnp_P2
  SITE 255: note = Tnp_P3
  SITE 256: note = Tnp_P4
  SITE 268: note = Tnp_P5
MQDVTLIGIDLGKHGFHVHGQDQHGKALLRRKFDRKHLITFLANFQRCTIVMEACAGAHWMVRQLSALGHEAKLISPQFVRPFVKGNKNDFIDAEAICEAAGRPSMRFVTPKTETQQCLSALHRTRESLMRDRVKAINQVHGFLLEFGIGLPTGPAIIKRLPSVMAEHALPARLVSLIERLRAHIKYLDEQLDDLEKELGTQLQDDDLGQRLMAIPGVGPITASVLSAEMGDGKQYRCGRDFAASLGLVPQQHSTGGRANLLGISKRGDKNIRRLLVQCARSYMQHLDRHTGRLGQWVRSMLLRRHSNVVACALANKLARTAWALAAHHTEYKMQEAATSL

SEQ ID NO: 13780 - protein, 341 aa, unidentified
  source 1..341: note = protein_c5c2ab9
  REGION 7..148: note = RuvC_domain
  SITE 10: note = RuvC_P1
  SITE 53: note = RuvC_P2
  SITE 88: note = RuvC_P3
  SITE 90: note = RuvC_P4
  SITE 93: note = RuvC_P5
  REGION 210..296: note = Tnp_domain
  SITE 218: note = Tnp_P1
  SITE 248: note = Tnp_P2
  SITE 256: note = Tnp_P3
  SITE 257: note = Tnp_P4
  SITE 269: note = Tnp_P5
MKTFIRIGIDLAKNFFQVHAIEREGAPAVTRKLSRGKVLAFFAQTAPCRVGMEACGSSHYWAREIRALGHEVVLIPPAYTKPYVKRGKNDANDAAAICEAMSRPEMRFVPIKSADQQAVLMLHKTRELLVKQRTMTVNALRGHLSEFGLIAPKGIQRVKELLKLALVDETLPEEARQATAMLASHGDGLDERIDDLEKKIARASGRNQTSRLLDEIPAFGPVIASAMVAFNPDPSVFRSGCDFSASLGITPSQNSSGGKDKLGGITKKGNRYLRKMLVVGCTSVLRVAHKYKGALAEWIVAIRARKPERVVAVALANKLARIAWAMMTTGESFRAELYTKA

SEQ ID NO: 13781 - protein, 351 aa, unidentified
  source 1..351: note = protein_0f5a307
  REGION 12..152: note = RuvC_domain
  SITE 15: note = RuvC_P1
  SITE 58: note = RuvC_P2
  SITE 93: note = RuvC_P3
  SITE 95: note = RuvC_P4
  SITE 98: note = RuvC_P5
  REGION 217..302: note = Tnp_domain
  SITE 225: note = Tnp_P1
  SITE 255: note = Tnp_P2
  SITE 263: note = Tnp_P3
  SITE 264: note = Tnp_P4
  SITE 276: note = Tnp_P5
MSHNLSNAIAVIGIDIGKNSFHVVGLDERGAIVLRQKWSRSQVEGRFANMPPCLIGMEACVGAHHLSRKLKALGHDARLMPAKYVRPYSKGQKNDFRDAEAIAEAVQRPTMKFVTTKTADQLDLQALHRVRERLVSQRTGIINQIRAFLLERGVAVRQGSAFLRSELPRILAGPPEVLSPRMASIIEGLAEDWRRLDARVECLSDEISALAREDIGCQRLMSIPGIGPIISSAMVAAIGTGEAFSKGRDFAAWLGLVPRQISTGDRTILGKISKRGNRYLRTLFVQAAWVALLKVKPNRWEGHGLKHWIEAAKKRLHHNVLAVALANKLARIAWSVLARGRAFEVGKAQVA

SEQ ID NO: 13782 - protein, 328 aa, unidentified
  source 1..328: note = protein_a3f966d
  REGION 4..155: note = RuvC_domain
  SITE 7: note = RuvC_P1
  SITE 60: note = RuvC_P2
  SITE 100: note = RuvC_P3
  SITE 102: note = RuvC_P4
  SITE 105: note = RuvC_P5
  REGION 200..286: note = Tnp_domain
  SITE 208: note = Tnp_P1
  SITE 237: note = Tnp_P2
  SITE 245: note = Tnp_P3
  SITE 246: note = Tnp_P4
  SITE 259: note = Tnp_P5
MYYLGIDVAKAKLDCSFLLDETGLKRKSKKVTNSQAGFSELLTWLAKQGIELTELHVTMEATGGYHEQAAQALHDAGVAVSIVNPAQIKALGKTLAIRTKTDAVDSFLIARFGLLCKPDVWVPSAPEARALKALLARQEAISEDLQRERNRQEKASISTTPERVQKSLDDSIHFLQTQLKQLQQEIDDHIDKHPALREDLGLLKSIRAIGPQVGKAMLSVMQTHSFKTAEQLAAYLGLVPVERQSGSSVLGRSRLSKAGSPEIRAKLYMAAVVAIRYNAHVKALYERLRARGKSAMSALGACMRKLVHLCFGVLKTRMPYQENYRNIA

SEQ ID NO: 13783 - protein, 344 aa, unidentified
  source 1..344: note = protein_4aa297c
  REGION 4..157: note = RuvC_domain
  SITE 7: note = RuvC_P1
  SITE 55: note = RuvC_P2
  SITE 96: note = RuvC_P3
  SITE 98: note = RuvC_P4
  SITE 101: note = RuvC_P5
  REGION 219..304: note = Tnp_domain
  SITE 227: note = Tnp_P1
  SITE 257: note = Tnp_P2
  SITE 265: note = Tnp_P3
  SITE 266: note = Tnp_P4
  SITE 277: note = Tnp_P5
MITIGIDPHKSSLTAVAVDATGQQLAARRFTVNAGTFGQLTRWADRWPQRRYAVEGANGLGRGIAQQLAAAGETVLDVPATLAARARLLDTGGSRKTDTADASSVAHVALRHRSLRQVTAEDQSTILRLLAERRDDLAHERTRILNRLHGMLRDLIPGGAPTGLSADKAAALLRATRPTTATAACRRDIARDLLADLRRLDRQLRANEVSQQDAVAATGSTLSEVHGIAVVLSAKILGHVGDVSRFPTADHFASYTGTSPLDASSGNRNRHRLNTGGNRQLNSALHTIAVCQARDPGPGRAYYLRKISEGKTPAEARRALKRRLANVIYRHILRDQKRRPAMTT

SEQ ID NO: 13784 - protein, 344 aa, unidentified
  source 1..344: note = protein_e0f4042
  REGION 7..148: note = RuvC_domain
  SITE 10: note = RuvC_P1
  SITE 53: note = RuvC_P2
  SITE 88: note = RuvC_P3
  SITE 90: note = RuvC_P4
  SITE 93: note = RuvC_P5
  REGION 213..297: note = Tnp_domain
  SITE 221: note = Tnp_P1
  SITE 251: note = Tnp_P2
  SITE 259: note = Tnp_P3
  SITE 260: note = Tnp_P4
  SITE 272: note = Tnp_P5
MTEVTTIGLDIAKNVFHAHGADGPGHTVFSRRLTRGKLLDFFARQPACTVAMEACGGAHHWARQLTELGHSVRLIPPAYVKPFVKRHKNDALDAEAICEAAQRPGMRFVAIKSEEQQAAGMVFQTRDLMVRQRTQLINALRGHLAEYGWVAPRGTAQIAMLADLLDEDEMASSLPDAALVMFSVLIDHLARLDEQIADLDREIARRARDEETARRLMTIPGIGPIAATAILALAPPIETFSKGRDFAAWLGLAPLQRSTGGKQRLGSISKMGERTIRRLLIIGASSIVRQASRRGAPAGSWLERMLSRKPRMLVSVALANKMARIVWALLTKKEDYRAPVAAAA

SEQ ID NO: 13785 - protein, 360 aa, unidentified
  source 1..360: note = protein_85ef341
  REGION 14..157: note = RuvC_domain
  SITE 17: note = RuvC_P1
  SITE 66: note = RuvC_P2
  SITE 102: note = RuvC_P3
  SITE 104: note = RuvC_P4
  SITE 107: note = RuvC_P5
  REGION 235..318: note = Tnp_domain
  SITE 271: note = Tnp_P2
  SITE 279: note = Tnp_P3
  SITE 280: note = Tnp_P4
  SITE 291: note = Tnp_P5
MAKTKSVRPPFVVGGVDTHKDLHVAAVVDENNRVLGSDFFATTRQGYRQMLTWMASFGTVARIGVECTGSYGAGLLRHLQNAGITVLEVTAPDKMERRRRGKSDTIDAESAAHAAFSLIRTVTPKTRSGMIEALRVLKVCRKTAVAARRIALQMIQMNIVSSPDELRDQLRNLTRMQLIRTLAAWRPDVTAYRNVQDAYRIALKSLARRYLELHDEIADLDIMIASIVDELAPELIKRNAIGYESASQLLITAGDNPQRLQSEPGFAALCGVSPVPVSSGKTNRHRLNRGGDRAANSALHIIAIGRLRTDTKTQEYVAKRVAEGHSKMEALRCLKRYIAREVFTLLRNQNRQINSTQITT

SEQ ID NO: 13786 - protein, 390 aa, unidentified
  source 1..390: note = protein_d2ca2f9
  REGION 5..160: note = RuvC_domain
  SITE 8: note = RuvC_P1
  SITE 59: note = RuvC_P2
  SITE 98: note = RuvC_P3
  SITE 100: note = RuvC_P4
  SITE 103: note = RuvC_P5
  REGION 263..350: note = Tnp_domain
  SITE 271: note = Tnp_P1
  SITE 301: note = Tnp_P2
  SITE 309: note = Tnp_P3
  SITE 310: note = Tnp_P4
  SITE 323: note = Tnp_P5
MRYFIGIDVAKFKHTACVIDTYGTVLVESFDFTNDIIGFQSLLKNIKPFLKKKHLVGMEDTGHYGDNLRNFLLEKQYKVVMLNPIVTSHIRKASNKAKNDRIDCFVIANTMMNPNFYRDQHAQSIDYATVRQLTRMHHTHTEEINRYKCQLQKSIDIVFPEFNSLLNTKYSKTYLEILDTYHSAYTIANTDIRLLRNTLKNVGVGRSVSISAEQLKKSAKESIGQHNLAIEMDIPFLISLIRRLTSILGEIDKKIEEFSHQLNSPILDISGISHFSAMSIISELGDITYFSSEKKLIKFAGINPCVYESGTYSMTHTRLEKKGSKYLRKTLYQIIDSVIRFNPIFQAFYQKKISQGKSYRCAQGHCIRKLLRVIYKIISTGEGFDSAKLK

SEQ ID NO: 13787 - protein, 324 aa, unidentified
  source 1..324: note = protein_93a9313
  REGION 6..155: note = RuvC_domain
  SITE 9: note = RuvC_P1
  SITE 54: note = RuvC_P2
  SITE 92: note = RuvC_P3
  SITE 94: note = RuvC_P4
  SITE 97: note = RuvC_P5
  REGION 196..283: note = Tnp_domain
  SITE 204: note = Tnp_P1
  SITE 234: note = Tnp_P2
  SITE 242: note = Tnp_P3
  SITE 243: note = Tnp_P4
  SITE 256: note = Tnp_P5
MKNVIIGIDVSKLTLDISVLIDSTFQFFTIENTVKALKKFFKEFKEHQVMIAMENTGRYNYHLYEVLPLFEFKVYVINPLHIKRSIGLVRDKNDKIDSKRIALFLEKHHIDLRIWSPCSKTLQKIKLLNTERRLRVKIRAALLTQLADQSLLKGMQDKDLLKLNKDFIALLDKQISFIEDKILYLIENDEVLKDQYHRIQTIPGVGKVLAANMLIKTNGFTEIQSAREMSCYAGVAPFEYQSGTSLKYKSKVSPLADKELKKILHLAAMSAIRFKNDLAVYYLRKVSEGKNKMSVLNAVRNKIIHRIYSLIKNKTFYQNQLEMS

SEQ ID NO: 13788 - protein, 408 aa, unidentified
  source 1..408: note = protein_f308b3f
  REGION 5..161: note = RuvC_domain
  SITE 8: note = RuvC_P1
  SITE 58: note = RuvC_P2
  SITE 98: note = RuvC_P3
  SITE 100: note = RuvC_P4
  SITE 103: note = RuvC_P5
  REGION 275..361: note = Tnp_domain
  SITE 283: note = Tnp_P1
  SITE 313: note = Tnp_P2
  SITE 321: note = Tnp_P3
  SITE 322: note = Tnp_P4
  SITE 335: note = Tnp_P5
MLNAVGIDVSKGRSTVAVLQPGGVVIHKPFDVSHKSSDLRDLARYLGSLNGETRVVMESTGRYHEPIRNALSKAGLFVCAVNPHLIRNYGNNTLRKVKTDPADAKKIARYTLDNWASLREYSVMDTTRTELKTLNSQFAFFMKQKTAAKTNLIALLDMTYPGVNKLFTSPVRPDGSEKWVDYADSFWHVDCVLDSGPKVFTEHYQSFCKHHGYDYQPARPEKLYAQAKELVPTVPKDPVYKEMIRDSIAQLNLMSKHVEELRRKMDELASSLPEYQTVRSMYGVGPSLGPQIMAEIGDISRFNHREALTAYAGVDPGKNDSGEVVHKSGHASKCGSARLRKSLFQVMEAMLQLGPRDDDPVSQFLFRKKAEGKPYLVYMTAGANKFLRVYYGKVKECIRNLPASDSED

SEQ ID NO: 13789 - protein, 343 aa, unidentified
  source 1..343: note = protein_e88b4d7
  REGION 7..152: note = RuvC_domain
  SITE 10: note = RuvC_P1
  SITE 56: note = RuvC_P2
  SITE 91: note = RuvC_P3
  SITE 93: note = RuvC_P4
  SITE 96: note = RuvC_P5
  REGION 215..301: note = Tnp_domain
  SITE 223: note = Tnp_P1
  SITE 253: note = Tnp_P2
  SITE 261: note = Tnp_P3
  SITE 262: note = Tnp_P4
  SITE 274: note = Tnp_P5
MAIVNRIALDLAKDFIQVLALDENEQEVFNKKLRSNKVLAKLATLSRTDDCEVAVESCGMSHYWRRECEKLGYQTVALPPRFVKAYLQGEKNDANDARAIAEAASRPNRQTVRLKSIEQQDLALMVNQREGFVQTRTQFSNRLRGQLAEYGIILPKRVSTILQRVPEILEDDSNALTLQSRDLINRLYQMLRTVDEEVKALDKRLAAQADNNEDSRRLMTIPGIGPITATSLLALIGDVNEFKRGRNLSEYLGLVPRQNSSGGKDRLGGITKKGNTKLRTLLVHGARSALRVAQQRDDRLSLWAQDVAKRRGNNVATVALANKHARIIWAMLKNKEDYRMTAA

SEQ ID NO: 13790 - protein, 400 aa, unidentified
  source 1..400: note = protein_d2faf9e
  REGION 3..158: note = RuvC_domain
  SITE 6: note = RuvC_P1
  SITE 55: note = RuvC_P2
  SITE 95: note = RuvC_P3
  SITE 97: note = RuvC_P4
  SITE 100: note = RuvC_P5
  REGION 265..352: note = Tnp_domain
  SITE 273: note = Tnp_P1
  SITE 305: note = Tnp_P2
  SITE 313: note = Tnp_P3
  SITE 314: note = Tnp_P4
  SITE 325: note = Tnp_P5
MYVGWDWAGKAHDVTVLDEQGRVVEHFEVGHHEAGFEHALKRLCHHGRPEALPVAIERPSGLVVERLVEAGHPVIPIHPNAFNAARSRWGASHAKSDPGDSYRLADYLRTDGRRLRRLRPMDAVTRQLQALVRMRDDHIKARIAAANQLEALLNAHWPGALSIFADLASDIALNFLERYPTPHATAGLGATRLAAFLKRHSYCGRRSPAQLLERLRRAPTAPDRLDPEVLAELVRHQVCLLRTLLHTGKELEHAITAVLPDHAKARLLAGLPRIGDGVNLAQVLSEVGPILDASLDVDHAAAQCGASPVTKASGQSRGVHFRWAANPHARQALQIFADNSRHASPWAARLSARHVAAGKRHPHAVRILMRAWLRVIWSCWHSNIPYDPARHRSELRLAGA

SEQ ID NO: 13791 - protein, 400 aa, unidentified
  source 1..400: note = protein_3a0df94
  REGION 3..158: note = RuvC_domain
  SITE 6: note = RuvC_P1
  SITE 55: note = RuvC_P2
  SITE 95: note = RuvC_P3
  SITE 97: note = RuvC_P4
  SITE 100: note = RuvC_P5
  REGION 265..352: note = Tnp_domain
  SITE 273: note = Tnp_P1
  SITE 305: note = Tnp_P2
  SITE 313: note = Tnp_P3
  SITE 314: note = Tnp_P4
  SITE 325: note = Tnp_P5
MYVGWDWAGKTHDVSVLDEQGRLVEHFAVDHDEAGFKQALRRLGRHGPAEEMPVAIERPSGLVVERLVEAGHPVIPIHPNAFNAARARWGASRAKSDPGDSYRLADYLRTDGRRLRRLRPLDEATRQLRALVRMRDDHIEARVAASNQLEALLNAHWPGAVCIFETVASDIALHFLDRYPTPDAAARLGETRLAAFLKRRCYSGRRTPAQLLERLRRAPTAASGLDPEVLAELVRHQVDLLRTLLHTCKELEHAIAAVLPDHGKVRILAGLPRIGDGVNLAQVLSEVGPILDASLNVDHAAAQCGACPVTKASGQSRGVQFRWAANTHARQALQTFADNSRHASPWAARLYAKHVAAGKRHPHVVRILMRAWLRVIWSCWHSDIPYDPARHRNELRLAGA

SEQ ID NO: 13792 - protein, 366 aa, unidentified
  source 1..366: note = protein_aa35b03
  REGION 25..173: note = RuvC_domain
  SITE 28: note = RuvC_P1
  SITE 77: note = RuvC_P2
  SITE 113: note = RuvC_P3
  SITE 115: note = RuvC_P4
  SITE 118: note = RuvC_P5
  REGION 242..328: note = Tnp_domain
  SITE 250: note = Tnp_P1
  SITE 281: note = Tnp_P2
  SITE 289: note = Tnp_P3
  SITE 290: note = Tnp_P4
  SITE 301: note = Tnp_P5
MPTLFGASERDDGFSMAAKKRQVTGGVDTHGKTHHAAAIDGAGRVLGDQEFPASASGYRQLLAWLRRFGQVIKVGVEGTGTYGAGLARHLTAQSVTVVEVDRPDRRARRAKGKSDPLDALAAARAALSGQASGTPKTRTGPVEAIRALRVARRGAMKARTAALNQLHGLLASAPESLRHDLSHPQAPLVDRCAALIVDETRLTDPVEATKAALAAIAARIQALTAEITHADRRLRPAVARTAPHLNAVHGVGTDVAGQLLTTAGDNPDRLRSEAALAHLCGAAPIPASSGRTDRHRLNRGGDRAANSALHTIALVRMRHDPRTRAYVDKRTKQGLNKKEIMRCLKRYIVREIHTALLADFTTLNTA

SEQ ID NO: 13793 - protein, 346 aa, unidentified
  source 1..346: note = protein_fca0953
  REGION 6..148: note = RuvC_domain
  SITE 9: note = RuvC_P1
  SITE 52: note = RuvC_P2
  SITE 87: note = RuvC_P3
  SITE 89: note = RuvC_P4
  SITE 92: note = RuvC_P5
  REGION 211..296: note = Tnp_domain
  SITE 219: note = Tnp_P1
  SITE 249: note = Tnp_P2
  SITE 257: note = Tnp_P3
  SITE 258: note = Tnp_P4
  SITE 270: note = Tnp_P5
MNIATVGIDLAKTVFQLHGVDAQGRAVLRKQLRRDQMAPFFANLPPCLVGMEACGSAHFWARKLQGFGHMVKLMAPQFVKPYVKTNKNDAADAEAICEAVARPSMRFVPLKSAEQQAVLALHRARQGFVKARTAQANQICGLLAEYGIIIPQGIKHIADRLPDILEDADNELPGAFRLLLERLRAHLKVLDTQVGELDVQIQLWHRQSEASKKLAQIPGIGPITASALVASIGDARNFDNGRQLAAWLGLVPRQHSSGGKPTLLGISKRGDAYLRTLLIHGARAVIRVAQSKADQAGGWLAKVLARRNKNVAAVALANKNARIVWALLVRDRPYASTYPAQCGSTA

SEQ ID NO: 13794 - protein, 311 aa, unidentified
  source 1..311: note = protein_726a924
  REGION 7..152: note = RuvC_domain
  SITE 9: note = RuvC_P1
  SITE 53: note = RuvC_P2
  SITE 93: note = RuvC_P3
  SITE 95: note = RuvC_P4
  SITE 98: note = RuvC_P5
  REGION 188..272: note = Tnp_domain
  SITE 196: note = Tnp_P1
  SITE 225: note = Tnp_P2
  SITE 233: note = Tnp_P3
  SITE 234: note = Tnp_P4
  SITE 245: note = Tnp_P5
MVERFGGIDVSMDRLDVMVLPDRSGFLVENNAEGWAELIERLSGSRLIAIGIEPSGGYERGVIRALLAAGLSVRRINPNKLRQFARARGVLAKNDRLDARLIAEYVAIMPTRIVQFDPAAQRLAEVVTMRRQLCDEHVTVQNQATHVEDAMLRRLNKRRLARLEADICLLEKRMAEMVAADPVLAHRYRLLISMPGVGPVLAFTLVALLPELGQMSRKQIAALVGLAPYDFDSGKLRGHRSIYGGRMPVRNVLYMAALSACRYNPVLKTFHNRLAAADKKSKIVIVAVMRKMITNLNAMLRDDTEWQPKSA

SEQ ID NO: 13795 - protein, 422 aa, unidentified
  source 1..422: note = protein_5a5e403
  REGION 26..178: note = RuvC_domain
  SITE 29: note = RuvC_P1
  SITE 77: note = RuvC_P2
  SITE 115: note = RuvC_P3
  SITE 117: note = RuvC_P4
  SITE 120: note = RuvC_P5
  REGION 286..371: note = Tnp_domain
  SITE 293: note = Tnp_P1
  SITE 324: note = Tnp_P2
  SITE 332: note = Tnp_P3
  SITE 333: note = Tnp_P4
MHSDCATSQEARIQHASQSPTPTRTAGIDWATDTNALCVVGGDGQVVGELVTTADAAGIRRLLRELDRSGVTQVAIERPDGPVVEALLGTGRTVVVVPPRQVRHLRTRYGQAGNKHDRFDAFVLADVLRTDGRRLPPLHPDTLQTVALRSLVRARADLVQARVALCNQLRAHLRVVFPGAVGLFADLDAPISLAFLARFPSAEAAAWLSHQRLGAWLAANRYCGRTPTQVLLERLTSAPAGLTGEPGQAASHTTGAHVRALAAIGDQIAALQAQVTEQLALHPDRVVFQSLPRAGVVRAAKLLVEFGDARGRFPTDASPAALAGAAPSTRQSGRRQVVSFRWACDKKLRAAVTDFTADSRRASPWAEAIYQRHRAAGKTHQHAVRTLARAWPRVIWRCWQDQAPYNPALHGIAKHRRLPLTA

SEQ ID NO: 13796 - protein, 400 aa, unidentified
  source 1..400: note = protein_b6a71ae
  REGION 5..163: note = RuvC_domain
  SITE 8: note = RuvC_P1
  SITE 62: note = RuvC_P2
  SITE 102: note = RuvC_P3
  SITE 104: note = RuvC_P4
  SITE 107: note = RuvC_P5
  REGION 273..362: note = Tnp_domain
  SITE 281: note = Tnp_P1
  SITE 311: note = Tnp_P2
  SITE 319: note = Tnp_P3
  SITE 320: note = Tnp_P4
  SITE 333: note = Tnp_P5
MNPVIGLDVSKGESEVQAFLDKRKPYKKSFSVLHNNKGLETLLHFMSEIEEETGVRPTVIFESTGHYHTSIVQFLEENNYLYIMVNPLLSYQAKKSSLRKVKTDAVDAFNLCELFYKEELEPYKQRGIQLLDLRNLTRQHETVTGIYVQTKLQFHSILDQVFPEYRGVFGDLYSKVSLKTLLEFSTSEAILKVGIDQLTDKIACECITRSEHWARDRAQKLIEAAQRNPFKSTLYQSHLFSLQMYIQMLLQYQEHLSELDDQIDALAEELEEYKIIQSIPGIGGKIAATIVSEIGEIERFSHPKKLVAFSGIDPSVHSSGKFTATINRISKRGSSQLRHALYMAALCGIRSSRNKKLKEFYDRKREEGKPFKVAMIACTNKLIHWIYTLLKRKENFLDLA

SEQ ID NO: 13797 - protein, 339 aa, unidentified
  source 1..339: note = protein_88cb8b8
  REGION 6..146: note = RuvC_domain
  SITE 9: note = RuvC_P1
  SITE 52: note = RuvC_P2
  SITE 87: note = RuvC_P3
  SITE 89: note = RuvC_P4
  SITE 92: note = RuvC_P5
  REGION 210..293: note = Tnp_domain
  SITE 218: note = Tnp_P1
  SITE 248: note = Tnp_P2
  SITE 256: note = Tnp_P3
  SITE 257: note = Tnp_P4
  SITE 269: note = Tnp_P5
MKYIPVCVDIAKHLIQVHFINEHTGEMVDKQLRSRDFLTFFSNREPCLIGMEACGGSQHWARELKKQGHKVRLMQARFVKAFVMGNKNDVMDARAIWMAVQQPGKEIAVKTEEQQSVLVLHRTRRQLVKFRTAQINALYGIFLEFGETLHKGRAALAKELPEALERLKMRLPPYLISVLDDQYNRLSELDYQIDGIEKQLLSVARQSETCKRLMEIPGVGPLIATAAVAAMGEASAFKSGREFAAYVGLVPKQTGSGGKVRLLGISKRGDTYLRTLFVHGARAAALLTKEPGLWITELKKRRPTSVAIVAMANKLARTVWAIAAHGRKYDKNHVSIRPY

SEQ ID NO: 13798 - protein, 341 aa, unidentified
  source 1..341: note = protein_2b7b85b
  REGION 7..149: note = RuvC_domain
  SITE 10: note = RuvC_P1
  SITE 53: note = RuvC_P2
  SITE 88: note = RuvC_P3
  SITE 90: note = RuvC_P4
  SITE 93: note = RuvC_P5
  REGION 209..296: note = Tnp_domain
  SITE 217: note = Tnp_P1
  SITE 247: note = Tnp_P2
  SITE 255: note = Tnp_P3
  SITE 256: note = Tnp_P4
  SITE 268: note = Tnp_P5
MSNLALVGIDLGKHTFHLHGQDKPGRELFRKKLSRQQMMRFFANLPACTVVMEACAGAHFVARELTALGHQAKLISPQFVKPFVKGNKNDFVDAQAICEAASRPTMRFVSPKTEGQQTLSVLHRLRESLIRDRTKAVNQMHGFLLEFGISLPQGLAVMKRLSAVLAEHELPVRLTVLLHRLHDHFVYLDEQIKQLDKELAGQLADDDLGRRLLSMPCIGPITASLLAVEMGDGQQYGCSRDFAASLGLVPRQYSTGGKANLLGISKRGDKNLRSLLVQCARVYMRHLERQKGGLAEWVRSLLTRRHSNVVACALANKLARIAWAISAHHTQYEAGPDVVKA

SEQ ID NO: 13799 - protein, 348 aa, unidentified
  source 1..348: note = protein_8591366
  REGION 5..152: note = RuvC_domain
  SITE 8: note = RuvC_P1
  SITE 55: note = RuvC_P2
  SITE 92: note = RuvC_P3
  SITE 94: note = RuvC_P4
  SITE 97: note = RuvC_P5
  REGION 212..299: note = Tnp_domain
  SITE 220: note = Tnp_P1
  SITE 250: note = Tnp_P2
  SITE 258: note = Tnp_P3
  SITE 259: note = Tnp_P4
  SITE 271: note = Tnp_P5
MDHYAGIDVSLEYSSVCVVDGSGTIVREGKVVSEPEGLIAWFGSLGLQLVRIGLEAGPTSQWLYAGMKQAGLAMELLETRHVRDAFKAMPVKSDRNDARGIAQLMRLGWFRPVHCKSIGAQETRAVLTARKLVQSKLHDVEMSMRGILRGFGLKVGKTTASGFAGRIEELVAGHPHLEAIAAALLPVRAVLLREFNGFEKRVRMMARADANAKLLMSTPAVGPIVSLTYASAVDDPARFKSSKQAGSHFGLTPKKYQSGETDRTGRISKIGDAAVREALYLAAHVMLTKPVKGCSELKSWAMRIAKRAGMRKAKVALARKLAVIMHRMLADGQPFNPAARTKPVAAAA

SEQ ID NO: 13800 - protein, 341 aa, unidentified
  source 1..341: note = protein_da07195
  REGION 6..148: note = RuvC_domain
  SITE 9: note = RuvC_P1
  SITE 52: note = RuvC_P2
  SITE 87: note = RuvC_P3
  SITE 89: note = RuvC_P4
  SITE 92: note = RuvC_P5
  REGION 210..296: note = Tnp_domain
  SITE 218: note = Tnp_P1
  SITE 248: note = Tnp_P2
  SITE 256: note = Tnp_P3
  SITE 257: note = Tnp_P4
  SITE 269: note = Tnp_P5
MKDMMIGVDLAKNVFQLHGASMTGQVLFRKKLSRGQFLRFMESLRAAVVVMEACGSAHHWARELVKLGHDVKLIGPQYVRPFVKRQKNDAADAEAIVIAAQRPEMRFVEPKTPNQQARAILFRARERIVHQRTELVNALRAVLYEYGQVVPLGIGHIKRIEAIVEDADNELPELVREECHDLLAQIGEKTLRIEDKTKKITGLSKQSDTARRLQTMPGVGPMISLAVEAFAPAMENFRCGRDFAAWLGLVPRQFSSGGEERLGKVLKAGQADIRRLLIIGAMARVNWVSRKPAAQGAWLSRMLAKKPRMLVAIALANKMARKIWAMLKQEDYRDPALVVAA

SEQ ID NO: 13801 - protein, 396 aa, unidentified
  source 1..396: note = protein_80d1deb
  REGION 6..160: note = RuvC_domain
  SITE 9: note = RuvC_P1
  SITE 58: note = RuvC_P2
  SITE 98: note = RuvC_P3
  SITE 100: note = RuvC_P4
  SITE 103: note = RuvC_P5
  REGION 266..352: note = Tnp_domain
  SITE 273: note = Tnp_P1
  SITE 304: note = Tnp_P2
  SITE 312: note = Tnp_P3
  SITE 313: note = Tnp_P4
  SITE 325: note = Tnp_P5
MATIWAGIDAGEVHHHCVAIDESGRRLLSRRVTNDEPELLELLADGLASGDEVTWGIDLADGGAALATAILLNHGQPVHYISGRAIDRASASYRGEGRTDPKDATVIADQARVRRDLHLVRATDDTVTDLKILTGRRMDLVADRTRTVNRLRARLTSIFPGLERALDLTDTGPLTLMTGYQTPAAIRRIGAERLVTWLRNRHVVRPHRLAETAFRAAEQQHTSLPGEELTAELVHTPAKEVMDLNQQVADLDKNIEARFRDHHAFDVITSMPGLGIILGAEFLAATGGDMTILGSADRLAGFGGVAPVPRDSGKTSGNLRRPRRYNRRLQRVFYISALLNGGHCDESRRFHDRKRAEGKRHIQTVLALARRRVNILWALLRDGRCYELTPPSAPAA

SEQ ID NO: 13802 - protein, 347 aa, unidentified
  source 1..347: note = protein_fa7a698
  REGION 5..152: note = RuvC_domain
  SITE 8: note = RuvC_P1
  SITE 55: note = RuvC_P2
  SITE 92: note = RuvC_P3
  SITE 94: note = RuvC_P4
  SITE 97: note = RuvC_P5
  REGION 212..300: note = Tnp_domain
  SITE 220: note = Tnp_P1
  SITE 250: note = Tnp_P2
  SITE 258: note = Tnp_P3
  SITE 259: note = Tnp_P4
  SITE 271: note = Tnp_P5
MDYYAGLDVSLKLTSVCVVDEKGKIVREAKVESEPGALIGFFAELGLRMTRIGLEAGPLSQHLHAGLVEGGLDVVLLETRHVKAALSAMTVKTDRKDARGIAQLLRMGWFRPVHCKSMPAQEKRALLTARKLLVAKLIDVEMSVRGILRGFGLKVGSTTKKTYADKVRTLVAGQVTLELVIEPLLRCHEALRTEYVVLHRQLLGAVRGDEVCKRLMTAPGVGPVAALTFTATVDDPARFTSSRSVGPHLGLTPRKYQSGETDVTGGITKAGDAMARSALYEAAFSMLCKTRRMSALKAWAMQVARRRGLKRAVVALARKLATVLHRMWVDGTEFRWTHETSAVPAAA

SEQ ID NO: 13803 - protein, 342 aa, unidentified
  source 1..342: note = protein_ee3397c
  REGION 6..147: note = RuvC_domain
  SITE 9: note = RuvC_P1
  SITE 52: note = RuvC_P2
  SITE 87: note = RuvC_P3
  SITE 89: note = RuvC_P4
  SITE 92: note = RuvC_P5
  REGION 211..294: note = Tnp_domain
  SITE 219: note = Tnp_P1
  SITE 249: note = Tnp_P2
  SITE 257: note = Tnp_P3
  SITE 258: note = Tnp_P4
  SITE 270: note = Tnp_P5
MGIVMIGIDLGKNSCSLAGLDERGSVVLRRRMQPGTVVGFASKLAPCTIAMEACCGAHHLGRLLAAQGHTIKPMAPEYVRPYVKAQKNDDRDAEAIAEAATRPTMRSVELKSQDQLDIQSLHRVRSRLVGARTTLINQLRALLLERGATFPQGRRKFEIGLDAMLADAEGLPQGRIRQLLFDMRDEWSALDGRIDALDQEFSALARTDEAARRLTSIPGVGALNATALVAAVGRAESFSHARDLGAFLGLVPRQHTTGGKPRLLGISKRGNAYLRTLLIHGARAALPSLAKSETPLGAWLRGLLARCRRNTVVVALANKLARIAWALLRREGTFLIGQAAKV

SEQ ID NO: 13804 - protein, 336 aa, unidentified
  source 1..336: note = protein_42cb2a4
  REGION 4..155: note = RuvC_domain
  SITE 7: note = RuvC_P1
  SITE 60: note = RuvC_P2
  SITE 100: note = RuvC_P3
  SITE 102: note = RuvC_P4
  SITE 105: note = RuvC_P5
  REGION 200..286: note = Tnp_domain
  SITE 208: note = Tnp_P1
  SITE 237: note = Tnp_P2
  SITE 245: note = Tnp_P3
  SITE 246: note = Tnp_P4
  SITE 259: note = Tnp_P5
MFQLGIDVSKKTLDLCLLREGVKGRVKTRKLKNDFNAASAVITWLRKQHVEPTDIHIIMEATGVYHELLAYGLHKSGVRISLANPHRAREFARGMDILSKNDSVDAYMLACYGALKVPERWVPPPENVRYLSALLRRRDAIITDRTREKNRLEKCRATDTPPAVTESIENALRNLSTEIEHLDALILAHLDQHPELKKDFDLLTSIKSVGIQLGLNMLVILRSHHFDTAKQAAAFLGVVPIEKISGSSVRGKPRLSKIGPPEIRAKLYLASLCGLKFNPVMKLMYERLCQRGKAKMCAIGALMRKLVHWCYGVLHTQKAFDAEYQSSDGRSACKAA

SEQ ID NO: 13805 - protein, 418 aa, unidentified
  source 1..418: note = protein_e773139
  REGION 6..159: note = RuvC_domain
  SITE 9: note = RuvC_P1
  SITE 57: note = RuvC_P2
  SITE 98: note = RuvC_P3
  SITE 100: note = RuvC_P4
  SITE 103: note = RuvC_P5
  REGION 221..307: note = Tnp_domain
  SITE 229: note = Tnp_P1
  SITE 259: note = Tnp_P2
  SITE 267: note = Tnp_P3
  SITE 268: note = Tnp_P4
  SITE 279: note = Tnp_P5
MAEVMIGIDPHKSSHTAVAIGTGEEALGELQVHACPSQAEQLLAWAAAWPERAWAVEGAAGLGCLLAQQLVGAGEQVLDVPPKLAARVRLLQAGDTNKNDPNDALSVAVAALRSPAPRPVLAEDHAVVLKVWAKRHRDLARARNQAACRLHAVLCDLVPGGVRKEISAGQAARVLERVTPAGAAARARCELAAEFLTDIRRLDAQLRDTNKKLAAAVKASGTSLTGLFGVGPVIAGTVIGDVRQVFRFGSRDHFAAYNGTAPVEVSSGGRKVYRLSLRGNRRLNHAIHMAAVTQLRYKHSQGRAYYEKKLAEGKTHKEALRALKRRISDAIYAALVADARRAADTSPQGPGGQPGNGSDSSVAGSHPEHRLFGQATPGPATTIRPSATAGTAPTQPTGALHRQAGRSPAASKKSPTTA

SEQ ID NO: 13806 - protein, 408 aa, unidentified
  source 1..408: note = protein_11598ae
  REGION 11..166: note = RuvC_domain
  SITE 14: note = RuvC_P1
  SITE 62: note = RuvC_P2
  SITE 102: note = RuvC_P3
  SITE 104: note = RuvC_P4
  SITE 107: note = RuvC_P5
  REGION 273..358: note = Tnp_domain
  SITE 281: note = Tnp_P1
  SITE 311: note = Tnp_P2
  SITE 319: note = Tnp_P3
  SITE 320: note = Tnp_P4
  SITE 332: note = Tnp_P5
MAGPDEVTVWVGLDVGKEEHFADVLDDEVEPLFARSIGNDEADLEALLDRADEHGVPALVIDQPGSIAQLAIAVANRRGVPVAYVPGLVMRRAADLYPGEAKTDRRDAFVLADTARLRRRQVHWLDTGSDELLDQLRVLNGFDIDLAADLTRLTNRLRDALTSISPALERAVGSRLGHAGVRELLARFPTPTMLRSAGRARIAKAIRARSPRLAAKLTDAVVGALEAQSVTLPAEATVGRVIAELAGELDRLHRRRDALAGEIEEVFRTHPFGQLLVTLSGIGPRTGARILAEIGDGSRFANGSKLASYAGLAPVTRQSGTSLRGESKSRRGNHRLKNAMFLAAFASLRDPESKAFYDRKRAEGKKHNAAMICLARRRCDVILAMLRDRQPYLTPGERDTRRAPAEAA

SEQ ID NO: 13807 - protein, 412 aa, unidentified
  source 1..412: note = protein_22cd656
  REGION 18..174: note = RuvC_domain
  SITE 21: note = RuvC_P1
  SITE 70: note = RuvC_P2
  SITE 111: note = RuvC_P3
  SITE 113: note = RuvC_P4
  SITE 116: note = RuvC_P5
  REGION 280..366: note = Tnp_domain
  SITE 288: note = Tnp_P1
  SITE 318: note = Tnp_P2
  SITE 326: note = Tnp_P3
  SITE 327: note = Tnp_P4
  SITE 339: note = Tnp_P5
MLGNKRIGGFLATGQLWAGVDVGKEHHWVFVVDDRGTAVLSRKLANDEQPIRELIAEVDALNQEVSWTVDLTTVYTSLLLTLLAAAGKSVRYLAGRAVWQASVTYRGGEAKTDAKDARVIADQSRMRGTDLPVLHPDDDLITELRMLTAHRADLVADRTRTINRLRQQLIAVCPALERAAKLTSDRGWVVLLARYQRPKAIRQSWVSRLTKMLGDAGVRTAATIAAAAVTAAKSQTVRLPGEEVAAGLVAELAGEVVALDDRIKSTDADIEDRFRRHPLAEVITSLPGMGFRLGAEFLAAVGDPALLGSADQLAAWAGLEPVSKDSGNRTGRLHTPKRYSRRLRRVMYMSALTAIRCDPHSKAYYQRKRDEGKRPIPATICLARRLTNVLYALIRDNRAWQPDSPPITQSAA

SEQ ID NO: 13808 - protein, 341 aa, unidentified
  source 1..341: note = protein_4b9ddbd
  REGION 7..148: note = RuvC_domain
  SITE 10: note = RuvC_P1
  SITE 53: note = RuvC_P2
  SITE 88: note = RuvC_P3
  SITE 90: note = RuvC_P4
  SITE 93: note = RuvC_P5
  REGION 211..296: note = Tnp_domain
  SITE 219: note = Tnp_P1
  SITE 249: note = Tnp_P2
  SITE 257: note = Tnp_P3
  SITE 258: note = Tnp_P4
  SITE 270: note = Tnp_P5
MEQVTIIGLDLAKNVFQAHGASETGMLIFRKKLTRNQVLSFLSEQPRCIVAMEACATAHGWAREIDRLGHSSRLIPPQYVKPYVKRQKNDMADAEAIAEAASRPTMRFVEVKTEDQQASAMAYRTRQMFIGQRTQSTNALRSHLAEHGVIAATSKSRLKKLSAMIQDETVGMPDKVRGIAHVYVNHIEGLTAQIVEMTEAMMTVAKTSTTMKRLQTVPGVGLQTAMAIETFAPDLTCFTRGRDFSAWLGLVPKQNSTGGKSRLGRVSKMGQVDIRSHMIRGAMSVISAACRFGVKKGSWLERLLARKPKLVAAITLANRMARAIWAMMTKNEDYRNPEVVA

SEQ ID NO: 13809 - protein, 420 aa, unidentified
  source 1..420: note = protein_2d5550f
  REGION 22..174: note = RuvC_domain
  SITE 25: note = RuvC_P1
  SITE 73: note = RuvC_P2
  SITE 111: note = RuvC_P3
  SITE 113: note = RuvC_P4
  SITE 116: note = RuvC_P5
  REGION 281..367: note = Tnp_domain
  SITE 289: note = Tnp_P1
  SITE 320: note = Tnp_P2
  SITE 328: note = Tnp_P3
  SITE 329: note = Tnp_P4
  SITE 340: note = Tnp_P5
MKSATNTPNTALPESPPNDVTAGVDWARDDHAACIVDGRGRKVAAIMVEHTTAGLHDLVTFLGRHGAGEVAIERPDGPVVDTLLAAGLTVVVISPNQVKNLRGRYGSAGNKDDRFDAYVLADTLRTDRARLRPLVPDTEPTIALRRACRARKDLVKHRVAAANQLRAHLRNVFPGAVGLFADIDSEITLAFLTRFTTQDCADWLTPKRLGQWLAKQGYSGRTDPAVLHQRLLDAARGASGEHATSQAHITASYVALLRTLLEQIKALADQIDRQLEAHTDAHIFTSLPRSGRVRAARLLGEIGDCRARFPTPESLTCLAGAAPSTRQSGKLRAVGFRWACDKQLRDAVVDFAADTRLVNPWAADLYDRARARGHDHAHAVRILARAWLHIIWHCWQDGVAYDPAKHRALQRFLTSPDQAA

SEQ ID NO: 13810 - protein, 280 aa, unidentified
  source 1..280: note = protein_cb7292c
  REGION 2..87: note = RuvC_domain
  SITE 28: note = RuvC_P3
  SITE 30: note = RuvC_P4
  SITE 33: note = RuvC_P5
  REGION 150..235: note = Tnp_domain
  SITE 158: note = Tnp_P1
  SITE 188: note = Tnp_P2
  SITE 196: note = Tnp_P3
  SITE 197: note = Tnp_P4
  SITE 208: note = Tnp_P5
MLASQEVVWVPARLTAAHRKLHAATGTKSDPVDAAAAAHAALATPGLDRHRIDERVRELRVLVDYRADLIKRRTMMINQLKAQLHVWLDHTPGDLARPKGMDAVTALLDAASLGAHVRQALTEMSMEIAELNRRVRQLDDAIRELVTPLAPTLLEITGISHISAAILIAEIGDITRFSSSAKLARYTGCAPIPVYSADKERHRLHRGGNRRLNSVLYTAAIVQKRRYPAAQALLARHEPTKGSRGARRILQRHLIDVIHRAMTTDQASWQHHITRHDHAA

SEQ ID NO: 13811 - protein, 406 aa, unidentified
  source 1..406: note = protein_e717801
  REGION 4..162: note = RuvC_domain
  SITE 7: note = RuvC_P1
  SITE 57: note = RuvC_P2
  SITE 99: note = RuvC_P3
  SITE 101: note = RuvC_P4
  SITE 104: note = RuvC_P5
  REGION 277..363: note = Tnp_domain
  SITE 285: note = Tnp_P1
  SITE 315: note = Tnp_P2
  SITE 323: note = Tnp_P3
  SITE 324: note = Tnp_P4
  SITE 337: note = Tnp_P5
MNAVGIDVSKGKSTVAILRPGGEVVASPFEVSHNPRELNELVTLIKSLDGDTKIVMEYTGNYYLPVALFLQKSGLFVSVVNPILVKDYSNKSLSVRKGKTDKKDSIKLAAFALDRWNELPLFSSQSDTRTLLKSFNRQYNQYNKLKVMLKNNLISILDQTFPGANTLFNTPARKADGHEKWIDFVLKFPHCECVSKKSFSTFSKSYLSWCKKCGYNFSDAKAKEIYAFACNCAPSLADSEAAHALVSAAILQLNTLNETLASLQREMNLLACSLPEYDTVRGLYGVGSVLGAQLIAEIGDVSRFSNKKALVGFAGIDAPPFQSGNFNPQSRNISKRGSAALRKTLFQVMSVILQKAPAKDPVFLFMDKKRSEGKHFYVYMMAGANKFLRIYYARVMEHLNSLQEAA

SEQ ID NO: 13812 - protein, 350 aa, unidentified
  source 1..350: note = protein_fe5c47f
  REGION 6..148: note = RuvC_domain
  SITE 9: note = RuvC_P1
  SITE 52: note = RuvC_P2
  SITE 87: note = RuvC_P3
  SITE 89: note = RuvC_P4
  SITE 92: note = RuvC_P5
  REGION 211..298: note = Tnp_domain
  SITE 219: note = Tnp_P1
  SITE 249: note = Tnp_P2
  SITE 257: note = Tnp_P3
  SITE 258: note = Tnp_P4
  SITE 270: note = Tnp_P5
MKITTVGIDLAKAVFQIHGIDEQSRAVLRKQLKRAEMAEFFANMEPCLIGMEACGSAHHWARKLEVYGHTVKLMAPQFVKPYVKTNKHDVADAEAICEAVSRPNMRFVPAKTVEQQAILSVHRARQGFVKARTAQANQIRGLLSEFGIVIPQGILSIVKWIPEILEDGENGLPGMMRNLLERLTENLKEMDRQVDEMEKQIQLWHRENEASRKLAEISGIGPITASAIAATVGNAKEFKNGRQLAAWMGLVPRQNSSGGKQTLLGISKRGDTYLRTLLIHGARSVIRFAKNKAEPDGWLRKLIARRNKNVAAVALANKNARVVWALLAKDRMFRPDYTPVPSLPEHNRVG

SEQ ID NO: 13813 - protein, 390 aa, unidentified
  source 1..390: note = protein_e36b6d3
  REGION 4..163: note = RuvC_domain
  SITE 7: note = RuvC_P1
  SITE 60: note = RuvC_P2
  SITE 101: note = RuvC_P3
  SITE 103: note = RuvC_P4
  SITE 106: note = RuvC_P5
  REGION 266..353: note = Tnp_domain
  SITE 274: note = Tnp_P1
  SITE 304: note = Tnp_P2
  SITE 312: note = Tnp_P3
  SITE 313: note = Tnp_P4
  SITE 326: note = Tnp_P5
MIYVGIDVAKDKHDCFITNSDGEILFKVFTITNNLEGFDSLYQKIKSITTDPKIIKVGLEATGHYSYNLLGYLIDKGLPTFVINPLHTNLYRKSLSLRQTKTDKVDARTIAYMLMSDVNLKSYSDSLYHNEELKSLTRYRFDKVKERAKLKSSVSRLVCILFPELEKLVPSLHMSSIYKMLAEFPGAKHISNAHLTRLTNLLSEASKGHYGKETAITFRDAARNSIGSYMPAKSLELKHTIKLIQELDSEIDEIENEIKTIMDEINSPILSIPGINYRMGAMIISEIGSFDRFDSPDKLLAYAGLSPSTHQSGQLDGAYAHMEKRGSRYLRYALYNATKYVCHWDSVFAAYLSKKRAEGKHYNVAISHAAKKLIRVIYHLEKTKQQYIKS

SEQ ID NO: 13814 - protein, 343 aa, unidentified
  source 1..343: note = protein_ab25628
  REGION 6..148: note = RuvC_domain
  SITE 9: note = RuvC_P1
  SITE 52: note = RuvC_P2
  SITE 87: note = RuvC_P3
  SITE 89: note = RuvC_P4
  SITE 92: note = RuvC_P5
  REGION 211..299: note = Tnp_domain
  SITE 219: note = Tnp_P1
  SITE 249: note = Tnp_P2
  SITE 257: note = Tnp_P3
  SITE 258: note = Tnp_P4
  SITE 270: note = Tnp_P5
MNISTIGLDIAKNVFQIHGVDQGGDTVLRKRLRRKDVLAFFAGLPPCLVGIEACGTAHHWAREIRDLGHDVRLIPAAYVKPYVKRNKNDAADAEAICEAVGRPTMRFVPIKGAEQQSVLMLHRTRDLLVRQRTMLMNALRGHLAEYGIVTAKGAGNVKRLFEVLAQDNEALIPVLARRALLLIADQLQQLCRQIQALEMEIMAWHKTSEPSQRLATIPGVGPITATAIVASVGDPSQFRSGRHFAAWLGLVPRQNSSGDKERLGRISKRGDKYIRRLLVLGATIVIHHARAKPSQRTAWINQLLARRSARLVSVALANKMARIAWVILARGEVYRVPAAVAAV

SEQ ID NO: 13815 - protein, 364 aa, unidentified
  source 1..364: note = protein_04fdbb5
  REGION 4..163: note = RuvC_domain
  SITE 7: note = RuvC_P1
  SITE 60: note = RuvC_P2
  SITE 100: note = RuvC_P3
  SITE 102: note = RuvC_P4
  SITE 105: note = RuvC_P5
  REGION 271..357: note = Tnp_domain
  SITE 279: note = Tnp_P1
  SITE 310: note = Tnp_P2
  SITE 318: note = Tnp_P3
  SITE 319: note = Tnp_P4
MLFVGDDWAEDHHDVEVQDETGRRLGRARLPEGVTGVARLHALIGEHLPEGAEPDQVVIGIETDRGPWVQALIAAGYTVYAINPRQVARYRERHGTSGAKSDAGDAHALADMVRTDRHQLRAVAGDTEQAQAVKVVARAHQTLIWDRHRHMLRLRTAAREFFPAALEAFDDLLAPDALELLGRAPDPDQAARVSRAQITGALKRARRRNVDEKTTAIQTALHTEHLTQPPAVAAAYAVTVRSLVSVITAFNTEIAAVQEQVQACFGRARDAEIYLSQPGMGQILGARALGEFGDDADRYASAKNRKNYAGTSPITRQSGKKKTVLARFVHNDRLVDALHQQAFCALRASPGARAYYDELRGRAA

SEQ ID NO: 13816 - protein, 335 aa, unidentified
  source 1..335: note = protein_41d36de
  REGION 7..149: note = RuvC_domain
  SITE 10: note = RuvC_P1
  SITE 53: note = RuvC_P2
  SITE 88: note = RuvC_P3
  SITE 90: note = RuvC_P4
  SITE 93: note = RuvC_P5
  REGION 210..297: note = Tnp_domain
  SITE 218: note = Tnp_P1
  SITE 248: note = Tnp_P2
  SITE 256: note = Tnp_P3
  SITE 257: note = Tnp_P4
  SITE 269: note = Tnp_P5
MEKVSIVGLDLAKNVFQVHGIDAQGKVLLRQHLRRGEVLSFFAKLAPCLVGMEACATAHYWGRELMKLGHAVKLMPPAYVKPYVKPGKTDAADAEAIAEAVSRPTMRFVAVKTVGQQSVLMLHKVRDLLVRQRTMLINALRGHLAEFGVVTARGPAGVKAIEELHQMQDGLPALARIAFQRLVDRLEAVGAEIRKAEREIVASCREDAVSRRLMTIPGIGPITASAIVAAAPDGTLFRSGRQFAAWLGLTPRPHSSGGKERLGGISKQGDGYIRRLRVTGATAVIRLARQGNPSKVWAAKLLERKPARLVSVALANKTARIAWVVLTRDESYRAV

SEQ ID NO: 13817 - protein, 341 aa, unidentified
  source 1..341: note = protein_88284b4
  REGION 7..149: note = RuvC_domain
  SITE 10: note = RuvC_P1
  SITE 53: note = RuvC_P2
  SITE 88: note = RuvC_P3
  SITE 90: note = RuvC_P4
  SITE 93: note = RuvC_P5
  REGION 211..302: note = Tnp_domain
  SITE 219: note = Tnp_P1
  SITE 249: note = Tnp_P2
  SITE 257: note = Tnp_P3
  SITE 258: note = Tnp_P4
  SITE 270: note = Tnp_P5
MLEVNTIGLDLAKNVFQAHGADASGAVVFRKKLRRNQILTFLATQPTCTVAMEACASSHYWAREITRLGHAVRLIAPAYVKPFVKRQKNDVADAEAICEAAQRPAMRFVGVKSEEKQAAGIVFRTRDLLARQRTQAINAIRGHLAEFGIVAAKGPFHVTKLTTAIEDDPSALPESARQILRVLVEQMRSLDQKVALLDREIARRAKEDTEAKRLMTIPGVGPITATALAALAPPAQIFKRGRDFAAWLGLTPLQRSAGGKQKLGETSRMGERTLRRLLIIGASAAVRWAMRKGTTADPWLSRLLSRKPTMLAIVALANKTARIVWALMAKGGTYRTSAVAG

SEQ ID NO: 13818 - protein, 405 aa, unidentified
  source 1..405: note = protein_49fa876
  REGION 4..162: note = RuvC_domain
  SITE 7: note = RuvC_P1
  SITE 59: note = RuvC_P2
  SITE 99: note = RuvC_P3
  SITE 101: note = RuvC_P4
  SITE 104: note = RuvC_P5
  REGION 270..356: note = Tnp_domain
  SITE 278: note = Tnp_P1
  SITE 309: note = Tnp_P2
  SITE 317: note = Tnp_P3
  SITE 318: note = Tnp_P4
MLFVGDDWAEDHHDIEVQDETGRRLAKARFTEGLAGVAQLHELVAQHLDEDEADQVVVGIETDRGPWVLALIAAGYRVFAINPLQVARYRERQSVSGAKSDAADAHALADMVRTDSHQLRSVAGDSDQAEAVKVVARAHKSLIWERTRHAQRLRNVLREFFPAALQAFDDLTAADALELLAKAPDPDAAARLTIAQISAALKHPHRHHASDKARVIRAALRTEQLRQPAAVTTAYAATVRAQVAVIGTLNAQIKTMGAQVEAHFGQHPDAEIYLSQPGMGPILGARVLAEFGDDDHRYADARSRKNYAGTSPITRASGKKKTVLARYVHNNRLIDALGQQAFSALTGSPGARSYYDELRRRGTGHRAALRQLANRLVGILHGCLKTGTVYDEAAAWSHHTHTAAA

SEQ ID NO: 13819 - protein, 345 aa, unidentified
  source 1..345: note = protein_c68ce10
  REGION 7..148: note = RuvC_domain
  SITE 10: note = RuvC_P1
  SITE 53: note = RuvC_P2
  SITE 88: note = RuvC_P3
  SITE 90: note = RuvC_P4
  SITE 93: note = RuvC_P5
  REGION 210..294: note = Tnp_domain
  SITE 218: note = Tnp_P1
  SITE 248: note = Tnp_P2
  SITE 256: note = Tnp_P3
  SITE 257: note = Tnp_P4
  SITE 269: note = Tnp_P5
MSQIIRIGMDTSKYIFQLHGVDASERVVLRKRLGRKAMLEFFAKLPPTVVAIEACGAAHNLARELSKLGHTVKLIAPQLVKPYVPRNKNDGRDAEGLCEAASRPRMRYVPVKTAEQQAALMLLGVRDQLVSRRTQLSNTIRGHAAEFGLTTARGLDKLAAFLAAIEQDERVPVLARELFAMLARQYDQVQAELKAIEAKLLAWHRADATSRRLAQVPGIGPVTAAALVMKAPDPHAFRSGRLFAAWLGLTPKDHSTAGKTRLGKITRAGDETLRQLLVVGATSVVKQAKAKRRGPDWLVELLKRKTPKLAAVALANKMARIAWKLMTTGDSYNAARFDAKTATAA

SEQ ID NO: 13820 - protein, 334 aa, unidentified
  source 1..334: note = protein_69346e0
  REGION 15..153: note = RuvC_domain
  SITE 18: note = RuvC_P1
  SITE 65: note = RuvC_P2
  SITE 105: note = RuvC_P3
  SITE 107: note = RuvC_P4
  SITE 110: note = RuvC_P5
  REGION 211..294: note = Tnp_domain
  SITE 219: note = Tnp_P1
  SITE 246: note = Tnp_P2
  SITE 254: note = Tnp_P3
  SITE 255: note = Tnp_P4
  SITE 267: note = Tnp_P5
MKTLSIQQLKNCTGIGIDVSKATLAFSGITPDQTIHYQLSNTVEAIKKLAEKLEKSEYKGKIICESTGHYHLKLVSVLSKYDLNLYVINPLLATKHSKANIRKTKSDSVDGDSLAAMCLTEKNLPKPIKMSDSNLLITLKVGQVKAIEKLIQKMGGSLRLYEETYQGLGFEVSEIQQELATKLKDVKSLHKRMLRELEAMIIEANESKEDADILISIPGISSTTAALLSQLDRGVKNCHSWVAFVGLDTSIRESGTWKGRGKLTKRGNTYLRKRLFCSAWGATMHDEHFKAYYDKLRAQGRSYKAALCIVAKKQIRIAYHLLMSGEKYDPSKAF

SEQ ID NO: 13821 - protein, 391 aa, unidentified
  source 1..391: note = protein_e7b5323
  REGION 4..163: note = RuvC_domain
  SITE 7: note = RuvC_P1
  SITE 60: note = RuvC_P2
  SITE 101: note = RuvC_P3
  SITE 103: note = RuvC_P4
  SITE 106: note = RuvC_P5
  REGION 266..353: note = Tnp_domain
  SITE 274: note = Tnp_P1
  SITE 304: note = Tnp_P2
  SITE 312: note = Tnp_P3
  SITE 313: note = Tnp_P4
  SITE 326: note = Tnp_P5
MISVGIDVAKDKHDCFIVSSEGEVLADVFTISNSIDGFHCLLQKIGDCTSPQDKIKVGLEATGHYSYNILGFLLDNGLPAYVLNPLHTNLYRKSLSLRKTKTDRVDARTIADMLLSDVGLKPYTDTAYHDEELQSLTRYRFDKVKERGQLKQSIARLVCILFPELEKLMPTLHIVSVYALLEEFPGARQIAQAHLTRLKTLLHDASKGRYGRDVAVNIRETARISVGSVMPAKSLELRHTIHLIRELDAESDEIEAEIQKIMDKLHSRITTIPGIGHRMGAMILAEVGDFSRFESPDKLLAYAGLSPSTYQSGQLKNCYACMEKRGSRYLRYAIFNAAKYVCLWDPIFSAYLAKKRAEGKHYNVAISPAAKKLVRLIYAMEKSREPYRLAA

SEQ ID NO: 13822 - protein, 344 aa, unidentified
  source 1..344: note = protein_189d446
  REGION 7..149: note = RuvC_domain
  SITE 10: note = RuvC_P1
  SITE 53: note = RuvC_P2
  SITE 88: note = RuvC_P3
  SITE 90: note = RuvC_P4
  SITE 93: note = RuvC_P5
  REGION 212..298: note = Tnp_domain
  SITE 220: note = Tnp_P1
  SITE 250: note = Tnp_P2
  SITE 258: note = Tnp_P3
  SITE 259: note = Tnp_P4
  SITE 271: note = Tnp_P5
MKQVITIGLDLAKQIFQAHGADAEGSPLFTRRLRRAEVLPFFEKQPPCLVGIEACSGSHYWAREIGELGHEVRLIPPAYVKPFVKRGKTDAADAEAISEAVTRKTMRFVPVKSPEQQAAAMVLKTRALLVRQQTQTINALRAHLSELGIIAGIGTAKIASLIAIVRVETDARLPNAARFALTAIADQIDALALQINKLERELVAEVKHDEDMRRLATIPGVGAITSASIKALVPDPGGFKSGRHFAAWLGLTPRSHSSGGKERLGKISKMGNPELRTLLVAGATSVLRHARGNHKAPRWLVALLARRPFKVVAIALANKMARIIWALLTKGGTYRGLESSAASS

SEQ ID NO: 13823 - protein, 304 aa, unidentified
  source 1..304: note = protein_338acc7
  REGION 4..150: note = RuvC_domain
  SITE 7: note = RuvC_P1
  SITE 50: note = RuvC_P2
  SITE 90: note = RuvC_P3
  SITE 92: note = RuvC_P4
  SITE 95: note = RuvC_P5
  REGION 183..266: note = Tnp_domain
  SITE 190: note = Tnp_P1
  SITE 219: note = Tnp_P2
  SITE 227: note = Tnp_P3
  SITE 228: note = Tnp_P4
  SITE 239: note = Tnp_P5
MYGIGIDVSQATLDVAVHEQAFRQFSNDKRGFVRLIQWLKQWPITQVVLEASGGYERAALEALHEAGLPMVRINPARARRFAQATGRAAKTDRLDAAVLAQMAQLLPLTRYVPPAPWQRRLAEFAQCRRHLVQMRVSEMQRLRQLTDPVLITIKQRHLAQLSEDLKQLDKAIAEQLAAQPCWKNIGTLKGAGPILVSTLACELPELGTLGSKAIASLVGLAPMNRESGTWQGKRSITGGRAVVREALYMAALTAIRYEPRLRDFYATLKAKGKASKVALVAVMRKMLVILNARKRDAEAALVCT

SEQ ID NO: 13824 - protein, 349 aa, unidentified
  source 1..349: note = protein_39603cd
  REGION 12..153: note = RuvC_domain
  SITE 15: note = RuvC_P1
  SITE 58: note = RuvC_P2
  SITE 93: note = RuvC_P3
  SITE 95: note = RuvC_P4
  SITE 98: note = RuvC_P5
  REGION 217..302: note = Tnp_domain
  SITE 225: note = Tnp_P1
  SITE 255: note = Tnp_P2
  SITE 263: note = Tnp_P3
  SITE 264: note = Tnp_P4
  SITE 276: note = Tnp_P5
MNRTVPRGAAIYGVDLGKNVFHVVGLDADGAVIQRAKFRRETLLAFFEQVSKVIVGMEACPGSQWLARKLEAMGHRVRIVPAQFVKPYVKSHKNDTIDAEAIAEAVTRPTMRFTRVRTTDEVDLQARHRIRDQLISSRTRLINQVRGFCLEYGVAIRQGAGVFCRDLPGALADEGNDLTPAMRRMLAELYEDIERLDTRIAAATREVEGLAARDDRARRLMTIPGIGPLGATALLAGVGDGTQFRRARDLAAWLGLVPRQSSTGCRTVLLGITKRGNRYVRRLLVHGARSCVTHLDRSRDRLGNWLDGLCARMHVNKVTVALAAKVARVAWVIITKPGATYERRDPAVA

SEQ ID NO: 13825 - protein, 344 aa, unidentified
  source 1..344: note = protein_89eb3b5
  REGION 5..152: note = RuvC_domain
  SITE 8: note = RuvC_P1
  SITE 55: note = RuvC_P2
  SITE 92: note = RuvC_P3
  SITE 94: note = RuvC_P4
  SITE 97: note = RuvC_P5
  REGION 212..300: note = Tnp_domain
  SITE 220: note = Tnp_P1
  SITE 250: note = Tnp_P2
  SITE 258: note = Tnp_P3
  SITE 259: note = Tnp_P4
  SITE 271: note = Tnp_P5
MDHFAGLDVSVNETSVCIVDDTGRIVREAKVASEPEALLAVLTNPGYRFKRIGLEAGPLSQWLFSALAEAGLPMICVETRHMRAVLKAQINKTDRNDARGMAQMMRAGLYRPVHVKTLRSQKLRMLLTHRKLLQSKAIAVENDLRGTLRNFGLKVGIVGKLKFEARIRELVESHPDLAVLVEPLLVVRRVLREQLGILHRRLLAIVQDDEVCRRLMTTPGVGPVVALTFRATVDVPARFRNSKAVGAVLGLTPSRYQSGEINRTGAISKCGDEMMRVMLYEAAQSMLVRSAKWSWLKAWAMQIARRRGMKKAIVALARRLAVIMHRIWVDGAEFRWSRQETAAA

SEQ ID NO: 13826 - protein, 424 aa, unidentified
  source 1..424: note = protein_6544904
  REGION 23..183: note = RuvC_domain
  SITE 26: note = RuvC_P1
  SITE 81: note = RuvC_P2
  SITE 122: note = RuvC_P3
  SITE 124: note = RuvC_P4
  SITE 127: note = RuvC_P5
  REGION 290..375: note = Tnp_domain
  SITE 298: note = Tnp_P1
  SITE 328: note = Tnp_P2
  SITE 336: note = Tnp_P3
  SITE 337: note = Tnp_P4
  SITE 349: note = Tnp_P5
MKFKMQDKQNQLIERISDKHLVVGVDIAQHVHVARAVNFRGIVVGDPLTFENNEKGFARLMEWICHLKLSKGLNTEIVGMEPTGHYWLNLSKWLYDQDIDVVTVNPHHVKRNKENRDNTQSKSDKKDALVIADMIKNGYYSFIRPTSEAFEKLRVLMANRDVIVKRLTSSINQINRWVDIVFPELREVFKDVKGKGAIATLRLFPTPSELCSMKAQDIVKGWKTVMKRHAGLKKAQSLIDLAKNSVGSKQAHEAYKLHLEHLLEEFDLAKVQLERVEKEVTSVLDQITFAKKIIAIEGISEISLAGILGEAGDLSGFAHGNSLLRHAGLHLAEASSGKWKGQIVVSKRGRSRLRRFLFLTTLSLVSNNSDFKQIHFNNVKVKKMKKMKSIMKLVGKLARILVAISKNHESYCSQKVQPLAPIAA

SEQ ID NO: 13827 - protein, 359 aa, unidentified
  source 1..359: note = protein_152b0eb
  REGION 5..158: note = RuvC_domain
  SITE 8: note = RuvC_P1
  SITE 56: note = RuvC_P2
  SITE 97: note = RuvC_P3
  SITE 99: note = RuvC_P4
  SITE 102: note = RuvC_P5
  REGION 220..305: note = Tnp_domain
  SITE 228: note = Tnp_P1
  SITE 258: note = Tnp_P2
  SITE 266: note = Tnp_P3
  SITE 267: note = Tnp_P4
  SITE 278: note = Tnp_P5
MTVIIGVDPHKGTPMAVAVGGDEQPLARLEVVADRGQAQRLLAWAAPFEDRRWAIESADALGKLLAQQLLAASEDVVDVPPTLSARVRLLGSAKAAKNDSNDALSTAIAGLRHCGLRSVRVEDHVAVIRMLVDRYDDLTALRTQAACRLHVALRELVAGGAPKRLSADRAGRMLRSVRPHGVAAIERKRLAGELLADVRRLDRDLATARARVTDAVATSGTSLLELHGVGPIVAGFVLGHVGDPARFPTPERFASDNGTAPIEASSGPVKRHRLNPRGNRKLNHAIHMASVTQIRHDTPGRAYYERKLTEGKSKKEALRALKRRISDAIWRQLQVDLGRRRDNGPGRATRDDSESSVAG

SEQ ID NO: 13828 - protein, 339 aa, unidentified
  source 1..339: note = protein_9c321f4
  REGION 6..148: note = RuvC_domain
  SITE 9: note = RuvC_P1
  SITE 52: note = RuvC_P2
  SITE 87: note = RuvC_P3
  SITE 89: note = RuvC_P4
  SITE 92: note = RuvC_P5
  REGION 211..296: note = Tnp_domain
  SITE 219: note = Tnp_P1
  SITE 249: note = Tnp_P2
  SITE 257: note = Tnp_P3
  SITE 258: note = Tnp_P4
  SITE 270: note = Tnp_P5
MEITTIGLDLAKNVFQVHGVDTEGTVVLRRKLRRSDLITFFGSIPPVLIGMEACGGAHFWARELAALGHEVRLMPPAYVKPYVKRGKTDAADAEAICEAVTRPTMRFASIKTVPQQSAGVELKVRQLLIRQRTRTVNALRGHLAEFGIVAAKGIGRLDELVVIVRDASDRRLPDAVRDVLQDLTQEIDGLNDRIRRIDRRLVKHCREDETARRLATIPGVGPITACALQAMVTAPKSFRSSRHFAARIGLTPRANSSGGKERLGPISKQGNTMLRSFLVLGAIARLRNVRSSPERDGWMSALLARRPYKVAAVAVANKLARIAWALMVRGGIYRETATS

SEQ ID NO: 13829 - protein, 340 aa, unidentified
  source 1..340: note = protein_2aabb21
  REGION 6..147: note = RuvC_domain
  SITE 9: note = RuvC_P1
  SITE 52: note = RuvC_P2
  SITE 87: note = RuvC_P3
  SITE 89: note = RuvC_P4
  SITE 92: note = RuvC_P5
  REGION 211..296: note = Tnp_domain
  SITE 219: note = Tnp_P1
  SITE 249: note = Tnp_P2
  SITE 257: note = Tnp_P3
  SITE 258: note = Tnp_P4
  SITE 270: note = Tnp_P5
MMTTTIGLDLAKSVFQVHGVSSEGQVTVRRKLRRSELMRFFRDLPPCLIGMEACATAHYWARELSALGHEVRLMPPSYVKAYLRRQKNDAADAEAICEAVTRPTMRFVPVKSAERQAILTLHRTRELLVRQKTTLIRAIRSHCAEFGLVVPQGARRITDLLQLVRETHPSTLPQAAVLTMQMLGAQLDALAVQIRTLERRLLAWHRENETSQRLATIPGVGIITSTALAASISDPKLFKSGREFAAFLGLVPRQNSSGGKERLGQISKKGDGYLRKLLVVGATSVIRRARTGVTPSAGWVQALLERRPSRVVTVAMANKTARIAWAVMARGETYRPIAKV

SEQ ID NO: 13830 - protein, 403 aa, unidentified
  source 1..403: note = protein_b32b216
  REGION 11..166: note = RuvC_domain
  SITE 14: note = RuvC_P1
  SITE 63: note = RuvC_P2
  SITE 103: note = RuvC_P3
  SITE 105: note = RuvC_P4
  SITE 108: note = RuvC_P5
  REGION 273..361: note = Tnp_domain
  SITE 281: note = Tnp_P1
  SITE 311: note = Tnp_P2
  SITE 319: note = Tnp_P3
  SITE 320: note = Tnp_P4
  SITE 332: note = Tnp_P5
MINTGDVDVFLSLDVGKGEHHGTALTRAGKQVFDKRLPNSEPKMRAMLDKLTAKHGTVLVVVDQPASIGALPRAVARDAGCRVAYLPGLTMRRIADLYPGEAKTDARDAFVIADAARTMPHTLRGIELTDETVAELEMIVGFDDDLAGEATRIANRLRELPTQIHPHLERVLGPRIDHPAVLALLERFGSPTALHKAGRRRLLTVARPLAPRMFERLVEDVLVALDEQTVVVPGTDAAALIVPSLAGSLRAVLDQRRHLEKRIQELLDEHPLSEILTSIPGIGTRTGARVLIDVGDASAFPTAAHLASYAGLAPATRSSGSSIRGEQPSRRGNKQLKRAFFLAAFAAFASLGDPASRAYYDKKINQGKRHTQALLCLARRRTDVLFAMLRDGTLHESRPAAAT

SEQ ID NO: 13831 - protein, 305 aa, unidentified
  source 1..305: note = protein_9f9e366
  REGION 5..152: note = RuvC_domain
  SITE 8: note = RuvC_P1
  SITE 52: note = RuvC_P2
  SITE 92: note = RuvC_P3
  SITE 94: note = RuvC_P4
  SITE 97: note = RuvC_P5
  REGION 186..270: note = Tnp_domain
  SITE 194: note = Tnp_P1
  SITE 223: note = Tnp_P2
  SITE 231: note = Tnp_P3
  SITE 232: note = Tnp_P4
  SITE 243: note = Tnp_P5
MISWVGIDISKSNLVVWVQPQGEGFEVSNLSEGFAELIKRLRCFEVGRVLLEATGGYERQVMAALQEANFNVLRINPRRARAFAVAMGKTAKTDPIDAAVLADFAEVLHGSREKRISPEREALRELIQLREHFVQQRDDNKRRLQQAQLPAVVTATQDHIRYLKTQIKALEKYITHSMLELDAEKANRLMSVKGIGMVAAASLLVYLPELGELDRREVAALAGIAPYNDDSGNHNGKRQIYGGRGRVRHALYMSSWVVIRYQADFKTRYEALRERGKSAKVALIACMRILLIRLNAMLRDGTEWR

SEQ ID NO: 13832 - protein, 347 aa, unidentified
  source 1..347: note = protein_ada9890
  REGION 6..147: note = RuvC_domain
  SITE 9: note = RuvC_P1
  SITE 51: note = RuvC_P2
  SITE 86: note = RuvC_P3
  SITE 88: note = RuvC_P4
  SITE 91: note = RuvC_P5
  REGION 212..299: note = Tnp_domain
  SITE 220: note = Tnp_P1
  SITE 252: note = Tnp_P2
  SITE 260: note = Tnp_P3
  SITE 261: note = Tnp_P4
  SITE 273: note = Tnp_P5
MKNTIAGVDLAKDVIQVCICKNNKVHSNTEMAHCEFLAWLFNSKPMTLIFEACGTSNYWKQRAIEAGHDARLISAKLVSSIRQNQKTDKNDALAIAQASQLADIQFVKGKSVEQQQLQSMMRLRELAIKQKTASSNQIKALLLEFNIRVSLKQKQGGLKGVIESLLEDAENGFSSEFRRALNAAWELHREILDSIRVYDRCLETTIGEHDDCKRLLKLEGVGTLNAINLYIALGCADLGVFSKGKDASACIGLTPLQHSSGGVTKLGHIGKGVKNSSIRSQLITGAMAVVNQVMKRTAVTKKEVWVQGLVARRGKKCAAVALANKTVRTAYVMLTQGTEYKAELVAA

SEQ ID NO: 13833 - protein, 342 aa, unidentified
  source 1..342: note = protein_3ffb6c6
  REGION 6..147: note = RuvC_domain
  SITE 9: note = RuvC_P1
  SITE 52: note = RuvC_P2
  SITE 87: note = RuvC_P3
  SITE 89: note = RuvC_P4
  SITE 92: note = RuvC_P5
  REGION 211..296: note = Tnp_domain
  SITE 219: note = Tnp_P1
  SITE 249: note = Tnp_P2
  SITE 257: note = Tnp_P3
  SITE 258: note = Tnp_P4
  SITE 270: note = Tnp_P5
MSIVILGIDLGKNSCNVVGLDAGGTVVLRRRMRRDGVVAFAAKLAPCTMAMEACCGAHHMGRSLATLGHEARLMSPEYVRPYVKAQKNDDRDAEAIAEAATRPTMRFVELKSEEQLDVQTLHRVRDRLVGERTSLTNQIRSLLLERGHVVAQGHARLRLLLRELLDAGADTLSPRMAFLLGDMRARWEELDRRIGAFDAEFTAMARTDDRARRLTGIPGIGALNATALVAAVGSAATFDKGRDLAAWLGLVPRQATTGGRPKLLGITKRGSRYLRKMLIQGARSAMPTLARADTAVGAWLRALLARAHPNVAVVALAAKMARTVWALLRHGRFYGPVPRAMT

SEQ ID NO: 13834 - protein, 406 aa, unidentified
  source 1..406: note = protein_7c7ba67
  REGION 4..163: note = RuvC_domain
  SITE 7: note = RuvC_P1
  SITE 60: note = RuvC_P2
  SITE 100: note = RuvC_P3
  SITE 102: note = RuvC_P4
  SITE 105: note = RuvC_P5
  REGION 271..357: note = Tnp_domain
  SITE 279: note = Tnp_P1
  SITE 310: note = Tnp_P2
  SITE 318: note = Tnp_P3
  SITE 319: note = Tnp_P4
MLFIGDDWAEDHHDVEVQDEQGRVQRRERLPEGIAGIRGFGELVGRFVDDDTEFSDVLVCIETDRGPWVQALLATGYRVFGVDPKQAARHREILGSSGAKSDKGDAHALADMVRTRRNQLREVAADSEVAEAVKVVARAHQTLIWERTRHMLRLRVALRDYFPAALEAYTPFGLTSTPVLILLAKAPTPEAAAKLTLRQIAAALKGRRDIDAKAAAIQQVLRAEHLGQPAAVATAYAATVRSLVAILTTLNTEIANLEKDVTAHFGQHPDAEILLSQPGLGVVLGARVLAEFGDAPGRYTSAKARKNYAGTSPITRQSGKTRVVSARHVHNDRLVDAVHMQASCAILHDDQVRAYYDQLRARDVSHNAALRQIGNRLVGILHGCLKTHTAYDQATAWSHRQATVAA

SEQ ID NO: 13835 - protein, 345 aa, unidentified
  source 1..345: note = protein_6ca440e
  REGION 6..147: note = RuvC_domain
  SITE 9: note = RuvC_P1
  SITE 52: note = RuvC_P2
  SITE 87: note = RuvC_P3
  SITE 89: note = RuvC_P4
  SITE 92: note = RuvC_P5
  REGION 211..298: note = Tnp_domain
  SITE 219: note = Tnp_P1
  SITE 249: note = Tnp_P2
  SITE 257: note = Tnp_P3
  SITE 258: note = Tnp_P4
  SITE 270: note = Tnp_P5
MHIASIGIDLGKTTFHLVALGERNKILLRKKFSRAQLLAYTANLPTSLIGLEACAGAHFLGAALREQGHEVRLIPGQFVKPYRKSNKNDFLDAEAIAEAVTKQNMRFAQLKTQEQLDWQAMHRVRDRLVQRRTALINEIRGFLLERGITFAAQPIHLRKNLPTVIEDAEQNLSPRLRWLLDRMWQEWKQIETDVEAITDEIERISNEDARCRQLRQIPGFGPLVSTATVAAIGNGSAFRRGRDFAAWVGVVPRQYSTGGKQKLYGISKRGNVYLRRMLIHGARAVLFRVKYDTGGFGQWVHRLAQRAPHNKVIVAIANKLARIAWAVLSSGQDYRHQPLQQRAAA

SEQ ID NO: 13836 - protein, 310 aa, unidentified
  source 1..310: note = protein_882a4bf
  REGION 5..158: note = RuvC_domain
  SITE 8: note = RuvC_P1
  SITE 56: note = RuvC_P2
  SITE 97: note = RuvC_P3
  SITE 99: note = RuvC_P4
  SITE 102: note = RuvC_P5
  REGION 271..310: note = Tnp_domain
  SITE 277: note = Tnp_P1
  SITE 307: note = Tnp_P2
MPYILALDVSMGHSYSVLYKDDTCLFEDEIEHTQRGFHALLEEIQHLPERPLIVFEATGIYSRPVEKFFQDHHFSYCLLNPLEAKKQIEESTLRSWKTDKSDAHRLAQTHLRNQRQPKEVQSNFYLEMRDLARFYQEIEKKITRLRMDLHNCLQLTFPELEQFFSNRLTPYALTLIRLFPHPDFVLASTRTKIKNKLINETRKKISANRAEQKADQIIHYTQCAYPAVEKDSIHCQKTIYYAELLQDLLEQKEALATQMIKKAEGSPCFLLYQTFPGIGALTAALLLGELGDITRFKTHKQLNAFVGIDI

SEQ ID NO: 13837 - protein, 316 aa, unidentified
  source 1..316: note = protein_f006039
  REGION 8..150: note = RuvC_domain
  SITE 53: note = RuvC_P2
  SITE 93: note = RuvC_P3
  SITE 95: note = RuvC_P4
  SITE 98: note = RuvC_P5
  REGION 189..273: note = Tnp_domain
  SITE 197: note = Tnp_P1
  SITE 226: note = Tnp_P2
  SITE 234: note = Tnp_P3
  SITE 235: note = Tnp_P4
  SITE 247: note = Tnp_P5
MQDQAVFVGVDASKAELVSGIHGQPGCAALPNQDAPVAAWLQTLPPGAKVAVESTGECHLTLVRQAVRLGVTVYVLNARDVYFYAKALGMRAKTDRVDARVIARYLAEHHAQLRPYQPPSPVQAEIERLLGQRWVAVTKRTALRQALRGSSAIEQQIQQLDASFDSLLQTIDQRIEQLIDTDPTLKASQRQLLTIVGVGSQASALLSSLLARLQFASADALVAFSGLDPRAQDSGRSHGKRRPSKRGSPDLRRQMYMVAMSACHSKVFGPVYQQLRSRGFKTTEALVILARKLLRVAYAVWRSGKPFEPERFTVPA

SEQ ID NO: 13838 - protein, 306 aa, unidentified
  source 1..306: note = protein_5e9bc82
  REGION 12..154: note = RuvC_domain
  SITE 15: note = RuvC_P1
  SITE 57: note = RuvC_P2
  SITE 97: note = RuvC_P3
  SITE 99: note = RuvC_P4
  SITE 102: note = RuvC_P5
  REGION 195..278: note = Tnp_domain
  SITE 203: note = Tnp_P1
  SITE 232: note = Tnp_P2
  SITE 240: note = Tnp_P3
  SITE 241: note = Tnp_P4
  SITE 252: note = Tnp_P5
MMAEPAEIQCVLGLDVSRDTVTLCDGRRHTVTVANEADALRAALQPYQGTTTLAVCEATGGHEDTLLGVLLELAIPAHRADPAKVKAYIASFGKRAKNDPIDARWLSRYGRDRAATLPRWQSADPTQQKLELLVARRLDLVAMRVQEQNRLKAPRSRLIADNIRDHLAELERHIEALNAEIGALIGESRDLALRAEQLRSVPGIGPVLVPLLLAVIPELGTLNRRQVASLAGVAPHPKDSGKANWHRSTTGGRRQIRPALFIAALAACRGNKRVALTAIMRKIITIANARVRDALPHQNEIMPINA

SEQ ID NO: 13839 - protein, 412 aa, unidentified
  source 1..412: note = protein_cbd760f
  REGION 4..170: note = RuvC_domain
  SITE 7: note = RuvC_P1
  SITE 67: note = RuvC_P2
  SITE 107: note = RuvC_P3
  SITE 109: note = RuvC_P4
  SITE 112: note = RuvC_P5
  REGION 278..364: note = Tnp_domain
  SITE 286: note = Tnp_P1
  SITE 317: note = Tnp_P2
  SITE 325: note = Tnp_P3
  SITE 326: note = Tnp_P4
MLFVGDDWAEDHHDVEIVDDAGQVLARRRLPEGVDGVTRLHTLIAEHMPSEWTDLEPVQAAFMVKVGIETDRGPWVAALVATGYEVFAINPMSVARYRERHSTSGAKSDTADAHLLAEIMRLDRAHHRPVAGDSDQGEAIKLTARAHQSLVWDRTRHVLRLRSALRDFFPAALKAFPDLDAPDALELLGRAPDPDQAARLTRSKITDALRRAHRRNVDAKTTQLRAVLGAEQLRQPPVIQSAFAAIVTSEVAIIDALNTQIDQLGAVVAAHFGQHPDAEIYASQPGLGTILAARVLGEFGDDPNRYADAKARKNYAGTSPITRASGTKKIVLARYARNRRLGDALQQWAFCALRGSPGAKAYYQQLRARNIGHQAALRQVANRLVGILHGCLKTRTSYDEHTAWAHHTRAAA

SEQ ID NO: 13840 - protein, 341 aa, unidentified
  source 1..341: note = protein_7229d32
  REGION 6..147: note = RuvC_domain
  SITE 9: note = RuvC_P1
  SITE 52: note = RuvC_P2
  SITE 87: note = RuvC_P3
  SITE 89: note = RuvC_P4
  SITE 92: note = RuvC_P5
  REGION 211..296: note = Tnp_domain
  SITE 219: note = Tnp_P1
  SITE 249: note = Tnp_P2
  SITE 257: note = Tnp_P3
  SITE 258: note = Tnp_P4
  SITE 270: note = Tnp_P5
MQIHSVGIDLGKTTFHLVALGAAGKVLVRKKFTQKQLITFTANLQTSLIGLEACSGAHFLGRALRAQGHEVKLIPAQFVKPFVKSNKNDFIDAEAIAEAVERKNMRFVPIKTDDQLDLQAIHRVRDRLISRRTAVINQLRAFLLERGMVFAKTPAKLRAAMADVLENADADLTPQMRNLISMLWDEWKLVEQQITALTDDLEKIADADAGCARIRQIPGIGPVVATAIVAAIGNGAAFRKGREFAAWLGIVPRQYSTGGKAKLFGISKRGNVYLRKILIHGARAAVLRIKRDRAPIGAWLDALDSRAPKNVVVVAMANKLARIAWAVLSSGHDYRPTAVPA

SEQ ID NO: 13841 - protein, 351 aa, unidentified
  source 1..351: note = protein_b99f13f
  REGION 12..164: note = RuvC_domain
  SITE 15: note = RuvC_P1
  SITE 67: note = RuvC_P2
  SITE 103: note = RuvC_P3
  SITE 105: note = RuvC_P4
  SITE 108: note = RuvC_P5
  REGION 230..315: note = Tnp_domain
  SITE 238: note = Tnp_P1
  SITE 268: note = Tnp_P2
  SITE 276: note = Tnp_P3
  SITE 277: note = Tnp_P4
  SITE 288: note = Tnp_P5
MPIVADQYEFVIGVDTHAATHSLSVVTAATGAVVDQSMFPTNPSGLERAVTWISRRVGEHATLVVIEGVGSYGAGLAERVLGSGLAVVEPAAMPAAHRRGIGKTDSLDAVRIARSVLAVDISRLRWPRAEGPRAALRVLVVAREQMAGERTRAVNALTALLRITDLGIDARKALTRKQIDAISTWRSRSEDVTMHTCRQEAVRLAKRIRALDAELIDNRKALDSAVGSVAPELPELPGVGSVVAASVLIAWSHPGRVRSEAAFAALAGTCPIPASSGNTMRHRLNRGGDRRLNRALTTIVLVRMRTHPDTRAYVARRRREGRTTKEIMRCLKRYITRQLFRTLTAAYPAPA

SEQ ID NO: 13842 - protein, 362 aa, unidentified
  source 1..362: note = protein_0eef9d7
  REGION 1..131: note = RuvC_domain
  SITE 29: note = RuvC_P2
  SITE 70: note = RuvC_P3
  SITE 72: note = RuvC_P4
  SITE 75: note = RuvC_P5
  REGION 194..278: note = Tnp_domain
  SITE 201: note = Tnp_P1
  SITE 231: note = Tnp_P2
  SITE 239: note = Tnp_P3
  SITE 240: note = Tnp_P4
  SITE 251: note = Tnp_P5
MGRYGTDKPGYAQMLAAGRRFADRIWAVEGCNGIGRHIAHRLVHDGEVVVDVPAKLSAQVRVFATGNGRKSDPVDAHSVAMVALRTPNLVQVRVDADLQVMGMLVDRRDELGRARTQTINRLHRLLLELLPGGAKKFLTAPQARALIAAVKPRDVVGKTRRRLAVELIGELDGIDKKIKAAEKDLKELVTARGCTLMDLHGIGPSGAARLLADVGDIRRFADRDRFACWNGTAPLDASFGQQQRHRLSRAGNRRINRTVHIMAVVQLRHRTEGRAYFDAKKATGKTSMEAMRALKRRLSNVVYARMVADQKRREAAGPGGHSGTTVQSSVTDPTPDVGSSDKPLPGPAMAHPKPQPHDGALT

SEQ ID NO: 13843 - protein, 291 aa, unidentified
  source 1..291: note = protein_3eb6d87
  REGION 6..95: note = RuvC_domain
  SITE 34: note = RuvC_P3
  SITE 36: note = RuvC_P4
  SITE 39: note = RuvC_P5
  REGION 158..246: note = Tnp_domain
  SITE 166: note = Tnp_P1
  SITE 196: note = Tnp_P2
  SITE 204: note = Tnp_P3
  SITE 205: note = Tnp_P4
  SITE 218: note = Tnp_P5
MVVRIIGRNLLNRAGHQIKAINARQVKAFRQGQKTDANDALAISVAARQPHIKGSRLLSVQEQCLQGIECMRDLLVKQKVSLGNQLRALLLEFGYPIAQGDTKLTQAIPEILEDAENSLTGAFRFTINRVYQRFTEAVEEVKLIEKQLHEVIKEDQTCIRLQALEGVGPVCAILIKIALGNTTHFKNGREAAACFGLTPVQHSSGGKQKIGSISKVIGNKKLRSALYKGALAVVSQLEKREVRSQKDIWLKELSVRRGKKVAAIALANKTIRTAFAMQKHNKDYQPQLLVA

SEQ ID NO: 13844 - protein, 341 aa, unidentified
  source 1..341: note = protein_1511a7c
  REGION 7..149: note = RuvC_domain
  SITE 10: note = RuvC_P1
  SITE 53: note = RuvC_P2
  SITE 88: note = RuvC_P3
  SITE 90: note = RuvC_P4
  SITE 93: note = RuvC_P5
  REGION 212..299: note = Tnp_domain
  SITE 220: note = Tnp_P1
  SITE 250: note = Tnp_P2
  SITE 258: note = Tnp_P3
  SITE 259: note = Tnp_P4
  SITE 271: note = Tnp_P5
MANVHVIGLDIAKSVFQLHGLDEAGTTILQKRLTRARLLPFFEKLPPCLVGIEACATSHYWAREIAKFGHEVRLMPAQYVKPYVKRQKNDMADAEAIAEAVTRPTMRFVAPKAPEEQSAMMLHKVRLMLNRQLVMLTNAIRAHMAEFGIVAPVGRRGVDRLLEVIDDAADARLPAAARQCLQMLVAQWKLVKQQILENDRQVLGLARSTELGRRLMEVPGIGPLVASALIACVPDPSVFRCGRNMAAWMGLVPRQNSSGGKERLGSITKAGNRYLRQMLFAGAMAVIRRAMQSTRRTWLVRLIERRKPKVAAIALANKNARIAWAMMMHGERYREPMAVAA

SEQ ID NO: 13845 - protein, 342 aa, unidentified
  source 1..342: note = protein_59799e3
  REGION 6..148: note = RuvC_domain
  SITE 9: note = RuvC_P1
  SITE 52: note = RuvC_P2
  SITE 87: note = RuvC_P3
  SITE 89: note = RuvC_P4
  SITE 92: note = RuvC_P5
  REGION 211..300: note = Tnp_domain
  SITE 219: note = Tnp_P1
  SITE 249: note = Tnp_P2
  SITE 257: note = Tnp_P3
  SITE 258: note = Tnp_P4
  SITE 270: note = Tnp_P5
MNIRTIGLDLAKNVFQVHGVDAQGKVVLRKQVARASLAAFFANLPPCLVGMEACASARFWARKLVAQGHVVKLMAPQFVKPYVKGSKTDVADAEAICEAVSRPNMRFVPVKLPEQQALLAVHRARAGFVKARTAQANQLRGLLAEFGITIPVGLASLRRRLPLILEDVESGLPRMMRELVARLAEHLQALDQQVAELEKQIQLWHRQSEPSQRLAAIPGMGPITATALVASIGDARAFSNGRQLAAWLGLVPRQHSSGGKPVLLGISKRGDVYLRTLLIHGARAVISHVEHRGDQAESWLKRLQGRRNRNISAVALANKNARVVWALLAHDRQYGDPTPLAP

SEQ ID NO: 13846 - protein, 328 aa, unidentified
  source 1..328: note = protein_3224598
  REGION 4..155: note = RuvC_domain
  SITE 7: note = RuvC_P1
  SITE 60: note = RuvC_P2
  SITE 100: note = RuvC_P3
  SITE 102: note = RuvC_P4
  SITE 105: note = RuvC_P5
  REGION 200..286: note = Tnp_domain
  SITE 208: note = Tnp_P1
  SITE 237: note = Tnp_P2
  SITE 245: note = Tnp_P3
  SITE 246: note = Tnp_P4
  SITE 259: note = Tnp_P5
MFYLGIDVAKAKLDCCLLLDPESTKRKSKSVANTRAGFATLLEWLARNGVSPAQLHAVMEGTGVYHEQAALALADTGVTVSIVNPAQIRDFARGLAVRTKTDGVDSFVLARYGALLKPQPWQPPSAEARVLRALLARREAVAQDLQRELNRREKADATQTPALIRQSIDDSSAFLRKQLAKLQEDIDHHIDRHPNLKDDMELLTSIPAVGRQTGSNLLAIIHTHHFNSAEQLAAYLGLVPVERQSGSSVLGRVRLSKAGPPRIRATLYMAAIVAIKYNPHIKALYHRLVARGKVKKAALGAAMRKLVHLCFGVLKNRMVYQPDYVKTA

SEQ ID NO: 13847 - protein, 326 aa, unidentified
  source 1..326: note = protein_d282130
  REGION 19..171: note = RuvC_domain
  SITE 22: note = RuvC_P1
  SITE 67: note = RuvC_P2
  SITE 107: note = RuvC_P3
  SITE 109: note = RuvC_P4
  SITE 112: note = RuvC_P5
  REGION 203..287: note = Tnp_domain
  SITE 211: note = Tnp_P1
  SITE 240: note = Tnp_P2
  SITE 248: note = Tnp_P3
  SITE 249: note = Tnp_P4
  SITE 260: note = Tnp_P5
MMHPAEAFKPAPTDALITIGIDVSKDHLDAARHPSGDSLRVPNTRKGHTELLRWLGNSGGIARVVFEPTGPYHRMLEERLASVGLQIVKVNPRQARRFAEAAGRLAKTDRIDALMLARYGALLEPVTRPVRSDVQNRLAELVAARRNLMRDRTATLNRLKTLTIELLKRHARHRLRQIEAQVASLDAAIDAIVLGDPVLSRRRDVLVSIPGLGLITAHTLLADMPELGAMEEGQAASLAGLAPITRQSGTWRGRSSIQGGRASLRQALYMPAIVAMRFNPDLKRVYDRLIAQRKHTKIAITAIMRKIVVLANALLRDNRLWAPKTS

SEQ ID NO: 13848 - protein, 400 aa, unidentified
  source 1..400: note = protein_040e383
  REGION 10..164: note = RuvC_domain
  SITE 13: note = RuvC_P1
  SITE 62: note = RuvC_P2
  SITE 102: note = RuvC_P3
  SITE 104: note = RuvC_P4
  SITE 107: note = RuvC_P5
  REGION 270..356: note = Tnp_domain
  SITE 278: note = Tnp_P1
  SITE 308: note = Tnp_P2
  SITE 316: note = Tnp_P3
  SITE 317: note = Tnp_P4
  SITE 329: note = Tnp_P5
MSTSGRRIWVGVDAGKGHHWAVALDADGETLFSTKVINDETQILSLIETAREKADEVRWAADISGRASTLLVALLVAHGQQVVYVPGRTVNRMTGAYKGEGKTDAKDARVIADQARVRRDFAPLDTPPELVSTLRVLTNYRADLIADRVRLINRLRDLLVGICPALERAFDYSAAKGPVVMLTEYQTPAALRRIGVKRLTTWLERRKVRGADAVAAKAVEAARSQQIVLPGEKRAAKLVCDLAHQLLALDERIKDNDREIRETFRTDERAEIIESMPGMGPILGAEFVAIVGDLSGYRDAGRLASHAGLAPVARDSGRRTNNYHRPKRYNRRLRHIFYMAAQTAMMRPGPSRDYYLKKRGEGLLHTQALLSLARRRIDVLWAMLRDGRLFTSAPPVTQTA

SEQ ID NO: 13849 - protein, 322 aa, unidentified
  source 1..322: note = protein_eae1c2a
  REGION 9..157: note = RuvC_domain
  SITE 12: note = RuvC_P1
  SITE 56: note = RuvC_P2
  SITE 96: note = RuvC_P3
  SITE 98: note = RuvC_P4
  SITE 101: note = RuvC_P5
  REGION 195..279: note = Tnp_domain
  SITE 203: note = Tnp_P1
  SITE 232: note = Tnp_P2
  SITE 240: note = Tnp_P3
  SITE 241: note = Tnp_P4
  SITE 252: note = Tnp_P5
MSQPNQICVGIDVAKGTLDICAGAGNTSFTVVNGTDGFEKIINALKDASVSLILMEATGGLEAGVAYHLQSEGYEIAVVNPRQARDFCRAMGYLAKTDSIDAKALAQMADVINNHPDRERFILSLPDNERQVLTALVVRRRQLVTMLVSERNRLYTSHPAVMKSVECVICALNGELELIDIEMREHVKNHFVELSQLLSTIKGVGDTTIASLLAEVPELGTLSRRAISALVGVAPINRDSGKMRGKRTIFGGRASVRTTLYMATLSAVRYNQAIKTFYTRLVQAGKPKKVALVASMRKLLSIINAMIKKGEGWDNSFHNLAF

SEQ ID NO: 13850 - protein, 346 aa, unidentified
  source 1..346: note = protein_da0e9fe
  REGION 5..152: note = RuvC_domain
  SITE 8: note = RuvC_P1
  SITE 55: note = RuvC_P2
  SITE 92: note = RuvC_P3
  SITE 94: note = RuvC_P4
  SITE 97: note = RuvC_P5
  REGION 212..300: note = Tnp_domain
  SITE 220: note = Tnp_P1
  SITE 250: note = Tnp_P2
  SITE 258: note = Tnp_P3
  SITE 259: note = Tnp_P4
  SITE 271: note = Tnp_P5
MKHYAGLDVSVKETAICIVNETGKVCREIKVTSHPEDLVQALKNPEWQLGRIGLEAGPLSQWLFSGLVEAGLPAICIETRHTKAFLKAQVNKTDRNDARGIAQMMRVNLIRPVHVKTLTSQKRRALLTARKLLLEKAIAIENDIRGLLRNFGLKVGVVNVIRFDDRIRELVDGLPELGDLMGPLLSARQKLRETFMALHRKLLSIVRDDEVCRRLMTIPGVGPVTSLAFISTIDVPARFRNSRAVGPALGLTPVLNQSGESHRVGRVCLCGDGMMRTLLYEAAQVMLSRVNKWSWLKAWAMNVAKRRGRQKAIVALARRLAVIMHRMWSDGAEFRWTRENSMPTAV

SEQ ID NO: 13851 - protein, 346 aa, unidentified
  source 1..346: note = protein_5177605
  REGION 7..147: note = RuvC_domain
  SITE 10: note = RuvC_P1
  SITE 53: note = RuvC_P2
  SITE 88: note = RuvC_P3
  SITE 90: note = RuvC_P4
  SITE 93: note = RuvC_P5
  REGION 210..296: note = Tnp_domain
  SITE 218: note = Tnp_P1
  SITE 248: note = Tnp_P2
  SITE 256: note = Tnp_P3
  SITE 257: note = Tnp_P4
  SITE 269: note = Tnp_P5
MDQIIRIGMDTSKHFFQLHGVDAAERPVLRKKLRRNEVLAFFAKLAPTVIGMEACGAAHYWARELRKLGHEVKLMAPQHVKAYVKRNKNDGRDAEALCEAMSRPTMQFVPVKTEEHQAALMLAGIREQLIARRTQLSNTIRGYAAEFGLTAAKGLDKIEPLLARIAQDATVPAQARELFAIQGQDYAQLQSELKGLNAKLLAWHRANAASRRLAQIPGVGPIGATTLVMKTPDPRVFASGRHFAAWLGLTPKDHSTAGKTRLGKITRAGDEVLRSLLVAGATAVIQQVRRGRGRPSPWLLALLKRKPPKLAAVALANKIARIAWKLMATGESYDGARMLGASALAA

SEQ ID NO: 13852 - protein, 400 aa, unidentified
  source 1..400: note = protein_376b2c9
  REGION 10..164: note = RuvC_domain
  SITE 13: note = RuvC_P1
  SITE 62: note = RuvC_P2
  SITE 102: note = RuvC_P3
  SITE 104: note = RuvC_P4
  SITE 107: note = RuvC_P5
  REGION 270..356: note = Tnp_domain
  SITE 278: note = Tnp_P1
  SITE 308: note = Tnp_P2
  SITE 316: note = Tnp_P3
  SITE 317: note = Tnp_P4
  SITE 329: note = Tnp_P5
MRETHTHAWVGIDAGKGHHWAAVVDEAGLIVWSHKIINDETAILHALSEILALADELHWAVDISGTSSTLLLALLAAHGQSAVYVPGRTVNRMSGAYRGEAKTDARDAYVIAETARHRRDLSVLIPPAQLAAELALLTSHRTDLVADRVRLINRLRDTLTGVFPALERAFDFGRHKGALVLLTGFQTPRGIRRRGRVRLSLWLGKRGVRGADGVAEIAWEAASAQNVVLPGEAVAAQLVADIADRVLAVDVQLARLDAQIGETFRRHPQAAVIESMPGIGPILGAEFVVAAGDMSAYSDAGHLASAAGLVPVPRDSGRRTGNMHRPKRYSRRLRRVFYLSAQTSIIKDGPNREFYLKKRSEGMRHVQAVIALARRRVSVIWALLRDDRLFVVDAPAVRTA

SEQ ID NO: 13853 - protein, 302 aa, unidentified
  source 1..302: note = protein_9b60091
  REGION 4..159: note = RuvC_domain
  SITE 7: note = RuvC_P1
  SITE 58: note = RuvC_P2
  SITE 98: note = RuvC_P3
  SITE 100: note = RuvC_P4
  SITE 103: note = RuvC_P5
  REGION 263..300: note = Tnp_domain
  SITE 271: note = Tnp_P1
MIFIGIDIAKSTHFASGVNSDGEVLINPFKFTNDNQGFNLFINTFKDFDLSNCLVGLESTGIYGDNLTTFLFEKGFKIGRINPIQTDSLRSSNIRKTKNDKIDTFLIAQCLMLGHYTLITEKDIQLIKLKTICRFKFDVKKSQSKSKVQLVTCLDIAFPELANFFNNNLHIKSSYALLSKYPTARIIANTRIDALTNLLYSASRGHFKQDKAIALKELARNSIAMDNPAIGIQIKMLIEQIQMLEKQIDLLDIEITNIMESLNSPISSIPGIGNWLGSIIISEIGDITRFSTSTKLLFFLLV

SEQ ID NO: 13854 - protein, 339 aa, unidentified
  source 1..339: note = protein_ba7a197
  REGION 7..150: note = RuvC_domain
  SITE 10: note = RuvC_P1
  SITE 53: note = RuvC_P2
  SITE 89: note = RuvC_P3
  SITE 91: note = RuvC_P4
  SITE 94: note = RuvC_P5
  REGION 213..298: note = Tnp_domain
  SITE 221: note = Tnp_P1
  SITE 251: note = Tnp_P2
  SITE 259: note = Tnp_P3
  SITE 260: note = Tnp_P4
  SITE 272: note = Tnp_P5
MNEISMIGLDLAKGAFQVHGVDGGGEVVVRRRLRRGQVLGFFAKLGPCVVGMEACASSHYWARELRRLGHEVRLIPPAYVKPYVKRGRKNDATDAAAICEAMTSKGMSLVPVKTPEQQAGLMLHRARRLLVRQRVMLANAVRSHLAEFGIVDAQGEAGLDRLIGVAVDADDPSLPAAAREALAMLAAQLRDAEAKVEALDREILARHRADDASRRLASIPGIGPVSASAIVATVGDARRFRTGRDFAAWLGLVPSQHSSGGKTVLGPITKMGDRYLRSLLVLGATAMLRRRDSGYGPWLAGLLARKPARQASVALANKMARIAWAILARGGVYRKPAAA

SEQ ID NO: 13855 - protein, 416 aa, unidentified
  source 1..416: note = protein_ae31dba
  REGION 12..167: note = RuvC_domain
  SITE 15: note = RuvC_P1
  SITE 64: note = RuvC_P2
  SITE 104: note = RuvC_P3
  SITE 106: note = RuvC_P4
  SITE 109: note = RuvC_P5
  REGION 275..361: note = Tnp_domain
  SITE 283: note = Tnp_P1
  SITE 314: note = Tnp_P2
  SITE 322: note = Tnp_P3
  SITE 323: note = Tnp_P4
  SITE 334: note = Tnp_P5
MSLALPDALFFTGIDWAAETHAICVMEAGGKIAAQFTIEHSADGITALLRRLARYGDPGALPVAIERPDGRLVDLLLEAGHPVVPVKPNAIKTWREGEVLSGAKSDAGDAAVIAEYLRLRAHKLRVVAPYGDQTRALRTIVRSRGDLVELRVAATNQLSALLDAHWPGARAIFADVESPISLKFLTCYPTPAAAAHLGEKRMAAFCLKHGYSGRRSPAELLARLRSAPAGTTGEALTDALRDTVLAAAGVLSALNAAVKNLDRSIAAHLGEHPDGAIFTSLPRSGQVNAAQVLAEWGDARPAYEHPDSAAALAGVTPVTTQSGKHRGVQFRWACNKRFRVAITTFADNSRHASPWAAKIYNDARAAGKDHPHAIRILARAWIRVIYRCWLDGVPYDPARHGAAVALAQQTAEQIAA

SEQ ID NO: 13856 - protein, 348 aa, unidentified
  source 1..348: note = protein_f4d37e1
  REGION 7..147: note = RuvC_domain
  SITE 10: note = RuvC_P1
  SITE 53: note = RuvC_P2
  SITE 88: note = RuvC_P3
  SITE 90: note = RuvC_P4
  SITE 93: note = RuvC_P5
  REGION 210..296: note = Tnp_domain
  SITE 218: note = Tnp_P1
  SITE 248: note = Tnp_P2
  SITE 256: note = Tnp_P3
  SITE 257: note = Tnp_P4
  SITE 269: note = Tnp_P5
MEQITRIGVDTSKNVFQLHGVNAEEKPVLRKKLTRTQMLAFFKDLPPTVIAIEACGSAHHWAMHLGSLGHEVKLIAPQLAKPYVKRGKNDAADAEALCEAMSRPTMRFVPVKTADQQAALMLVGMRDRLVRNRTQLANAIRGYAAEFGLTAARGISRIELLLGDIASDGSLPELSRELFAFHRREYELLQAEIEKVEAKLMEWHRNDECSQRLARIPGVGPIGASLLMMKTPDPRLFKSGRDFAAWIGLTPRDHSTAGRARPGGITRGGDEHLRSVLVVGATSVLKNIRAGRSKNSSPWLVKLLERSQKPKLVAVALANRIARIAWKLMVSGESYRAITAQPVLKKAA

SEQ ID NO: 13857 - protein, 340 aa, unidentified
  source 1..340: note = protein_8f10c77
  REGION 7..149: note = RuvC_domain
  SITE 10: note = RuvC_P1
  SITE 53: note = RuvC_P2
  SITE 88: note = RuvC_P3
  SITE 90: note = RuvC_P4
  SITE 93: note = RuvC_P5
  REGION 212..299: note = Tnp_domain
  SITE 220: note = Tnp_P1
  SITE 250: note = Tnp_P2
  SITE 258: note = Tnp_P3
  SITE 259: note = Tnp_P4
  SITE 271: note = Tnp_P5
MDEVTMIGLDLAKNIFQVHGVDAAGQVVLRRKLRRDNVEDFFRRLPPLTIGMEACGGAHYWGRLLEALGHRVRLMPPAYVKPYVKRGKTDAADAEAICEAMTRPTMRFVPTKTAGQQAAAAELKARQLLVAQRTRTINALRGHMAEFGIVTAKGTWRISDLTAVVQDVDDTRLPDVARAALLMLTEQIKNLDDQIERLETAMVRRSRVDETARRLASIPGIGAITATALQALVPDPCGFKSGRHFAAWLGLTPRSHSSGGKERLGRISRAGNSTLRSFLVLGATARLRYARQKPEAADWVTRLLARRPFKVAAVALANKMARIAWALLTKGGTYKVPTAA

SEQ ID NO: 13858 - protein, 316 aa, unidentified
  source 1..316: note = protein_c10804a
  REGION 10..154: note = RuvC_domain
  SITE 13: note = RuvC_P1
  SITE 57: note = RuvC_P2
  SITE 97: note = RuvC_P3
  SITE 99: note = RuvC_P4
  SITE 102: note = RuvC_P5
  REGION 193..277: note = Tnp_domain
  SITE 201: note = Tnp_P1
  SITE 230: note = Tnp_P2
  SITE 238: note = Tnp_P3
  SITE 239: note = Tnp_P4
  SITE 250: note = Tnp_P5
MNEMNAEQFVGIDVSKATLDGAVEPQGQVWQVAYDAKGIDQLVLQLQEIGPTLIVIEATGGLETQIASALAGKELPVAVVNPRQVRDFAKASGRLAKTDRVDAGVLAAFARAIRPQARPLKDADTRALDDLVDRRRQLIGIRVQEVLRLKGATTKPLQTSLKKHIAWLDKQIDQNDRDLTRRLRESDAWRAKDDLLKSIPGVGSVTIVTLLAKCPELGTLNRREIAALVGVAPMANDSGQYRGKRFIWGGRSEVRAVLYMATISAIRCNAVIRAFAERLKNAGKPPKVVIVACMRKLLTIMNAMLKNNTPWQPQNT

SEQ ID NO: 13859 - protein, 327 aa, unidentified
  source 1..327: note = protein_82c1bb2
  REGION 4..158: note = RuvC_domain
  SITE 7: note = RuvC_P1
  SITE 61: note = RuvC_P2
  SITE 101: note = RuvC_P3
  SITE 103: note = RuvC_P4
  SITE 106: note = RuvC_P5
  REGION 203..287: note = Tnp_domain
  SITE 211: note = Tnp_P1
  SITE 240: note = Tnp_P2
  SITE 248: note = Tnp_P3
  SITE 249: note = Tnp_P4
  SITE 261: note = Tnp_P5
MMFIGFDISKDKVDLCWLRDPTTNKKKTKVFKNNQLSFKDIEQWLLSTTQAVAEEVVITVEPTGVYHEPLMYFLYQQGFNIVLANPGKAKKYAEALNIVHKTDKSDAIMLASYGYAKHSIVNYWQPEAKEIRELKALLRRLDALESSKQREHNRLEASEFNAASERVIQSLKETINFFDDEIKKLKLDIDNHIDSFPNLKKDRALLETIPGIGPVMSRELTYIFAAKKFNQAKQAAAYCGLIPKLHESGKMKGRTTLSKLGPSRIRSKLYMAAVVAGQWNYQIKQQKIRLMNHGKTSMQIIGANMRKLIHICFGVVKNQEAFKLQES

SEQ ID NO: 13860 - protein, 405 aa, unidentified
  source 1..405: note = protein_454e464
  REGION 4..162: note = RuvC_domain
  SITE 7: note = RuvC_P1
  SITE 59: note = RuvC_P2
  SITE 99: note = RuvC_P3
  SITE 101: note = RuvC_P4
  SITE 104: note = RuvC_P5
  REGION 270..356: note = Tnp_domain
  SITE 278: note = Tnp_P1
  SITE 309: note = Tnp_P2
  SITE 317: note = Tnp_P3
  SITE 318: note = Tnp_P4
MLFVGDDWVEDHHGVELMDDTGRRLAKARLPEGVAGMARLHAMFGEQLGEDAADQVVIGIETDRGPWVQALIVAGYRVFAINPLQASRYRERHGVSGAKSDAADAHVLADMVRTDSHQLRPVAGDSAQAAAIKVVARAHKTLIWERTRHAQRLRHSLRDYFPAAREAFEDLTAADTLELLAKPPDPASAAKLTVAQIAAVLKRARRRCIADKAAKIQAALRTERLGQPEIVVSAYAARVRSAAAVLAVLNEQITALQGQVEAHFGRHPDAKIILSRPGLGPILGARVLAEFGDDRTRYVNAKARKNYAGTRPITRASGKKKVVLARYIHNDRLVDALGVQAFAALQASPGARLYYDELRAREVSHHAALRQLANRLFGILHGCLKTGTLYDEAAAWSHRVEKLAA

SEQ ID NO: 13861 - protein, 320 aa, unidentified
  source 1..320: note = protein_f3df8d8
  REGION 10..159: note = RuvC_domain
  SITE 13: note = RuvC_P1
  SITE 55: note = RuvC_P2
  SITE 95: note = RuvC_P3
  SITE 97: note = RuvC_P4
  SITE 100: note = RuvC_P5
  REGION 190..277: note = Tnp_domain
  SITE 198: note = Tnp_P1
  SITE 227: note = Tnp_P2
  SITE 235: note = Tnp_P3
  SITE 236: note = Tnp_P4
  SITE 248: note = Tnp_P5
MAMRVDNFIIGIDVAKAELVCYYEDSAQQQTVRNTKPEIQKWLALQPANTAICVEATNVYHLDLVEMAYEKGFAVYVVDGFQLSNYRKGVGGRVKTDASDACLLARFLDREGSALRPWSPPPAVYGKLQSLLRRRAALVSARTSLTQSWGNEMSLKEAFNSFAKHFESLDLLIQKRLKVLVKEAGLAEQVARCQKVEGIGFLTAVALVTAFIRGEFKNSDSYIAFLGMDLKVADSGQKAGRRRLTKRGCSEIRRLLHNAAMAASRSAAWKDVYEHYRRAGKATTQALVILSRKLARVAFALMKTQGEYVSKGAKKLCPQP

SEQ ID NO: 13862 - protein, 345 aa, unidentified
  source 1..345: note = protein_b1efa28
  REGION 5..152: note = RuvC_domain
  SITE 8: note = RuvC_P1
  SITE 55: note = RuvC_P2
  SITE 92: note = RuvC_P3
  SITE 94: note = RuvC_P4
  SITE 97: note = RuvC_P5
  REGION 212..298: note = Tnp_domain
  SITE 220: note = Tnp_P1
  SITE 250: note = Tnp_P2
  SITE 258: note = Tnp_P3
  SITE 259: note = Tnp_P4
  SITE 271: note = Tnp_P5
MEHYAGIDVSLESASVCVVDASGRIVREAKVASEPEVLIGWFGMLGLAVTRIGLEAGPLSQWLYAGMREAGLPVELLETRHVPDAFKAMPVKTDRKDARGIAQLMRLGWFRAVHCKSLPAQEVRALLTARKLLQTKNHDVEMSLRGVLRGFGLKVGPTTPRTFAARIRELVAGHPTLSTVAEALLAARSTLFEQWQKLEKRLRSLARQDRRVRLLMTAPGVGPIVGLTYASAIDDPSRFRSSKAVGAHFGLTPKRYQSGETDVSGRISKIGDGGVRTALYEAANVILTRPVKGSTLKNWGMRLAARAGVRKAKVALARKLAVVLHRMLANGTTFLAEKAAPAAAH

SEQ ID NO: 13863 - protein, 310 aa, unidentified
  source 1..310: note = protein_8811f41
  REGION 6..149: note = RuvC_domain
  SITE 9: note = RuvC_P1
  SITE 53: note = RuvC_P2
  SITE 93: note = RuvC_P3
  SITE 95: note = RuvC_P4
  SITE 98: note = RuvC_P5
  REGION 187..271: note = Tnp_domain
  SITE 195: note = Tnp_P1
  SITE 224: note = Tnp_P2
  SITE 232: note = Tnp_P3
  SITE 233: note = Tnp_P4
  SITE 244: note = Tnp_P5
MFSYSAGIDVSKDSLEARIHLLEAGVSCSNTEKDLPALIGWLRLYQVSRVLVEATGGYERNVVKAAQAAGLQVICVNPRRAKAFSRAMGQKAKTDPIDAKSLAQFAAVIDSPSARITSPEHERLRALVQQREHFVQQRDDDRRRLKTASCDAVKPALQSHIEYLSAAVEAINQLIRQSANELDREKVARLCSVKGIGLITASSLMAYLPELGEIGGRPIAALAGLAPYNNDSGKHKGARHISGGRFAARRSLYMACWVIIRDQPEFQARYQLLRDKGKCAKVALIACMRVLLVRLNAMLRDGTEWKEHTA

SEQ ID NO: 13864 - protein, 411 aa, unidentified
  source 1..411: note = protein_44d6a45
  REGION 5..164: note = RuvC_domain
  SITE 8: note = RuvC_P1
  SITE 61: note = RuvC_P2
  SITE 101: note = RuvC_P3
  SITE 103: note = RuvC_P4
  SITE 106: note = RuvC_P5
  REGION 272..358: note = Tnp_domain
  SITE 280: note = Tnp_P1
  SITE 311: note = Tnp_P2
  SITE 319: note = Tnp_P3
  SITE 320: note = Tnp_P4
MRLFVGDDWAEDHHDIEVMDQAGKVLARRRLPEGVAGMAQLHGLIGACLGEDDEDAEVIVGIETDRGPWVAALIAAGYLVFPVNPLLASRYRERHGVSGAKSDAGDAHMLADMVRTDSHQLRPAAGDSPEAEGVKVLARTHKTLIWERTRAVQRLRHQLREYFPAALEAFEDLDAPDTLELLGKAPEPARAARLTRAQVSAALKRARRRSIPDKATAILAALRGEHLGQPEALTAAYAATVRALLAVIATLNEQVKILQGQVEEHFGQHPDAEVILSQPGLGPVLGARVLAEFGDDPRRYRDGKARRNYAGTSPVTRASGKKKVVAARFIHNDRLVDALNAQAFASLNSSPGARAYYDELRARGIEHNDALRRLANRLVGILHGCLKTRTLYDEATAWGHRQTSSQSSVAA

SEQ ID NO: 13865 - protein, 411 aa, unidentified
  source 1..411: note = protein_30f4027
  REGION 5..163: note = RuvC_domain
  SITE 8: note = RuvC_P1
  SITE 62: note = RuvC_P2
  SITE 102: note = RuvC_P3
  SITE 104: note = RuvC_P4
  SITE 107: note = RuvC_P5
  REGION 273..373: note = Tnp_domain
  SITE 281: note = Tnp_P1
  SITE 311: note = Tnp_P2
  SITE 319: note = Tnp_P3
  SITE 320: note = Tnp_P4
  SITE 333: note = Tnp_P5
MNPVVGLDISKGESQVQAFLDKGKPYRKSFKISHTVEGLSSLVSFLEDVKKESGKKPSIILEATGHYQTPVVHYLEERGYLLIIINPLISYKARSSSLRKVKTDVIDAYLLCELFYKEELEPYKKRGVQLLNLRNLTRQHENITGVMIQTKLQFQAVLEQVFPEYKGVFGDLYSVVSLLTLSEFPSSEDILNASEEVVTDKIKGLCKSRSSRWAKEKAIQLKAAAARNPFEKAVYQSHILSLGMYIKMILQYKEHLAKLETEIDALAKDIEEYNIIKSIPGIGEKIAATIISEIGEIDRFNDPKKLVAFAGVDPSVFESGKFSATKNRITKRGSSRLRHALYMAVRCAIRDCRKKKTTDEIIPRNKRMREFYDKKRDEGKPFKVAVIACVNKLLHWIFALLKNRTTFQDIA

SEQ ID NO: 13866 - protein, 409 aa, unidentified
  source 1..409: note = protein_e849268
  REGION 7..170: note = RuvC_domain
  SITE 10: note = RuvC_P1
  SITE 64: note = RuvC_P2
  SITE 110: note = RuvC_P3
  SITE 112: note = RuvC_P4
  SITE 115: note = RuvC_P5
  REGION 282..368: note = Tnp_domain
  SITE 289: note = Tnp_P1
  SITE 319: note = Tnp_P2
  SITE 327: note = Tnp_P3
  SITE 328: note = Tnp_P4
  SITE 341: note = Tnp_P5
MMNPLFVGIDVGSRNNVAYLMKPDGSKHSSFSVQNNLGGAKLLSERIVSALGSMQLSDVIIGLEATSIYGDSLVYALREDGSLGRFQRKIHVLNPKQVRKFKDAYPDLPKNDWVDAFVIADHLRFGRIAKEVYMDDYRYQALRTLTRARFDVIQNLTREKQRFANYLFLKCSGMAQDKDIQNTSATTIALMERFETVDDLANADLEELTAFVTETGRGRFADPAATAKAVQAAARGSYRLPKTVNDTVNQAMSVSIASMRALKEQIKVLEKAIEQQFEIIPNTLTSIPGIGKVYSAGIIAEIGDIHRFNSQASVAKFAGLVWHKNQSGEFEAEHSQMIKSGNRYLRYYLLEAANSVRRCDSEFRRYYDLKYHEVNKYQHKRALALTARKLVRLVFRLLKDNRLYIPPES

SEQ ID NO: 13867 - protein, 317 aa, unidentified
  source 1..317: note = protein_37df897
  REGION 8..150: note = RuvC_domain
  SITE 11: note = RuvC_P1
  SITE 55: note = RuvC_P2
  SITE 95: note = RuvC_P3
  SITE 97: note = RuvC_P4
  SITE 100: note = RuvC_P5
  REGION 190..274: note = Tnp_domain
  SITE 198: note = Tnp_P1
  SITE 227: note = Tnp_P2
  SITE 235: note = Tnp_P3
  SITE 236: note = Tnp_P4
  SITE 247: note = Tnp_P5
MEVGFPFVGIDVSKARLDVAVRPSGASESFLNDAAGIKELVKRLKQIQPTLIVLEATGGVERGATRALASAELPVVVVNPRQVRDFAKATGQLAKTDQIDAVVLARFAEAVRPALRPLPDEVTLELRALITRRRQITDMIVAENNRRNGASKAVKKRIDAHIRWLEAELGRADKDLDQSIGHSPIWQENQDLLRTVPGIGPVTSRSLIAELPELGQLNRKQIAALVGIAPLNRDSGTLRGRRTIWGGRAAVRAVLYMAVLVASRHNGVIRAFYKRLRNAGKAPKVALVACMRKLLTILNAMIKHKTRWSETFSVQTS

SEQ ID NO: 13868 - protein, 406 aa, unidentified
  source 1..406: note = protein_4b4081b
  REGION 5..161: note = RuvC_domain
  SITE 8: note = RuvC_P1
  SITE 58: note = RuvC_P2
  SITE 98: note = RuvC_P3
  SITE 100: note = RuvC_P4
  SITE 103: note = RuvC_P5
  REGION 275..359: note = Tnp_domain
  SITE 283: note = Tnp_P1
  SITE 313: note = Tnp_P2
  SITE 321: note = Tnp_P3
  SITE 322: note = Tnp_P4
  SITE 335: note = Tnp_P5
MLNAVGIDVSKGRSTVAVLQPGGVVIHKPFDVSHNSKDLHDLAHYLVTLDGETRVVMESTGRYHEPILHALSEAGLFVSAVNPHLIKNFGNNTIRKIKTDPADAKKIARYTLDNWTSLREYSAMDTTRTELKTLNSQFSFFMKQKISAKANLIALLDETYPGVNKLFNSPTRPDGSEKWVDYAYSFWHVNCVLDSGLKAFTERYKSFCKRHGYNCQPDKPAQIYEQAKALVPVAPKDSIYKELIQDSIKQLNLISQHVEQLRKKMDELASTLPEYNTVRSMYCVGPSLGPQLIAEIGDISRFTHREALTAFAGVDPGKDDSGQVVHKSGHASKCGSARLRKTLFQIMDAMLKLGPREGDPVSQFLFKKKSEGKPYLVYMTAGANKFLRVYYGKVKECLRGQARSEA

SEQ ID NO: 13869 - protein, 340 aa, unidentified
  source 1..340: note = protein_86407fb
  REGION 6..148: note = RuvC_domain
  SITE 9: note = RuvC_P1
  SITE 52: note = RuvC_P2
  SITE 87: note = RuvC_P3
  SITE 89: note = RuvC_P4
  SITE 92: note = RuvC_P5
  REGION 211..301: note = Tnp_domain
  SITE 219: note = Tnp_P1
  SITE 249: note = Tnp_P2
  SITE 257: note = Tnp_P3
  SITE 258: note = Tnp_P4
  SITE 270: note = Tnp_P5
MTIKFLGIDLAKNVFQLCGLNQAGKPVYSKRVSRKILLQTVANIPACLIGVEASTGAFYWQREFEKLGHNVKVISPQFVKPFVRGQKNDGNDAQAIGIALMQPTMRFVPPKSPEQQDIQALHRARQRIVNHRTATVCQIRGLLLDRGFTIGAAISRVKRAVPLIIEDVENGLSTRMRKTVAELFDLFMDLGRRITFFDKEIEAIFRQSEPCQRIAKIKGIGPKTATAVVAAIGKGSEFKNGRHFATWLGLVPRQYSSGDRQVLMNMTKKGDKHLRTLFIHGARSVVRVAENNNDSAMNQWVNQLKERRGANKTTVAVANKNARIVWSILKNNTEYQSVVI

SEQ ID NO: 13870 - protein, 402 aa, unidentified
  source 1..402: note = protein_62b80c5
  REGION 5..161: note = RuvC_domain
  SITE 8: note = RuvC_P1
  SITE 58: note = RuvC_P2
  SITE 98: note = RuvC_P3
  SITE 100: note = RuvC_P4
  SITE 103: note = RuvC_P5
  REGION 269..355: note = Tnp_domain
  SITE 277: note = Tnp_P1
  SITE 308: note = Tnp_P2
  SITE 316: note = Tnp_P3
  SITE 317: note = Tnp_P4
MAVCGGLDWGQAGHSVCVIDRATGQIVVQFVIPHTADGLADLIRRLARRGAPADLPIAIERPSGLIVDTLMAAGHPVIPIHPNVVKASRPRYRAAGGKSDQGDAYLLADLLRTDGHRFRPLVPCSDAIKALRALVRGRDDLVAQRLALANQLRALLDSFWPGAAAIFADIDSPIALAFVQRYPTPDSAARLGEKRLTTFMAQHRYCGRRSAAELLNRLRAAPTGLAGETEADAKGELVRSLAAVLSTIVAHIAELSARIGHDLAELPEGRVIMSFPRAGRICAAQILAEIGDDPERFQTQDQLAAEAGVCPVTHASGKSRGVVFRWACNHRLRQAVTCFADNSRHASHWAADIYRRAIARGCKHPHAVRILARAWIRIIWRAWSDNVIYDPNRHQAARAFAA

SEQ ID NO: 13871 - protein, 270 aa, unidentified
  source 1..270: note = protein_51feb80
  REGION 2..74: note = RuvC_domain
  SITE 14: note = RuvC_P3
  SITE 16: note = RuvC_P4
  SITE 19: note = RuvC_P5
  REGION 138..220: note = Tnp_domain
  SITE 146: note = Tnp_P1
  SITE 176: note = Tnp_P2
  SITE 184: note = Tnp_P3
  SITE 185: note = Tnp_P4
  SITE 197: note = Tnp_P5
MSPEYVRPYVKAQKNDDRDAEGIAEAASRPTMRFVELKSQDQLDIQTLHRARSRLVAERTNLINQLRAILLERGVTFPVGRRKLEQGIDGLLAEGDDTLSSRMSRLVAEMRAEWKELDAKIEMLNGEFVEMARSDAAMRRLTTIPGIGVLNATALVAAVGDGSSFGKARDLGAWLGLVPRQHTTGGKPRLLGISKRGNTYLRTLFIHGARAALPSLAQGDTPLGRWLKGMIERGVHRNAVVVALANKLARVAWAALRRETSFERNYPVAG

SEQ ID NO: 13872 - protein, 396 aa, unidentified
  source 1..396: note = protein_cc6b0ae
  REGION 6..160: note = RuvC_domain
  SITE 9: note = RuvC_P1
  SITE 58: note = RuvC_P2
  SITE 98: note = RuvC_P3
  SITE 100: note = RuvC_P4
  SITE 103: note = RuvC_P5
  REGION 265..352: note = Tnp_domain
  SITE 273: note = Tnp_P1
  SITE 304: note = Tnp_P2
  SITE 312: note = Tnp_P3
  SITE 313: note = Tnp_P4
  SITE 325: note = Tnp_P5
MPRIWAGVDIGKEHHHCVVINSDGERLLSRRVLNDESALLELIGDVLALDEDVLWAVDLNHGGAALLIGLLLGHSQPMVYITGLTVHRASASYRGEGKTDAKDAFVIAGQARMRRDLGLLRPGDEIAVDLRTLTTRRTDLVCDRTRQINRLRAQLLEIFPALERALDLTNKGPVLLLTGYQTPAAIRRAGVKRIEAWLKNRKVRGAAALAKAAVEAAEAQHTALPGEQLAAAMVVRLSKGVMALDEEIAELEALIEARFREHPHAEVIVSLPGMGKLMGAVFLAVTGGDMDAFGSADRLAGYAGLAPAPRDSGRVSGNLRRPRRFHRGLLNAMYLSALSSLKSCPASKAYYQRKRAEGKGHKQALLALARRRVNVLWAMIRDGACYQATPPVTAAA

SEQ ID NO: 13873 - protein, 342 aa, unidentified
  source 1..342: note = protein_10de82c
  REGION 6..148: note = RuvC_domain
  SITE 9: note = RuvC_P1
  SITE 52: note = RuvC_P2
  SITE 87: note = RuvC_P3
  SITE 89: note = RuvC_P4
  SITE 92: note = RuvC_P5
  REGION 211..295: note = Tnp_domain
  SITE 219: note = Tnp_P1
  SITE 249: note = Tnp_P2
  SITE 257: note = Tnp_P3
  SITE 258: note = Tnp_P4
  SITE 270: note = Tnp_P5
MRIMILGIDLGKNSCSVVGLNESGKVVVRRRMRRDGVIAFAAKLPPCVMAMEACCGAHHMGRSLVEFGHEVRLMSPEYVRPYVKAQKNDDRDAEAIAEAASRPTMRFVELKSEEQLDIQTLHRVRDRLVGERTSLTNQIRSLLLECGHVVAQGHARLGLLLSELLDTEAGTLSPRMVFLLRDMRTRWDELDRRIAAFDAEFASMARTDERARRLTDIPGIGALNATALVAAVGDAATFSKGRDLAAWLGLVPRQATTGGRPKLLGITKRGSRYLRKMLIQGARSAMPSLARSDSAVGAWLRGLLARSHSNVAVVALAAKMARTVWALLHHGRSYKIMTITTA

SEQ ID NO: 13874 - protein, 408 aa, unidentified
  source 1..408: note = protein_0cece2c
  REGION 4..165: note = RuvC_domain
  SITE 7: note = RuvC_P1
  SITE 62: note = RuvC_P2
  SITE 102: note = RuvC_P3
  SITE 104: note = RuvC_P4
  SITE 107: note = RuvC_P5
  REGION 273..359: note = Tnp_domain
  SITE 281: note = Tnp_P1
  SITE 312: note = Tnp_P2
  SITE 320: note = Tnp_P3
  SITE 321: note = Tnp_P4
MLFVGDDWAEDHHDVEVMDATGRRLAKARLPEGVAGIARLHAMIGAQLADDADDGVGQVKIGIETDRGPWVQALIAAGYTVYAVNPLQASRYRERLGVSGAKSDPGDAHMLADMVRTDSHQLRPVAGDTAEAEAVKVVTRMHKTLIWERTRAGQRLRHALREYFPAALEAFEDLDATDTLELLAKAPDPASAARLSTAQISAALKRARRRDIPGKTTAIQAALRAQHLGQPAVVSAAYAVSVRALLAVLGTLNEQVKVLQGQVEAYFGRHPDAEIVLSQPGLGPVLGARVLAEFGDDHNRYASAKARKNYAATSPITRASGKKKVVAARFVHNDRLIDALMTQAFTSLNNSPGARAYYDQQRARGANYNAALRQLANRLVGILHGCLKTRTPYNEATAWSHHLTEAAA

SEQ ID NO: 13875 - protein, 311 aa, unidentified
  source 1..311: note = protein_ef36ce2
  REGION 6..156: note = RuvC_domain
  SITE 9: note = RuvC_P1
  SITE 52: note = RuvC_P2
  SITE 92: note = RuvC_P3
  SITE 94: note = RuvC_P4
  SITE 97: note = RuvC_P5
  REGION 188..272: note = Tnp_domain
  SITE 196: note = Tnp_P1
  SITE 225: note = Tnp_P2
  SITE 233: note = Tnp_P3
  SITE 234: note = Tnp_P4
  SITE 245: note = Tnp_P5
MTNDTIGVDISKDHLDAHRMSDSASRRFANDSVGHRAFIGWLGQPDARIVYEPTGPYHRAFEQRLAEAGLALVKVNPRQARRFAEATGTLAKTDRLDAAMLARMAALLDLEARPARSPVLNDLKDMHMAREALVKNRTAARNRAKNLTLAILKRHNGEQLRRIERQIAAIEKEIMALIKTYPDLARRFAILVTIPGVSAITAFALLIDMPELGTLQSGQAASLAGLAPVARQSGNWTGRAFIRGGRANVRQALYMPALVAMRFNPDLKAKYNQLKAAGKASKLAITAIMRKLIVLANALLRDRRKWTASLT

SEQ ID NO: 13876 - protein, 352 aa, unidentified
  source 1..352: note = protein_f395766
  REGION 7..147: note = RuvC_domain
  SITE 10: note = RuvC_P1
  SITE 53: note = RuvC_P2
  SITE 88: note = RuvC_P3
  SITE 90: note = RuvC_P4
  SITE 93: note = RuvC_P5
  REGION 210..298: note = Tnp_domain
  SITE 218: note = Tnp_P1
  SITE 248: note = Tnp_P2
  SITE 256: note = Tnp_P3
  SITE 257: note = Tnp_P4
  SITE 269: note = Tnp_P5
MSSIARIGMDTSKSIFVLHGVSADDQVVLRKKLRRNQVLEFFSKLSPTQIGIEACGASHHWSRKLEELGHEVLLIAPQHVKPYVRRNKNDAADAEAICETMSRPRTWFVPAKTADQQAGLMLAGTRDALIRRRTQLSNMIRSYAAEFGLVSPRGLDKIEPLLARIAADETLPDLAKEMFADLGGDYTQLQDRLTIIEKRLQLWHRSHEQSRRLAQIPGVGVVGAALMTMKVPDPKAFRSGRHFAAWLGLTPKDHSTAGKQRLGVITRAGDEALRSVLVVGATALLQQVRKGRSLQSRWLAELLRRKPPKLVAVALANKTARIAWKLVVSGEVYDRNRVTPPQDGITAELVAA

SEQ ID NO: 13877 - protein, 402 aa, unidentified
  source 1..402: note = protein_3756e29
  REGION 4..160: note = RuvC_domain
  SITE 7: note = RuvC_P1
  SITE 57: note = RuvC_P2
  SITE 97: note = RuvC_P3
  SITE 99: note = RuvC_P4
  SITE 102: note = RuvC_P5
  REGION 274..361: note = Tnp_domain
  SITE 282: note = Tnp_P1
  SITE 312: note = Tnp_P2
  SITE 320: note = Tnp_P3
  SITE 321: note = Tnp_P4
  SITE 334: note = Tnp_P5
MNCVGIDVSKGKSMITVMRPFGEVVVSPFEVRHTANELSELAGLLKSLDGETRVVMESTGNYHAPVAWLLHDAGLYVSVVNAMLVHDYGNNSLRRAKTDKKDAIKLANYGLDHWLTLPRYVPEEDTRLMLKACYRQYQQYSKVQTMLKNNLISLLDTTFPDANRLFTSPPRDDGREKWIDFVATFWHRECVCDLSEKAFAAKYQKWCKKYGYNFSEGKALDIYAAARGHFGVMPKTDTAKLLVEQAISQLRATSSALAALKQEMQSLAASLPEYPVVMEMFGVGPTLGPQLMAEIGDVRRFHSKKALVAFAGIDAPPYQSGQMDVRSRSISKRGSASLRRTLFLVMSVILQHAPMNEPVYQFMNKKRSEGKPYRVYMMASANKFLRIYYASVKSYLDSLEHD

SEQ ID NO: 13878 - protein, 331 aa, unidentified
  source 1..331: note = protein_b606d21
  REGION 8..157: note = RuvC_domain
  SITE 11: note = RuvC_P1
  SITE 62: note = RuvC_P2
  SITE 100: note = RuvC_P3
  SITE 102: note = RuvC_P4
  SITE 105: note = RuvC_P5
  REGION 204..291: note = Tnp_domain
  SITE 212: note = Tnp_P1
  SITE 242: note = Tnp_P2
  SITE 250: note = Tnp_P3
  SITE 251: note = Tnp_P4
  SITE 264: note = Tnp_P5
MNKFKHFIGIDISKEYFDATILGESKQSSHNQFSNTKKGITQFLKWVRQEKCSMDVTLICMEYTGIYNKIILDILINKSFYVWVEMSYRIIRSSGIQRGKNDKIDSERIALYAKKNQEDAKIFKASDKVLDKIQGLLGQREMILSHKTALQVRTNELKVYDIEVYNVLSKNIKAIIRSEEVALKAIENQIDDLIKENQELQVLYNHITSVPGVGRVTALFLICFTNACTTYENPRQLASYCGVVPFEYTSGKSVRGRAKVHFMANKKLKKLLHLCALSSSKNDIEMKQYYDKKVAEGKSKMLVLNNVRNKLIHRICACVKNNRPYEIRLIA

SEQ ID NO: 13879 - protein, 318 aa, unidentified
  source 1..318: note = protein_9b82d14
  REGION 10..151: note = RuvC_domain
  SITE 13: note = RuvC_P1
  SITE 55: note = RuvC_P2
  SITE 95: note = RuvC_P3
  SITE 97: note = RuvC_P4
  SITE 100: note = RuvC_P5
  REGION 191..275: note = Tnp_domain
  SITE 199: note = Tnp_P1
  SITE 228: note = Tnp_P2
  SITE 236: note = Tnp_P3
  SITE 237: note = Tnp_P4
  SITE 249: note = Tnp_P5
MNPQQATEFVGVDVASAHLDVAVQGQASVRRFANTPQGIALLLRTLRPASVLALESTGRYHVPLALAAHAAGLHVYVLNPLDARRYAQSVGQRGKTDRMDALVLARYICREHAQLRQWQPPTACQAVLRELLAHRATLVRQRSALAQAGNHSKDLARLDEPVLAALQQAIEHIDEQLASTVQADPASQETFKCITSVPGLGLICGSLLVMLFGRLQTRSADAVIAFTGLDPRPNDSGKKTGQRRLSKRGWPETRRLMYAAAMSAARTKTWNGYYCAQRDKGLSTTAALVVLARKLLRVAFSLFKQQALFDPALVAGRT

SEQ ID NO: 13880 - protein, 340 aa, unidentified
  source 1..340: note = protein_bcd88eb
  REGION 6..147: note = RuvC_domain
  SITE 9: note = RuvC_P1
  SITE 52: note = RuvC_P2
  SITE 87: note = RuvC_P3
  SITE 89: note = RuvC_P4
  SITE 92: note = RuvC_P5
  REGION 211..297: note = Tnp_domain
  SITE 219: note = Tnp_P1
  SITE 249: note = Tnp_P2
  SITE 257: note = Tnp_P3
  SITE 258: note = Tnp_P4
  SITE 270: note = Tnp_P5
MEITTIGLDLAKSVFQLHAVDANGDVVWRKKLRRTALLGALAKIPPCLVGIEACATSHYWAREISALGHQVRLMPPAYVKAYLRRQKNDAADAEAICEAVQRPMMRFVPVKSAERQAVLVLHRSRELLVRQRTMLINAIRGHCAEFGLIAAQGVRNVSELMKRVRLADQAVLPEMAKNAMILLAEQLETLDMQIQRLNRRLLVWHRQDQASQRLATIPGIGVISATALAASVTDPAQFRSGREFSASLGLVPRQNSSGGKDRLGRISKMGDRYLRKLLVVGATSVVRRARTADSAASNWVCGLLERKPTRLVTVAMANKTARIVWAVLARGEVYQAKALA

SEQ ID NO: 13881 - protein, 398 aa, unidentified
  source 1..398: note = protein_ac674f2
  REGION 4..160: note = RuvC_domain
  SITE 7: note = RuvC_P1
  SITE 57: note = RuvC_P2
  SITE 97: note = RuvC_P3
  SITE 99: note = RuvC_P4
  SITE 102: note = RuvC_P5
  REGION 275..361: note = Tnp_domain
  SITE 283: note = Tnp_P1
  SITE 313: note = Tnp_P2
  SITE 321: note = Tnp_P3
  SITE 322: note = Tnp_P4
  SITE 335: note = Tnp_P5
MISVGIDVSKGKSTVCILKPCGEIVSSPFDVEHTDSSLSELANMILRLEDEVKVVMEATGAYHVPVLTFLTDKKIFVSVINPLVMKEYRCKGLRKAKTDRLDSKMIANYGLDNWFHLREYSPVTETYQALKLLGRQYAHYMRMRIESMQVLTNMLDYTMPGIKTLLKGYSEATKKNKLSDFVEHYWHYDNITKKSETQFVKSYIAWAKKKGYHQSQAKAIKIYALAKDGIPTLPSSSPSTKMLVLEAVRVLRELETTLETILSQMQDLARDLPEYPVVRAMGGVGNTIAVRLIAEIGDTRRFYNGKALVAYAGIDSPPYQSGQFNGSNRHITKRGSANLRKIGFEIMLCLKSLKPVEDPVYWFMIKKEAEGKAHKVAKMAALNKFLRIYYARVMEVYA

SEQ ID NO: 13882 - protein, 391 aa, unidentified
  source 1..391: note = protein_a24e990
  REGION 4..163: note = RuvC_domain
  SITE 7: note = RuvC_P1
  SITE 60: note = RuvC_P2
  SITE 101: note = RuvC_P3
  SITE 103: note = RuvC_P4
  SITE 106: note = RuvC_P5
  REGION 266..353: note = Tnp_domain
  SITE 274: note = Tnp_P1
  SITE 304: note = Tnp_P2
  SITE 312: note = Tnp_P3
  SITE 313: note = Tnp_P4
  SITE 326: note = Tnp_P5
MIYVGIDVAKDKHDCFITNSDGEVLFKAFTIPNNLDGFNLLYQKIESVMEDVSKVKVGLEATGHYSYNLLGYLFDKGLPACVINPLHTNLYRKSLSLRQTKTDKVDARTIASMLMSDVNLKSYSDISYHNNELKSLTRYRFNKVKERARLKTSISRLVCILFPELENLVPTLHMASIYAMLAEFPSAKHVADAHLTRLTNLLSDASKGHYGKDTAITFRKAARSSIGSNMPAKSLELKHTIKLIQELNSEIDEIENEIKIIMDQIHSPILSIPGINYRMGAMIIAEIGDFNRFDSSDKILAYAGFSPSTYQSGQLDGAYAHMEKRGSRYLRYALYNAAKYVCHWEPTFAAYLAKKRAEGKHYNVAISHAVKKLVRVIYHLEKSNQQYIKSA

SEQ ID NO: 13883 - protein, 310 aa, unidentified
  source 1..310: note = protein_ff32082
  REGION 11..103: note = RuvC_domain
  SITE 43: note = RuvC_P3
  SITE 45: note = RuvC_P4
  SITE 48: note = RuvC_P5
  REGION 205..291: note = Tnp_domain
  SITE 213: note = Tnp_P1
  SITE 244: note = Tnp_P2
  SITE 252: note = Tnp_P3
  SITE 253: note = Tnp_P4
  SITE 264: note = Tnp_P5
MNAMMSIWNLQVNTEVPVFNLLEDQINVTIANPKWVKAVKGNKDDTKDSKWIGDLFRLGLVKGSYIPCKSIRILREYTRYRYKLVSCRSSEKNRYQNALTVCNIALDSVVSDIFGKSSSSIIDYLLEQSGTTINHEEIASKLLKSLKSKEDAVIESIEGYQMTDSQKYRMRLVRAHIDYITAEINDVDKQIESLISSVPDYVKAIRLLTTIPGVKHDSAITIISEIGIDMSQFCNSKRLCCWAGLTPSNNESAGKKKSVRITRAGVYLKPALVQCAHAAVKSDKSPYYKRNMNPLLNAVARKELLLPLPV

SEQ ID NO: 13884 - protein, 416 aa, unidentified
  source 1..416: note = protein_1c45549
  REGION 12..167: note = RuvC_domain
  SITE 15: note = RuvC_P1
  SITE 64: note = RuvC_P2
  SITE 104: note = RuvC_P3
  SITE 106: note = RuvC_P4
  SITE 109: note = RuvC_P5
  REGION 275..361: note = Tnp_domain
  SITE 283: note = Tnp_P1
  SITE 314: note = Tnp_P2
  SITE 322: note = Tnp_P3
  SITE 323: note = Tnp_P4
MSFALPEALFFTGIDWAAETHAVCVLDAGGKIAAEFTIEHSADGIATLIRRLARYGDPGDLPVAIERPDGRLVDLLLEAGHPIVPVKPNAIKTWRDGEVLSGAKSDAGDAAVIAEYLRLRAHKLKVVAPYSDETRALRTIVRTRGDLVEMRVAATNQLSALLDAHWPGARAIFADVESPVSLEFLTRYPTPAAAACLGEKRMAAFCVKHGYCGRRSAAELLGRLRSAPPGTGREALTEALRDAVLAAVGVLRALNASVKNLDRSVTAHLGEHPDGAIFTSLPRSGQVNAAQVLAEWGDARQAYEHPDSVAALAGCTPVTKESGKHRAVHFRWACNKRFRVAITTFADNSRHASPWAAQIYNDARASGKDHPHATRILARAWIRVIYRCWLDGVPYDPARHGAAAALAEQPAKQIAA

SEQ ID NO: 13885 - protein, 344 aa, unidentified
  source 1..344: note = protein_7198600
  REGION 7..148: note = RuvC_domain
  SITE 10: note = RuvC_P1
  SITE 53: note = RuvC_P2
  SITE 88: note = RuvC_P3
  SITE 90: note = RuvC_P4
  SITE 93: note = RuvC_P5
  REGION 213..297: note = Tnp_domain
  SITE 221: note = Tnp_P1
  SITE 251: note = Tnp_P2
  SITE 259: note = Tnp_P3
  SITE 260: note = Tnp_P4
  SITE 272: note = Tnp_P5
MSQVTTIGLDIAKNVFHAHGADERGAMVFSRKLTRAKLLDFFAKQPTCVVALEACGGAHHWARELAALGHDARLIPPSYVKPFVKRNKSDALDAEAICEAAQRPGMRYVAVKCEEQQAAGLVFRTRDLMVRQRTQLINAIRGHLSEYGWVAPRGTAHMAMLADLLEEEAMAATLPQAARPMFKLMVEHLNELEKRVAELDREIARRAKEDEDARRLMTIPGVGPIAATAILALAPPIETFRKSRDFAAWLGLTPRQHSTGGKQRLGSISRMGERSIRRLLIIGGSSIVRQARRFGAPEGSWLERMLARKPRMLVSVALANKMARMVWALLTKREDHRAPAALAV

SEQ ID NO: 13886 - protein, 343 aa, unidentified
  source 1..343: note = protein_dfb0df6
  REGION 7..149: note = RuvC_domain
  SITE 10: note = RuvC_P1
  SITE 53: note = RuvC_P2
  SITE 88: note = RuvC_P3
  SITE 90: note = RuvC_P4
  SITE 93: note = RuvC_P5
  REGION 212..300: note = Tnp_domain
  SITE 220: note = Tnp_P1
  SITE 250: note = Tnp_P2
  SITE 258: note = Tnp_P3
  SITE 259: note = Tnp_P4
  SITE 271: note = Tnp_P5
MQAITTIGLDIAKSVFQVHGVDAEGKAMLRRQLKRRYVLAFFQKLPSCLIGIEACASSHYWSRELQALGHSVRLMPPAYVKPYVKRQKNDMADAEAICEAVTRANMRFVPIKTPEQQSGLMLHRTRHLFIRQQTSVINAIRAHLAEFGVTAPVGRKGIEELLRVIADPSDKRVPDVVRACLAALGSQLISLKKQILDFDRMIMAWHRCDQTSKRLNCIPGVGPLLATALVASVADPKVFRSGRNFSAWIGLVPKQHSSGGRARLGSISKKGDRYLRSLFVAGAFAVIRYAKLHGTKYRPWVAALLARRPTKVAAIALANKLARMAWAMMATGERYNYPASLRV

SEQ ID NO: 13887 - protein, 405 aa, unidentified
  source 1..405: note = protein_c405db7
  REGION 4..162: note = RuvC_domain
  SITE 7: note = RuvC_P1
  SITE 60: note = RuvC_P2
  SITE 101: note = RuvC_P3
  SITE 103: note = RuvC_P4
  SITE 106: note = RuvC_P5
  REGION 275..360: note = Tnp_domain
  SITE 282: note = Tnp_P1
  SITE 312: note = Tnp_P2
  SITE 320: note = Tnp_P3
  SITE 321: note = Tnp_P4
  SITE 333: note = Tnp_P5
MYYVGVDIAKDKHYVCILDESKELACKPFWIHSDILGLRELLKRLADLSLDNDDFIIGIESTGAFSENFYSYLTDANYKVILLNSYQTAKYRDFSTLKKIKNDSIDAYVIAELLATGKYKASYISNEAYHNLKVLNRLKKSLDDKIKTIKREISTVVATVNPEIEKVFPNIFTKTAIAIIKAYPTAMDIQKATPAKLTKIFRHIKGNNFSLEKAKYLIELAYSSIYSGRAYESRALMIRTNIKILELYIQEKEDIEKQIQDLIDNQLDEDSSNIENTKSIPGVANKTIAAILGECGDLRRFESAKAFIGFLGLYPTLYQSGKSLSTGTLAKRGIPIAKHALYLAAVSAVRHNTELHKLYRDKRSSGKSTKEALIIVAKKLASIIYSLFKYNQAYNPNRVLIQHRR

SEQ ID NO: 13888 - protein, 397 aa, unidentified
  source 1..397: note = protein_de82eae
  REGION 4..160: note = RuvC_domain
  SITE 7: note = RuvC_P1
  SITE 57: note = RuvC_P2
  SITE 97: note = RuvC_P3
  SITE 99: note = RuvC_P4
  SITE 102: note = RuvC_P5
  REGION 274..361: note = Tnp_domain
  SITE 282: note = Tnp_P1
  SITE 312: note = Tnp_P2
  SITE 320: note = Tnp_P3
  SITE 321: note = Tnp_P4
  SITE 334: note = Tnp_P5
MIAVGIDVSKSKSTVAILNSDGSLRIKPYDMKHNHPEMNALINYLNELDEPIIILMEYTGHYHYPVLKKLTDEHFPVCLVNPYQMKKYGDTELRRSKTDKKDAIRIATYALEKSYQLVPYSVDDQKYVDLKMLSRQYSQRMSTLTINKVYLANLLDQTMPGITSILPLRSRDPETSLSMMFIKKYKSFDYICKMGKSRFLDSYSRLVKKSRNRNASHLGLAIYELATSSITTNGENEYTVLAQTQCIDLVAEAQRSADCIIAQMQTIAETLPEYKILRNMPGVGERLGPLILAEIGNVRRFHSGKALNAYAGNDAPPYQSGNFESHNRHISKRGNAALRKYCFEVMQALKLIKPQDDPVYLFLLKKEQEGKHFNVAKMAAVNKFLRIYYARVMELEQ

SEQ ID NO: 13889 - protein, 345 aa, unidentified
  source 1..345: note = protein_0d9dfec
  REGION 9..169: note = RuvC_domain
  SITE 12: note = RuvC_P1
  SITE 68: note = RuvC_P2
  SITE 108: note = RuvC_P3
  SITE 110: note = RuvC_P4
  SITE 113: note = RuvC_P5
  REGION 209..296: note = Tnp_domain
  SITE 217: note = Tnp_P1
  SITE 247: note = Tnp_P2
  SITE 255: note = Tnp_P3
  SITE 256: note = Tnp_P4
  SITE 269: note = Tnp_P5
MTNILKQVVGIDVAQDELVVSLGRMDQNVQITIYAFKQFANKLSGFKELEKWVKKHTDQQVTVRYVMEATGIYHEKLAYYLTDQGHEVSIVLPNKISNYMRTLDTKTVTDKTASQAICQFGLERKHEVWQQPKKIFRDLKQLTRERDQIIAERTVSKNQLHAEQAEAFPNDKSISRLKQRIQLCNSQEKEIKEDIAAIIKQDKELAERITNVATIPGVGKLTVVICIAETNGFDLVENKRQVTSYGGLDVEEKESGTSVKKKPKISKKGNRHLRKAMHMPALTAIRYDDRFRAIYARLVSKHGIKMKAAVAIQRRLLELIYTLWKTNEKYEKNHIHQSIENTQVV

SEQ ID NO: 13890 - protein, 344 aa, unidentified
  source 1..344: note = protein_7a983cc
  REGION 5..152: note = RuvC_domain
  SITE 8: note = RuvC_P1
  SITE 55: note = RuvC_P2
  SITE 92: note = RuvC_P3
  SITE 94: note = RuvC_P4
  SITE 97: note = RuvC_P5
  REGION 212..300: note = Tnp_domain
  SITE 220: note = Tnp_P1
  SITE 250: note = Tnp_P2
  SITE 258: note = Tnp_P3
  SITE 259: note = Tnp_P4
  SITE 271: note = Tnp_P5
MDHFAGLDVSVKDTSVCIVDDTGKIVRELKVASEPDALLAVLTDPAYHFKRIGLEAGPLSQWLFSALAEADLPVICVETRHMRAVLKAQINKTDRNDARGIAQMIRVGLYRPVHVKTLRSQKLRMLLTHRQLLQSKAIAVDNDLRGTLRNFGLKVGIVGAARFEARIRELVQGLPDLAVLIEPLLVVRRVLREQIAVLHRRLLAVVRDDEVCRRLMTAPGVGPVVALTYRATVDVPARFRKSKSVGAVFGLTCSRDQSGERDRAGAISRCGDKMMRAMLYEAAQSMLVRSTRWSWLKAWAMQIARRRGKKKAVVALARRLAVILHRIWVDGTEFKWTRETVPAA

SEQ ID NO: 13891 - protein, 407 aa, unidentified
  source 1..407: note = protein_e619e25
  REGION 3..158: note = RuvC_domain
  SITE 6: note = RuvC_P1
  SITE 55: note = RuvC_P2
  SITE 95: note = RuvC_P3
  SITE 97: note = RuvC_P4
  SITE 100: note = RuvC_P5
  REGION 266..352: note = Tnp_domain
  SITE 274: note = Tnp_P1
  SITE 305: note = Tnp_P2
  SITE 313: note = Tnp_P3
  SITE 314: note = Tnp_P4
MFCGIDWASERHAVCVLDDAGRKATAFEIAHTGDGLDHLVTRLGRFGDPAALPVAIERPDGRLVDRLLEAGHPVVPVQPNAIKAWRDAEILSGAKSDPGDAALLAEYLRLRHHRLRVLQPFSAQTRALRAVVRTRDDLVDQRVAATNQLAACLDAFWPGAKAVFADVESPIALDFLTRYPTPESAARLGEQRMAAFCVKHGYCGRRPAAELLARLRAAPAGLTGTVEVEARRDAVLAMVGVLRALNQAIKDLDRAVVAHLGEHPDAEIFTSLPRSGQISAAQVLAEWGDCRQAYDGPDAVACLAGAAPVTKRSGKHTAVHFRWACNKRFRKAITTLADNSRHASPWAAKVYTDAIARGCDHPHAVRVLARAWIRVIWRCWMDGVPYDPAKHGAIRNLAEMAALAPEG

SEQ ID NO: 13892 - protein, 339 aa, unidentified
  source 1..339: note = protein_d2166de
  REGION 6..148: note = RuvC_domain
  SITE 9: note = RuvC_P1
  SITE 52: note = RuvC_P2
  SITE 87: note = RuvC_P3
  SITE 89: note = RuvC_P4
  SITE 92: note = RuvC_P5
  REGION 211..297: note = Tnp_domain
  SITE 219: note = Tnp_P1
  SITE 249: note = Tnp_P2
  SITE 257: note = Tnp_P3
  SITE 258: note = Tnp_P4
  SITE 270: note = Tnp_P5
MQVTTIGIDLAKHVFQVHGITEDGEVVFNRAIRRAQLMQFFINLEPCLIGMEACGSSHYWARELTKLGHDVRLIPANYVKPYVKRGKSDANDAEAICEAVTRPTMRFVAPKSEEQQAVLFLHCARDLIVRQRTQLSNMLRSLLAEFGVIIPQGTGAAVKYAKGVLEGEKPALPQIAIDVLKQLSHQLVAMHLRFRWYEMRMRLHSKLDKRVMLLRTIPGVGPVTASAIVATIGDAKQFKNGRQFAAWLGLTPLNMSSGGKERLGRITKMGDRYIRRLLVTGMTARLRQMKVNPDRVDPWAIGLLERKPARLATVAMANKTARIVWAVLTKNEYYRPHTA

SEQ ID NO: 13893 - protein, 323 aa, unidentified
  source 1..323: note = protein_b1a1b3c
  REGION 11..160: note = RuvC_domain
  SITE 14: note = RuvC_P1
  SITE 61: note = RuvC_P2
  SITE 101: note = RuvC_P3
  SITE 103: note = RuvC_P4
  SITE 106: note = RuvC_P5
  REGION 197..281: note = Tnp_domain
  SITE 205: note = Tnp_P1
  SITE 234: note = Tnp_P2
  SITE 242: note = Tnp_P3
  SITE 243: note = Tnp_P4
  SITE 254: note = Tnp_P5
MSSGSEPGPYVGIDVSKGRLDVCVRRGGARQEGFAVANDQEGIDALARRLLGTPPALVVLESSGGFERPAATTLAREGVAVAVVNPRQARDFARATGRLAKTDRLDAEALARFAEAVRPEPRALPDEEALLLGEILDRRRQIVGMLVAEKNRLSTLASEPVRRRVRAHVRWLEKELDRTDCDLQAAVEASETWRENEALLRSVPGVGPVLARTLLAELPELGTLTHRRLAALAGVAPFSRDSGTLRGRRAVWGGRARVRGALYMGALVAARHNPTIREFYERLVKKGKPKKVALVACMRKLLAILNAVMRDRTGWRSIHALSP

SEQ ID NO: 13894 - protein, 393 aa, unidentified
  source 1..393: note = protein_705b3b9
  REGION 4..163: note = RuvC_domain
  SITE 7: note = RuvC_P1
  SITE 60: note = RuvC_P2
  SITE 101: note = RuvC_P3
  SITE 103: note = RuvC_P4
  SITE 106: note = RuvC_P5
  REGION 266..355: note = Tnp_domain
  SITE 274: note = Tnp_P1
  SITE 304: note = Tnp_P2
  SITE 312: note = Tnp_P3
  SITE 313: note = Tnp_P4
  SITE 328: note = Tnp_P5
MICVGIDVAKNKHDCFILNSEGEVLADVFTIPNNAEGFGTLLQTIRRCARPEDKIKVGLEATGHYSYNILGFLLDNGLDTYVINPLHTNLYRKSLSLRKTKTDRVDVRTIAAMLMSDVDLKSYTDTAYHNEELKSLTRYRFDKVRERAKLKQSVSRLVTILFPELEKLVPTLHMASVYALLSEFPGARQVAGAHLTHLKAVLHDSSKGRYGRDMATTLRDAARCSVGSVMPAKSLELQHTIRLIRELDTEIEDIEATIQSMMEEIHSPITTIPGIGVRMGAMILAEIGDFSRFGSPDKILAYAGMSPSTYQSGQLSLSGAYSHMEKRGSRYLRYALYNATKYVCLWDPTFAAYLSKKRAEGKHYNVALSHATKKLVRLIYALEKSQQPYNTAV

SEQ ID NO: 13895 - protein, 270 aa, unidentified
  source 1..270: note = protein_f881a1b
  REGION 1..71: note = RuvC_domain
  SITE 14: note = RuvC_P3
  SITE 16: note = RuvC_P4
  SITE 19: note = RuvC_P5
  REGION 136..223: note = Tnp_domain
  SITE 144: note = Tnp_P1
  SITE 174: note = Tnp_P2
  SITE 182: note = Tnp_P3
  SITE 183: note = Tnp_P4
  SITE 195: note = Tnp_P5
MPAKYVRPYSKGQKNDFRDAEAIAEAVQRPTMKFVATKTAEQLQALHRVRERLVSQRTGVINQIRAFLLERGVAVRQGLRFLRAELPRILTAPCDAPSPRMLRVIEDLAGDWRRLDERIKGLSSEIEVLARQDKSCERLMTVPGIGPIIASAMVAAIGTGDAFSKGRDFGAWLGLVPKQISTGDRTILGSISKRGNRYLRTLFVQAAWVVLVRVGPKHWERYGLKSWIEAAKKRLHHNVLAIALANKLARIAWSVLAHGRTFEASNIQAA

SEQ ID NO: 13896 - protein, 391 aa, unidentified
  source 1..391: note = protein_2188b9a
  REGION 4..163: note = RuvC_domain
  SITE 7: note = RuvC_P1
  SITE 60: note = RuvC_P2
  SITE 101: note = RuvC_P3
  SITE 103: note = RuvC_P4
  SITE 106: note = RuvC_P5
  REGION 266..353: note = Tnp_domain
  SITE 274: note = Tnp_P1
  SITE 304: note = Tnp_P2
  SITE 312: note = Tnp_P3
  SITE 313: note = Tnp_P4
  SITE 326: note = Tnp_P5
MIHVGIDVAKDKHDCFIVSSEGEVLQDVFTVPNTMTGFDDLFQRIRAVSGNLDKVKVGLEATGHYSYNILGFLLDKGLHTFVINPLHTNLYRKSLSLRKTKTDKVDARTIASMLMSDVNLKSYTDTAYHNEELKSLTRYRFDKVKERAQLKQSIARLVTILFPELEKLVPTLHMVSVYAILREYPGARQVAAANLTHLKTLLSDASKGHYGREKAIEIRDVARCSIGSRMPAKSLELRHTIKLIQELDAEIVEIEVEIKSIMDELQSPILTIPGISYRMGAMILAEIGDFSRFDSPDKILAYAGLSPSTYQSGQLTSSYSHMEKRGSRYLRYAIFNATKFVCHWDPTFAAYLAKKRSEGKHYNVAISHAAKKLVRLIYALEKSGQAYCSVT

SEQ ID NO: 13897 - protein, 297 aa, unidentified
  source 1..297: note = protein_7767200
  REGION 5..152: note = RuvC_domain
  SITE 8: note = RuvC_P1
  SITE 55: note = RuvC_P2
  SITE 92: note = RuvC_P3
  SITE 94: note = RuvC_P4
  SITE 97: note = RuvC_P5
  REGION 212..296: note = Tnp_domain
  SITE 220: note = Tnp_P1
  SITE 247: note = Tnp_P2
  SITE 255: note = Tnp_P3
  SITE 256: note = Tnp_P4
  SITE 268: note = Tnp_P5
MKYYAGLDVSVKETSICIVDQTGKICREVKVTSHPDDLIAVLKDPAWNMERIGLEAGPLSQWLFEGLARAGLPVICIETRHTKAFLKAQPNKSDRNDARGIAQMMRVHLYRAVRVKTLTSQKRRALLTARKLLQDKAIAIENDLRGLLRNFGLKVGVVGSAKFEARIRELVEGTLDLVEIVEPLLDARRKLREHFATLHRKLLMIARDDEVCRLLMTIPGVVAVAYTATIDIPQRFKNSKAVGPILGLTPVLNQSGESHRVGRVSLCGDGMMRTLLYDAAQVLLNRVAKWSWLKAWR

SEQ ID NO: 13898 - protein, 405 aa, unidentified
  source 1..405: note = protein_57b3785
  REGION 4..160: note = RuvC_domain
  SITE 7: note = RuvC_P1
  SITE 57: note = RuvC_P2
  SITE 97: note = RuvC_P3
  SITE 99: note = RuvC_P4
  SITE 102: note = RuvC_P5
  REGION 271..357: note = Tnp_domain
  SITE 279: note = Tnp_P1
  SITE 310: note = Tnp_P2
  SITE 318: note = Tnp_P3
  SITE 319: note = Tnp_P4
MICVGNDWASDHHDVCVMDEHGTTLATRRLPENAAGVTAMHDLLARFAHDPTEVVVGIETDHGMWVAALVAAGYQVYAINPLSVSRYRDRHHVGGTKSDKADAKTLADLVRTDRHNHRLVAADTVEVKAITVMARTHQNLVWARSAQQNVLRAQLGAYYPAAVDAFGGDLAHKDCLAVLRRAPTPRQGAALTVAAIRSALKKGGRQRNTDTRAREIQQALRGGGHLSAPEALTAAYAATVTVTVNMLTTLNTQIDQLETSMAQSFRAHPDAEIYLSMPGVGDITGARMLGEFGDDPERYATAKSRRNYAGTSPRTIASGKGHVVLARHIRNTRLNAAAMAMAQSALTGSPGARVYYDSLRDQKKSHPQALRALANRLIGILHGCLKHRTLYNEHTAWNHRANLAA

SEQ ID NO: 13899 - protein, 323 aa, unidentified
  source 1..323: note = protein_bc6a81a
  REGION 9..153: note = RuvC_domain
  SITE 12: note = RuvC_P1
  SITE 56: note = RuvC_P2
  SITE 96: note = RuvC_P3
  SITE 98: note = RuvC_P4
  SITE 101: note = RuvC_P5
  REGION 191..276: note = Tnp_domain
  SITE 199: note = Tnp_P1
  SITE 228: note = Tnp_P2
  SITE 236: note = Tnp_P3
  SITE 237: note = Tnp_P4
  SITE 248: note = Tnp_P5
MAKHIMICAGIDTGKDKLDVAVDGSSERLQVDNTVEGRQELVEWLKGHKVKRIGIEASGGYERAVVAELRRKRFVVVLFQPKQVRAYATFHQLLAKNDTIDAALIAMCTAAVKTIHPAPDPRLQPFAEHLTMIDQITEDIARLKNRLESCRDTRIQGVWKAQIALLTKSKRAELKALLATIRKHPDLAARLDLIYSVAGCGLPTAVAVLVRMPEVGNITRGPAAALGGLAPYDDDSGNRAGARHIEGGRERLRRALYTAALAASFRWNPQLKALYARLIAAGKGHKCALIACARKLLVTINAVVARGTPWVAELPQLAKRPAA

SEQ ID NO: 13900 - protein, 344 aa, unidentified
  source 1..344: note = protein_9121dcb
  REGION 6..148: note = RuvC_domain
  SITE 9: note = RuvC_P1
  SITE 52: note = RuvC_P2
  SITE 87: note = RuvC_P3
  SITE 89: note = RuvC_P4
  SITE 92: note = RuvC_P5
  REGION 210..296: note = Tnp_domain
  SITE 218: note = Tnp_P1
  SITE 248: note = Tnp_P2
  SITE 256: note = Tnp_P3
  SITE 257: note = Tnp_P4
  SITE 269: note = Tnp_P5
MQITTIGLDLAKHWFQVHGVDAAGKPVVKRRLRRSEVVEFFKSLGPCLVGMEACATAHHWARELIALGHEVKLMPPAYVKAYVKRNKNDAADAEAICEAVTRPSMSFVPIKDVDQQSVLMLHRARALLIRQRTMLVNALRAHMAEFGIIAPQGLRNVEQLIDAISDARTALPELARSILQLIVAQLNDTAARVRLLEARLAKWHRTNAVSRLLASVPGVGIMGASAIAATVTDPSLFRSGREFAAWLGMTPRQNSSGGKERLGGMSKRGDKYFRSLLIAGAVAILRHARDRATKDAEWVRGMLARKPAKVVAVALANRTARIVWAVMRRGSAYRAKESLGQAAA

SEQ ID NO: 13901 - protein, 320 aa, unidentified
  source 1..320: note = protein_a1bb22d
  REGION 9..152: note = RuvC_domain
  SITE 12: note = RuvC_P1
  SITE 56: note = RuvC_P2
  SITE 96: note = RuvC_P3
  SITE 98: note = RuvC_P4
  SITE 101: note = RuvC_P5
  REGION 191..276: note = Tnp_domain
  SITE 199: note = Tnp_P1
  SITE 228: note = Tnp_P2
  SITE 236: note = Tnp_P3
  SITE 237: note = Tnp_P4
  SITE 248: note = Tnp_P5
MAKRTTICAGIDTGKRKLDVALDCSSEQLQVENTAEGYKTLLEWLGRHKVKRVGIEASGGYEQAVVAELRRKRLGVVVFQPAQVRAYAKYRGQRAKNDRIDAALIAACTAAVNEIHPAPDARFSALAVHLTLIEQIGEDIARCKNRLESCRDMRIQKLWKEDITHLVKRKRAEFKALVAAIREHRDLAERLDLIYSVGGAGLPTAVAILVRMPEIGQLSREQAAALAGLAPYDDDSGEHTGARHIEGGRKRLRRALYAAALAGSFRWNPQLMALYKRLIAAGKGHKRALVACARKLLIFINAVVTRGTPWQADAPAAQAA

SEQ ID NO: 13902 - protein, 339 aa, unidentified
  source 1..339: note = protein_fd7387a
  REGION 16..175: note = RuvC_domain
  SITE 19: note = RuvC_P1
  SITE 74: note = RuvC_P2
  SITE 114: note = RuvC_P3
  SITE 116: note = RuvC_P4
  SITE 119: note = RuvC_P5
  REGION 290..339: note = Tnp_domain
  SITE 298: note = Tnp_P1
  SITE 328: note = Tnp_P2
  SITE 336: note = Tnp_P3
  SITE 337: note = Tnp_P4
MSNKVIFNLDELFISVGIDVGADFSWMSIALPNQQFVGKPYKILHNSIDSLTTAVSKIKEAEELYSLESRIFLESTGIYHYPLFCYLRDKGFNCSVINPIITKNSTNINIRKVHNDRFDSKKAALVGLKPDLKVSLMPSDLALNCRNLCREYYDLMDNRSAYVNKLQGELRMAFPQYLSIFSKVTINTSLTLLETYTSPSAFLEADKQEIIDIIKSTARFGLTYAQNKYNAIIQAATDANQFGYIIDSNIKRIRLYISFIRKYDEEINNILESLHELVDANEDADFVKQIHLIETFKGAGFLSAVSIMGEIGDFSAFSKPKQLFVYFGLDPAVKQSGKI

SEQ ID NO: 13903 - protein, 320 aa, unidentified
  source 1..320: note = protein_f18ad75
  REGION 10..159: note = RuvC_domain
  SITE 13: note = RuvC_P1
  SITE 55: note = RuvC_P2
  SITE 95: note = RuvC_P3
  SITE 97: note = RuvC_P4
  SITE 100: note = RuvC_P5
  REGION 190..277: note = Tnp_domain
  SITE 198: note = Tnp_P1
  SITE 227: note = Tnp_P2
  SITE 235: note = Tnp_P3
  SITE 236: note = Tnp_P4
  SITE 248: note = Tnp_P5
MAMRVEKFIIGVDVAKVELVSYCEETAQQHSLKNTKPEIRKWLALQPANTAICVEATNVYHLDLVEMAYEKGFAVYVVDGYQLSNYRKGIGGRAKTDASDACLLARFLDREGSLLRPWSPPPAVYSKLQSLLRRRAALVSARTSLTQSWGNEASLKDAFNSFAKHFESLDLLIQKRLKTLVREAGLSEQVARCQAVEGIGFLTAVALVTAFIRGDFKRSDSFIAFLGMDLKVAESGQKSGRRCLTKRGCSEVRRLLHNAAMAASKTAAWKEVYEHYRNTGKATTQALVILSRKLARIAFALMKTQGEYMSKGGKKHCPQP

SEQ ID NO: 13904 - protein, 347 aa, unidentified
  source 1..347: note = protein_ae7c82e
  REGION 6..148: note = RuvC_domain
  SITE 9: note = RuvC_P1
  SITE 52: note = RuvC_P2
  SITE 87: note = RuvC_P3
  SITE 89: note = RuvC_P4
  SITE 92: note = RuvC_P5
  REGION 211..299: note = Tnp_domain
  SITE 219: note = Tnp_P1
  SITE 249: note = Tnp_P2
  SITE 257: note = Tnp_P3
  SITE 258: note = Tnp_P4
  SITE 270: note = Tnp_P5
MKIATIGLDLAKTLFQVHGVDSQGHIVVRKQLRRADVLPFFAKLEPCVVGMEACGSSHYWGRELTKLGHTVRLIAPQFVRPYVKNNKTDAADAEAICEAVNRPNMRFVPIKTQAQQTMLSLHRARAGLVKSRTALANQIRGLLSEFGIVLPQGIRLLGQRAIEALSNREYEHCEQFRTLIQILVEHLRELGNKAAELEGRIRAMHRTDEAGQLLETIPGVGPLTASALAASIGNPRAFRDGRELAAWLGLVPRQHSSGGKPRLLGISKRGDTALRTLLIHGARAVIRMAATKPEMADSWVMKLCRRRHENIAAVALAAKNARTAWALLVRKQVYQVSHVPIRSGVTA

SEQ ID NO: 13905 - protein, 315 aa, unidentified
  source 1..315: note = protein_d632b63
  REGION 12..162: note = RuvC_domain
  SITE 15: note = RuvC_P1
  SITE 57: note = RuvC_P2
  SITE 97: note = RuvC_P3
  SITE 99: note = RuvC_P4
  SITE 102: note = RuvC_P5
  REGION 192..276: note = Tnp_domain
  SITE 200: note = Tnp_P1
  SITE 229: note = Tnp_P2
  SITE 237: note = Tnp_P3
  SITE 238: note = Tnp_P4
  SITE 250: note = Tnp_P5
MAMPVSVAKPIVGVDVAKDELVIYHAETDRLEAIPNTKAAIKKWLKELPAPVDVAIEATNIYHQEFADLAYAQGCVIYMIGGYELSHYRKGVKVRAKTDALDARLLARYLNNEGHQLHPWTPPSPLYCRLISLFRRRAALVQARVSLKQSWSNEPLLKTAFEHQIKAMQRLEILLEKTIQTQLEAAGLGAQLKRCMKVEGIGLLSGARLLTSFQRGDFRNADAFIAFLGLDLRISDSGKKKGRRCLSKRGDPEARRLMHNAAMSARRTAAWKGFYEALRARGLSTTEALVALARKLARVVFALLKNQSEYLPKGI

SEQ ID NO: 13906 - protein, 345 aa, unidentified
  source 1..345: note = protein_717e67e
  REGION 5..152: note = RuvC_domain
  SITE 8: note = RuvC_P1
  SITE 55: note = RuvC_P2
  SITE 92: note = RuvC_P3
  SITE 94: note = RuvC_P4
  SITE 97: note = RuvC_P5
  REGION 212..299: note = Tnp_domain
  SITE 220: note = Tnp_P1
  SITE 250: note = Tnp_P2
  SITE 258: note = Tnp_P3
  SITE 259: note = Tnp_P4
  SITE 271: note = Tnp_P5
MEYYAGIDVSLESASLCVVDATGQIVCEAKLASEPEVLIGWFRDLGLAVTRIGLEAGPLSQWLYAGMRDAGLAVELLETRHVRNAFKAMPVKTDRKDARGIAQLMRLGWFRPVHCKSLPAQEVRALLTARKLLQTKNHDVEMSLRGVLRGFGLKVGRTTPRTFAGRIRELVTGHATLSTVAEALLSARGTLFEQCQKLEKRLRSLAREDGRARLLMTAPGVGTIVALTYAAAIDDPSRFRSSKAVGAHFGLTPKKYQSGETDVTGRISKIGDGGVRTALYEAANVILTRPVKGSTLRSWAMRVATRAGMRKAKVALARKLAVVLHRMLADGASFLADKAAVAAAR

SEQ ID NO: 13907 - protein, 408 aa, unidentified
  source 1..408: note = protein_ed543dc
  REGION 5..164: note = RuvC_domain
  SITE 8: note = RuvC_P1
  SITE 61: note = RuvC_P2
  SITE 101: note = RuvC_P3
  SITE 103: note = RuvC_P4
  SITE 106: note = RuvC_P5
  REGION 272..358: note = Tnp_domain
  SITE 280: note = Tnp_P1
  SITE 311: note = Tnp_P2
  SITE 319: note = Tnp_P3
  SITE 320: note = Tnp_P4
MRLFVGDDWAQDHHDVEVMDEAGKVLGRRRLPEGAAGMAQLHGLVGGFLGEDADAAEVMVGIETDRGPWVAALAAAGYVVFAVNPLQAARFRERHGVSGAKSDAGDAHALADMVRTDSHQLRPAAGDSPEAGGVKVLARTHKTMIWERTREVQRLRHQLREYFPAALEAFADLDAPEALELLAKAPEPARAARLTRAQVSAALKRAGRRNITERATAILAALHGEQLGQPEALTAAYAVTVRALVAVIITLNDQVKALEQQVRNHFGRHPDAEVILSQPGMGPVLGARVLAEFGDDPRRYADGKARRNYAGTSPVTRASGKRKVVAARFVHNDRLLDALHAQAFSALTASPGARAFYDQQRASGHGHNDALRRLANRLVGILHGCLKTRTCYDEDTAWAHRQQTQQAA

SEQ ID NO: 13908 - protein, 343 aa, unidentified
  source 1..343: note = protein_f80960d
  REGION 7..149: note = RuvC_domain
  SITE 10: note = RuvC_P1
  SITE 53: note = RuvC_P2
  SITE 88: note = RuvC_P3
  SITE 90: note = RuvC_P4
  SITE 93: note = RuvC_P5
  REGION 212..299: note = Tnp_domain
  SITE 220: note = Tnp_P1
  SITE 250: note = Tnp_P2
  SITE 258: note = Tnp_P3
  SITE 259: note = Tnp_P4
  SITE 271: note = Tnp_P5
MQSISTIGLDIAKSVFQVHGVDAAGQVVIRRQLRRQQVVAFFQKLPPCLVGIEACASSHHWSRELKTLGHTVRLMPPAYVKPYVKRQKNDSTDAEAICEAVTRPNMRFVPTKTVEQQSCLMLHRARHLFIRQQTAVINSIRAYLAEFGIVAPIGRRGVEQLLEVVADTADRRLPEVARACLAALGSQLRALKAHILEFDRRIIAWHRSHATSKRLDAIPGVGPALATALVASVADANAFRSGRDFSAWVGLVPKQNSSGGKDKLGSISKQGDRYLRSLFTAGALAVIRYAKIHGTGHRRWLTALLARRPTKVAAIALANKLARMAWAMMARNECYKEPAALTA

SEQ ID NO: 13909 - protein, 343 aa, unidentified
  source 1..343: note = protein_cf8e43a
  REGION 6..148: note = RuvC_domain
  SITE 9: note = RuvC_P1
  SITE 52: note = RuvC_P2
  SITE 87: note = RuvC_P3
  SITE 89: note = RuvC_P4
  SITE 92: note = RuvC_P5
  REGION 211..297: note = Tnp_domain
  SITE 219: note = Tnp_P1
  SITE 249: note = Tnp_P2
  SITE 257: note = Tnp_P3
  SITE 258: note = Tnp_P4
  SITE 270: note = Tnp_P5
MQVVRIGLDLAKYVFEVHGVDSLGKVAVRKTLRRDAVARFFANLPRCLVGMEASNGAHYWARVLSDLGHEVRLISPQFVTPYVKSNKNDRNDAEAICEAVGRPSMRFVPPKSTDQLAVQAVHRIRRRLVADRVRLVNQIRGLLSEHGIVIARDISQLRRSLAVIVGNGDDGLSGMVRSLMRELQAEMAEIDDRVATYDRRIREIFRSSEQCQRLGKIEGIGPVTATALIAAVGDRTCFKNGRQFAAWLGLVPKQRSSGGRARLFGISKRGDRYLRTLMIHGARAALGKAAGKQDPRSLWLGKLRQRRHPNVAAVALANKNARIVWAMLSGGTFYEHAPSVKAA

SEQ ID NO: 13910 - protein, 343 aa, unidentified
  source 1..343: note = protein_7fb0567
  REGION 6..147: note = RuvC_domain
  SITE 9: note = RuvC_P1
  SITE 52: note = RuvC_P2
  SITE 87: note = RuvC_P3
  SITE 89: note = RuvC_P4
  SITE 92: note = RuvC_P5
  REGION 212..295: note = Tnp_domain
  SITE 220: note = Tnp_P1
  SITE 250: note = Tnp_P2
  SITE 258: note = Tnp_P3
  SITE 259: note = Tnp_P4
  SITE 271: note = Tnp_P5
MDIQVLGIDLGKNSCSIVGLDATGSVVMRRRMRRQSIVELAAKMPGCVVAMEACCGAHHLGRLLAAQGHKVRLMSPEYVRPYVKAQKNDDRDAEAIAEAATRPTMRFVALKTAAQLDVQVLHRVRDRLVSQRTALTNQIRSILLERGIVVPQGRRSLLEALEAVSSGPDGAGVGPRVRLLLDDMLDQWRTLDRRIVALDDEFADMARNDPAARRLATIPGIGVLNATALVAAIGDGRTFSRGRDLSAWLGLVPCQATTGGKPKLLGITKRGSKYLCKLLIQGARAALPSLARTPTPLGTWLRGLLSRAHGNKVVVALASKLARIAWAMLRNETDFAANRLVAV

SEQ ID NO: 13911 - protein, 340 aa, unidentified
  source 1..340: note = protein_8e25d82
  REGION 7..147: note = RuvC_domain
  SITE 10: note = RuvC_P1
  SITE 53: note = RuvC_P2
  SITE 88: note = RuvC_P3
  SITE 90: note = RuvC_P4
  SITE 93: note = RuvC_P5
  REGION 212..299: note = Tnp_domain
  SITE 220: note = Tnp_P1
  SITE 250: note = Tnp_P2
  SITE 258: note = Tnp_P3
  SITE 259: note = Tnp_P4
  SITE 271: note = Tnp_P5
MSNRIVIGLDLAKDSTAAVALGGQGREQWRRTLRRQRLLPFLGRQAPCIVAMEACAGAHYLARQAQQYGHEVRLYPPKHIKAYQRGQKNDYNDALAVAEAAQHGRLRSVPVKTVEQQDDVLVVQQRRQLKREQVRLGNHIRALLVERGLVLPKGTAALRRRLPSLLEDADNGLTPTVRRVLNGIYRRWLALLEELAWYDQELERQAREEDARQRLCEMPGVGAVIAGALKAWMGDGKQFRRGRDASAALGLVPRQHSTGGRQVLGGISKRGDRYTRAQLINGAQAVLRQAHRKDDALHRWVVRLQATRGHNKAVTALANKLVRIAWVILARGERYSPRYA

SEQ ID NO: 13912 - protein, 411 aa, unidentified
  source 1..411: note = protein_893e29f
  REGION 4..160: note = RuvC_domain
  SITE 7: note = RuvC_P1
  SITE 57: note = RuvC_P2
  SITE 97: note = RuvC_P3
  SITE 99: note = RuvC_P4
  SITE 102: note = RuvC_P5
  REGION 274..361: note = Tnp_domain
  SITE 282: note = Tnp_P1
  SITE 312: note = Tnp_P2
  SITE 320: note = Tnp_P3
  SITE 321: note = Tnp_P4
  SITE 334: note = Tnp_P5
MNAIGIDVSKGKSMISVLRPLGVTVAQPFEVAHTALALNKLADYIGSLDGESKVIMEHTGRYYEPIANVIHERGLFVSAVNPLLIREYGGNSLRRVKTDKADARKIAKYGLDNWAELREYTPMDAIRYELKTLNRQFQLASKNRTACSNNLVALMDQSYPGVRGWFDSPVRKDGSQKWIDFAMTFWHMDCVRCASQAAFVERYRKWCKRNGYNFDAVKAERIHRETKDMVALVPKSDTTKLLVQENATQLTSISRMGEVLRAEMNRLAAQLPEYPVVMGMYGVGESLGPQLMAEIGDIRRFAGKQSLVAFAGVDPMPNQSGAKDIRSNRSSKRGSPYLRKTLFIIMTVLLQKAPADVSVYQFLDRKRAEGKPYYVFMTAGANKFLRVYYGKVRDYPASLNTACSPSSVDPE

SEQ ID NO: 13913 - protein, 340 aa, unidentified
  source 1..340: note = protein_171ce46
  REGION 6..148: note = RuvC_domain
  SITE 9: note = RuvC_P1
  SITE 52: note = RuvC_P2
  SITE 87: note = RuvC_P3
  SITE 89: note = RuvC_P4
  SITE 92: note = RuvC_P5
  REGION 211..297: note = Tnp_domain
  SITE 219: note = Tnp_P1
  SITE 249: note = Tnp_P2
  SITE 257: note = Tnp_P3
  SITE 258: note = Tnp_P4
  SITE 270: note = Tnp_P5
MNVTTIGIDLAKSVFQLHGVDADGGIVFRKKLRRSAVLDFLRDRSPCLIGLEACATAHYWAREISALGHDVRLIPPAYVKPYVKRQKNDAADAEAICEAVTRPNMRFVPIKSADRQGVLMLHRTRDLLMRQRTMTFNAVRAHLAEFGIITAQGPHKILALITAIQAGEVPGLPQIAAVALESLATQLDNLAGEIRRLDRRLMSWHRADETSQRLETIPGVGIITATALAASVPDPSVFKTGRQFAAFLGLVPRQNSSGGKDRLGRISKMGDGYLRRLLVVGATSVVRRANTNTSATGTWVRCLLERKPVRVATVAVANKTARIAWAILARGETNRAPMAA

SEQ ID NO: 13914 - protein, 348 aa, unidentified
  source 1..348: note = protein_48be344
  REGION 19..150: note = RuvC_domain
  SITE 54: note = RuvC_P2
  SITE 89: note = RuvC_P3
  SITE 91: note = RuvC_P4
  SITE 94: note = RuvC_P5
  REGION 213..299: note = Tnp_domain
  SITE 221: note = Tnp_P1
  SITE 251: note = Tnp_P2
  SITE 259: note = Tnp_P3
  SITE 260: note = Tnp_P4
  SITE 272: note = Tnp_P5
MKLSGMRQLDLAKAGVFKVHGGDLHGKPCLRRQLRRAELLTFFVNLEPCLIGMEACGSAHCWARKLSQMGHTVKLMAPQFVKPYVKTNKNDAADAEAICEAVTRPNMRFVAIKTEQQQALLAIHRARQGFVKARTAQANQIRGLLAEFGIVIPKGLCNLGPRLASLSDESAGQLPGSFCSLLQRLAENLKELDRQVQDLEKEIQLWHAQNEASRRLAEIPGIGPITASALVASIGDARCFKNGRQLAAWMGLVPRQHSSGGKQVLLGISKRGDGYLRALLIHGARAVLRHAEHKVETATSWLGHLLSRRNKNIAAVALANKNARRVWALLMHDGRRFRADYVPAGAGT

SEQ ID NO: 13915 - protein, 341 aa, unidentified
  source 1..341: note = protein_e39b0e2
  REGION 7..149: note = RuvC_domain
  SITE 10: note = RuvC_P1
  SITE 53: note = RuvC_P2
  SITE 88: note = RuvC_P3
  SITE 90: note = RuvC_P4
  SITE 93: note = RuvC_P5
  REGION 210..296: note = Tnp_domain
  SITE 218: note = Tnp_P1
  SITE 248: note = Tnp_P2
  SITE 256: note = Tnp_P3
  SITE 257: note = Tnp_P4
  SITE 269: note = Tnp_P5
MEKVTIIGIDLAKRVFQVHAAAKDGRPVLRKKVSRSQLLGFLAKQPPAVVAMEACATAHDWGRAISGLGHDVRLVPPIYVKPFVRRQKNDAADAEAIVEAASRPTMRFVALKTEEQQARSMIFRTRDLLVRQRTQLVNALRGHLAEHGIVAAHGLAKVKVLATAMRDTGSLHPLVCELGERYLEHIARLDVEIAELDKRLRRWSKDDETAKRLQSMPGMGPITAAAIEAFAPPMATFKRGRDFAAWLGLVPRQHTTGGKPRLGRTSKMGQRDIRRLLIIGAMTVVRWAVRKGAAQGSWLARMLAEKPRLVVAIALANKMARSVWAMLSKGEDYRGSALAPA

SEQ ID NO: 13916 - protein, 401 aa, unidentified
  source 1..401: note = protein_ade6841
  REGION 4..160: note = RuvC_domain
  SITE 7: note = RuvC_P1
  SITE 57: note = RuvC_P2
  SITE 97: note = RuvC_P3
  SITE 99: note = RuvC_P4
  SITE 102: note = RuvC_P5
  REGION 275..362: note = Tnp_domain
  SITE 283: note = Tnp_P1
  SITE 313: note = Tnp_P2
  SITE 321: note = Tnp_P3
  SITE 322: note = Tnp_P4
  SITE 335: note = Tnp_P5
MNAVGIDVSKGKSTVAVLRPFGEIVAEPFDVVHECSDLNKLADFIKSLPGETKVVMEYTGNYYLPIANALHNNSIFVSVVNAILVHDYGGNSIRRVKTDKKDALKLASFALDKWLDLHQYTPEEDIRKTLKLLNRQYIQYSKIQTMQKNNLISLLDMVFPKANTLFSSPSRKTDGHEKWVDFVLKFCHVDCVAKLSLSAFKAKYQSWCKKNCYYFSEAKVEDIHSFARTQVCILPLTDSVKLLITQSVTQLNSILEALAAIRNEMDRLSSQLPEYDTVMAFYGVGTVLGSQLIAEIGDVRRFHNRKAITAFAGLDAPPFQSGNLDVKSRNISKRGSSAIRKTLFQIMTVIIQNQPLDEPVYQFLDKKRSEGKPYKVYMIAAANKFLRIYYARVSEALNTAV

SEQ ID NO: 13917 - protein, 370 aa, unidentified
  source 1..370: note = protein_170469d
  REGION 8..154: note = RuvC_domain
  SITE 11: note = RuvC_P1
  SITE 57: note = RuvC_P2
  SITE 94: note = RuvC_P3
  SITE 96: note = RuvC_P4
  SITE 99: note = RuvC_P5
  REGION 226..312: note = Tnp_domain
  SITE 234: note = Tnp_P1
  SITE 264: note = Tnp_P2
  SITE 272: note = Tnp_P3
  SITE 273: note = Tnp_P4
  SITE 285: note = Tnp_P5
MLDTTTFVGLDVHARSIKAVSLDVMTGEVRAATFGYDAGAVAEWVRSVDPEARCVYESGVTGFDLQKRLSGLGVDCVVGAVSKMIKPSADRRRKNDRNDAEFLARMLSVGNVVEVWVPDDECEAARDLTRALEDARDDPSRSKQRLSKFLLRHGLVFDERTPTGRRKGNWTRAHWSWIESIGFAEGADNDVLAYYVDAVRRAAEDKARLEGLVEAETRKPRWRKRVDSLRCLKGVDTATAADLVFEAGEFSRFRNARSFAAWVGLTPSEHSSGESDRRGAITKAGNKHLRKTLVEAAWHYLTCSGRPKDLAKGQAPDRGARRHAAKGVRRLVERREALLARGVHGNKANVATARELACWVWAVGLMAEEA

SEQ ID NO: 13918 - protein, 343 aa, unidentified
  source 1..343: note = protein_809c72d
  REGION 6..147: note = RuvC_domain
  SITE 9: note = RuvC_P1
  SITE 52: note = RuvC_P2
  SITE 87: note = RuvC_P3
  SITE 89: note = RuvC_P4
  SITE 92: note = RuvC_P5
  REGION 211..295: note = Tnp_domain
  SITE 219: note = Tnp_P1
  SITE 249: note = Tnp_P2
  SITE 257: note = Tnp_P3
  SITE 258: note = Tnp_P4
  SITE 270: note = Tnp_P5
MQIRSVGIDLGKTTFHLVALGERGKVLLRKKFSQRQLVAFTANLQVSLIGLEACSGAHFLGRRLREQGHDVRLIPAQFVKPFVKSNKNDFLDAEAIAEAVERQNMRFVPIKTDDQLDLQALHRVRERLVSRRTAVINQLRAFLLERGITFRKGPATLRKQIPEILENADENLSPRMRNLLDLLWQEWRSLDQQVESLSLEMESISVTDPACQRLRQIPGVGPLVATAIVAAIGNGAAFHKGREFAAWLGLVPKQYSTGGKAKLLGISKRGNPYLRKMLIHGARAAVLRLKRERSPIGAWMNGLEARAPKNVLIVATANKLARIVWAVLSSGEDYRAAPSSLAA

SEQ ID NO: 13919 - protein, 311 aa, unidentified
  source 1..311: note = protein_de32267
  REGION 6..147: note = RuvC_domain
  SITE 9: note = RuvC_P1
  SITE 53: note = RuvC_P2
  SITE 93: note = RuvC_P3
  SITE 95: note = RuvC_P4
  SITE 98: note = RuvC_P5
  REGION 188..272: note = Tnp_domain
  SITE 196: note = Tnp_P1
  SITE 225: note = Tnp_P2
  SITE 233: note = Tnp_P3
  SITE 234: note = Tnp_P4
  SITE 245: note = Tnp_P5
MEPVYAGIDVSKATIDVAITGEKEVQSFSNDEVGVMKLVSYLKIKSPVLTIAEATGGLEKLLAGYLTEAGLQLAIVNPKRVRDFAKAKGKLAKTDNIDARIMAEFALDIKPIVRPLADKDTEEIKAIMTRRHQVREMITAERNRLYLSNTAVKPSIEEHIEWMKNQLKDIDKNLEDQIKKSPIWKEKDALLRSVPGVGKITSITLMGSLPELGKLNRKEIAALVGVAPVNRDSGTMRGRRTILGGRARVRTRLYMAALSATKHNPVIKEYYNHLLKLGKAKKLALTACMRKLLTILNAMVKNNQKWQCKTI

SEQ ID NO: 13920 - protein, 366 aa, unidentified
  source 1..366: note = protein_9e0441c
  REGION 28..169: note = RuvC_domain
  SITE 31: note = RuvC_P1
  SITE 74: note = RuvC_P2
  SITE 109: note = RuvC_P3
  SITE 111: note = RuvC_P4
  SITE 114: note = RuvC_P5
  REGION 234..318: note = Tnp_domain
  SITE 242: note = Tnp_P1
  SITE 272: note = Tnp_P2
  SITE 280: note = Tnp_P3
  SITE 281: note = Tnp_P4
  SITE 293: note = Tnp_P5
MEWPAPIPSGVELLEYQLEEGVMRITVLGIDLGKNVCSLVGLDENGAVVMRRRNRRDLLIHYVVKLPPCIIGMEACCGAHHLGRLFASTGHDVRLMSPAYVRPYVKAQKNDDRDAEGIAEAATRPTMRFVEIKTEAQLDMQTLHQSRERLVGERTTLINQLRAVLLERGIIVPQGKRKLEQYLVELLQEPETPRLSVRMRMLVADLQAQWRELDRRIAAFEAEFVAYAKESDDARKLITIPGVGVITATEFIAAIGNAETFTHGRDLAAWLGLVPRQSTTGGKPRLLGISKRGNRNLRKLLIHGARAALPHVAERDTPLGRWIKDLLVRVHPNVAVVALANKLARISWAVLRTGQQLNAKGRDVAA

SEQ ID NO: 13921 - protein, 347 aa, unidentified
  source 1..347: note = protein_8a6135f
  REGION 8..149: note = RuvC_domain
  SITE 11: note = RuvC_P1
  SITE 54: note = RuvC_P2
  SITE 89: note = RuvC_P3
  SITE 91: note = RuvC_P4
  SITE 94: note = RuvC_P5
  REGION 212..299: note = Tnp_domain
  SITE 220: note = Tnp_P1
  SITE 250: note = Tnp_P2
  SITE 258: note = Tnp_P3
  SITE 259: note = Tnp_P4
  SITE 271: note = Tnp_P5
MNASAKVVGLDIAKDVFFAVGLDGHGRRVFKRKLSRDQVLAQFAQMAPAMIGIEACAGSHYWARKLVEMGHDAKLIAAQHVRAYVTGNKNDMNDAAAIAEARSRGSTKYVPINTAAQQDLQMLHRARSALMTERVAMINRIRAFAGEYGRVFPKRVERLRDGLKAWLNDPDNGLSGMALETFRELKAQLDDKDERIQAYDRRLNQAARSELAKKLMEVPGVGPLTATAVQATIADPHHYKSARDFAANLGLVPREHSSGGKQRLYGITCRGDSYLRTLLIHGARSALRTASGKPDKLLQWATRLAERRSFNVAATALANKMARVIWALIAHGRPYVPAWSKDTPRPA

SEQ ID NO: 13922 - protein, 314 aa, unidentified
  source 1..314: note = protein_30e335c
  REGION 8..154: note = RuvC_domain
  SITE 11: note = RuvC_P1
  SITE 54: note = RuvC_P2
  SITE 94: note = RuvC_P3
  SITE 96: note = RuvC_P4
  SITE 99: note = RuvC_P5
  REGION 190..274: note = Tnp_domain
  SITE 198: note = Tnp_P1
  SITE 227: note = Tnp_P2
  SITE 235: note = Tnp_P3
  SITE 236: note = Tnp_P4
  SITE 247: note = Tnp_P5
MILPLRCVGIDVSKRMLDIFDDGIGAPERIANASQPITEQVARWRCGNVFVVFEATGIYDHVLAEVLHQAGIRFARINPARARDFARAGGRLAKTDAIDACMLAAFARAMAPTAEQAPCPERNALALLAKRRDQLVQMRAQEKNRRSEAQDRAMIDGIARHLDFLNGEIKAIEAEIKALIKAAPLIAEQARMMRSAPGIGPVACMQLIAQMPELGHVGPKQVVALAGLAPLNVDSGAYRGKRTIAGGRKRVRDALYMAALNAVRREGPFKTFYQKLRVAGKPAKLALIAVARKLLTTLNAMLRDRKCYLPPQPS

SEQ ID NO: 13923 - protein, 343 aa, unidentified
  source 1..343: note = protein_51c14bb
  REGION 6..148: note = RuvC_domain
  SITE 9: note = RuvC_P1
  SITE 52: note = RuvC_P2
  SITE 87: note = RuvC_P3
  SITE 89: note = RuvC_P4
  SITE 92: note = RuvC_P5
  REGION 210..296: note = Tnp_domain
  SITE 218: note = Tnp_P1
  SITE 248: note = Tnp_P2
  SITE 256: note = Tnp_P3
  SITE 257: note = Tnp_P4
  SITE 269: note = Tnp_P5
MQITTIGLDLAKHWFQVHGVDAAGKVVVKRRLRRAEVVEFFKTLEPCLVGIEACATAHHWARELIALGHEVKLMPPAYVKAYVKRNKNDAADAEAICEAVTRPSMRFVPVKDADQQSVLMMHRARNLLVRQRTMLVNALRAHLAEFGVIAPQGLRHVEQLIAAIEAESTALPELARSILRLIVSQLNDTQAKIQQVEAKLAQWHRNSRLSKLLATIPGVGIMGASAIAATVCDPNLFRSGREFAAWLGMTPRQNSSGGKERLGRTSKRGDKYIRCLLVAGAVAILRHARTRATKDAEWVRGMLARKPAKVVAVALANRTARIVWAVMKRGDGYKAKEIVGQAA

SEQ ID NO: 13924 - protein, 325 aa, unidentified
  source 1..325: note = protein_be4563f
  REGION 7..149: note = RuvC_domain
  SITE 10: note = RuvC_P1
  SITE 54: note = RuvC_P2
  SITE 92: note = RuvC_P3
  SITE 94: note = RuvC_P4
  SITE 97: note = RuvC_P5
  REGION 197..284: note = Tnp_domain
  SITE 205: note = Tnp_P1
  SITE 235: note = Tnp_P2
  SITE 243: note = Tnp_P3
  SITE 244: note = Tnp_P4
  SITE 257: note = Tnp_P5
MQNQIIIGIDISAATLDICISAKDQKSVVIKNEVADIRKFFNAYPFENLIVGMENTGRYNWALYEVLKDLHHRVYIISPLHLKKSLGLVRGKSDKIDAVRIAAFTAKNHTELSQWKPSSPAIQKLKILLTERNARVKSKRQLLKQQYDYTKMKHLGLDKALRELNQQQLMLIDRQILLIEHEIEQLIKVDEQMNKHAKLMRSVPGVGKVLCWMMLAKTENFTTLMEPRKMACYSGVVPFANQSGTSIRGKQRVSSYADKTIKTVLHLAAMSAIRLKNDLKEYYLRKIAEGKNKMSVLNAVRNKIVHRIFAVIKNQLPYQTHLVIS

SEQ ID NO: 13925 - protein, 342 aa, unidentified
  source 1..342: note = protein_9dd641b
  REGION 7..149: note = RuvC_domain
  SITE 10: note = RuvC_P1
  SITE 53: note = RuvC_P2
  SITE 88: note = RuvC_P3
  SITE 90: note = RuvC_P4
  SITE 93: note = RuvC_P5
  REGION 209..294: note = Tnp_domain
  SITE 217: note = Tnp_P1
  SITE 247: note = Tnp_P2
  SITE 255: note = Tnp_P3
  SITE 256: note = Tnp_P4
  SITE 268: note = Tnp_P5
MNNVAIAAIDLGKHTFHLHAQDDRGHEVYRKKFTRTALTRHLANLAPCTVVMEACGGAHFMAQEVAKLGHTPKLIAPHLVRPYVKSNKNDFADAEAICEAATRPTMRFVPPKTQAQQALAMSNSLRESFIKDRTATVNRIHAALLEVGVSLAPGFKTIKELPALLEVSSFSERIKKNLMLLHGHFNYLDGQVKSLDKEVECQAAEDDLAARLMTMPCVGPITSSALAAELGDGKQFKCGRGYAASIGLVPKQHSTGDKTVLLGISKRGDRNQRRLLIQCARVYLMQLDRQKGALADWVRQLLASRHHSNLVVCALANKLARIAWAIAAHHTEFDAGPAAMNA

SEQ ID NO: 13926 - protein, 342 aa, unidentified
  source 1..342: note = protein_9f6b814
  REGION 7..149: note = RuvC_domain
  SITE 10: note = RuvC_P1
  SITE 53: note = RuvC_P2
  SITE 88: note = RuvC_P3
  SITE 90: note = RuvC_P4
  SITE 93: note = RuvC_P5
  REGION 211..296: note = Tnp_domain
  SITE 219: note = Tnp_P1
  SITE 249: note = Tnp_P2
  SITE 257: note = Tnp_P3
  SITE 258: note = Tnp_P4
  SITE 270: note = Tnp_P5
MSEITTVGLDLAKNVFQAHGADASGQAVLRKKLRRDQVLSFFSQLPSCIVAMEACGGAHFWGREIGKLGHEVRLIPPAYVKPFVKRQKNDAADAEAICEAAQRPTMRFVPVKSEETQGSAMVFRIRELLIRQRTQAINALRGHLGEFGQIVPQGAGNAARLIAMIEDPDSGLPTEALPTLDVLVAALRHLETEIGKLDAEISRRAKGNEVARRLMTIPGIGPLIATAIATLAPPPEIFRTGRDFAAWLGLTPRQHSTGGKQRLGATTKMGERSLRRLLIIGANSVIIKRHVHASARPGTWLGGILTRKPPMLVRVALANKMARIVWALMAHGDVYKAPAAAA

SEQ ID NO: 13927 - protein, 411 aa, unidentified
  source 1..411: note = protein_be300eb
  REGION 5..164: note = RuvC_domain
  SITE 8: note = RuvC_P1
  SITE 61: note = RuvC_P2
  SITE 101: note = RuvC_P3
  SITE 103: note = RuvC_P4
  SITE 106: note = RuvC_P5
  REGION 272..358: note = Tnp_domain
  SITE 280: note = Tnp_P1
  SITE 311: note = Tnp_P2
  SITE 319: note = Tnp_P3
  SITE 320: note = Tnp_P4
MRLFAGDDWAEDHHDIEVMDAAGKVLAKRRLPEGAAGMSQLHELIGRFLPEDADEVEVVIGIGTDRGPWVAALVAAGYTVFPVNPLQASRYRERHGVSGAKSDQGDSHMLADMVRTDSHQLRPAAGDSPEAAGVKVVARTHKTLIWDRTRQVQRLRHQLREYFPAAIEAFEDLDAPDVLELLGKAPDPARAARLTRAQISAALKRARRRNIADKTDAILAALRGEHLTQPAALTVAYAATVRSLVAVITTLNEQAKLLEEQVKEHFGRHPDAEIYQSQPGIGAILGARVLGEFGDDPRRYVSAKSRKNYGGTSPITRAPGKKKVVAARFIRNDRLIDALMSWAFASLNASPGARAFYDQQRAKGLEHNDALRRLANRLVGILHGCLKTRTLYDEATARGHRENLPQSSVAA

SEQ ID NO: 13928 - protein, 407 aa, unidentified
  source 1..407: note = protein_a125899
  REGION 4..163: note = RuvC_domain
  SITE 7: note = RuvC_P1
  SITE 60: note = RuvC_P2
  SITE 100: note = RuvC_P3
  SITE 102: note = RuvC_P4
  SITE 105: note = RuvC_P5
  REGION 271..357: note = Tnp_domain
  SITE 279: note = Tnp_P1
  SITE 310: note = Tnp_P2
  SITE 318: note = Tnp_P3
  SITE 319: note = Tnp_P4
MLFVGDDWAEDHHDVEVQDETGRRLGRARLPEGVSGVARLHALIGEHLVEDAEPDQVAIGIETDRGPWVQALIAAGYVVYAINPRQVARYRERHGTSGAKSDAGDAHALADMVRTDHHQLRAVAGDSEQAQAVKVVTRAHQTLIWDRQRHMLRLRAALREFFPAALEAFPELIAPDTLELLSKAPDPDRAARLSLAQITSVLKRAGRRRVEDRAAAIQAALRTEQLAQPPAVAAAYAATVRSLASVIAAFNTEITVMDEQVSACFGQARDAEIYLSQPGMGQILAARALGEFGDDEHRYATAKNRKNYAGTSPITRQSGKKTTVLARFVRNNRLVNALHQQAFCALKASPGARAYYDQLRARGMSHHAALRQLANRLVGILHGCLKTRTPYDEHTAWTPPNHDQAAA

SEQ ID NO: 13929 - protein, 401 aa, unidentified
  source 1..401: note = protein_7f84cac
  REGION 7..172: note = RuvC_domain
  SITE 10: note = RuvC_P1
  SITE 63: note = RuvC_P2
  SITE 103: note = RuvC_P3
  SITE 105: note = RuvC_P4
  SITE 108: note = RuvC_P5
  REGION 272..357: note = Tnp_domain
  SITE 280: note = Tnp_P1
  SITE 310: note = Tnp_P2
  SITE 318: note = Tnp_P3
  SITE 319: note = Tnp_P4
  SITE 330: note = Tnp_P5
MKPHLCVGIDVGCKAHRVGIARPDGSILEEFDISHSDVGFQEFFRRVEEQKERLSLPVAVAMEGFNGYARPFDRLVQEKGYRLFNVNNMKLAQFKKIFPGPAKTDAIDARKIVELFILQDHLPMAKNALQEVVAAPAVNEKLKRLSRRRRGLVIEKTRVLNRMQSDLQAVCPELLAATPDADNLWFLRFITSREDLQQLARLRRTTVLQIRGIGQKYAGIIQEWQVRAKFSSEVEYVGPMIIEDARRILELHDRIHALDQAMEGLIDGSEIARRLATLPGFGKTSIAELAGEIGTQRRFVSEGSLALYLGMSPLTHQSGKISSTRSPRQVNRRAKAAMMTAVAHHARCVPQSAAYYDRKRSEGKTHNQAIRSLGRHLVRVIWAMLRDGRDYEIREDVHPMT

SEQ ID NO: 13930 - protein, 278 aa, unidentified
  source 1..278: note = protein_58b00ff
  REGION 5..151: note = RuvC_domain
  SITE 8: note = RuvC_P1
  SITE 53: note = RuvC_P2
  SITE 91: note = RuvC_P3
  SITE 93: note = RuvC_P4
  SITE 96: note = RuvC_P5
  REGION 211..278: note = Tnp_domain
  SITE 219: note = Tnp_P1
  SITE 249: note = Tnp_P2
  SITE 257: note = Tnp_P3
  SITE 258: note = Tnp_P4
  SITE 270: note = Tnp_P5
MNQYIGLDVSLKDTAISIREDGKRIWRGKCPSDPKLLVQIIRKKAPRAQRIVFETGPLSTWFYHALTGEGLPAICIEARHAQKVLNETLNKTDANDADGLAQLAEAGFYKAVRVKSFDAMRARTLVAAREQLLYISTQLGNQIRGLMKTFGLIIPKAKGRVFDGDVRKLLDGNSELAKIILPLLEAWHDIRKRAADLSRQLLIAARASQAAKLLMTIPGVGAVTAVSYVTAIENPENFRTSRSVGAWLGLTTRRYQSGEVDYDGHISRRGQSFTGAAL

SEQ ID NO: 13931 - protein, 405 aa, unidentified
  source 1..405: note = protein_8ce7a4c
  REGION 11..165: note = RuvC_domain
  SITE 14: note = RuvC_P1
  SITE 62: note = RuvC_P2
  SITE 102: note = RuvC_P3
  SITE 104: note = RuvC_P4
  SITE 107: note = RuvC_P5
  REGION 273..359: note = Tnp_domain
  SITE 281: note = Tnp_P1
  SITE 311: note = Tnp_P2
  SITE 319: note = Tnp_P3
  SITE 320: note = Tnp_P4
  SITE 332: note = Tnp_P5
MEPSTTPDIIIGLDVGKTGHHACALTTTGERIYDKPLPQDEAALREILASMQAHGSVLMVVDQPNTIGALPIAVARDCGCTVGYLPGLAMRKAADLYPGRSKTDRRDAFIIADTARTMPHTLRAVDRDDETLAALKMLAGFDDDIAKDATRTKNRLRSVLTQIHPALERVFAGEILSRTLVLDLLIHYGGPTKLAAAGRGRVLKWMRNRAKKDPAALVDAIFAALAEQTVTVPGTAAAELVIPQLAANIKALQAQRDTIAEQVEEMLESFPLAQVLMSMPGVGIKTASNILLSIGDCSDFADAAHLAAYAGIAPITRRSGTSIRGEFPTRTGNKRLKNAMFRSAWIASNCHPASRDYYLRKRAEGKKHNAAVMCLARRRCNVIYALLTRREFFREIPARTIATAA

SEQ ID NO: 13932 - protein, 337 aa, unidentified
  source 1..337: note = protein_1037342
  REGION 6..148: note = RuvC_domain
  SITE 9: note = RuvC_P1
  SITE 52: note = RuvC_P2
  SITE 87: note = RuvC_P3
  SITE 89: note = RuvC_P4
  SITE 92: note = RuvC_P5
  REGION 211..298: note = Tnp_domain
  SITE 219: note = Tnp_P1
  SITE 249: note = Tnp_P2
  SITE 257: note = Tnp_P3
  SITE 258: note = Tnp_P4
  SITE 270: note = Tnp_P5
MKITTIGLDIAKRFFHVVCCNDQGRLVRKKMLKRAQVLAFFQNHPSCLVAIEACATSHYWAREIQKCGHKVKLIPPQHVKAFLIGNKNDYNDALAIAVAAKQPHIKSVGIKSLEQQDNQAQHKARELSIRQRTALCNQIRGLIAEYGIILNKGVNNIRKNIPLMLDDETKSLSEAFKTILRQLQTQLNVLDSCIEAYGKLIVETVKTNDICQRVQTIPGFGPMVSSAYFNEVGNGSNYRRGRDVSASLGIVPRQHSSGGKDTLLGISKRGNSYLRCLLIQGAKAVVSRANTKNDKLSQWINRLVQTRGHNRACVAYANKMARMAWAITVSGEEYSTV

SEQ ID NO: 13933 - protein, 402 aa, unidentified
  source 1..402: note = protein_89c0452
  REGION 4..160: note = RuvC_domain
  SITE 7: note = RuvC_P1
  SITE 57: note = RuvC_P2
  SITE 97: note = RuvC_P3
  SITE 99: note = RuvC_P4
  SITE 102: note = RuvC_P5
  REGION 274..361: note = Tnp_domain
  SITE 282: note = Tnp_P1
  SITE 312: note = Tnp_P2
  SITE 320: note = Tnp_P3
  SITE 321: note = Tnp_P4
  SITE 334: note = Tnp_P5
MNCVGIDVSKGKSMIAVMRPFGEVVISPFEVRHTASELSELTKLLKSLDGETRVVMESTGNYHAPVAWLLHDAGLYVSVVNAMLVHDYGNNSLRRAKTDKKDAVKLANYGLDHWLTLPRYVPEEDTRLLLKNCYRQYQQYSKVQTMLKNNLISLLDAVFPEVNRLFSSHPRPDGSEKWVDFVATFWHCQCISELSPKAFSAKYMKWCKKHGYNFSQEKAVELHTKARSCIGAMPRNDTTKLLVQQAVAQLQTTSVALASLKQEMHSLAASLPEYPVVMGMFGIGPALGPQLMAEIGDVRRFHSKKALVAFAGIDAPPCQSGQMDVRSRSISKRGSAALRRTLFLVMGIYLQNAPLDEPVYQFMDKKRSEGKPYRVYMMASANKFLRIYYASVTAYLNSLERI

SEQ ID NO: 13934 - protein, 342 aa, unidentified
  source 1..342: note = protein_81cc70a
  REGION 6..148: note = RuvC_domain
  SITE 9: note = RuvC_P1
  SITE 52: note = RuvC_P2
  SITE 87: note = RuvC_P3
  SITE 89: note = RuvC_P4
  SITE 92: note = RuvC_P5
  REGION 210..294: note = Tnp_domain
  SITE 218: note = Tnp_P1
  SITE 248: note = Tnp_P2
  SITE 256: note = Tnp_P3
  SITE 257: note = Tnp_P4
  SITE 269: note = Tnp_P5
MKDTMIGVDLAKNVFQLHGATMTGHLSFRKKLTRSRFRQFMAAQPPAVVVMEACGSASYWAREMVKFGHEVKLIAPQYVRPFVKRQKNDAADAEAIVVAAQRPEMRFVQPKSEEQQACAVLFRARERLLHQRTELVNALRSVLYEYGHIIPKGIAHIKRIESILDEPNSDLPALVREECFDLLEQIAEKTARIDVKTAKAKALSLATDTARRLQTMLGVGPQTALAISGFAPPMESFKRGRDFAAWLGLVPRQYTSGGKERLGRVSKAGQTDIRSLLIIGAMSRLTVLARKSIVEGSWLARMLRRKPLMLVAIALANKMARAIWAMMTKKEDYRNPARVVAA

SEQ ID NO: 13935 - protein, 339 aa, unidentified
  source 1..339: note = protein_c6b9d16
  REGION 6..147: note = RuvC_domain
  SITE 9: note = RuvC_P1
  SITE 52: note = RuvC_P2
  SITE 87: note = RuvC_P3
  SITE 89: note = RuvC_P4
  SITE 92: note = RuvC_P5
  REGION 210..298: note = Tnp_domain
  SITE 218: note = Tnp_P1
  SITE 248: note = Tnp_P2
  SITE 256: note = Tnp_P3
  SITE 257: note = Tnp_P4
  SITE 269: note = Tnp_P5
MKYTTVGVDIAKNVFQLHWVDAGTGEIVNRQLKRAAFLEHFANREPCLIGMEACGGSQHWARRLIEMGHQVKLMPAKFVKAFNIGNKNDPADARAIWMATQMPSKAVAVKTEAQQAILALHRLRQQKIKFRTAEMNSLRGLLAEYGEVMAKRRAALDKAIPSVLARLAERLPAMLIDSLRELWSDLERLDSQIADIERRLQAWMKEDRACRAIAAIPGVGLLTATATVATMGDAKAFSSGREFAAWLGLVPKQIGTGGRVQLLGISRRGDTYVRTLLIHGARSVLFHGKHTGTWAAQLQKRRPSNVVAVALANKIARTIWAILAHDRPYDQSYVTLKMA

SEQ ID NO: 13936 - protein, 347 aa, unidentified
  source 1..347: note = protein_7d7f033
  REGION 6..150: note = RuvC_domain
  SITE 9: note = RuvC_P1
  SITE 54: note = RuvC_P2
  SITE 89: note = RuvC_P3
  SITE 91: note = RuvC_P4
  SITE 94: note = RuvC_P5
  REGION 213..298: note = Tnp_domain
  SITE 221: note = Tnp_P1
  SITE 251: note = Tnp_P2
  SITE 259: note = Tnp_P3
  SITE 260: note = Tnp_P4
  SITE 272: note = Tnp_P5
MQITRVGVDIAKSVFHVHAVDRHDARQWEKKLKREEWIAALVERVPTEATVAMEACASAHHWARELQRRGYRVRLIAAQFVKPYVKSNKNDRVDAEAICEAAGRPSMRFVAVKSIAQQDAQAIHRIRSELIKQRTALANQIRGLVGEYGIVAPVGIVQLRRAVPCWLEDAENGLSESFRVQLARLREDLQRLDERVGEQDERIARQAKEDPVAQRLLTLRGVGPLTATALAGALGDGRAFGKGRDFAASLGLTPRQHSTGGKERLLGISKRGDPYLRKLLVHGARAVIRHATHRDDGLSRWVNGLVARKHVNVATVALANKTARMAWAIAHGNVDYDPTLATAAQTA

SEQ ID NO: 13937 - protein, 343 aa, unidentified
  source 1..343: note = protein_219df7d
  REGION 7..149: note = RuvC_domain
  SITE 10: note = RuvC_P1
  SITE 53: note = RuvC_P2
  SITE 88: note = RuvC_P3
  SITE 90: note = RuvC_P4
  SITE 93: note = RuvC_P5
  REGION 211..296: note = Tnp_domain
  SITE 219: note = Tnp_P1
  SITE 249: note = Tnp_P2
  SITE 257: note = Tnp_P3
  SITE 258: note = Tnp_P4
  SITE 270: note = Tnp_P5
MTKDTMIGVDLAKTVFQHHGASMTGELKFRKKLSRGSFAKFMADQPPAVIVMEACGSAHYWAREMSRYGHEVKLIAPHYVKPFVKRQKNDAADAEAIVIAAQRPEMRFVDPRTAEQQSRAILFRARERLVHQRTELANALRGCLYEYGHVIPKGMHQLKRIDEILNNPNSDLPDLMREECRDLMDQIAEKTVRIDARTVKIKALAAEADTARRLQTIPGVGPLTALAVEAFAPPIESFRCGRDFAAWLGLVPRQFSSGGKERLGRISKAGQADIRRLLIIGAMSRLTWLTRKSITEGSWLARMAARKPRMLVAIALANKMARTIWAVLTKNEDYRVPTRAAVA

SEQ ID NO: 13938 - protein, 322 aa, unidentified
  source 1..322: note = protein_1a0927f
  REGION 7..134: note = RuvC_domain
  SITE 10: note = RuvC_P1
  SITE 53: note = RuvC_P2
  SITE 88: note = RuvC_P3
  SITE 90: note = RuvC_P4
  SITE 93: note = RuvC_P5
  REGION 196..282: note = Tnp_domain
  SITE 204: note = Tnp_P1
  SITE 234: note = Tnp_P2
  SITE 242: note = Tnp_P3
  SITE 243: note = Tnp_P4
  SITE 255: note = Tnp_P5
MSSIHILGIDLGKHCFHAVAHSHSGKETLRRKYNRSQLLQFLVKLESTTIAFEACGGAHWLARKCVEFGHQVRLIPPQYVKPYVKGNKNDFIDASAIAEDAQVIAATHRVRDGYIKERTACMSRIGAILLEFGLSFPKGHAKMKVLFQWLADQNQPLPQSLINKLTSIHDHYSYLNEKVKTQDKKLHCISENNKNARLLKTVPGIGDLVATLCIADVSSANNFSNGRDMAAWLGLVPRQFSTGGKTKLLGMSKRGNKHLRTLFVHGARAVLSRLETTGKVFGECLINLRATKPFNVAVVALANKLARIAWAVLYHRQAFKAV

SEQ ID NO: 13939 - protein, 344 aa, unidentified
  source 1..344: note = protein_09ae6fa
  REGION 6..147: note = RuvC_domain
  SITE 9: note = RuvC_P1
  SITE 52: note = RuvC_P2
  SITE 87: note = RuvC_P3
  SITE 89: note = RuvC_P4
  SITE 92: note = RuvC_P5
  REGION 211..298: note = Tnp_domain
  SITE 219: note = Tnp_P1
  SITE 249: note = Tnp_P2
  SITE 257: note = Tnp_P3
  SITE 258: note = Tnp_P4
  SITE 270: note = Tnp_P5
MRIASIGIDLGKTTFHLVALGERNKVVVRKKFSRGQLLAYTANLPSSLIGLEACAGSHFLGTVLRQQGHEVRLIPAQFVKPYRKSNKNDFLDAEAIAEAVTKENMRFVQIKSQDQLDLQAMHRVRDRLVQRRTALINEIRGFLLERGIIFAAHPIHLRKNLPGVIEDAEQNLSPRLRWLLDRLWQEWKQIESDVQAISHEIERISDEDVRCRQLRQIPGFGPLVSTATVAAIGNGAAFRRGRDFAAWVGVVPRQFSTGGKARLYGISKRGNIYLRRMLIHGARAVLYRIKHDTGGFGQWVHRLAQRAPRNKVIVAIANKLARIAWAVLSSGKDYRHQPLQAAAA

SEQ ID NO: 13940 - protein, 342 aa, unidentified
  source 1..342: note = protein_8b347b6
  REGION 7..148: note = RuvC_domain
  SITE 10: note = RuvC_P1
  SITE 53: note = RuvC_P2
  SITE 88: note = RuvC_P3
  SITE 90: note = RuvC_P4
  SITE 93: note = RuvC_P5
  REGION 212..303: note = Tnp_domain
  SITE 220: note = Tnp_P1
  SITE 250: note = Tnp_P2
  SITE 258: note = Tnp_P3
  SITE 259: note = Tnp_P4
  SITE 271: note = Tnp_P5
MGQVTTIGLDIAKSIFQVHGVDAAGEVVLQRRLTRARLVPVFEKVGPCLVGIEACASSHHWARELRKLGHDVRLMPPSYVKAYVKRQKNDTADAEAICEAVTRPTMRFVEVKTPQQQSVMVLHGTRTMLMRQRIQLSNVIRGHMAEFGVVAPIGREGLLTLVDALYEETDDRVPAEARHCLQMLADQLRLVNAQILENDRKIRISARATDVGRRLMDIPGVGPVLASAFVATVPDPYAFRSGRSLAAWIGLVPRQNSSGGKERLGGITKQGNRYLRQLLFVGAMAVIRYAERHGTRRPWLAQLLARRTTKVAAAALANKTARMVWAIMTSGQSYREPELRAA

SEQ ID NO: 13941 - protein, 346 aa, unidentified
  source 1..346: note = protein_5f8830f
  REGION 6..148: note = RuvC_domain
  SITE 9: note = RuvC_P1
  SITE 52: note = RuvC_P2
  SITE 87: note = RuvC_P3
  SITE 89: note = RuvC_P4
  SITE 92: note = RuvC_P5
  REGION 211..301: note = Tnp_domain
  SITE 219: note = Tnp_P1
  SITE 249: note = Tnp_P2
  SITE 257: note = Tnp_P3
  SITE 258: note = Tnp_P4
  SITE 270: note = Tnp_P5
MKITTIGVDLAKELFQIHGVDAHGKAVLRKQLRRGEMAKFFANLEPCLIGMEACSSAHHWARKLGEFGHTVKLMAPQFVKPYVKTNKNDMADAEAICEAVSRPNMRFVPVKNVEQQAILSVHRAREGFVKARTAQANQIRGLLSEFGIVIPQGIRSIAKCMPGILEDAENSLPGTMRRLLERLNDHLKELGRQVEELELQIKLWHKESEASRKLEAIPGIGPITASAIVATVGNATEFKNSRQLAAWMGLVPKQHSSGGKQTLLGISKRGDTYLRTLLIHGARSIIRFAENKAEPESWLRKLMARRNKNVAAVALANKNARIIWALLAKGRTYEQNYAPAPKAATA

SEQ ID NO: 13942 - protein, 307 aa, unidentified
  source 1..307: note = protein_aeda0c5
  REGION 8..145: note = RuvC_domain
  SITE 50: note = RuvC_P2
  SITE 90: note = RuvC_P3
  SITE 92: note = RuvC_P4
  SITE 95: note = RuvC_P5
  REGION 186..270: note = Tnp_domain
  SITE 194: note = Tnp_P1
  SITE 223: note = Tnp_P2
  SITE 231: note = Tnp_P3
  SITE 232: note = Tnp_P4
  SITE 243: note = Tnp_P5
MIIHPGFVGIDVSKQYLDIFEDGRTERLPNTTQSIADHAVRWRGRFVLFEATGRYDRHLRQALEAADIAFARVNPARARDFARATGRLAKTDRIDARMLAAMAQSLGLARKGASDPEREALARAHKRRDQLVHMRQQERTRLTECDEPALRADLVAHTQWLDVQIARWDAEIERLLAQSASLAQDARRLRSIAGIGPVASTTLLALVPELGSLSPKKIAALAGLAPFNADSGQFRGLRRIRGGRKRVRDALYMAAVSAARYNLRLKPLYRRLRSAGKPAKVALIAVARKLLIIANALMRDKTTFKPA

SEQ ID NO: 13943 - protein, 317 aa, unidentified
  source 1..317: note = protein_c5eb6c0
  REGION 9..150: note = RuvC_domain
  SITE 12: note = RuvC_P1
  SITE 56: note = RuvC_P2
  SITE 96: note = RuvC_P3
  SITE 98: note = RuvC_P4
  SITE 101: note = RuvC_P5
  REGION 191..276: note = Tnp_domain
  SITE 199: note = Tnp_P1
  SITE 228: note = Tnp_P2
  SITE 236: note = Tnp_P3
  SITE 237: note = Tnp_P4
  SITE 248: note = Tnp_P5
MSKYSMNCAGIDTGKRKLDVALDGRAERLQVDNNADGHKALSAWLRRHRAKRVGIEASGGYEQAVVAELRRDHFQVIVFQPVQVRAYAKFHLQRAKNDKIDAALIAACTAAAKKIYAPPDPRLAPFSEHLTMIEQITEDIARFKTRRESCRDPRIGQFWDEEVARLKRRLRIELEQLVAAIREHRDLAERLDLIASVDGVGERTAVAILVRMPEIGTLSREQAAALAGLAPYDDDSGDQVGVRHIDGGRERLRKSLYAAALAASFRWNAQLGAMYRRLLAAGKEHKLALVACARKLLIFVNTVVARGTPWTKKTAPV

SEQ ID NO: 13944 - protein, 407 aa, unidentified
  source 1..407: note = protein_fcdfbad
  REGION 5..164: note = RuvC_domain
  SITE 8: note = RuvC_P1
  SITE 61: note = RuvC_P2
  SITE 101: note = RuvC_P3
  SITE 103: note = RuvC_P4
  SITE 106: note = RuvC_P5
  REGION 272..358: note = Tnp_domain
  SITE 280: note = Tnp_P1
  SITE 311: note = Tnp_P2
  SITE 319: note = Tnp_P3
  SITE 320: note = Tnp_P4
MRLFVGDDWAEDHHDVELMNEQGRVLARRRLPEGVAGMARLHELIGEQLGEDADDAEVIIGTETDRGPWVAALVAAGYTVYGVNPLQASRYRERHGVSGAKSDTGDAHMLTDMVRTDSHQLRAVAGDSPGAGAIKVVARTHKTLIWERTRQVQRLRHQLREYFPAALAAFEDLDAPDALELLARAPDPARAAKLTRAQISAALKRARRRDIPGKATVIMAALRGAQLGQPPAITAAYAATVRSLIAVITTLNEQVKILQGQVAAHFGQHPDAEIYLSQPGLGPVVGARVLGEFGDDPRRYVSGKARKNYAGTSPITRASGKKKMVMARFIRNDRLIDALMAQALSALGSSPGARAFYDAQRAAGVEHNAALRKLANRLVGILHGCLKTRTLYDEATAWSHREDKLAA

SEQ ID NO: 13945 - protein, 367 aa, unidentified
  source 1..367: note = protein_1909d95
  REGION 22..166: note = RuvC_domain
  SITE 25: note = RuvC_P1
  SITE 70: note = RuvC_P2
  SITE 105: note = RuvC_P3
  SITE 107: note = RuvC_P4
  SITE 110: note = RuvC_P5
  REGION 229..316: note = Tnp_domain
  SITE 237: note = Tnp_P1
  SITE 267: note = Tnp_P2
  SITE 275: note = Tnp_P3
  SITE 276: note = Tnp_P4
  SITE 288: note = Tnp_P5
MNKRTAKKQSQPLNDVSACTTVAVDLAKRVFQLAGEDAQGQVVFEQRIKSREAFQAFLGALPAGVMVLMETGPGAQAWARLLQAQGVRVRILPAQRVAEHRSGAKNDRNDTLAILRAGRDSSIAAVPVKSAAALAMQALHRARQGYVRRRTAMGNQMRGLLLEHGIALAQGEAAIARGVPRVLEDATQPLPDMLRELLDELLGEWLQLGARIDVLTGRLETHARTDETAKRLMTVRGVGPIIATALLAKQTEPERFANARQFAAYFGVVPDQHSSGQKVQLGRMSKRGDAYLRSLMIQGAHAVLRQLQPDTEQPDDRRLQRWLQRLGRKGAAVRLANRNLRILWVLLQSEQTYRRQPNLDQEAAMSH

SEQ ID NO: 13946 - protein, 351 aa, unidentified
  source 1..351: note = protein_e25c676
  REGION 6..166: note = RuvC_domain
  SITE 9: note = RuvC_P1
  SITE 68: note = RuvC_P2
  SITE 105: note = RuvC_P3
  SITE 107: note = RuvC_P4
  SITE 110: note = RuvC_P5
  REGION 212..298: note = Tnp_domain
  SITE 219: note = Tnp_P1
  SITE 249: note = Tnp_P2
  SITE 257: note = Tnp_P3
  SITE 258: note = Tnp_P4
  SITE 271: note = Tnp_P5
MKKIFIGIDVSKKTIDASVIIPSMTGDKPSLQVYGKFDNRPSGFRKMVAMVRKAAAGIDTSEWTFCCETTGGYDIALCDYITSKQMIIWREHAAEIAKIRRDHGKDDRRDSLLIAEYAWRNQDKTRPYTPKNVEILNLRHLLLYRRQLVEMRKQLVVRSNELKQIAENCEQLKFMYKDSQKLIKEITERIENCEVKMRELMSTSPTIAANFSHIISITGIGLVSTAAILIYTNNFIGITSYKKFASYCGIAPFYEDSGTTVHKRDYIGHKSNSIVRTYLTQAAQVASRFNVDMVEYKQRMALAGKPQQVIIINIANKLLRIVFSVIKNDCDYEPRHEYMRQQRIAQEKTVA

SEQ ID NO: 13947 - protein, 364 aa, unidentified
  source 1..364: note = protein_eb02028
  REGION 1..120: note = RuvC_domain
  SITE 18: note = RuvC_P2
  SITE 59: note = RuvC_P3
  SITE 61: note = RuvC_P4
  SITE 64: note = RuvC_P5
  REGION 230..316: note = Tnp_domain
  SITE 238: note = Tnp_P1
  SITE 268: note = Tnp_P2
  SITE 276: note = Tnp_P3
  SITE 277: note = Tnp_P4
  SITE 289: note = Tnp_P5
METLQQKHRLKDIIIGMEPTGHYWYSLANWLVQKGLNVVLVNPATTKRNKENRDNCPSKSDPKDALVIADVVSRGYYYEYIRQATQFQRLRTLMNDREFWVTNSVRMQNRIIRWLDIRFPEYASVFKDWTCPRSIATLKEFPSPLDLKGQSTSEVITGWRKYMKRAGGSTGIQKAAELLSKAVQSVGETVALNEAKQDLHRLLEEFERIEGILNQIAQEIALLLGEIPIASQLRSVKGLGTIYIAAILAGAGDLKQYVHGRQLLRKAGLNLAESMSGKRKGQIILSKRGDSTLRKYLYLATLTLVGTNPIFKQLHENNVQVKHMSKQKSIFKLLGKLARILVGMVHSEESFTPEKTVVQCTQAA

SEQ ID NO: 13948 - protein, 273 aa, unidentified
  source 1..273: note = protein_5e04cef
  REGION 3..100: note = RuvC_domain
  SITE 45: note = RuvC_P3
  SITE 47: note = RuvC_P4
  SITE 50: note = RuvC_P5
  REGION 145..231: note = Tnp_domain
  SITE 153: note = Tnp_P1
  SITE 182: note = Tnp_P2
  SITE 190: note = Tnp_P3
  SITE 191: note = Tnp_P4
  SITE 204: note = Tnp_P5
MLSWKGTGVYHEQAAFGLFDAGVTVSIVNPAQIKDFGRGLAVRTKTDGVDSFVPARYGALLKPAAWQPPSPEARVLQALLSRREAIAQDLRRERNRREKADATETPALIRQSINDTIDFLQKQLTKIQQDIDDHIGRHPDLQHDLELLISIPAVGKQVGSNLLSVMRRHHFNSAEQLAAYLGLVPIERQSGSSIHGRARLSKTGPARIRAVLYMAAVVATRFNPHVKAVYERLLARGKTKMAAIGAAMRKLVHLCFGVLKTRRPYQTDYVKIC

SEQ ID NO: 13949 - protein, 313 aa, unidentified
  source 1..313: note = protein_7767b72
  REGION 9..152: note = RuvC_domain
  SITE 12: note = RuvC_P1
  SITE 56: note = RuvC_P2
  SITE 94: note = RuvC_P3
  SITE 96: note = RuvC_P4
  SITE 99: note = RuvC_P5
  REGION 190..274: note = Tnp_domain
  SITE 198: note = Tnp_P1
  SITE 227: note = Tnp_P2
  SITE 235: note = Tnp_P3
  SITE 236: note = Tnp_P4
  SITE 247: note = Tnp_P5
MDNPIPQTIGIDISKATLDVYAHPAGCERQFTNTAKGHKELIAWLGQWLIDRIAYEATGAYHRQLEQALSDLPCVKLNPARARRFAQAIGTLAKTDKIDAVILARMATTLQPPVRPANTPQQAKLAELISARDGLVRDKIALQNQAKNLTLPLLKRQHKKRLDQIERHIEQVDAELATIIAADSELARRHEIISSIAGIGTRTADQLVATMPELGALDPKQAASLAGLAPVTRQSGQWKGRSFIQGGRANVRRALYMPALVAARYNPDLKAKYQSLVAAGKPAKVALVALMRKLIIIANALIKENRLWVEKRA

SEQ ID NO: 13950 - protein, 351 aa, unidentified
  source 1..351: note = protein_fb280b3
  REGION 12..154: note = RuvC_domain
  SITE 15: note = RuvC_P1
  SITE 58: note = RuvC_P2
  SITE 93: note = RuvC_P3
  SITE 95: note = RuvC_P4
  SITE 98: note = RuvC_P5
  REGION 217..302: note = Tnp_domain
  SITE 225: note = Tnp_P1
  SITE 255: note = Tnp_P2
  SITE 263: note = Tnp_P3
  SITE 264: note = Tnp_P4
  SITE 276: note = Tnp_P5
MQTNAKASPAIIGLDIAKNFFQVHGVDVAGQVVLRRKLSRGDVLAFFKNQPKALVGIEACGTGHYWAREIAALGHEVRLLPPTYVKPYGKRGKTDAADAEAICEAVTRPNMHFVPAKTPEQQAAMMMHRSRELLVGQRTALANALRGHLAELGIIAAKGIRRVADLVAELVGADAAKIPPLAKASLTCLAAQIEAVETQIDKLEALILEWHKGNEASRRLAKIPGVGPITASAVVATIGDASNFTSARHLSAAWGLTPKQNSSGGKAKQGGISKAGDAYLRRLLFIGSIAVIRSKKAQDAGSWLGRLLERRPAKVVAIAVANKTARVIWAMLRSGEAYRAADAAVAAPAAG

SEQ ID NO: 13951 - protein, 404 aa, unidentified
  source 1..404: note = protein_4c884a9
  REGION 9..161: note = RuvC_domain
  SITE 12: note = RuvC_P1
  SITE 60: note = RuvC_P2
  SITE 98: note = RuvC_P3
  SITE 100: note = RuvC_P4
  SITE 103: note = RuvC_P5
  REGION 268..354: note = Tnp_domain
  SITE 276: note = Tnp_P1
  SITE 307: note = Tnp_P2
  SITE 315: note = Tnp_P3
  SITE 316: note = Tnp_P4
MHDSTAGYAGIDWATDAHAVCVVDDHGRVIVEFEVAHTADGLGDLCRRIERAGARRAAIERPDGPVVDALLAAGLEVVVVASRSVKALRERYGTSGNKSDRSDAYVLADALRTDGHRWRSLEPDSPATVTLRTHVRARKDLVETRVAVANQLRAHLRIVFPGAVGVFRDLDSPISLRFLERFPSATRAAWLSEKRLGAWLRANGYCGRKSPADLHARLVAAPAGIDGDEGDARGAITLAYVTVLKTLRAQIDELNTRLDELLDAHPDAAIFRSLPRCATIRAATLLAEIGDCRARFPDAEALSCLAGVAPSTRASGRHRAVTFRFSSDKKLRDALCDFAGDSWRGNVWAEQRYRQLRASGKTHPHAERILARSWAHIIWRCWTDRMPYDEAKHTALQRLICEAA

SEQ ID NO: 13952 - protein, 318 aa, unidentified
  source 1..318: note = protein_27db841
  REGION 6..153: note = RuvC_domain
  SITE 9: note = RuvC_P1
  SITE 58: note = RuvC_P2
  SITE 98: note = RuvC_P3
  SITE 100: note = RuvC_P4
  SITE 103: note = RuvC_P5
  REGION 193..279: note = Tnp_domain
  SITE 201: note = Tnp_P1
  SITE 231: note = Tnp_P2
  SITE 239: note = Tnp_P3
  SITE 240: note = Tnp_P4
  SITE 252: note = Tnp_P5
MTKIVIGVDIAKKKFDVASFNDSKYKHKTFTNDEPGYADFIIWIIHLFANNKPLICMEATGAYSIPLADFMVSQGYPVSVVNPAKINAFAKSELSRAKTDKADAKLIARYASIIQPPLWIPPPHNIRMLQALVRRVEHLLEMIQMERNRLETSDITIVDSINTVLATLENELEATRKAIREHINNDSELKRRRDLLITIPGIADASIAHLLVVLSEHHGFINAKQVVAFAGLAPALRQSGQWSGNTHIAKSGDSALRKALYMPALSAWQFNPAIREFCKRLKANGKNGKAIVCAAMRKLIHLSFAILKSGQPFDPNFA

SEQ ID NO: 13953 - protein, 341 aa, unidentified
  source 1..341: note = protein_45c3620
  REGION 7..149: note = RuvC_domain
  SITE 10: note = RuvC_P1
  SITE 53: note = RuvC_P2
  SITE 88: note = RuvC_P3
  SITE 90: note = RuvC_P4
  SITE 93: note = RuvC_P5
  REGION 213..299: note = Tnp_domain
  SITE 220: note = Tnp_P1
  SITE 250: note = Tnp_P2
  SITE 258: note = Tnp_P3
  SITE 259: note = Tnp_P4
  SITE 271: note = Tnp_P5
MSDVRVIGLDIAKSVFQLHGVDDAGATVLQKRLTRARLLPFFEKLPPCLIGIEACATSHFWARELTRLGHEVKLMPAQYVKPYVKRQKNDMADAEAIAEAVTRPSMPFVGPKSPDEQSAMMLHKVRLMLTRQLTMITNAIRAHMAEFGIVAPVGRGGVDRLLAIVDDDTDERIPMQARSCLQMLVAQLRLVKLQILDNDRQVLALARSTELGCRLMEVPGIGPLVASALIACVPDPSMFRCGRNMAAWLGLVPKQNSSGGKERLGSITKAGNRYLRQMLFAGAMAVIRRAMQGTRRTWLIRLLERRRPKIAAIALANKNARIAWAMMMSGEHYREPMAIAA

SEQ ID NO: 13954 - protein, 400 aa, unidentified
  source 1..400: note = protein_943e7a8
  REGION 4..160: note = RuvC_domain
  SITE 7: note = RuvC_P1
  SITE 57: note = RuvC_P2
  SITE 97: note = RuvC_P3
  SITE 99: note = RuvC_P4
  SITE 102: note = RuvC_P5
  REGION 275..363: note = Tnp_domain
  SITE 283: note = Tnp_P1
  SITE 313: note = Tnp_P2
  SITE 321: note = Tnp_P3
  SITE 322: note = Tnp_P4
  SITE 335: note = Tnp_P5
MISVGIDVSKEKSTVCIMKPYGEIISKPFEIQHVEQELNGLSAMLLRLDDEVRVVMEATGIYHLPVLSYLQGKKIFVAVINPFEMKEYRCRGLRRVKTDKQDAITISNYGIDHWYRLKNYEADTGIYEELKLLGRQYRHYMRMRVESVLELTHLLDYTMPGIKTLLKGWNETNGKDKLSDFAEEYWHYDNITKKSEKQFINSYLKWAEKKGYHQNQDKAAKIYALAKEGIPTLSSGTPSVKILVQEAVRVLREVDNTLMRILTQMQELAKTLPEYPVVRAMGGVGNVLAPKLIAEIGDVRRFHNGKALIAYTGIDAPPYQSGQFTGTERKISKRGSSSLRKIGYEVMRCLKTHKAPEDDAVYQFILKKEREGKSKCAAKIAGLNKFLRIYYARVMEVYQR

SEQ ID NO: 13955 - protein, 392 aa, unidentified
  source 1..392: note = protein_b689bc6
  REGION 4..161: note = RuvC_domain
  SITE 7: note = RuvC_P1
  SITE 60: note = RuvC_P2
  SITE 100: note = RuvC_P3
  SITE 102: note = RuvC_P4
  SITE 105: note = RuvC_P5
  REGION 266..353: note = Tnp_domain
  SITE 274: note = Tnp_P1
  SITE 304: note = Tnp_P2
  SITE 312: note = Tnp_P3
  SITE 313: note = Tnp_P4
  SITE 326: note = Tnp_P5
MFYVGIDIAKKNHEASIINSKGELLDKSIPFSNSQAGCTKLASLLNKFEVHASNVIIGMEATGHYWVSLYSYLIDLGFTVYVINPIQSDAFRKMYIRQTKNDSKDSFIIAQIMRFGEFSTTSLADEDIMALRQLSRYRLALVDECSDWKRKCIALLDQVFPEYSKLFSDSFGVTSRELLSKYPTPEDMLSVNTDTLAELLSKASRGRFGTSKASEIQEYASNTFGVSFAKDAFAFQIKQIIAQINFIEEQLEELEIKISELLHKTNQVITTITGIGDVLGGIIIGEIGDISRFETASQLVAYAGLDVSVKQSGDFVGTQTKISKRGSPYLRRAIWLAATVAAFKDPALSVYYQSLKARGKHHLTAIGAVARKMCNIIFAVLRNNKPYVPYIK

SEQ ID NO: 13956 - protein, 404 aa, unidentified
  source 1..404: note = protein_52ea201
  REGION 5..161: note = RuvC_domain
  SITE 8: note = RuvC_P1
  SITE 58: note = RuvC_P2
  SITE 98: note = RuvC_P3
  SITE 100: note = RuvC_P4
  SITE 103: note = RuvC_P5
  REGION 275..362: note = Tnp_domain
  SITE 283: note = Tnp_P1
  SITE 313: note = Tnp_P2
  SITE 321: note = Tnp_P3
  SITE 322: note = Tnp_P4
  SITE 335: note = Tnp_P5
MLNAVGIDVSKGRSTVAVLQPGGTVIRKPFVVKHSPCELKSLAEYILSLSGETKAVMECTGRYHEPILKVLNEAGVFVSAVNPHLIKNYGNNSLRRVKSDPADAKKIASYTLDSWADLRQYSSMDTTRTQLKTLNAQMDFFIKQKVSARNNLISLLDMTYPGVNKLFDSPTRSDGTEKWVDYASSFWHVDCVRKIGLKAFTERYRAFCKRHGYNFQPGKPEELYNASKELVAVFPKDQAYKDLIQAGILQFHTASANVERMRKAMNELASSLPEYETVLSIRGVGATFGPQLMAEIGDITRFTHREALTAFAGVDPGVNESGDFKSKSNRASKVGSARLRKTLFLIMLTLLQTRPENDPVYRFLDKKRSEGKPYQVYMTAGCNKFLRIYYGKVKECMANQPKND

SEQ ID NO: 13957 - protein, 321 aa, unidentified
  source 1..321: note = protein_aea074e
  REGION 4..163: note = RuvC_domain
  SITE 7: note = RuvC_P1
  SITE 60: note = RuvC_P2
  SITE 101: note = RuvC_P3
  SITE 103: note = RuvC_P4
  SITE 106: note = RuvC_P5
  REGION 266..313: note = Tnp_domain
  SITE 274: note = Tnp_P1
  SITE 304: note = Tnp_P2
MIYVGIDVAKDKHDCFITNSDGEVVFKSFTIPNNRDGFETLFQKVQSVSDNLTKAKVGLEATGHYSYNLLGFLLDKGLPTYIINPLHTNLYRKSLSLRKTKTGKVDAYTIASMIMSDVNLKSYSDTSYHNEELKSLTRYRFDKVKERAKLKSSVSRLVCILFPKSEKLMPQLHIVSVYALLSEFPSAHAVASVHLSRLTNLLYESSRGRYSKDTAIMFRNAARNSISSNMPAKSLELKHTIKLIQKLTSEIAEIETKIKSIIDEINSPILTIPEISYNMGAMIIAEIGDFSRFNSADKILAYAGYLHPLTNQGNWIIVIPI

SEQ ID NO: 13958 - protein, 422 aa, unidentified
  source 1..422: note = protein_e8c72c4
  REGION 25..183: note = RuvC_domain
  SITE 28: note = RuvC_P1
  SITE 81: note = RuvC_P2
  SITE 122: note = RuvC_P3
  SITE 124: note = RuvC_P4
  SITE 127: note = RuvC_P5
  REGION 289..376: note = Tnp_domain
  SITE 297: note = Tnp_P1
  SITE 327: note = Tnp_P2
  SITE 335: note = Tnp_P3
  SITE 336: note = Tnp_P4
  SITE 349: note = Tnp_P5
MRAAAFGRKTSASSTDEKEAVLHFIGIDIAKKEHFAGIRAEDGAPLSRAWRFANDEGGFRSLLERLRSLGVEAEGSLVAMEATGHYWMALFAHLSAHGFRIAVVNPSLVNAFRKADTMRRTKTDAVDCFLIAEHARFKRLAPSELDPEDAEGLKLLTRYRAHLVDERTSLKNRATSVVDRVFPELSDLFDDLCSATPKALIRKYPTPASVASCDVRTLAKLVKEASRGHFGREKAEEVKAAARRSVGITFALDSFSFELKHVIDLIDHIDEQIGALEKTISEVLGRTSGKWLATVPGIGDTLAAAITAEIGDPERFEGPKQLVAFAGMDATKAESGSFVGTGEKMSKRGSHHLRFALMTAADKARMYDPYFGDYYDSMIARGKHHYVALSGVARKLCGVILVLMKEQRAYERRPSVQSEKKL

SEQ ID NO: 13959 - protein, 314 aa, unidentified
  source 1..314: note = protein_df56791
  REGION 8..149: note = RuvC_domain
  SITE 11: note = RuvC_P1
  SITE 54: note = RuvC_P2
  SITE 94: note = RuvC_P3
  SITE 96: note = RuvC_P4
  SITE 99: note = RuvC_P5
  REGION 190..274: note = Tnp_domain
  SITE 198: note = Tnp_P1
  SITE 227: note = Tnp_P2
  SITE 235: note = Tnp_P3
  SITE 236: note = Tnp_P4
  SITE 247: note = Tnp_P5
MILSLRCVGIDVSKHTLDIFDDAVGKPERIANALQAITEQVARWRCGNVFVVFEATGVYDRELAEALHRARIRFARINPARARDFARARGRLAKTDAIDAHMLAGFARTMAPASEQAPDPARNALSLLAKRRDQLVHMRAQEKNRRSETRDPAMIESIARLIDFLNGEVKAIEARIKTLIKAEPTISDDARLIRSAPGVGPVACMQLIAQMPELGRVGPKQVAALAGLAPLNVDSGLYRGKRAIGGGRKRVRDALYMAALNAVRRDGSVKAFYQKLRTAGKPAKLALIAVARKLLTTLNAMVRDRKAYLAPRPS

SEQ ID NO: 13960 - protein, 433 aa, unidentified
  source 1..433: note = protein_2fdcd35
  REGION 5..164: note = RuvC_domain
  SITE 8: note = RuvC_P1
  SITE 61: note = RuvC_P2
  SITE 102: note = RuvC_P3
  SITE 104: note = RuvC_P4
  SITE 107: note = RuvC_P5
  REGION 267..322: note = Tnp_domain
  SITE 275: note = Tnp_P1
  SITE 305: note = Tnp_P2
  SITE 313: note = Tnp_P3
MVVSVGIDVSKDKHDCFILNSEGEILSDVFTIPNSLDGFTILLQRIRDCSSSQDNIKVGLEATGHYSYNILGFLLDNGLPTYVLNPLRTNLYRKSLRLRKTKTDRVDARTIAAMLLSDAGLKPYTDTVYHNEELKSLTRYRFDKVKERAKLKSSVSRLVCILFPELEKLTPTLHMPSVYALLDEFPGAKQIAEANLTHLKAILHNASKGRYNRDKAIDIRESARASIGAVMPAKSLELRHTIRLIRELDAEIEDIEAAIQSIMNEMHSPITTIPGIGTRMGAMILAEVGDFSRFDSPDKLLAYAGMSPSTYQSRQLKNCYPHPIWRSAVPDTCAMRFTTPPSMSAYGPQPLLHTLQKSGRRANITTLRFLTLPRSWCGLFLLWRNPGSRTARQRKFLLTASTGVLTSSCFAIPFLNHLPFYHIHSFLGLTLNS

SEQ ID NO: 13961 - protein, 356 aa, unidentified
  source 1..356: note = protein_fc78d8e
  REGION 7..149: note = RuvC_domain
  SITE 10: note = RuvC_P1
  SITE 53: note = RuvC_P2
  SITE 88: note = RuvC_P3
  SITE 90: note = RuvC_P4
  SITE 93: note = RuvC_P5
  REGION 211..269: note = Tnp_domain
  SITE 219: note = Tnp_P1
  SITE 249: note = Tnp_P2
  SITE 257: note = Tnp_P3
  SITE 258: note = Tnp_P4
MSEIFTAGLDLGKNVFQAHGADAAGQPVLRKKLRRGQVPAFFSGLQPCVVAMEACGGAHFWGREISKLGCDVRLIPPAYVIPFVKRQKNDAADAEATCEAALCPAMRFVPIKSEETQRAAMVFRVRELLIRQRTQAINALRGLLSGFGQVAPQGAANASKLIAIVDDPESGLPADAASTLKVLITALTKLEAEIVKLDAGIARRAKENDVARRLMTVPGIGPLIATAIATLAPPPETFRKARDFAAWLDLTPRQHSTGGKQRLGAATTLPGHCVSQCPAGQRMGERSLRRLLIIGANSVIIKRHVHAEAKPGTWLGGMLSRKPPMLVRVALANKMARIVWALIARGGVYQSPATVA

SEQ ID NO: 13962 - protein, 344 aa, unidentified
  source 1..344: note = protein_5716796
  REGION 6..148: note = RuvC_domain
  SITE 9: note = RuvC_P1
  SITE 52: note = RuvC_P2
  SITE 87: note = RuvC_P3
  SITE 89: note = RuvC_P4
  SITE 92: note = RuvC_P5
  REGION 211..299: note = Tnp_domain
  SITE 219: note = Tnp_P1
  SITE 249: note = Tnp_P2
  SITE 257: note = Tnp_P3
  SITE 258: note = Tnp_P4
  SITE 270: note = Tnp_P5
MDITTIGLDLAKSIFQVHGVDANGRVVIRKSLRRAQMLPFFARLPSCLVGMEACGTSHYWARELIKLGHEVRLMPPAYVKPYVKRSKTDAADAEAVCEAVTRPTMRFVPVKSPEQQAALSMHRARDLLVKQRTQLVNMIRGLLAEFGINIPKGLERALLMARRIVDDEAPDVPIEAAKIVGTLSQQALDIHVRLRQIDRDLLVWQRGNDVARRLMTIPGIGPVGATALAASVTDPHQFRSGRQFAAWLGLTPLQKSSGGKERLGRITKMGDKYLRKLLIVGMTSLVRRAKDNPPTIDPRLANLLVRKPVRVATVAMANKTARIIWAIMTRGETYRASHQPALAA

SEQ ID NO: 13963 - protein, 391 aa, unidentified
  source 1..391: note = protein_c8763ba
  REGION 6..159: note = RuvC_domain
  SITE 9: note = RuvC_P1
  SITE 57: note = RuvC_P2
  SITE 98: note = RuvC_P3
  SITE 100: note = RuvC_P4
  SITE 103: note = RuvC_P5
  REGION 222..307: note = Tnp_domain
  SITE 230: note = Tnp_P1
  SITE 260: note = Tnp_P2
  SITE 268: note = Tnp_P3
  SITE 269: note = Tnp_P4
  SITE 280: note = Tnp_P5
MSRVVIGMDPHKRSATIEIIDEHEQVLAHGRFGTDTNGYRAMLAAGRRFPERVWAVEGCAGIGRHIAQRLVADGEPVLDVPAKLSARVRVFDTGQGRKTDPVDAHSVAVAGLRSPGLRAVVADDGTVALRLLVDRRDELGRARTETISRIHHLLLELVPGGAKKFLTRGQASYLLRTAPAPVGIAAQTRHQLACELIDELTTIDAKIRAADKQLRQLVAAAGSSLIQLNGIGPSGAARLIGDIANIGRFRTAAHFASWNGTAPIEASSGDQRRHRLSRAGNRRINRVLHIMAVVQLRHDTPGRAYYRRRLAEGKTTMEALRALKRHLSDVVYKRMIHDAVHARRSGTGPGGQSGATLKSSADGPVPTAASSDKSQPGPATAKRRTLLAKTP

SEQ ID NO: 13964 - protein, 339 aa, unidentified
  source 1..339: note = protein_24e4c04
  REGION 7..148: note = RuvC_domain
  SITE 10: note = RuvC_P1
  SITE 53: note = RuvC_P2
  SITE 88: note = RuvC_P3
  SITE 90: note = RuvC_P4
  SITE 93: note = RuvC_P5
  REGION 207..293: note = Tnp_domain
  SITE 215: note = Tnp_P1
  SITE 245: note = Tnp_P2
  SITE 253: note = Tnp_P3
  SITE 254: note = Tnp_P4
  SITE 266: note = Tnp_P5
MEQPITIGLDLAKNVFQVHGVSATGTVVCRRQVRRAQLLLFFSRLEPCLVGMEACAGAHHWGREIAALGHEVRLMPPAYVKPYVKRGKTDAVDAEAICEAVTRPTMRFVPVKSAETQAALLDHKTRDFLVRQRTQIINAIRAHMGEFGVVVAKGIQNIERLIAAARNVPDAARAAVDMLADQLQDTQNRIDAVTARIAESQADDPLARRLATVPGVGAISSSAFAATTPDVSAFRSGRDYAAWLGLTPRAYSSGGKERLGRISKAGNRYLRRLLYLGAMARISARRSRRTAASDAAPDWLDRMLERKPVKVVAIALANRMARTVWALIRGGESYRAALA

SEQ ID NO: 13965 - protein, 358 aa, unidentified
  source 1..358: note = protein_c8df7cd
  REGION 7..139: note = RuvC_domain
  SITE 10: note = RuvC_P1
  SITE 54: note = RuvC_P2
  SITE 89: note = RuvC_P3
  SITE 91: note = RuvC_P4
  SITE 94: note = RuvC_P5
  REGION 218..314: note = Tnp_domain
  SITE 226: note = Tnp_P1
  SITE 268: note = Tnp_P2
  SITE 276: note = Tnp_P3
  SITE 277: note = Tnp_P4
  SITE 289: note = Tnp_P5
MKEISIIGVDLAKTVFQLHGVDAEGTAVLCRHFRRNQMLEFFQRLPGGCLVGMEACASAHYWARELMKLGHEVRLMQPRYVKGYVKRGKTDKADAEAICEAVSRPSMRFVPVKSEATQALLMAHKAREFLVRQQTQVVMPEACFQHDAIRAHLGEFGIVVPQGIHNMGRLIAACDRADLPGPARKALNLLADQLADTQRKIEDLTTDVRADAAANEAARRLQTIPGIGPITASALVASLPDVSDFKSGVAIVSRTDGATKATLSAWLGLTPRPHSSGGKERLRRISKMGNRYLRRLLYLGAIAQVSARRRAEPGDDWLWNIIRRKKPKQAAIALANRMARTVYALLKNGTEFQVAEAP

SEQ ID NO: 13966 - protein, 261 aa, unidentified
  source 1..261: note = protein_997ce60
  REGION 7..148: note = RuvC_domain
  SITE 10: note = RuvC_P1
  SITE 53: note = RuvC_P2
  SITE 88: note = RuvC_P3
  SITE 90: note = RuvC_P4
  SITE 93: note = RuvC_P5
  REGION 212..261: note = Tnp_domain
  SITE 220: note = Tnp_P1
  SITE 250: note = Tnp_P2
  SITE 258: note = Tnp_P3
  SITE 259: note = Tnp_P4
MGEVITVGVDIAKSVFQIHGVDADGTVVIRKRVGRVKVLEFFAELPPCLVGMEACATAHQWARELKKLGHDTRLMPPTYVKAYVKRGKNDAADAAAICEAVTRPSMRFVPIKSVEQQSALMLHRTRDLLIRQQTQLINALRAHLAELGLVSAKGHEGLQQLVTAVAESSDERLPSNARFACLALVTQLHAAQAQINGLDKRVTLAHRANADSKRLETIPGFGVILSTAVVATMTDPKAFRTGREFAAWIGLVPRQNSTGGK

SEQ ID NO: 13967 - protein, 412 aa, unidentified
  source 1..412: note = protein_e265955
  REGION 4..160: note = RuvC_domain
  SITE 7: note = RuvC_P1
  SITE 57: note = RuvC_P2
  SITE 97: note = RuvC_P3
  SITE 99: note = RuvC_P4
  SITE 102: note = RuvC_P5
  REGION 274..361: note = Tnp_domain
  SITE 282: note = Tnp_P1
  SITE 312: note = Tnp_P2
  SITE 320: note = Tnp_P3
  SITE 321: note = Tnp_P4
  SITE 334: note = Tnp_P5
MNAVGIDVSKGKSMVAVVRPFGELVVKPYEVRHTSSELRELANSLKSLEGETRVVLEHTGRYYEPVAQMLHDAGVFVSAVNPLLIKEYGNNSLRKVKTDKADSLKIARYGLDNWVELREHTSMDTIRYQLKSMNRQYCLYTKNKVAFKNNLIALLDQTYPGVNALFDSPVRTDGSQKWVDFAASFWHVDCVRSIGESAFVERYHKWCKRHGYNFNATKVAEIYADSKELIAMLPKNPLSKVMVQEAINQLNSISKTVEVFRSEMNQLAEQLPEYPVVMGMYGVGSSLGPQLMAEIGDVRRFAHKGSLTAFAGVDPGANQSGTYEAISTRSSKRGSPELRKTLFMVMTVLLQKAPPDDPVFRFLDKKRAEGKPYYVYMTAGCNKLLRIYYGKVKEYLNAVNEPVDMDSTGLSR

SEQ ID NO: 13968 - protein, 315 aa, unidentified
  source 1..315: note = protein_ebe2315
  REGION 12..162: note = RuvC_domain
  SITE 15: note = RuvC_P1
  SITE 57: note = RuvC_P2
  SITE 97: note = RuvC_P3
  SITE 99: note = RuvC_P4
  SITE 102: note = RuvC_P5
  REGION 192..276: note = Tnp_domain
  SITE 200: note = Tnp_P1
  SITE 229: note = Tnp_P2
  SITE 237: note = Tnp_P3
  SITE 238: note = Tnp_P4
  SITE 250: note = Tnp_P5
MAMPVPVSKPIVGVDVAKNELVIYHAELDLLEVIPNNKTAIKKWLKALPGTVAVAIEATNIYHLEFADLAYEAGCVIYMVGGYELSHYRKGVNIRAKTDAQDAKLLARYLKNEADELRPWTPPSPLYRQLLSLFRRRAALVQARVSLTQSWANEPLLKASFTEQVKSMQKLEGLIEKMIGDRLKEAGLSDQLKRCLTVEGIGFLTGARLVTSFQRGDFRNADAFIAFLGMDLRVSKSGQKDNRRSLSKRGDSEARRLLHNAAMAASRTAAWKEFYQAQRARGYSTTQVLVMLARKLARVVFALLKGQSEYQPKVG

SEQ ID NO: 13969 - protein, 340 aa, unidentified
  source 1..340: note = protein_fe9a349
  REGION 7..149: note = RuvC_domain
  SITE 10: note = RuvC_P1
  SITE 53: note = RuvC_P2
  SITE 88: note = RuvC_P3
  SITE 90: note = RuvC_P4
  SITE 93: note = RuvC_P5
  REGION 212..298: note = Tnp_domain
  SITE 220: note = Tnp_P1
  SITE 250: note = Tnp_P2
  SITE 258: note = Tnp_P3
  SITE 259: note = Tnp_P4
  SITE 271: note = Tnp_P5
MSSLIFCGVDLAKHHFSLHAVDERGKVTLHKSVSRAKLLYKLANMPPMRIGLEACSGAHYWAREFIKLGHDARIMAAKYVGPYRTKGKNDLNDAIAICEAVQRPNTRFVPVKSPERQAILSIHRMREHWVRERTALINRIRALLAEFGIVFPTGRAAIHREVPLILEAAENGLPDIARAVLADCFEHLQTLNQRISEAEQSFDLVVKASPSAMRIMKVRGIGPQTATAIIATIGKGEQFDSGRDFAAWLGLVPKQYSTGGKPRLGRITKHGDKYLRTLLVHGARAAITNIGEKQDRLSNWGRDVLERRGMNRAIVALAAKNARIIWALLHNQTEYQDYAA

SEQ ID NO: 13970 - protein, 320 aa, unidentified
  source 1..320: note = protein_1dab636
  REGION 8..161: note = RuvC_domain
  SITE 11: note = RuvC_P1
  SITE 56: note = RuvC_P2
  SITE 96: note = RuvC_P3
  SITE 98: note = RuvC_P4
  SITE 101: note = RuvC_P5
  REGION 195..279: note = Tnp_domain
  SITE 203: note = Tnp_P1
  SITE 232: note = Tnp_P2
  SITE 240: note = Tnp_P3
  SITE 241: note = Tnp_P4
  SITE 252: note = Tnp_P5
MSESQVVVGIDVAKAHVDCAVLGADFGARQFANDIDGHSALAAALQPLSVALVVMEATGGYESALACALQAAGLAVAVVNPKRARDFAKGIGRLAKTDRIDAEALAELAATLARRRDLARFIRPLPDAQQQELAALVTRRRQLLTMLGAERLRLQLATVKVRPSIDALIEAIRAQLEDIDAQMQAHLQEHFAALDDLLRSARGIGPIASATLIATLPELGRLSRREISALVGVAPMANDSGTSHGRRRITGGRFQVRRVLYMATLTATIHNPTIKAHYQRLLAAGKLPKVALVACMRKLLTMLNAMVRTQRRWSDEFHRA

SEQ ID NO: 13971 - protein, 414 aa, unidentified
  source 1..414: note = protein_2d77968
  REGION 22..175: note = RuvC_domain
  SITE 25: note = RuvC_P1
  SITE 73: note = RuvC_P2
  SITE 114: note = RuvC_P3
  SITE 116: note = RuvC_P4
  SITE 119: note = RuvC_P5
  REGION 237..322: note = Tnp_domain
  SITE 245: note = Tnp_P1
  SITE 275: note = Tnp_P2
  SITE 283: note = Tnp_P3
  SITE 284: note = Tnp_P4
  SITE 295: note = Tnp_P5
MPTSPSYRFSGREEEALSKVIIGVDPHKLSATIEVLDERESVLGSGRFTTDKAGFAAMRKYVKQWSEREWAVEGSLGVGRPLAQRLLEAGERVVDVPAKLAARARLLDTGHGRKTDAHDAHSAAVAAVRAKDLRVLAPDAQLEALRMLVDHRDQLSNQRVATVNRLQRLLAELTPGQAKKDITALQAKAILASVRPRDIAGKARRRIAVDELAAWVAINKKVKELTLEIKAIVKERGSNLMDLNGVGPVVAARVLADVGDVARFADRNRFASWTGTAPLDASSGEQTRHRLSRAGNRRMNRMLHIVATTQLRYDSEGRTYYRRKLAAGKTRMEAMRCLKRRLSDAVYRQLIADARLHAALDGTGPGGHCGASLTSSAVDLPPHIDTSDQPLPGPATPTLQPPRRPRKAVALKAG

SEQ ID NO: 13972 - protein, 407 aa, unidentified
  source 1..407: note = protein_5da4ea2
  REGION 6..159: note = RuvC_domain
  SITE 9: note = RuvC_P1
  SITE 57: note = RuvC_P2
  SITE 98: note = RuvC_P3
  SITE 100: note = RuvC_P4
  SITE 103: note = RuvC_P5
  REGION 221..307: note = Tnp_domain
  SITE 229: note = Tnp_P1
  SITE 259: note = Tnp_P2
  SITE 267: note = Tnp_P3
  SITE 268: note = Tnp_P4
  SITE 279: note = Tnp_P5
MTAVMIGVDPHKGSHTAVAIDASEEPLGKLRVRASASQAQRLVAWAAAWPERTWAVEGAGGLGHLLAQQLVAAGERVLDVQPKLGARVRLLATGASNKNDPNDALSVAVAALRSRTRRPVSADDHAAVLRVWSRRHRDLGRAKNQVACRLHAVLCELVPGGVPEEITAAQAARLLRSAQPSGAGGQARGELAAELLEDMRRLEAQMRESKKKLAVAVKASGTSLTGIFGVGPVIAATVIGDADGVARFASRDHFAAYNGTAPIEVSSGNRKIYRLSLRGNRRINHAIHMAAITQIRHRHSDGRAYYDKKLTEGKTHKEALRSLKRKISNAIYARLQADAQSAASAAATGPGGQPGNDSDSSAAGSHPERQLFGQATPEPATATLRRATPRRLPTPARPAAKKIRQTS

SEQ ID NO: 13973 - protein, 325 aa, unidentified
  source 1..325: note = protein_61a06f0
  REGION 11..163: note = RuvC_domain
  SITE 14: note = RuvC_P1
  SITE 58: note = RuvC_P2
  SITE 98: note = RuvC_P3
  SITE 100: note = RuvC_P4
  SITE 103: note = RuvC_P5
  REGION 197..281: note = Tnp_domain
  SITE 205: note = Tnp_P1
  SITE 234: note = Tnp_P2
  SITE 242: note = Tnp_P3
  SITE 243: note = Tnp_P4
  SITE 254: note = Tnp_P5
MANESREPVYVGIDVSKDSLEVALADKVASVRFENDEQGVNALLEYLTSHNVAVVLLEATGGLEKRCAHAMYLAGMTVVVANPRQAHEFAKSMGYLAKTDGIDARMLSHFARTLHSSERFDKLLFKMATPQQEQLQALVTRRAQLVHMRVAETNRLNQAHALSAKSIQAVIKTLDKQIKTLDEDIGNRLKQHFAQKLKLLEGFKGIGEGTKAVLMAALPELGQLNRREIGKLVGVAPLNHDSGKMRGRRSVWGGRADVRSALYMAALSAVRFDPTIKAFYERLRVAGKPAKVALVACMRKMLSILNAVIKSNTAWEQRYPQASAA

SEQ ID NO: 13974 - protein, 344 aa, unidentified
  source 1..344: note = protein_63b9824
  REGION 6..146: note = RuvC_domain
  SITE 9: note = RuvC_P1
  SITE 52: note = RuvC_P2
  SITE 87: note = RuvC_P3
  SITE 89: note = RuvC_P4
  SITE 92: note = RuvC_P5
  REGION 211..295: note = Tnp_domain
  SITE 219: note = Tnp_P1
  SITE 249: note = Tnp_P2
  SITE 257: note = Tnp_P3
  SITE 258: note = Tnp_P4
  SITE 270: note = Tnp_P5
MQISILGIDIGKNSCSVVGVDKRAAVVVRRTMRRETLIEFVEKLPTCVIAMEACCGAHHLSRLFTARGHEIRLMSPEYVRPYVKAQKNDDRDAEGIAEAASRPTMRFVELKSQEQLDIQTLHRVRSRLVAERTTLINQMRAILLERGLVFAAGRCKFERAVDTLLEERASGLSERVHRLVAELRDEWKVLDTKIAALNAEFLSLARDNLAVRRLTTIPGIGVLSATALIAAIGNASGFDRARDLGAWLGLVPRQFTTGGKPRLLGITKRGNVYLRTLLVHGARAAMPTLSRSDTPLGQWLRGLLSRGMHRNVVIVALANKLARIAWAVLRKDCPFERAYGATAA

SEQ ID NO: 13975 - protein, 342 aa, unidentified
  source 1..342: note = protein_9919a0a
  REGION 6..147: note = RuvC_domain
  SITE 9: note = RuvC_P1
  SITE 52: note = RuvC_P2
  SITE 87: note = RuvC_P3
  SITE 89: note = RuvC_P4
  SITE 92: note = RuvC_P5
  REGION 210..294: note = Tnp_domain
  SITE 218: note = Tnp_P1
  SITE 248: note = Tnp_P2
  SITE 256: note = Tnp_P3
  SITE 257: note = Tnp_P4
  SITE 269: note = Tnp_P5
MKDTMIGVDLAKNVFQIHAASRTGELLFRKKIRRPQFLQFMASQPPALIVMEACGSAHYWARELMSVGHEVKLIAPHYVRPFVKRQKNDAADAEAIVIAARQPEMRFVVPKTEEQQARAVLFRCRERLVHQRTELVNALRATLYEFGLVVPKGITHLKSIEDFVEDENVSLPVFVRKECRDLLEQIEEQSARITEKTRAMIAVSEESTTAQRLETIPGVGPLTALAVEAFAPAMENFRNGRDFAAWLGLVPRQFSSGGKERLGRISKAGQADIRRLLIIGAMTRVNWASRKPPVPGSWLARMLTRKPRMLVAVALANKMARTIWAMLTRQENYRDPVLSAVA

SEQ ID NO: 13976 - protein, 310 aa, unidentified
  source 1..310: note = protein_ca7c54c
  REGION 5..152: note = RuvC_domain
  SITE 8: note = RuvC_P1
  SITE 52: note = RuvC_P2
  SITE 91: note = RuvC_P3
  SITE 93: note = RuvC_P4
  SITE 96: note = RuvC_P5
  REGION 187..271: note = Tnp_domain
  SITE 195: note = Tnp_P1
  SITE 224: note = Tnp_P2
  SITE 232: note = Tnp_P3
  SITE 233: note = Tnp_P4
  SITE 244: note = Tnp_P5
MKDTIGIDISKATLDAHRLIDDEARQFANSPAGLRALRRWIGTKMPDLVIYESTGAYHAAIERSFGGVLPLVKVNPLQARRFAQARGTRAKTDAVDARVLAAMGAALDLAPDVPAGKNQHDLKELQIARMALIKERTRLLNRSKTQSLTVLKRQSKARLAQIKRQLGELEDALLDLARQCPKRARAFDILCSIPGLGRVTAVAILVECPEIGTMTRKQITSLAGLAPMTRQSGQWRGKAFIQGGRKFLRDALYMPALVAARYNPDLRQKYQAMISDGKPAKVALTALMRKLIELANALVRQDREWTPKTA

SEQ ID NO: 13977 - protein, 331 aa, unidentified
  source 1..331: note = protein_4a9913f
  REGION 5..150: note = RuvC_domain
  SITE 8: note = RuvC_P1
  SITE 55: note = RuvC_P2
  SITE 95: note = RuvC_P3
  SITE 97: note = RuvC_P4
  SITE 100: note = RuvC_P5
  REGION 197..283: note = Tnp_domain
  SITE 204: note = Tnp_P1
  SITE 234: note = Tnp_P2
  SITE 242: note = Tnp_P3
  SITE 243: note = Tnp_P4
  SITE 256: note = Tnp_P5
MAVHVGLDVGSRTTAMGWRDKGRSAGAWEITQTPKGRKAAVKKLLALKPLSVVMEATGIYYLDLAIELSAAGLPVSVINPKSSRNFARLKLQHSKTDAIDAQLLAEYGERMTPRLWTPPTAAQLELRAIGRHINRLVGHRTQAKNELHALKATDTSEALLIEDEEEAIAAFDKRIERFRKAGLDLVASCPVLQGQFDNMLAAPGMGEVSTLAALAEMATLPTTLKSGQVSRHAGLDVRLTQSGTSIDKPGRLSKCGNAYLRCSMYMPALTAIRCDPYVKGFYEALVGRGKRKMQAVCAVMRKYLTGLWACMRSGEDFNTAKLFSEKHLQKA

SEQ ID NO: 13978 - protein, 423 aa, unidentified
  source 1..423: note = protein_2c7e91d
  REGION 4..157: note = RuvC_domain
  SITE 7: note = RuvC_P1
  SITE 59: note = RuvC_P2
  SITE 94: note = RuvC_P3
  SITE 96: note = RuvC_P4
  SITE 99: note = RuvC_P5
  REGION 287..372: note = Tnp_domain
  SITE 294: note = Tnp_P1
  SITE 324: note = Tnp_P2
  SITE 332: note = Tnp_P3
  SITE 333: note = Tnp_P4
MLGVGIDWAEEFHLVALGRPDEGVIEVVWVQHTPAAVDQLAARIAALEADPAEVRVVLETRHGLLVERLVDAGYTALPVNPDLVARRRGPARKKDDAEDARIACLLALDRHAALRPLIPHGELAGELRAIARDDERAARDQRRLLNRLRADLITTYPAAPQIAADDLGTPIMLKMLERWPTSAQLAATSRGELGAFARTARHGWPDRFADHLQAALAAKADHFTPRDYLVRAKAATIRLTATQLLAIATQRRAWQRRMAELLLGARPTGESGRRREERPDYAVPGGKVYLSFPGLGDRLATRVAGEIGDHICQYESNALQCDAGKAPVTRRSGKAELVVATRLACNRHLADAVQQWASCSLRGSGWARAFYDAQRGRGKHHHAALRALGNRWLEILWHCLHKGVVYDEAVHVATRNRALGKAA

SEQ ID NO: 13979 - protein, 344 aa, unidentified
  source 1..344: note = protein_e4020d4
  REGION 6..147: note = RuvC_domain
  SITE 9: note = RuvC_P1
  SITE 52: note = RuvC_P2
  SITE 87: note = RuvC_P3
  SITE 89: note = RuvC_P4
  SITE 92: note = RuvC_P5
  REGION 211..297: note = Tnp_domain
  SITE 219: note = Tnp_P1
  SITE 249: note = Tnp_P2
  SITE 257: note = Tnp_P3
  SITE 258: note = Tnp_P4
  SITE 270: note = Tnp_P5
MRITTVGIDLAKNVFQVHGVNEHGKPVLKKQLKRDQLVTFFVNLEPCLIGMEACGGAHHWARKLQCLGHEVRLMAPQFVKPYVKSNKNDAADAEAICEAVARPNMRFVPIKNIEQQSVLALHRVRQGLVKARTAQGNQIRGLLAEFGLVIPVGLANIAKRVPELIEDASNELTGSFRLLVDRLMERLKEIDKQVKELELLIRSWHRASDASRKLEKVPGIGPITASALVATIGDAKNFDNGRQVAAWLGLVPRQHSSGGKANLQGISKRGDTYLRTLLVQGARSVILSAAKKLDTTSWLHKLMERRNTNVAAIALANKNARTVWALLAHDREFRPDYSRSAVAA

SEQ ID NO: 13980 - protein, 350 aa, unidentified
  source 1..350: note = protein_0f5ac62
  REGION 13..155: note = RuvC_domain
  SITE 16: note = RuvC_P1
  SITE 59: note = RuvC_P2
  SITE 94: note = RuvC_P3
  SITE 96: note = RuvC_P4
  SITE 99: note = RuvC_P5
  REGION 218..303: note = Tnp_domain
  SITE 226: note = Tnp_P1
  SITE 256: note = Tnp_P2
  SITE 264: note = Tnp_P3
  SITE 265: note = Tnp_P4
  SITE 277: note = Tnp_P5
MTQRNKPRDAAVFGIDIGKNTFHVVGLDGTGAPIQRATFRRETLLQFFERAARTVVGMEACPGSQWLARKLKAFGHTVRIVPAKFVKPYVKSNKNDIIDAEAIAEAVTRPTMRFVEIRSPEQVDLQALHRVRDRLVAQRTRVICQMRAFCLEYGIAMHQGAGKFKADLPRVVADEENDLSPAMRRLLTELFDDVKNLEGRIKEVTGEIEDVAAADDTARRLMTVPGIGPLAATALLAAAGRGLQFRKARDMAAWIGLVPREYSTGGKTTLLGISKRGSSYLRRLLIHGARSCILHLDRSRDRLGSWIDGLQSRMHNNKATVALAAKMARVAWVVITKPGATYERRGLVAA

SEQ ID NO: 13981 - protein, 310 aa, unidentified
  source 1..310: note = protein_a9ef4e8
  REGION 1..113: note = RuvC_domain
  SITE 18: note = RuvC_P2
  SITE 53: note = RuvC_P3
  SITE 55: note = RuvC_P4
  SITE 58: note = RuvC_P5
  REGION 177..263: note = Tnp_domain
  SITE 185: note = Tnp_P1
  SITE 215: note = Tnp_P2
  SITE 223: note = Tnp_P3
  SITE 224: note = Tnp_P4
  SITE 236: note = Tnp_P5
MQLITYISKLDTCLIGMEACSGSNILGRTLRAQGHTVRLIPAQFVRPFVKSNKNDYNDAEAIAEAVQKPNMRFVPIKTEDQLDLQAIHRTRERFVTQRTRVINQIRAYLLERGIVLRTGRLYLQRQMASILEDGEQRLSGLVRRLLDILWQEWKHLDVQIAELQQQIETIAEQDQACQRLMEIPGIGPLASTLMIAAVGNGSAFRRGRDFSAWLGIVPAQATTGGKTRLLGISKRGNKYLRQLFVHGARSCKTHMNREKHPFGEWVTALEKRSHSNVASVALANKIARIAWSVLARGERYRAHDPVVQVA

SEQ ID NO: 13982 - protein, 314 aa, unidentified
  source 1..314: note = protein_4dcdf20
  REGION 8..150: note = RuvC_domain
  SITE 11: note = RuvC_P1
  SITE 53: note = RuvC_P2
  SITE 93: note = RuvC_P3
  SITE 95: note = RuvC_P4
  SITE 98: note = RuvC_P5
  REGION 188..272: note = Tnp_domain
  SITE 196: note = Tnp_P1
  SITE 225: note = Tnp_P2
  SITE 233: note = Tnp_P3
  SITE 234: note = Tnp_P4
  SITE 246: note = Tnp_P5
MTSQIAVIGIDVAKDSLSICRAPTGEVLELPNESRSIRDWLKTLPSGCSIAIEATGIYHVLIATLAHARGHRIYVINGYRLSNYRKGVGGRNKDDRSDAQLLARYLAHEQAQLDPWQPPSKVYCRLQALLHRRAVVVRSAISLRQSFSQDRELASELKPVLKRMAALERRLEKAIQCVLDEAGLTAQSKRCQKVEGIGPLTAAALTMAFLRGHFRHSDAFIAFIGLDVRLKESGLYSGRRKLTKQGDPEIRRLLHNAAMAAARTQRWKSVYQSYLARGLKKIEALTILARKLARIAFALMKTQQPYRPTADTAG

SEQ ID NO: 13983 - protein, 391 aa, unidentified
  source 1..391: note = protein_85891dd
  REGION 4..163: note = RuvC_domain
  SITE 7: note = RuvC_P1
  SITE 60: note = RuvC_P2
  SITE 101: note = RuvC_P3
  SITE 103: note = RuvC_P4
  SITE 106: note = RuvC_P5
  REGION 266..353: note = Tnp_domain
  SITE 274: note = Tnp_P1
  SITE 304: note = Tnp_P2
  SITE 312: note = Tnp_P3
  SITE 313: note = Tnp_P4
  SITE 326: note = Tnp_P5
MIYVGIDVAKDKHDCYISDSDGVELYAPFIISNTKEGFEDLFLKIKQVTDDLTKVKVGLEATGHYSYNILGFLLDKDLNVSLINPLHTNLFRKSLSLRQTKTDKVDARTICMMLSSGMALTPYSKESYHMDELKSLTRYRFDKVRERAKLKTSVTRLVTILFPELEKLVPTLHMKSVYALLYEFPGAHHIASCHLTRLKKLLSGASKGRYGRDVAITFRDAARNSIGSNMPAKSLELRHTIDLIRKLDEEINEIEASIKMIMDDIDSPILSIPGISYRMGAMILAELGDIRRFSSPDKILAYAGMSPSTYQSGQLTSSYSHMEKRGSRYLRYALFNATRFVCNWDEAYGEYLAKKRAEGKHYNVAISHAAKKLVRLIYHLMMTGETYIPAA

SEQ ID NO: 13984 - protein, 347 aa, unidentified
  source 1..347: note = protein_bfc86d0
  REGION 12..158: note = RuvC_domain
  SITE 15: note = RuvC_P1
  SITE 65: note = RuvC_P2
  SITE 101: note = RuvC_P3
  SITE 103: note = RuvC_P4
  SITE 106: note = RuvC_P5
  REGION 231..315: note = Tnp_domain
  SITE 237: note = Tnp_P1
  SITE 267: note = Tnp_P2
  SITE 275: note = Tnp_P3
  SITE 276: note = Tnp_P4
  SITE 288: note = Tnp_P5
MNSLTDLLDVVIGVDTHVLTHTAAIVDAGTGGVIAQLTVDATATGYAELVDFADEHSTLRAWAIEGTGGHGAGLARHLERSREVVVELDRPERAQRRHGAKSDPLDAIRAAREALSRPRLGTPRSPGDRQALSVLLAARRSAVASSTDAQRQVFSLVIAAPEPIRVKFRGMKLPAMLRTAAKLRLSPSWDLETRTTVTVLRSLARRALELTAEAAAHEKEILRIVRTMRPDLLDQPGIGPIVAATVLCAWSHPGRIHSEAAFAMLGGVAPIPATSGQVTHRHRLNRHGDRQLNRALHVIALSRLRYDERTRAYADRRTSQGRSRREIIRCLKRYIARDLYRLLEHPA

SEQ ID NO: 13985 - protein, 316 aa, unidentified
  source 1..316: note = protein_8c1c81f
  REGION 3..147: note = RuvC_domain
  SITE 6: note = RuvC_P1
  SITE 50: note = RuvC_P2
  SITE 90: note = RuvC_P3
  SITE 92: note = RuvC_P4
  SITE 95: note = RuvC_P5
  REGION 189..273: note = Tnp_domain
  SITE 197: note = Tnp_P1
  SITE 226: note = Tnp_P2
  SITE 234: note = Tnp_P3
  SITE 235: note = Tnp_P4
  SITE 246: note = Tnp_P5
MLIGIDVAKAELVVAARPSGERWTVTNDDQGVHHLVERLRGSTPVLIVLEATGGYELLCVGALAAAALPVVVVNPRQVRDFAKATGQLAKTDRIDADILALFAERVRPAVRALADAEARELDALLARRRQLLDMLQAERNRLGQVFGRDKRLVKQSLKSHIAFLEREVRMADTELGTMIRQSPAWREKDDLLQSVPGVGPVLSLTLLAELPELGRLSRREIAKLGGVAPLSRDSGTLRGRRFVQGGRASVRAVLYMAALVATKRNAVIRAFYQRLVTAGKPKKLALVACMRKLLTILNTMARTHERWRADLTLTTA

SEQ ID NO: 13986 - protein, 349 aa, unidentified
  source 1..349: note = protein_2bed105
  REGION 4..150: note = RuvC_domain
  SITE 7: note = RuvC_P1
  SITE 52: note = RuvC_P2
  SITE 92: note = RuvC_P3
  SITE 94: note = RuvC_P4
  SITE 97: note = RuvC_P5
  REGION 191..278: note = Tnp_domain
  SITE 199: note = Tnp_P1
  SITE 229: note = Tnp_P2
  SITE 237: note = Tnp_P3
  SITE 238: note = Tnp_P4
  SITE 251: note = Tnp_P5
MTYVGIDVSKATFMVAYSSAKSGKTKSFKNTTQGVHEFIQTLSAGEHHCVLEATGNYSALLVYLLSQAGITVSLENPLKIKNFARVMLSVNKTDETDARLIALYGEKIQPAPYKLRSDTILILKQKRTLIRQLKKQFIATRNLKGSMQALPFFDPKCKKTIESTIAFLDKQIKGMEEELASLAKNEYKKQMELLTSIKGIGVTLATALIVATGGFTYFDNAKQLTRYLGLSPTYEQSGTSVNIKGHINRNGDSSLRSQLYVAAFASLRCNAQCKACFDRLRSKGKPGKVAVIAVANKLVRQAFAVITHEKPYVDGFHSAKVINSSAEGTPCGKGLSTQPRRASKSVLIA

SEQ ID NO: 13987 - protein, 354 aa, unidentified
  source 1..354: note = protein_5a4de49
  REGION 6..159: note = RuvC_domain
  SITE 9: note = RuvC_P1
  SITE 57: note = RuvC_P2
  SITE 98: note = RuvC_P3
  SITE 100: note = RuvC_P4
  SITE 103: note = RuvC_P5
  REGION 221..307: note = Tnp_domain
  SITE 229: note = Tnp_P1
  SITE 259: note = Tnp_P2
  SITE 267: note = Tnp_P3
  SITE 268: note = Tnp_P4
  SITE 279: note = Tnp_P5
MAAVVIGIDPHKASHTAVAVDEREVALGDVRVRATAAQSERLLAWAGRWPQRIWAVENAEGLGYLLAQQLAGAGEHVVDVQPKLAARVRLLAADASSKTDPHDARSVAIVGLRSAGLPRVVVEDHAAVMRVWIRRRRHLSRLRTKVVNQLHALLCEVVPGGFAREISARQATVLLQTVHPSSAADQARVELAAEILDDLRRVDAQLRELHKRLTAVVLASKTSVTSIVGVGSIVAAMVVGITGDVSRFRTSDHFAAYAGTAPIEVSSGPHKIFRLSRRGNRQLNHAIHMAAVTQIRNRNSDGYAYYQRKIAEGKSPKMALRALKRRITTTLFDTMIRDARHQPPRHGPVGPTGT

SEQ ID NO: 13988 - protein, 369 aa, unidentified
  source 1..369: note = protein_f654425
  REGION 19..165: note = RuvC_domain
  SITE 22: note = RuvC_P1
  SITE 71: note = RuvC_P2
  SITE 107: note = RuvC_P3
  SITE 109: note = RuvC_P4
  SITE 112: note = RuvC_P5
  REGION 237..323: note = Tnp_domain
  SITE 245: note = Tnp_P1
  SITE 276: note = Tnp_P2
  SITE 284: note = Tnp_P3
  SITE 285: note = Tnp_P4
  SITE 296: note = Tnp_P5
MTRTPETSEPDQAPTPVFAGVDTHKELHVAAVIDAGETVLGTKSFPTTRTGYRAMLAWIGDFGDLARIGVEGTGSYGAGLTRHLAKAGVMILEVDRPDRSDRRRKGKDDDLDAINAARAALHGRRTSIPKSKDGAVEALRVLRITRAHAVRERRSALQLLRMSIVSAPEVLRDQVRHLTRMQLIRTLAAWRPDVSNATDPITAYRVSMKSLARRYLELTDEITDLDELINPIVQALAPQLLERVGIGIEVAGQFLVTAGDNPERMKSEAAFAMLCGASPLPASSGMTQRHRLNRGGDRQANRALHLAVISRIRLDPRTQTYVAKKTAEGHSKMEIIRCLKRYLAREVYFILNPGHQHIVPNTRQHRNAA

SEQ ID NO: 13989 - protein, 351 aa, unidentified
  source 1..351: note = protein_dbddacf
  REGION 7..149: note = RuvC_domain
  SITE 10: note = RuvC_P1
  SITE 53: note = RuvC_P2
  SITE 88: note = RuvC_P3
  SITE 90: note = RuvC_P4
  SITE 93: note = RuvC_P5
  REGION 212..296: note = Tnp_domain
  SITE 220: note = Tnp_P1
  SITE 250: note = Tnp_P2
  SITE 258: note = Tnp_P3
  SITE 259: note = Tnp_P4
  SITE 271: note = Tnp_P5
MESISIIGLDLAKRVFQVHGINAQQEVVVQKRLRRNEVVAWFATIAPCLVGVEACATAHYWGRELSKLGHQVKLIPPAYVKPYVRRQKNDRADAAAICEAVSRPTMRVVAVKTVDQQAVQVLHRSRELLIRQRTQVGNALRAHLAEFGLVFPQGNGGLALAIRAIHERSDGTIPTLAYDTLRALVEQIDALKKAVTGLEHQMLAWHRTTADSQRLATIPGIGVVTASAVLAAIGTGKQFRSGREFAAWIGLVPRQHSSGGKDRLGHISKQGNHYLRQLLVLGATAQLHGQRRERAPGGAWFDALLRRKPGRVATVALANKMARVAWAVLTKGGSYRPLGETMPEGDGMVAA

SEQ ID NO: 13990 - protein, 259 aa, unidentified
  source 1..259: note = protein_d18cef7
  REGION 1..70: note = RuvC_domain
  SITE 9: note = RuvC_P3
  SITE 11: note = RuvC_P4
  SITE 14: note = RuvC_P5
  REGION 130..215: note = Tnp_domain
  SITE 138: note = Tnp_P1
  SITE 168: note = Tnp_P2
  SITE 176: note = Tnp_P3
  SITE 177: note = Tnp_P4
  SITE 189: note = Tnp_P5
MKAYVTGNKNDFIDAEAICEAASRPRTRSVQVKSVDQQVLSTVHKLRKSLVSRRTGVINQVHGFLLEFGVIFPTGYAALERVPALMEEHNLPLLLQQAISRMLDDIRQLTSEIKALDTEIKQQVNGSDAGKRLQSIPGIGPLIASALVADVGDASIYKSSRDFSASLGLVPRQYSTGGQTTLLGISKRGDKYLRTLLMQGAQTLLYRIDKRNDALGVWARNLLARKPLNKVACALANKMARIVWALLTKGGTYNGHATA

SEQ ID NO: 13991 - protein, 342 aa, unidentified
  source 1..342: note = protein_b742056
  REGION 7..149: note = RuvC_domain
  SITE 10: note = RuvC_P1
  SITE 53: note = RuvC_P2
  SITE 88: note = RuvC_P3
  SITE 90: note = RuvC_P4
  SITE 93: note = RuvC_P5
  REGION 211..298: note = Tnp_domain
  SITE 219: note = Tnp_P1
  SITE 249: note = Tnp_P2
  SITE 257: note = Tnp_P3
  SITE 258: note = Tnp_P4
  SITE 270: note = Tnp_P5
MATVTLIGIDIGKHHFHLVAHDTKGHVLLKRQFGRHVLIDFLARHSACRIVMEACCGAHWLARKLAGFGHTVQLIAPQYVRPFVQGNKNDFLDAQAICEAASRPTMRYVAAKSPEQQALAALHRLREARIGERVQTGNQIHALLLEFGIALPQGAQGLQQARLLLREREVALPPIAWRVLEAQLSHHDQLQQQIDDWDCQITVLAKQDDVARRLMTVPGIGPITASQLAADAGQAKGYHCARDFAASLGLVPRQHSTGGKSTLLGISKRGDKALRRLLVQCAHVIMMSARRWHSAMAEWTAKLMLRRHGNVVACAVANKLARVVWAILAHGGEYRPYPETGK

SEQ ID NO: 13992 - protein, 412 aa, unidentified
  source 1..412: note = protein_ab4bc21
  REGION 5..164: note = RuvC_domain
  SITE 8: note = RuvC_P1
  SITE 63: note = RuvC_P2
  SITE 103: note = RuvC_P3
  SITE 105: note = RuvC_P4
  SITE 108: note = RuvC_P5
  REGION 274..374: note = Tnp_domain
  SITE 282: note = Tnp_P1
  SITE 312: note = Tnp_P2
  SITE 320: note = Tnp_P3
  SITE 321: note = Tnp_P4
  SITE 334: note = Tnp_P5
MNPVIGLDVSKGESQVQAFLDKGKPYRKSFSVKHTLDGLDSLLVFLEEVTKASDGMKPSVILESTGPYHSPVVQFLDEQDYVYIMVNPLVSHRSRSTNLRKVKTDPVDAYQLCELFYKEELEPHRKRGIQLLNLRNLTRQQEAIVSVSSQTKLQLQTLLDQVFPEYRGVFGDLYSRVSLNVLNTFPTSESVLKIPKSELINIISSLCKSRSNQWAEEKVEKLIEAADRNPFQHNMYDSHIFNLKILINIVLQYEEHLSKLAAEIDALAEEMEEYKIIQSIPGIGEKIAATIISEIGEIERFNHPKKLVAFAGIDPSVYSSGRFTATQNKITKRGSSRLRRSLYMAVRCGIRDTRKQKTTDEIIARNKKLREFYDKKRDEGKPFRVAVIACVNKLLHWIYALLKSKTAFQDIA

SEQ ID NO: 13993 - protein, 340 aa, unidentified
  source 1..340: note = protein_865082e
  REGION 6..148: note = RuvC_domain
  SITE 9: note = RuvC_P1
  SITE 52: note = RuvC_P2
  SITE 87: note = RuvC_P3
  SITE 89: note = RuvC_P4
  SITE 92: note = RuvC_P5
  REGION 208..293: note = Tnp_domain
  SITE 216: note = Tnp_P1
  SITE 246: note = Tnp_P2
  SITE 254: note = Tnp_P3
  SITE 255: note = Tnp_P4
  SITE 267: note = Tnp_P5
MKNTIIGVDLAKNVFQLHGTSMTGEVKFRKKLVRGQFLRFMADQAPALVAMEACGSAHYWARELAALGHEVKLIAPQYVRPFVKRQKNDAADAEAIVTAARQPDMRFVEPKTVEQQARAVLFSARERIVHQRTELVNALRAVLYEYGQVVPLGIGHVKRIEQMIEDVDLPAIVREECCDLLGQIGEKTARIEQKTKKLGELSKQSDTARRLQTMPGVGPLTALAVEAFAPAMEGFRCGRDFAAWLGLVPRQFSSGGKERLGRVSKAGQADIRRLLIIGAMARVNWASRKPPTQGSWLSRMLSKKPRMLVAIALANKMARKIWAMLTKQEDYRDLTAGVTA

SEQ ID NO: 13994 - protein, 340 aa, unidentified
  source 1..340: note = protein_4023a7e
  REGION 5..152: note = RuvC_domain
  SITE 8: note = RuvC_P1
  SITE 55: note = RuvC_P2
  SITE 92: note = RuvC_P3
  SITE 94: note = RuvC_P4
  SITE 97: note = RuvC_P5
  REGION 212..300: note = Tnp_domain
  SITE 220: note = Tnp_P1
  SITE 250: note = Tnp_P2
  SITE 258: note = Tnp_P3
  SITE 259: note = Tnp_P4
  SITE 271: note = Tnp_P5
MNYYAGIDVSLEESCVCAIDATGKIVREAKVASEPEALIAWFRSLGVELTRIGLEAGPLSQWLYAGMQQAGLAVELLQTRHARNAFKIMPVKTDRKDARGIAELIRLGWFRPVHCKSMEAQETRAMLTARKLVQKELLETESSLRGILRGFGLKVGKTTPIHFEGRIKELVAGHPSLEIVASALLSVRATLRRELDGFEKRLRAMARTDTRTRLLMTTPGVGVIVALTFACAIDDPSRFKSSKTVGAHFGLTPTRYQSGETDYSGRISKNGDGLVRTVLYEAAHVILTRPLKGCTALKSWAMRIAKRAGMKKATVALARKLAVIMHRMLADGTPFTTQPA

SEQ ID NO: 13995 - protein, 326 aa, unidentified
  source 1..326: note = protein_d613fab
  REGION 4..160: note = RuvC_domain
  SITE 7: note = RuvC_P1
  SITE 60: note = RuvC_P2
  SITE 100: note = RuvC_P3
  SITE 102: note = RuvC_P4
  SITE 105: note = RuvC_P5
  REGION 200..286: note = Tnp_domain
  SITE 208: note = Tnp_P1
  SITE 237: note = Tnp_P2
  SITE 245: note = Tnp_P3
  SITE 246: note = Tnp_P4
  SITE 259: note = Tnp_P5
MIQLGVDVGKSKIDVCLLPEGPGGRKKTKVLSNGPDVARQLLEWLAVRKVALSELQVILEPTGTYHEHLAYGLHEKGLRVVVASPVRVRSFATGMGILTKNDHVDAHVLALYGALRQPEAWVPPPPAIRELKALLKRRDALREDLQREQNRLEKLHVTRFSTRVEASVTKMIAALDAELLSVQQQIDDHIDNHPDLKQDMKYLTSVKGIGKQVGSNMLAVLRGNAFSSPEQAAAWLGLVPREKRSGSSVNGRSRLTKTGPADLRAKLYLSAMTAIKHNPMLRIFYERLLEAGKAKMSALCAVMRKLVHICYAVLMKQQEFDPNYSA

SEQ ID NO: 13996 - protein, 358 aa, unidentified
  source 1..358: note = protein_8233e4b
  REGION 10..167: note = RuvC_domain
  SITE 13: note = RuvC_P1
  SITE 69: note = RuvC_P2
  SITE 107: note = RuvC_P3
  SITE 109: note = RuvC_P4
  SITE 112: note = RuvC_P5
  REGION 214..301: note = Tnp_domain
  SITE 222: note = Tnp_P1
  SITE 252: note = Tnp_P2
  SITE 260: note = Tnp_P3
  SITE 261: note = Tnp_P4
  SITE 274: note = Tnp_P5
MYKFMKKFFIGVDVSKDTVDVSFFDDDRMKSPEYLAQYSNSPKGFREMVKDLRMCCHGVSSGQWLFCCETTGRYDHPLCHWLVDHGMVVWRESALQIKWSSGIQRGKNDRVDSLRIAEYAWRHQDKMQKFVKPSESLSNLKAAFTHRRRLVEKRTATRCQLKSMSSEKGLSASVARMIVRDLSREIERLSASIATMDESIQKIIRSDSELDRNYRHIISVKGVGPITAVALIVCSGNFKAITSAKKMACYCGVASFRSQSGTSINRKASVSNLSNRQIKSLLSMAARSASRSNPVFAEYFNRTLSRGKPVALVYNNLRNKIITVVYKLIERDCDFDVDYKRMHSTGQRANEPAIREAV

SEQ ID NO: 13997 - protein, 348 aa, unidentified
  source 1..348: note = protein_aa7b2bf
  REGION 5..161: note = RuvC_domain
  SITE 8: note = RuvC_P1
  SITE 58: note = RuvC_P2
  SITE 98: note = RuvC_P3
  SITE 100: note = RuvC_P4
  SITE 103: note = RuvC_P5
  REGION 275..338: note = Tnp_domain
  SITE 283: note = Tnp_P1
  SITE 313: note = Tnp_P2
  SITE 321: note = Tnp_P3
  SITE 322: note = Tnp_P4
MNNVAGIDVSKGKSMVSVLRPFGEVVAKPFSIGHTGSELKELADYLKSLDGETRVVMEHTGRYYEPVARFLHDEGVFVSAVNPKLIKDYGNNTLRKVKTDKADSRKIARYGIDNWAELRQHTPMDTIRMQLKTLNRQQSLYTKTKTMMKNNLIALLDQTYPGVNALFDSPVREDGSQKWVDFATTFWHVDCVRNMSLTAFAERYRKWCKRHGYNFSQSKAVEVHAGAQDLIAMLPRDALTKTMVRQAIDALNAISASMERLKAEMQALAAQLPEYPVVMAMHGVGDSLGPQLMAELGDVTRFTHRNAITAFAGVDPGADQSGTHEAKSTRVSKSRSCAAPYSWLWTAY

SEQ ID NO: 13998 - protein, 339 aa, unidentified
  source 1..339: note = protein_f02d1d4
  REGION 6..147: note = RuvC_domain
  SITE 9: note = RuvC_P1
  SITE 52: note = RuvC_P2
  SITE 87: note = RuvC_P3
  SITE 89: note = RuvC_P4
  SITE 92: note = RuvC_P5
  REGION 210..297: note = Tnp_domain
  SITE 218: note = Tnp_P1
  SITE 248: note = Tnp_P2
  SITE 256: note = Tnp_P3
  SITE 257: note = Tnp_P4
  SITE 269: note = Tnp_P5
MNRTAVGVDIAKHVFQVHFVDQATGEIVNKPIKRAKFLEFFINRPPCLIGMEACGGAHHWARQLMKMGHQVRLMAGEYVKAFNIGNKKDAADARAIWLAVQQPGKPVAVKTEIQQAMLALHRMREQLVKFRTMQINSLRGLLTEYGEVMGKGRSALNTTIPEVLGRVAERLPAVVVDTLREQWSGLTKLDEQIASIERRMREWKKEDQTVRAISEIPGVGLLTATAAVAMIGNAATFKSGREFAAWAGLVPKQTGSGGRVNLHGISKRGDIYLRKLLIHGARSVLTHAKEPGPWVEQMKKRRPPNVVIVALANKMARTIWAVLAHEQPYQKNYVSAKPV

SEQ ID NO: 13999 - protein, 403 aa, unidentified
  source 1..403: note = protein_19446eb
  REGION 9..166: note = RuvC_domain
  SITE 12: note = RuvC_P1
  SITE 65: note = RuvC_P2
  SITE 105: note = RuvC_P3
  SITE 107: note = RuvC_P4
  SITE 110: note = RuvC_P5
  REGION 271..358: note = Tnp_domain
  SITE 279: note = Tnp_P1
  SITE 309: note = Tnp_P2
  SITE 317: note = Tnp_P3
  SITE 318: note = Tnp_P4
  SITE 331: note = Tnp_P5
MGGFFLFYCGIDIAKRNHEASVIDTEGKPLLDSITITNTQEGCEKLFSLFERLGIGKEAVVVGMEATGHYWLSVYEHLTEQGYDVRVINPIQSEAFRKIYIRQTKNDSKDSFIIAQVMRFGQYSETTLSDENTVAMRQLIRFRMALVDSCGDCKRRIIALLDQVFPEYASLFSDTFGVTSKELLLQCPTPEDMLAVSTRKLTNLLNKASHGRFGEERAKEIRTAAAGSFGVGFAKNAFAFQIKQLVEQLMFLETQIEELDEQISHLLKQVNQVITTIPGIGDTLGAIIVSEIGDINRFDAPNKLVAFAGLDVKVTQSGEFEGTKQHISKRGSPYLRRAIWLAANRAAFCDPILSEYYQSLKARGKHHLTAVGAVARKMCNIIFTILKENRPYQVTPPKKETLL

SEQ ID NO: 14000 - protein, 399 aa, unidentified
  source 1..399: note = protein_a676ac1
  REGION 7..162: note = RuvC_domain
  SITE 10: note = RuvC_P1
  SITE 59: note = RuvC_P2
  SITE 99: note = RuvC_P3
  SITE 101: note = RuvC_P4
  SITE 104: note = RuvC_P5
  REGION 270..356: note = Tnp_domain
  SITE 278: note = Tnp_P1
  SITE 308: note = Tnp_P2
  SITE 316: note = Tnp_P3
  SITE 317: note = Tnp_P4
  SITE 329: note = Tnp_P5
MTYDFVIGIDVGKYFHHACVLDKDGKQVKSKRIDQSEHSLRRFFDLFLALSSKILVVVDQPNNIGRLTVAVAQDMGITVKYLPGLSMRQLSRVHVGNAKTDVRDSYVIAHAGANLPDALRNVDRVQQVFSQLKVLNGIDEDLARSYTRLINQIRSSLVGSYPEFERVLRGQNIHRRWVLHMLAKYGGPTKIKRMGRARLIAFAKKYKARNPEKIIDGLLDAIKNQTVSIHGSEYVELGVAMSATDALAKLDHRKVIEEKVGALIEEVPHTHILLSMPGIGPKTAAQILMTVGDFSDFKTASHMASYAGLCPQTNQSGTSINTKSPNRAGNKKLKNALWQSSFSAIRYHERSRQYYERKRKEGKRHNAAVVALARRRLTVLFTMMANHSLYQEPEKQKTA

SEQ ID NO: 14001 - protein, 336 aa, unidentified
  source 1..336: note = protein_efbaba7
  REGION 6..147: note = RuvC_domain
  SITE 9: note = RuvC_P1
  SITE 52: note = RuvC_P2
  SITE 87: note = RuvC_P3
  SITE 89: note = RuvC_P4
  SITE 92: note = RuvC_P5
  REGION 209..295: note = Tnp_domain
  SITE 217: note = Tnp_P1
  SITE 247: note = Tnp_P2
  SITE 255: note = Tnp_P3
  SITE 256: note = Tnp_P4
  SITE 268: note = Tnp_P5
MTIIRIGLDTSKHVFQIHGVGENEKPVLRRQLRRSEVEKFFAKLPPTRIGIEACGASHHWARLLRGLGHEVVLMPPQYIKAYVKRGKSDAIDAAAICEAMSRPTMRFVPVKTAEQQAALAMLGVRDLLVKQRTMLINAIRGHAAEFGVTVAKGPQQMRELLRRLATGEGVPVLAREMLGVLAGQLEALNAKLKAIETRLMAWHRQDQTSQCLATAPGIGPIGGVSFTLKVPDAKAFRSGRHFAAWVGITPRENSTAGKHRPGKISREGDESLRRLLVLGATAVIQQAKSGRAAPWLLGLLARKPKKLVAVALANKMARIIWAMMVSGETYRRPQEA

SEQ ID NO: 14002 - protein, 317 aa, unidentified
  source 1..317: note = protein_12bf355
  REGION 12..165: note = RuvC_domain
  SITE 15: note = RuvC_P1
  SITE 63: note = RuvC_P2
  SITE 103: note = RuvC_P3
  SITE 105: note = RuvC_P4
  SITE 108: note = RuvC_P5
  REGION 213..297: note = Tnp_domain
  SITE 221: note = Tnp_P1
  SITE 250: note = Tnp_P2
  SITE 258: note = Tnp_P3
  SITE 259: note = Tnp_P4
  SITE 271: note = Tnp_P5
MIESYDSVDVFIGVDVGKGEHHAVALDRAGRQLFDKALPNDEAKLRELIGQLKRHGLVLFVVDQPATIGALPIAVAQSENVLVGCLPGRAMRRIADLHGGEAKTDARDAAIIAEAARSLPHALRSLQLADEQVAELSMLCGFDDDVLGQITATSNRIRGLLTRALGEQTVVVTGTNATSIVLPKLAEQLAALRRQRDEIAVEVERLVEAHPLHPVLISRPGVGVGTAARLLTEVSGKDFATANHLAAYAGLAPVTRRSGSSIRGEHPSGRGNKILKRAIFLSAFAALRDPVSRAYYDRKIAQGKRHNQALIALARRR

SEQ ID NO: 14003 - protein, 411 aa, unidentified
  source 1..411: note = protein_290f7e6
  REGION 12..167: note = RuvC_domain
  SITE 15: note = RuvC_P1
  SITE 64: note = RuvC_P2
  SITE 104: note = RuvC_P3
  SITE 106: note = RuvC_P4
  SITE 109: note = RuvC_P5
  REGION 275..361: note = Tnp_domain
  SITE 283: note = Tnp_P1
  SITE 314: note = Tnp_P2
  SITE 322: note = Tnp_P3
  SITE 323: note = Tnp_P4
MSLLVMGALFYVGIDWAAASHAVCVLDHTGRRVAAFSIEHSAAGFTTLVRRLSRLATVDRIAVAIERPDGRLVDTLLEAGFAVVPVSPNAIKTWRESEAGSGAKSDAGDAYVIADYLRCRAARLDPIEPYSAATVALRTVVRTRDDLVAMRVAATNQLAALLDAHWPGAKAIFADIESPIALAFLTRYPTAAHAKGLGAKRLEAFCREHGYSGKRSGEVLLARLRAAPTGTTDPTVCAALAEAVLAMVATLTVLGDTLKSMGKTVTATLGEHPDGKVFTSLPRSGQINAAQMLAEWGDIRQAYDGPESVAALAGVTPVTNQSGKHRAVHFRWACNKRLRVAITTFADNSRHASPWAASVYAEARARGHDHPHAVRVLARAWIRVIWRCWIDQVPYDPDRHGNARHRQPTWG

SEQ ID NO: 14004 - protein, 366 aa, unidentified
  source 1..366: note = protein_203b277
  REGION 21..164: note = RuvC_domain
  SITE 24: note = RuvC_P1
  SITE 69: note = RuvC_P2
  SITE 104: note = RuvC_P3
  SITE 106: note = RuvC_P4
  SITE 109: note = RuvC_P5
  REGION 228..314: note = Tnp_domain
  SITE 236: note = Tnp_P1
  SITE 266: note = Tnp_P2
  SITE 274: note = Tnp_P3
  SITE 275: note = Tnp_P4
  SITE 287: note = Tnp_P5
MKKHTTINQSLSADVSTCMNVAVDLAKKVFQVAGEDALGQVIFEDRIKSREAFQAFLQKLPASVTVLVETGPGAQAWARLLQAQGNPVCILPAQHVANHRSGPKNDRNDALAILRAGRDCTISAVPVKSAAAMAMQALHRARQGYIRRRTAVGNQMRGLLLEQGVSMAQGETAISQRVPRILEDATQPLPDLLRELIAELLGEWDQLGERVNVLTGRLETAAKQNETAKRLMTVRGVGPIIATALLAKQTEPERFANARQFAAYFGLVPSQHSSGEKIRLGKMSKQGDAYLRSLAIQGAHAVLRQVRPDSEQPDDQRLQRWISRLGRKEAAVRLANRNLRILWRLLQNDQTYRRQPGNSQEATMSH

SEQ ID NO: 14005 - protein, 401 aa, unidentified
  source 1..401: note = protein_b0dece3
  REGION 10..164: note = RuvC_domain
  SITE 13: note = RuvC_P1
  SITE 61: note = RuvC_P2
  SITE 101: note = RuvC_P3
  SITE 103: note = RuvC_P4
  SITE 106: note = RuvC_P5
  REGION 272..358: note = Tnp_domain
  SITE 280: note = Tnp_P1
  SITE 310: note = Tnp_P2
  SITE 318: note = Tnp_P3
  SITE 319: note = Tnp_P4
  SITE 331: note = Tnp_P5
MTTGTIDVTIGLDVGKTAHHACAMLATGEIIYDKPLPQDEDQLRKVFTDLQACGTVLVVVDQPNTIGALPIAVARDAGCLVGYLPGLAMRKAADLYPGRSKTDRRDAFIIADTARTMPHTLRAVDRDNEVLSALKMLSGFDDDIAKDATRTINRLRSVLTQIYPSLERALPGSIITRPLVLDMLIHYGGPTRLKKAGYQRVHSWMSTRAKKDPTKLVDAIFDGLKAQTVTVPGTAAAEIVIPQLATNIKALLEQRTTIAEQVEELLEDFPLHQVLMSMPGVGIKTAANILLAVGDCSDFRSAGHLAAYAGIAPVTRRSGTSIRGEFPARSGNKRLKNALFYSAFASIRFHEPSKAYYEKKRAEGKRHNAAVMCLARRRCNVIFAMLTRGEFFREVPARTAA

SEQ ID NO: 14006 - protein, 342 aa, unidentified
  source 1..342: note = protein_9163ff7
  REGION 7..149: note = RuvC_domain
  SITE 10: note = RuvC_P1
  SITE 53: note = RuvC_P2
  SITE 88: note = RuvC_P3
  SITE 90: note = RuvC_P4
  SITE 93: note = RuvC_P5
  REGION 212..299: note = Tnp_domain
  SITE 220: note = Tnp_P1
  SITE 250: note = Tnp_P2
  SITE 258: note = Tnp_P3
  SITE 259: note = Tnp_P4
  SITE 271: note = Tnp_P5
MSNITTVGLDLAKNVSHFVGCNQAGKIVRKRMLKRSEILAFFTTLDKCVVGIESCASAHYWAREIQKLGHTVKQIAPQHVKPYVRGNKTDYNDALAIAEAVVRPEMRVVRTKTQTQQDIQALHVMRKKCERDRTANCNEIRGLLYEYGVVLPMGVHNVYKALPDLYDRQADNGLSELFKTLLEQHYQKLVELDVHLEWYTKKIHALSQHEACQRLQSIPGVGPIIASALYQHIGNGSEFKNGRAVSASVGLVPKQHSSGGKQNLLGISKRGDGYLRTLLIHGARAVMRVSKTKDTPLARWVRRIEQTRGRNKAAVALANKLARIAWALLAQGGRYTPEWASA

SEQ ID NO: 14007 - protein, 343 aa, unidentified
  source 1..343: note = protein_3609a58
  REGION 4..157: note = RuvC_domain
  SITE 7: note = RuvC_P1
  SITE 55: note = RuvC_P2
  SITE 96: note = RuvC_P3
  SITE 98: note = RuvC_P4
  SITE 101: note = RuvC_P5
  REGION 218..303: note = Tnp_domain
  SITE 226: note = Tnp_P1
  SITE 256: note = Tnp_P2
  SITE 264: note = Tnp_P3
  SITE 265: note = Tnp_P4
  SITE 276: note = Tnp_P5
MITIGIDLHKASHTAVALDPQGLVLGELRAAATRTTTERLLRWAERWPDRIWAVEGASGLGRLLAQGLTARDQTVLDVPATLAARARLLDRGHGRKTDAIDAASVARVAQSQSDLRRVGPEDHTAVLRLLSDRRDELTGERRRVVNRLHRLLRDLRPGGAPTELSTVAAARLLGGVRPATAVDLERKAMARALVADLRRIDRALVENRARAGAVAANGTTLRSIFGISEVLAAKILGHVGDVGRFASADCFASYSGTAPIEVSSGEVTRHRLSRNGNRSLNNALHLAARVQTMHPGPGRDHYERKLAEHKSSREALRSLKRQLAKVVYCRLVADQAHRLALAS

SEQ ID NO: 14008 - protein, 392 aa, unidentified
  source 1..392: note = protein_ee88c12
  REGION 4..164: note = RuvC_domain
  SITE 7: note = RuvC_P1
  SITE 62: note = RuvC_P2
  SITE 103: note = RuvC_P3
  SITE 105: note = RuvC_P4
  SITE 108: note = RuvC_P5
  REGION 267..354: note = Tnp_domain
  SITE 275: note = Tnp_P1
  SITE 305: note = Tnp_P2
  SITE 313: note = Tnp_P3
  SITE 314: note = Tnp_P4
  SITE 327: note = Tnp_P5
MIFVGIDVAKSKHDCCIISSDGEVLSNSLRIQNSKEGFDLLFSSIVSSLPSNDFSKVKIGLESTGHYSINITNYLLSKGFQVTTLNPLSTNLFRKAHTLRKTKTDKTDALVIASMLFTDESKSYSPVLYQIQELKSLTRHRHRLIGYRSKLKVSVTRLIDIIFPELPNYVWSIHQNSSYKLLLEFPTTEDLRNAHLTKLTNLLSSSSNGKYGKDKALILKNLAVSSIGSSNRSLAFELRQTIRLIQSVQAEIDELDKQIKLVVDELDSPLMSIPGVSYTLASIIIAEIGDINRFDTPAKLLAFAGMEPSTYQSGNYNASKTPMVKRGSTYLRWAVMQASRLVAIRDTTFNLYLKKKRSEGKHYLVAINHVGKKLMRVMYYLLRSDTKFSVQA

SEQ ID NO: 14009 - protein, 333 aa, unidentified
  source 1..333: note = protein_e3262c7
  REGION 25..168: note = RuvC_domain
  SITE 28: note = RuvC_P1
  SITE 72: note = RuvC_P2
  SITE 112: note = RuvC_P3
  SITE 114: note = RuvC_P4
  SITE 117: note = RuvC_P5
  REGION 207..292: note = Tnp_domain
  SITE 215: note = Tnp_P1
  SITE 244: note = Tnp_P2
  SITE 252: note = Tnp_P3
  SITE 253: note = Tnp_P4
  SITE 264: note = Tnp_P5
MVEGTWGSHHKEGSRKMSKTNTIVAGIDVAKAKLDVAIHGCKLRWQVTNDPAGFHDLAGLLRSRKVTRVGLEATGGYERDVVEYLRKAGFNVVVLQPRQVRAFAEFILCRAKSDCIDAGLIAACVAHHQIEREAPDPRIAAFADQLTFIEQTEEDIVRIKVRLEHTRDPKLRRVMLADIERLKSRRAKVIARLVAALRTHEDLARRLDLLRSIDGVGPRTALAFIIRMPELGRLSREQAAALAGLAPFVHDSGDRKGERHIAGGRDRLRKSVYSAALPAAFRWNTQLITLYKRLTEAGKPHKLALVACARKLVIFANTVLARGTAWSSRPATC

SEQ ID NO: 14010 - protein, 356 aa, unidentified
  source 1..356: note = protein_e839f16
  REGION 7..148: note = RuvC_domain
  SITE 10: note = RuvC_P1
  SITE 53: note = RuvC_P2
  SITE 88: note = RuvC_P3
  SITE 90: note = RuvC_P4
  SITE 93: note = RuvC_P5
  REGION 210..296: note = Tnp_domain
  SITE 218: note = Tnp_P1
  SITE 248: note = Tnp_P2
  SITE 256: note = Tnp_P3
  SITE 257: note = Tnp_P4
  SITE 269: note = Tnp_P5
MDRIIRIGMDTSKHVFQLHGVNAAEKPVLRKKMRRKEMIDFFTTCPPTVIAIEACGASHHWARLLTSFGHEVKMIAPQLAKPYIKRSKNDAADAEGLCEAMSRPTMRFVPVKTADEQAALMLVGVRARLIANRTQLANAIRGYASEFGISAAKGLAHVSLLLERIQADGTVPELAKELFASQAEEYAQLEEKIADADAKLKAWQRNDERSKRLNTIPGIGPIGAALLIMKTPAPELFRSGRQFAAWIGLTPKDHSTGGKLRLGCITRAGDEALRAVLVAGATAVVQHARRSGKASSWLAELLKRKPPKLAAVALANKIARIAWKMMITGETYKSSPAQSALSGAARGNQLAMVNRI

SEQ ID NO: 14011 - protein, 322 aa, unidentified
  source 1..322: note = protein_1b7b21d
  REGION 8..152: note = RuvC_domain
  SITE 11: note = RuvC_P1
  SITE 57: note = RuvC_P2
  SITE 97: note = RuvC_P3
  SITE 99: note = RuvC_P4
  SITE 102: note = RuvC_P5
  REGION 197..283: note = Tnp_domain
  SITE 204: note = Tnp_P1
  SITE 234: note = Tnp_P2
  SITE 242: note = Tnp_P3
  SITE 243: note = Tnp_P4
  SITE 256: note = Tnp_P5
MKKSNNYVGIDISKLTFDVAISGSDDKYKYFKFANNHEGFMMFLEHLKVSESICVMEASGPYYLKLATFLSEQAIDVCVINPLVIRRFSQMRMSRAKTDKKDAMLIAEYGKTENPGIWKPEANHVLELKQMQAYLEQLNKNRTGFVVQKEAFNQNPIKSEALEKSINSILETIEQEMKNIEKKMELIIKTHHQEMFSQLKSIPGMGTKTSLLLIVISGGFSKFNNHKQLASYVGISPRIFESGTSVKGRSKICKMGMSKIRALLYMCAWSAKRCNKSCKELYDRLVEKGKSKKLALIAVVNKLLKQAFAIATKKEYYSVKIN

SEQ ID NO: 14012 - protein, 329 aa, unidentified
  source 1..329: note = protein_9df8636
  REGION 19..161: note = RuvC_domain
  SITE 22: note = RuvC_P1
  SITE 65: note = RuvC_P2
  SITE 100: note = RuvC_P3
  SITE 102: note = RuvC_P4
  SITE 105: note = RuvC_P5
  REGION 223..307: note = Tnp_domain
  SITE 231: note = Tnp_P1
MEVLKHHLKEASRGEVSTVGIDLAKSVFQVHGSDAGGTVIFRKKLRRDQVLAFFSTLPRCVVAMEACASAHYWAREIAAVGHDTKLIPPAYVKPFVKRQKNDMADAEAICEAAQRPTMRFVPGKSAAAQASAVVFRTRDLLVRQRTQLINALRGHLTEFGYIVRQGVGHVAKLVEIVVDPTTDVPSEARPVLAVIAESLKALQSQIALLDREIASRAKADPVAKRLMTIPGVGPVIATALVALAPAASTFRRGRDFAAWRARPTAALQRRQGAAGAYDENGRAQPATAADLRREFNNQGRGARSRQGRGMVGRHASAQASHAGHRRTGE

SEQ ID NO: 14013 - protein, 401 aa, unidentified
  source 1..401: note = protein_993f75e
  REGION 14..168: note = RuvC_domain
  SITE 17: note = RuvC_P1
  SITE 65: note = RuvC_P2
  SITE 105: note = RuvC_P3
  SITE 107: note = RuvC_P4
  SITE 110: note = RuvC_P5
  REGION 276..359: note = Tnp_domain
  SITE 283: note = Tnp_P1
  SITE 312: note = Tnp_P2
  SITE 320: note = Tnp_P3
  SITE 321: note = Tnp_P4
  SITE 333: note = Tnp_P5
MQDTQQHDAVDVFVGVDVGKGQHHAVALDRNGKRLYNKALPNDEVKLRALIAELKTHGRLLFVVDQPSTIGALPVAVARAEGVLVAYLPGLAMRRIADLHAGEAKTDARDAAIIAEAARSMPHTLRSLRLADEQLAELTMLCGFDDDLAAQVTQTSNRIRGLLTQIHPALERVLGPRLDHPAVLDLLERYPSPSALAAANEKTLANRLTKLAPRMGKNWAAEIVQALNEQAVIVPGTQAAAIVMPRLAQQLAALRKQRDEIAAEVERLVLAHPLWPVLTSMPGVGVRTAARRLTEATQKAFATAAHLAAYAGLAPVTRRSGSSIRGEHPSRRGNKVLKRALFLSAFAALRDPVSRAYYSCKIQQGKRHNQALIALARRRCDVLFAMLRDGTIYPPKSAPDA

SEQ ID NO: 14014 - protein, 341 aa, unidentified
  source 1..341: note = protein_8578dcd
  REGION 7..148: note = RuvC_domain
  SITE 10: note = RuvC_P1
  SITE 53: note = RuvC_P2
  SITE 88: note = RuvC_P3
  SITE 90: note = RuvC_P4
  SITE 93: note = RuvC_P5
  REGION 210..296: note = Tnp_domain
  SITE 218: note = Tnp_P1
  SITE 248: note = Tnp_P2
  SITE 256: note = Tnp_P3
  SITE 257: note = Tnp_P4
  SITE 269: note = Tnp_P5
MKKFIRIGVDLAKNFFQVHGIVREGAEAVSRKFTRTKFREFFLSVAPCRVGMEACGSAHYWARELRSMGHDVVLIAPAYVKPYVKRGKNDAADAAAICEAMSRPDMRFVPIKSADQQAALMLHKTRELLVKQRTMIVNALRGHLSEFGLIAAKGIQRVHELVALALGEEGLPEAARQAAALLAEQSEQLEGTIDTLEKKIAETSAKYPMVRLLKEIPAIGPLISSAMAASYPDPGVFASGRDFAASLGLTPSQHSSGGKEKLGSITKKGNRYLRKMLVVGCTSVLRVAHKYKGALAEWIVAIKARKPERVAAVALANKLARICWAMLSTGEGFREELYTRA

SEQ ID NO: 14015 - protein, 345 aa, unidentified
  source 1..345: note = protein_e78d960
  REGION 6..147: note = RuvC_domain
  SITE 9: note = RuvC_P1
  SITE 52: note = RuvC_P2
  SITE 87: note = RuvC_P3
  SITE 89: note = RuvC_P4
  SITE 92: note = RuvC_P5
  REGION 211..297: note = Tnp_domain
  SITE 219: note = Tnp_P1
  SITE 249: note = Tnp_P2
  SITE 257: note = Tnp_P3
  SITE 258: note = Tnp_P4
  SITE 270: note = Tnp_P5
MNVTTVGIDLAKNVLQVHGVNEHGKPVLKRQLKRHQVAMFFANLPCCLIGMEACGSAHFWARKLQGFGHTVRLMAPQFVKPYVKTNKNDVADAEAICEAVARPNMRFVPVKTVEQQAVLALHRARQGFVRARTAQANQIRGLLGEFGLVIPQGITNIAQCVPALIEDASNELPGSFRLLIQRLTDHLKELDRQVDELETLIKVWHRANDASRKLAEIPGIGPITASALVASVGDAKCFTNGRQLAAWLGLVPRQHSSGGKSTLLGISKRGDSYLRTLMVHGARAVVRYSANKKDPSSAWLQSLQARRHKNVAVVALANRNARIVWALLTQGRTFRPDYPPAVAGA

SEQ ID NO: 14016 - protein, 342 aa, unidentified
  source 1..342: note = protein_8e5f3e2
  REGION 6..147: note = RuvC_domain
  SITE 9: note = RuvC_P1
  SITE 52: note = RuvC_P2
  SITE 87: note = RuvC_P3
  SITE 89: note = RuvC_P4
  SITE 92: note = RuvC_P5
  REGION 211..296: note = Tnp_domain
  SITE 219: note = Tnp_P1
  SITE 249: note = Tnp_P2
  SITE 257: note = Tnp_P3
  SITE 258: note = Tnp_P4
  SITE 270: note = Tnp_P5
MIIVIVGIDLGKNSCSIVGLDSLGTVVVRRRLRRDSVIAFASKLPACIMAMEACCGAHHMGRSLAALGHEVRLMSPEYVRPYVKAQKNDDRDAEAIAEAATRPTMRFVELKSEEQLDVQTLHRVRDRLVGERTSLTNQIRSLLLERGHVAAQGHARLRHLLADLLDPATCSLSARMAFLLGDMRTRWDELGRRIAAFDAEFSAMARTDERARRLTSIPGIGALNATALVAAVGNAATFTKGRDLAAWLGLVPRQATTGGKPKLLGITKRGSRYLRKMLIQGARSAMPTLAKANTAIGAWLRALLVRTHPNIAVVALAAKMARTVWALLRHGRNYEAVPQAAG

SEQ ID NO: 14017 - protein, 345 aa, unidentified
  source 1..345: note = protein_9af9f86
  REGION 5..152: note = RuvC_domain
  SITE 8: note = RuvC_P1
  SITE 55: note = RuvC_P2
  SITE 92: note = RuvC_P3
  SITE 94: note = RuvC_P4
  SITE 97: note = RuvC_P5
  REGION 212..300: note = Tnp_domain
  SITE 220: note = Tnp_P1
  SITE 250: note = Tnp_P2
  SITE 258: note = Tnp_P3
  SITE 259: note = Tnp_P4
  SITE 271: note = Tnp_P5
MKHYAGLDVSVKESAICIMDETGKVCREVKVVSHPEDLIEVLKDPAWRLVCVGLEAGPLSQWLFSGLVEADLPVVCIETRHTKAFLKAQVNKSDRNDARGIAQMMRVNLFRPVHVKTLVSQKRRALLTARKLLQEKAIAVENDIRGLLRNFGLKVGVVGVIKFEERIFELVDGMTDLAEIMTSLLEARRTLREQVGKLHQRLLSIVRENDACRRLMTIPGVGPIVSLAFTATIDIPARFKSSKAVGPALGLTPILNQSGESNRVGRISQCGDGMMRTLLYEAAQVMLTRTIKWSWLKAWAMNIAKRRGKQKAIVALARRLAVIMHRMWCDGTEFRWTKETVPAAA

SEQ ID NO: 14018 - protein, 347 aa, unidentified
  source 1..347: note = protein_b67f817
  REGION 6..148: note = RuvC_domain
  SITE 9: note = RuvC_P1
  SITE 52: note = RuvC_P2
  SITE 87: note = RuvC_P3
  SITE 89: note = RuvC_P4
  SITE 92: note = RuvC_P5
  REGION 211..299: note = Tnp_domain
  SITE 219: note = Tnp_P1
  SITE 249: note = Tnp_P2
  SITE 257: note = Tnp_P3
  SITE 258: note = Tnp_P4
  SITE 270: note = Tnp_P5
MKIATVGLDLAKTLFQVHGVDSQGHIVVRKQLRRADVLAFFAKLEPCVVGMEACGSSHYWGRELTKLGHTACLIAPQFVRPYVKSNKTDAADAEAICEAVNRPHMRFVPIKTQAQQTMLSLHRARAGLVKSRTALANQIRGLLSEFGIVLPQGIRLLGQRVIEALSNREHELCEQFRSLIQLLVEHLRELGNKAAELEGRIRAMHCTDEAGQLLETIPGVGPLTASALAASIGNPRAFRDGRELAAWLGLVPRQHSSGGKPRLLGISKRGDTALRTLLIHGARAVIRMAANKPEMTDSWVMKLCRRRHKNIAAVALAAKNARTAWALLIRKQVYQVGHVPVRVDVTV

SEQ ID NO: 14019 - protein, 344 aa, unidentified
  source 1..344: note = protein_01e73c5
  REGION 7..148: note = RuvC_domain
  SITE 10: note = RuvC_P1
  SITE 53: note = RuvC_P2
  SITE 88: note = RuvC_P3
  SITE 90: note = RuvC_P4
  SITE 93: note = RuvC_P5
  REGION 213..297: note = Tnp_domain
  SITE 221: note = Tnp_P1
  SITE 251: note = Tnp_P2
  SITE 259: note = Tnp_P3
  SITE 260: note = Tnp_P4
  SITE 272: note = Tnp_P5
MSHAIIIGLDIAKTVFHARSADELGATVFSRKLSRAKLLDFFAKQPACLVAMEACSGAHHWARELARMGHEVRLIPPAYVKPFVKRHKNDAVDAEAICEAVQRPGMRFVAIKSEEQQAAGMVFRTRDLVVRQRTQLVNALRGHLAEFGWVAPRGLAQVTMLADLLDEEEMASSLPDAARAMLRVMTDMLAGLDDRIADLDKEIARRVREDEVARRLMTIPGIGPIATTAIVALAPPAETFTKGRDFAAWLGLTPLQHSTGGRQKLGRNSKMGERTIRRLLIIGGSSVVRQATVRGAPAGSWLERMLARKPRMLVSVALANKMARIAWAVMTRNEDYRAPAAVAA

SEQ ID NO: 14020 - protein, 272 aa, unidentified
  source 1..272: note = protein_e84aab2
  REGION 11..152: note = RuvC_domain
  SITE 14: note = RuvC_P1
  SITE 58: note = RuvC_P2
  SITE 98: note = RuvC_P3
  SITE 100: note = RuvC_P4
  SITE 103: note = RuvC_P5
  REGION 153..232: note = Tnp_domain
  SITE 185: note = Tnp_P2
  SITE 193: note = Tnp_P3
  SITE 194: note = Tnp_P4
  SITE 205: note = Tnp_P5
MEQRKTNTKIAGVDVSKRTLDVAVHGLEAMLQVANTPVGFEALDRWLAGHQVGRVGLEATGGYEQPLVIWLQVKGYEVVIHPPAAVRQFARFKRLKAKNDKIDARLIALATTQTETVKAANDPRLADLAQRMTAYEQAADHLARMKTEAEHIRLPDVRKLFAATIVIRMPELGSLKHGQAAALIGVAPFDRDSGLHRGQRFIWGGRERPRRMLYVAAVVAKRFDPALKAFAANLAQRGKPPKIITVAVVRKLIEAANLVLGRGQPWTKATAA

SEQ ID NO: 14021 - protein, 341 aa, unidentified
  source 1..341: note = protein_0833d73
  REGION 7..149: note = RuvC_domain
  SITE 10: note = RuvC_P1
  SITE 53: note = RuvC_P2
  SITE 88: note = RuvC_P3
  SITE 90: note = RuvC_P4
  SITE 93: note = RuvC_P5
  REGION 209..296: note = Tnp_domain
  SITE 217: note = Tnp_P1
  SITE 247: note = Tnp_P2
  SITE 255: note = Tnp_P3
  SITE 256: note = Tnp_P4
  SITE 268: note = Tnp_P5
MQTVTLIGIDLGKHTFHLHGQDRQGKAVFRKRVSRKQLVEFFATFHACTVVMEACAGAHHMARQLAGFGHQVRLISPQFVRPFVKSNKNDFVDAEAICEAASRPAMRFVTPKTESQQTLGALHRVRESLIRDRTKTINQLHGFLLEFGISLPIGQAVIRRLPAVLAEYSLPPRLIAVLERLHAHHKYLCEQICEIEKELTRQLAEDDLGQRLLSIPGVGPITASVLATEMGDGKQYACSRDFAAATGLVPRQYSTGGRATLLGISKRGDKNLRRLLVQCARAYMQRLERQTGRLADWVRAMLTRRHSNVVACALANKLARTAWALATHNTIFDAGPSAMPT

SEQ ID NO: 14022 - protein, 341 aa, unidentified
  source 1..341: note = protein_58c5521
  REGION 7..149: note = RuvC_domain
  SITE 10: note = RuvC_P1
  SITE 53: note = RuvC_P2
  SITE 88: note = RuvC_P3
  SITE 90: note = RuvC_P4
  SITE 93: note = RuvC_P5
  REGION 212..298: note = Tnp_domain
  SITE 219: note = Tnp_P1
  SITE 249: note = Tnp_P2
  SITE 257: note = Tnp_P3
  SITE 258: note = Tnp_P4
  SITE 270: note = Tnp_P5
MNEVTMIGVDLAKSVFQAHGATAVGEPVFRKKLSRGQFLKFLSEQQPCVVAMEACASSHYWGREILKLGHDVRLIPPIYVKPFVKRQKNDANDAEAIAEAAVRPTMRFVPVKSAEQQSRSMIFKTRDLFVRQRNSIINALRGHLMEYGIIAPPGRNFVKKLAEQIESPDCDLPSIVIELSRVHLDQLNVLTDKVVTIERRLKEESKSDPETIRLQTAPGIGPVSAMAIKAFSPPLEGFKRGRDFAAWLGLVPVQKSTGGRQVLGRTSKMGQRDIRRLLIIGAMTRIRWAIKNGPPKGSWLEQMLERKPRMLVAIALANKTARIIWAMMTKHEDYRDPIAVA

SEQ ID NO: 14023 - protein, 406 aa, unidentified
  source 1..406: note = protein_b393082
  REGION 3..163: note = RuvC_domain
  SITE 6: note = RuvC_P1
  SITE 60: note = RuvC_P2
  SITE 100: note = RuvC_P3
  SITE 102: note = RuvC_P4
  SITE 105: note = RuvC_P5
  REGION 272..358: note = Tnp_domain
  SITE 280: note = Tnp_P1
  SITE 311: note = Tnp_P2
  SITE 319: note = Tnp_P3
  SITE 320: note = Tnp_P4
MFVGDDWAEAHHDVEIMDEAGRTLAKARLPEGVAGMARLHAMVAEQIGQAADDEVEVLAGIEVDRGPWVLALVAAGYTVFAVNPLQASRYRERLAVSGSKSDAADAHMLADMVRTDSHQLRPIAGDSAQAEAIKVVARTHKTLIWERTRTGQRLRHALREYFPAALAAFEDLHAPEALDLLERAASPAEAAKLTISQISGALQRAHRRGDLAMRPRPIQSALRTEQLGQPDVVTAAYAASTRALVAVLTVLNQQITTLQGQVEAHFGAHPAAEIVLSQPGLGPILGARVLAEFGDDPSRYATAKARKNFAGTSPITRASGKKKTVLARFVHNDRLIDALITQASTAIRVSPGARAYYDKLRARGAGYNTALRQLANRLVGILHGCLKTGTFYDEATAWSHHQNATT

SEQ ID NO: 14024 - protein, 410 aa, unidentified
  source 1..410: note = protein_ef8ba2d
  REGION 5..163: note = RuvC_domain
  SITE 8: note = RuvC_P1
  SITE 60: note = RuvC_P2
  SITE 100: note = RuvC_P3
  SITE 102: note = RuvC_P4
  SITE 105: note = RuvC_P5
  REGION 271..357: note = Tnp_domain
  SITE 279: note = Tnp_P1
  SITE 310: note = Tnp_P2
  SITE 318: note = Tnp_P3
  SITE 319: note = Tnp_P4
MRLCVGDDWAQDHHDVEVMDESGKVLAKKRLPEGVAGIGQLHELIGRLLPADGDAQVQVGIETDRGPWVTALIAAGYVVFAVNPLQASRYRGRHGVSGAKSDGGDAHMLADVMRTDAHQLRPAAGDSAEAEGIKVLARTHKTLIWERTAVTQRLRAQLLEYFPAAVAAFEDLDAPDALELLGKAPDPARAAKLTRAQVSAVLKRNGRYKIKERTDAILGALRSPQLGQPPALTAAYAATVRSLIAVITTLNEQVSSLQGQVEAHFGQHPDAEIYLSQPGLGAITGARVLGEFGDDPHRYASAKARRNYAGTSPITRASGKRKIVAARFVRNDRLIDALMIQAFASLRVSSGARAFYDAQRAKGLEHNDALRRLASRLVGILHGCLKTRTRYDEATAWGHRQSIPQSNSAA

SEQ ID NO: 14025 - protein, 393 aa, unidentified
  source 1..393: note = protein_24cd1db
  REGION 19..167: note = RuvC_domain
  SITE 22: note = RuvC_P1
  SITE 106: note = RuvC_P3
  SITE 108: note = RuvC_P4
  SITE 111: note = RuvC_P5
  REGION 233..319: note = Tnp_domain
  SITE 241: note = Tnp_P1
  SITE 271: note = Tnp_P2
  SITE 279: note = Tnp_P3
  SITE 280: note = Tnp_P4
  SITE 292: note = Tnp_P5
MPKTKLQNGNDFSGQKFYVGLDVHKKSWAVTIRSLGIEVSHFSQDPGAERLDAYLQREFPGGDYYSAYEAGFCGTEAHGQLCKLGIKNIIVHAADIPTTDKQKKNKTDLHDSRALADHLERGNLKGIYVLNQDQQELRSLFRMTESKVIDVTRANNRLKSFLMYYSIKLPETISKNEFLSGKALAWLNIELGSSPGTFTLQQYIEELKYQRKQLFQITKSLRLQIQSLHKETYTNLLTVPGIGAITAMGLLVEIADFSRFEAPDKYASFLGLCPWEDSSGPVIKTKGVQPRCNGHLRPLLVEASWKAIAKSRSLFAYYSKHANKSGKKAIIKVARKLAMIAKGVATSGQPYKEDYLKNKQNEKGLKAERFSLGMTEQHINKQPGSGLRIEMPG

SEQ ID NO: 14026 - protein, 397 aa, unidentified
  source 1..397: note = protein_7991895
  REGION 7..161: note = RuvC_domain
  SITE 10: note = RuvC_P1
  SITE 58: note = RuvC_P2
  SITE 98: note = RuvC_P3
  SITE 100: note = RuvC_P4
  SITE 103: note = RuvC_P5
  REGION 268..355: note = Tnp_domain
  SITE 276: note = Tnp_P1
  SITE 307: note = Tnp_P2
  SITE 315: note = Tnp_P3
  SITE 316: note = Tnp_P4
  SITE 328: note = Tnp_P5
MDYDVVIGLDVGKAAHHACALDQGGRRLVDREITNTESSLRAIFTSMAAQGRVLVVVDQLHSIGALPVAVAQAMGVDVAYLPGLSMRRLADLHPGNAKTDARDAYVIAHAALTMPHTLRALDVPSEAQADLAMLLGYDDDLAAQVTAAINRLRGLLVQIHPSLEKALGDNVAHAGVLHLLIKAGGPDGLRTMGKTRIDTTLRKHAPRIHERLATEIWDGLAAQTVIVPGTTAAAKVLPGLAAQILQLRDQRKEIAKDVEKVLDAHPLAKILTSMPGVGVKIAARLLAEIGGDVTAFPTAAHLAAYAGLAPVTKRSGTSIRGEHPNRGGNKRLKNAMFMAAFTSLRADPASRTYYDRKRAQGKKHNAALICLARRKTDVLFAMIRDHQPYTPSQPAAA

SEQ ID NO: 14027 - protein, 386 aa, unidentified
  source 1..386: note = protein_5295f66
  REGION 5..158: note = RuvC_domain
  SITE 8: note = RuvC_P1
  SITE 56: note = RuvC_P2
  SITE 97: note = RuvC_P3
  SITE 99: note = RuvC_P4
  SITE 102: note = RuvC_P5
  REGION 220..305: note = Tnp_domain
  SITE 228: note = Tnp_P1
  SITE 258: note = Tnp_P2
  SITE 266: note = Tnp_P3
  SITE 267: note = Tnp_P4
  SITE 278: note = Tnp_P5
MGVITGMDPHKRSATIEVVDERAAVLAGGRFGTDKAGYAQMLAAGRKFRGRLWAVEGCNGIGKHIAHRLVHDGETVAGVPPRLSARVRVFATGNGRKTGPAGARPVAMVALRSPGLVRVQVDDDLVVMGMLADRRDELGRARTQTINRLHRLLPGLFPGGAKQFLSAQQARAMLVTIRPGDLPGKTRRRLAAELISELEVIDKKIKAIRKELTALVIARGSTLLELHGIGPSSAARLLADVGDIHRFADRGKFASRDGTAPLDASSGNQERHRLSRAGNRRTSRALHIMAVVQLRNQTQGRAYYDARKAGGMPSMMAMRALRRRLSNVVFARMLADQKRREAAGPGGQPGTTTDSSVTDLTPDIGSSEKPRPGPATQSRTILQAVP

SEQ ID NO: 14028 - protein, 370 aa, unidentified
  source 1..370: note = protein_fe8cf78
  REGION 37..188: note = RuvC_domain
  SITE 40: note = RuvC_P1
  SITE 93: note = RuvC_P2
  SITE 131: note = RuvC_P3
  SITE 133: note = RuvC_P4
  SITE 136: note = RuvC_P5
  REGION 234..321: note = Tnp_domain
  SITE 242: note = Tnp_P1
  SITE 272: note = Tnp_P2
  SITE 280: note = Tnp_P3
  SITE 281: note = Tnp_P4
  SITE 294: note = Tnp_P5
MLPLLFKAIINGDSSYHRLFGTNKERGSIMSNNMYFIGLDIACNDFAASIYQSPEKPIITKEAILNNPDGFNMLISWLKSNNINNTNSIICMEATGVYSKAITNYLTADGFNVCVEAPLKVKRAFDPVGHKTDAVDSKQIAEYAYRYRDELRLWKPKDEILEKVRQLLAARERFTKQSTAIQNASKAYEKEPIKVALIIKSHKQALKQLKKHIADIDKELDKHIHQNPAIFQNTNTLKSIPGYGMLLSANLMVITDNFENIKDHKRLSAFIGIVPYQHQSGTSINKKARIRHFGPQTTRKLLRLAAQSVATHNKGFRQYYLRKQAEGKAKTLVLNNIANKLIKIACAMMRENKSYIKEHRSIHPMCLKTA

SEQ ID NO: 14029 - protein, 429 aa, unidentified
  source 1..429: note = protein_e257cb2
  REGION 20..181: note = RuvC_domain
  SITE 23: note = RuvC_P1
  SITE 79: note = RuvC_P2
  SITE 120: note = RuvC_P3
  SITE 122: note = RuvC_P4
  SITE 125: note = RuvC_P5
  REGION 288..376: note = Tnp_domain
  SITE 296: note = Tnp_P1
  SITE 326: note = Tnp_P2
  SITE 334: note = Tnp_P3
  SITE 335: note = Tnp_P4
  SITE 347: note = Tnp_P5
MNYNTQNAKIASITEKTLIVGIDVGSETHYARAFSWRNYEYSKKPFAFSNDEDGFASFKAWMDDIAEKHEMEKVIPGMEPTGHYWLNLGAYLQGQGMRPVHVNPHHVKKSKELDDNNPNKNDRKDPKTIAGLVNEGRFSYPYIPTGIYAEIRNLSNLRIQTQEEITRIKNRIARWFSIYFPEIKDVYRNPDAVSGLMVIKQAPLPCDIKGLGVDGVNKIWRDARLKGAGIKRAKTLVTAAEHSIGNTEAPRSARKEIRNLLNDYEIYKSRMDELMEEIEELLSEIPYIDKLMGICGIGIKTVSCFIAEVGDIERFDNPKQVQKLAGYAIVADSSGKHNGESRISHRGRKRLRYALYEAAISVIGKNKEFKEIHHYYRTREKNPLKKMQSVIAVSCKLIRIFYTILTKGIDYDGQKMLRDIVRPGMQSAA

SEQ ID NO: 14030 - protein, 319 aa, unidentified
  source 1..319: note = protein_aabd51e
  REGION 20..160: note = RuvC_domain
  SITE 23: note = RuvC_P1
  SITE 65: note = RuvC_P2
  SITE 99: note = RuvC_P3
  SITE 101: note = RuvC_P4
  SITE 104: note = RuvC_P5
  REGION 223..312: note = Tnp_domain
  SITE 231: note = Tnp_P1
  SITE 263: note = Tnp_P2
  SITE 271: note = Tnp_P3
  SITE 272: note = Tnp_P4
  SITE 284: note = Tnp_P5
MVYLTFVSSHVGVHYENTIVGVDLAKKVIQVCKTTNRTVRSNEEMTPDEFILFLANSKPMTVVFEACGTSSYWKQQALLYGHDAAYFCQTRRLSEAIPKTDKNDALAIVQTALLPDVNFISGKSIEQQQLQSTMRLRELCSKQKTALSNQLIALLAEFNINSSNRNGGLRGAIESTLEDAGNGFSHEFRKALDEAWKLYLTVAETLVTYDECLEASIETHPECKKLLKLEGVGPINAINLYIALGCAELGCFTRGKDASACIGLTPLQHSSGGKSKLGSIGKHVKNTVIRSQLITGAAASVSTLLNGKLKLVKKNGYKT

SEQ ID NO: 14031 - protein, 327 aa, unidentified
  source 1..327: note = protein_d6f1f45
  REGION 13..132: note = RuvC_domain
  SITE 36: note = RuvC_P2
  SITE 71: note = RuvC_P3
  SITE 73: note = RuvC_P4
  SITE 76: note = RuvC_P5
  REGION 195..282: note = Tnp_domain
  SITE 203: note = Tnp_P1
  SITE 233: note = Tnp_P2
  SITE 241: note = Tnp_P3
  SITE 242: note = Tnp_P4
  SITE 254: note = Tnp_P5
MQGVDGAGVVVIRKRISRAKVLVFFADLQPCLIGIEACPSAHHWGRELEALGHTVRLMPPSYVKAYLKRSKNDANDAAAICEAVTRPSMRFVALKTKEQQASLMLHRTRQMLVRQRTMLINAMRGHLAELGIVSAKGRNGTGELLRIITDGADGRIPPMARGILGVLARQYSAIGAELGSIQKSILAWHRSCEASRRLEEIPGIGPIVATALVAEIGDWKAFGSGRNLAAWIGLVPKQHTTGGKDRLGGITKQGNRYLRWLLVTGAMAVIRYAQKHGTHKRPWLGRLMERRPTKVAAVALANKIARVAWAIMVHGDRYKEPELQAAA

SEQ ID NO: 14032 - protein, 336 aa, unidentified
  source 1..336: note = protein_811e820
  REGION 4..155: note = RuvC_domain
  SITE 7: note = RuvC_P1
  SITE 60: note = RuvC_P2
  SITE 100: note = RuvC_P3
  SITE 102: note = RuvC_P4
  SITE 105: note = RuvC_P5
  REGION 200..286: note = Tnp_domain
  SITE 208: note = Tnp_P1
  SITE 237: note = Tnp_P2
  SITE 245: note = Tnp_P3
  SITE 246: note = Tnp_P4
  SITE 259: note = Tnp_P5
MFQFGIDVSKKTLDLCLLREGVKGKVKTRKLKNDFNAADAVIGWLSKQHCEPANVHIIMEATGVYHESLAYGLYKAGAKVSLANPHRSREFARGMDILTKNDQVDAYMLACYGALKVPEPWVPPPENVRHLSALLRRRDAPVTDSTREKNRLEKCRATDTPLAVTESIENVLRNLSAEPEHLDALILTHLDQHPELKKDFDLLTSIKSVGYQLGLNMLVILRGHHFDTAEQVAAFLGVVRVEKYSGTSVRGKPKLSKIGPPEIRAKLYLASLCGLRFNPVMKAMYERLCLRGKAKMCAIGALMRKLVHWCYGVLKTQKPFDAEYLSSDARSACKAA

SEQ ID NO: 14033 - protein, 382 aa, unidentified
  source 1..382: note = protein_11016dd
  REGION 6..160: note = RuvC_domain
  SITE 9: note = RuvC_P1
  SITE 58: note = RuvC_P2
  SITE 98: note = RuvC_P3
  SITE 100: note = RuvC_P4
  SITE 103: note = RuvC_P5
  REGION 252..338: note = Tnp_domain
  SITE 259: note = Tnp_P1
  SITE 290: note = Tnp_P2
  SITE 298: note = Tnp_P3
  SITE 299: note = Tnp_P4
  SITE 311: note = Tnp_P5
MIAIWAGIDAGKTHHHCVAIDESGHRLLSRRVANDEPTLLELLADVLALGDEVAWGIDQADSGAALTIALLLNHDQPVHYLSGRAIHRASESYRGEGKTDAKDAAVIADQVRVRRDLHSVRTSDDTITDLKLLTGRRMDLVADRTRTVNRLRAHLTGIFPGLERALDLTNTGPLTLLTGYQAPAALRRLGVKRLATWLRNRKVLRANQLAETALLAAELVRTLATEVISLTQQIAELDKAIETRFREHHTFDVVTSMPGLGVILGAEFLAATGGDMTVFGTADRLAGFGGVAPVPRDSGKISGNLRRPRRYNRRLQRVFYISALFSIRYCENSRRFYDRKRAEGKRHIQAVLALARRCVNVLWALLRDGRRCEPAPPPPLVA

SEQ ID NO: 14034 - protein, 343 aa, unidentified
  source 1..343: note = protein_a860649
  REGION 4..157: note = RuvC_domain
  SITE 7: note = RuvC_P1
  SITE 55: note = RuvC_P2
  SITE 96: note = RuvC_P3
  SITE 98: note = RuvC_P4
  SITE 101: note = RuvC_P5
  REGION 219..304: note = Tnp_domain
  SITE 227: note = Tnp_P1
  SITE 257: note = Tnp_P2
  SITE 265: note = Tnp_P3
  SITE 266: note = Tnp_P4
  SITE 277: note = Tnp_P5
MITIGIDPHKRSLTAAALDPHSRLLGQLRVSASAQAGSQLLAWAEQWPQRRWAVEGASGLGRGIAQLLVAAGEQVVDVPAKLAARARLLSTSSARKTDLADACSVATAALHHRRLRPVALEDQTVILRLRSDRRDDLVAERTRILSRLHVLLADLAPGGATRELSATRAATLLRRVRPITVVDVERKRIARELLADVHRLDRQLKTASQAIRQAVRDHGTTLTQIYGVGPVLAAKLLGHAGDVTRFPDRDHFASYTGTAPVEASSGDVRRHRLNRGGNRQLNTALHLIAVCQIRDPSPGQSYYRRKLDQAKTPEEARRSLKRHLANVVYSHLTADHRCRTRAC

SEQ ID NO: 14035 - protein, 343 aa, unidentified
  source 1..343: note = protein_f8cb2b2
  REGION 6..150: note = RuvC_domain
  SITE 9: note = RuvC_P1
  SITE 54: note = RuvC_P2
  SITE 89: note = RuvC_P3
  SITE 91: note = RuvC_P4
  SITE 94: note = RuvC_P5
  REGION 213..300: note = Tnp_domain
  SITE 221: note = Tnp_P1
  SITE 251: note = Tnp_P2
  SITE 259: note = Tnp_P3
  SITE 260: note = Tnp_P4
  SITE 272: note = Tnp_P5
MKLIRVGVDLSKQVFQVHGVDWHEQAAWRCKLSRREWLKSLLKTIEPGCVIGMEACGGAHHWARQLQQHGFTVKLIAPQFVKPYVKSNKNDANDAEAICEAMARPTMRFVPVKTIEQQDIQATHRIRSGLIEQRTAKVNQTRGLVSEYGLIAPREVTQLRAAIPSWLEDAENGLSARFRRLLNGLWQDLMMLDERVKEMDREIAMIAATDPVAKRLQQLRGVGPITATALVATVGDANQFNNGRQMAASLGLTPRQSSSGGKERLLGISKRGDSYLRMLLVHGARSVIRTAKSKNDRLSQWVMRIASTRHPNIAAVALANKTARIAWAMMTKGTDYEPNLVSI

SEQ ID NO: 14036 - protein, 314 aa, unidentified
  source 1..314: note = protein_2e8bb8e
  REGION 8..153: note = RuvC_domain
  SITE 11: note = RuvC_P1
  SITE 55: note = RuvC_P2
  SITE 95: note = RuvC_P3
  SITE 97: note = RuvC_P4
  SITE 100: note = RuvC_P5
  REGION 190..274: note = Tnp_domain
  SITE 198: note = Tnp_P1
  SITE 227: note = Tnp_P2
  SITE 235: note = Tnp_P3
  SITE 236: note = Tnp_P4
  SITE 247: note = Tnp_P5
MTQPGPVVGIDVAKAELVVAVRPGDARWCVPNDALGLERLRARLQQLAPALVVLEATGGYERAAVAAIAATQLPVVVVNPRQVRDFARATGQLAKTDRIDADTLALFAERVRPTPRPLPDAVSAALEALLLRRRQLVGMLGAERNRLEHAVGPVRQDIRQHIRWLERRLAKVDQDLDDRIQRSPIWRAKDNLLRSVPGVGPIVSRTLLGELPELGQLNRKRIAALVGVAPLARDSGTLRGKRIVWGGRAPVRAALYMSALVAAHHNPVIRAFYRRLVAAGKPKKVALTACMRKLLTILNAMLRTETKWSHREIA

SEQ ID NO: 14037 - protein, 262 aa, unidentified
  source 1..262: note = protein_7b2dd55
  REGION 2..70: note = RuvC_domain
  SITE 9: note = RuvC_P3
  SITE 11: note = RuvC_P4
  SITE 14: note = RuvC_P5
  REGION 130..218: note = Tnp_domain
  SITE 138: note = Tnp_P1
  SITE 168: note = Tnp_P2
  SITE 176: note = Tnp_P3
  SITE 177: note = Tnp_P4
  SITE 189: note = Tnp_P5
MRPFVQGNKNDFADAQAICEAASRPSMRFVSVRNQAQQTVSALHRVRESLVAQRTGVINQVHAFLLEFGISLPRGQAILRRLPAVLAEHALPPQLGALLERLRSHFQYLDEQVGQIERELCLQLREDERSQRLLQIPGIGPITASVLMTELGDARQFGSARQFAASVGLVPRQYSTGGKPTLLGISKRGDKNLRRLLVQGARAIMRHVERRTDRLGAWVRELQARRHSNVVACALANKLARIAWAILANGTNYRSEQTVAPA

SEQ ID NO: 14038 - protein, 400 aa, unidentified
  source 1..400: note = protein_af9573d
  REGION 10..164: note = RuvC_domain
  SITE 13: note = RuvC_P1
  SITE 62: note = RuvC_P2
  SITE 102: note = RuvC_P3
  SITE 104: note = RuvC_P4
  SITE 107: note = RuvC_P5
  REGION 270..356: note = Tnp_domain
  SITE 278: note = Tnp_P1
  SITE 308: note = Tnp_P2
  SITE 316: note = Tnp_P3
  SITE 317: note = Tnp_P4
  SITE 329: note = Tnp_P5
MRERRSRVWAGIDAGKGHHWAAAVDETGATLWSKKIDNDESAILTALGEILELADEVHWAVDISGTSSALLLALLAAHGQQAVYVPGRTVNRMSGAYRGEAKTDARDAYVIAETARQRRDFAVINVPAQLTADLALLTGHRSDLVADRVRLVNRLRDVLTGIFPALERAFDYSSHKGALVLLTGHQTPAALRRRGRARLTAWLASRGVRGADAVAATAMEAARAQHTALPSEDVAAQIVADLAAQVLALDDRLKRINKQIRDTFRGHPQAEIIESLPGMGPILGAESVVSAGDLSAYVDAGHLASAAGLVPVPRDSGRRTGNLHRPKRYSRRLRRVFYMSAQTSIIREGPNRDFYLKKRAEGCKHVQAVIALPRRRASVLWALLRDGRVFTSAPPVTQAA

SEQ ID NO: 14039 - protein, 343 aa, unidentified
  source 1..343: note = protein_2cae2cd
  REGION 6..149: note = RuvC_domain
  SITE 9: note = RuvC_P1
  SITE 54: note = RuvC_P2
  SITE 89: note = RuvC_P3
  SITE 91: note = RuvC_P4
  SITE 94: note = RuvC_P5
  REGION 213..298: note = Tnp_domain
  SITE 221: note = Tnp_P1
  SITE 251: note = Tnp_P2
  SITE 259: note = Tnp_P3
  SITE 260: note = Tnp_P4
  SITE 272: note = Tnp_P5
MKLSRVGVDLAKNVYQLHGVDRFGKTIWKRRLKRHQWLKVLLDKTEPGCVIGMEACASAHHWGRELQSRGYTVRLVPAQFVKPYVKSNKNDARDAEAICEAMSRPNMRFVTVKTVAQQDIQATHRIREEFKVRRTAKANQIRGLVAEYGLVAPKHLSSLRAAIPCWLEDAENGLTHYFRSLLQGLWSDLLALDDRMCEMDKTIKQLAKDNEDCVRLQQLRGIGPMTSTAMIATVGDARQYHKSRQMAAGIGITPRQHSSGDKHRLLGISKRGDVYLRTLMIHGARSVVTGAKHKDDPLSRWVTEIAKRRHPNVAAVALANKNARMAWAILRNKTDYNPEYAIS

SEQ ID NO: 14040 - protein, 407 aa, unidentified
  source 1..407: note = protein_94c8922
  REGION 4..160: note = RuvC_domain
  SITE 7: note = RuvC_P1
  SITE 57: note = RuvC_P2
  SITE 97: note = RuvC_P3
  SITE 99: note = RuvC_P4
  SITE 102: note = RuvC_P5
  REGION 269..355: note = Tnp_domain
  SITE 277: note = Tnp_P1
  SITE 308: note = Tnp_P2
  SITE 316: note = Tnp_P3
  SITE 317: note = Tnp_P4
MIFVGDDWSEGHHDLWLSDVEGTRLGSVRLVEGVDGLGRFHELVAGFVDDPSEVVVGIETDRGLWVVALVAAGYRVFVVNPKSMSRYRDRYRLSGAKSDVSDAMVLSDVVRTDRHHHREVAGDTNQAEAIKVLARTHQNLVWERTSTSHRLRSTLREFYPQALAVFSELAHRDALGVLAKAPTPVQGAALSVSQIKAVLKKAGRQRYLDVTAEKIRDGLRTSGLAAPPPVTAAMGAVCETLVTLITTLNTEIERLESLLADHFEQHPDAHIYLSLPGAAVVLGARMLGEFGDDPNRFTDAKSRRNYAATSPITVASGKSRYVKARYVKNHRLNDAVIRWAFCSINVDADSRAFYDQQRAKNHGHYTALRALANRLVGILDGCLRTNTEYNPDTAWGHRRNEETSRAA

SEQ ID NO: 14041 - protein, 433 aa, unidentified
  source 1..433: note = protein_d6b061c
  REGION 30..193: note = RuvC_domain
  SITE 33: note = RuvC_P1
  SITE 87: note = RuvC_P2
  SITE 133: note = RuvC_P3
  SITE 135: note = RuvC_P4
  SITE 138: note = RuvC_P5
  REGION 305..391: note = Tnp_domain
  SITE 312: note = Tnp_P1
  SITE 342: note = Tnp_P2
  SITE 350: note = Tnp_P3
  SITE 351: note = Tnp_P4
  SITE 364: note = Tnp_P5
MRQVPRALVNSMADNFFMKEVISLSNSLLVGIDVSLNDNKVRILHPDGTSLSKFVVANSVPGAKSLSKKVVGIAEKNGFDNIVIGLESTSVYGDPLVYFLKQDVSVNRFNTKIHVLNPTQVNKFKMFYPDLPKTDDIDAWIIAEHLRFGRINKEVYMDDRYKALQKLTRARFHTVQNLAREKNWFLNNLFLKFSSLAQEKIFSDRFGATASSIIEEFFSVDEISYMPIEDLAEFINKKGKGHFQNPEEVAAAVQKAARSSYRLPKTVTDSVNQVLAVSFVAMKAYKEQLKIFDKAIEEQFKLIPNTLTSVKGIGPVYAAGIVAEIGDIHRFKDHAALAKFAGIAWTKYQSGNFTAANTHLIKSGNRYLRYYIMEAANKVRMHDPEFKRFYDLKYSQTPKTPHKRALALTARKFVRLVYALLHSNRLYTPPKGE

SEQ ID NO: 14042 - protein, 338 aa, unidentified
  source 1..338: note = protein_be8bd89
  REGION 1..105: note = RuvC_domain
  SITE 3: note = RuvC_P2
  SITE 43: note = RuvC_P3
  SITE 45: note = RuvC_P4
  SITE 48: note = RuvC_P5
  REGION 211..296: note = Tnp_domain
  SITE 219: note = Tnp_P1
  SITE 249: note = Tnp_P2
  SITE 257: note = Tnp_P3
  SITE 258: note = Tnp_P4
  SITE 270: note = Tnp_P5
MLDISGTSSAPLPALLAAHGQQAVYVPGRAVNRMAGAYRGEAKTDARDAYVIAETVRHRNDFAAIDLPAQPAADLAPLTAHRSGLVADRVRTINRLRDVLTGVFPALERAFDYSSQKGALSLLTGYQTPVAIRRRGRARLTARPANRGVRGADAVAATALQAAQAQQTALPGEDAAAQILADPAVQILALDDRLKRIDKQIRATFRSHPQAEIVGSPPGMGPIPGTEFVVAAGDLSAYPDAGHLASAAGLVPVPRDSGRRTGDLRRPKRYSRRLRRVFSMSARTSIIRDGPDRAFCLKKRGEGCKDVQAVIAPARRQAGVLRALLRDGRVFTSAPSVT

SEQ ID NO: 14043 - protein, 429 aa, unidentified
  source 1..429: note = protein_d578bc0
  REGION 6..162: note = RuvC_domain
  SITE 9: note = RuvC_P1
  SITE 59: note = RuvC_P2
  SITE 99: note = RuvC_P3
  SITE 101: note = RuvC_P4
  SITE 104: note = RuvC_P5
  REGION 276..364: note = Tnp_domain
  SITE 284: note = Tnp_P1
  SITE 314: note = Tnp_P2
  SITE 322: note = Tnp_P3
  SITE 323: note = Tnp_P4
  SITE 336: note = Tnp_P5
MTRISAGVDVSKNRSTVCIMDQDGKFIMRPFLVWHSTEELDFLADTLKRLNGEVRVIMESTSVYQYPIALQLKERGLFISIVNAYEMKQFANIDFRGGKTDKKDSRTIASYGISYWDKLVEWQIPKDTYFNLDLLNRTYMNAKKHRQIILQELQHYIDCAMPGMDKELHSLNLSTKKDFMLDFVEKFWHRDEIVNMTEAEFTEVFTAWAKKKGYRPVEGKAAKIYAIAKSCIPYYPANPTVKTILQCIVDKLSGVNRTLVTIVTQMIEEAKKLPEYQIVREMPGVGDPLAARFFGSAGDIRRFKNSKALVAYAGIDSPPDESGDFSSTHRHITKKGSKVFRDTGYEIMMALRAQKRTWEKVRKNPEVYDYMLKKEAEEKPRKVAKIAALNKFLRIVYARIKELYDNMALAERAKAKTKSKTKAKTKATA

SEQ ID NO: 14044 - protein, 410 aa, unidentified
  source 1..410: note = protein_3ea6b5d
  REGION 11..166: note = RuvC_domain
  SITE 14: note = RuvC_P1
  SITE 63: note = RuvC_P2
  SITE 103: note = RuvC_P3
  SITE 105: note = RuvC_P4
  SITE 108: note = RuvC_P5
  REGION 274..361: note = Tnp_domain
  SITE 282: note = Tnp_P1
  SITE 313: note = Tnp_P2
  SITE 321: note = Tnp_P3
  SITE 322: note = Tnp_P4
  SITE 334: note = Tnp_P5
MTVEDGLPVYVGLDWAAEIHAVCVLDHAGYQLAAFTIKHSADGIATLIGKLGRYGDPADVQVGIERPNGRLVDLLLEAGHPVVPVSPNAIKTWREGEVISGAKSDVGDAAVIAEYLRLRNHRLRPVQPYSPQTKALRTVVRSRDDLVQMRVAATNQLDALLDAHWPGAQAIFADTASAISLAFLRRYPTAAAAAHLGHKRLAAFITKQGYSGRRPANVLLARLRGAPAGTTDPALSTAVGDAVLAFVEVVAALNIAIKQLDTSLTARLGEHPDSKIFTSLPRSGQINAAQVLAEWGDVRQAYDGPDAIAALAGVTPVTKESGKRQHAVHFRWACNKRFRLALTTFADNSRHASPWAADTYNRARARGHDHPHAVRILARAWVRVIYRCWHTDQPYNANLHGGALRLPIAA

SEQ ID NO: 14045 - protein, 344 aa, unidentified
  source 1..344: note = protein_6cd8bd4
  REGION 7..147: note = RuvC_domain
  SITE 10: note = RuvC_P1
  SITE 53: note = RuvC_P2
  SITE 88: note = RuvC_P3
  SITE 90: note = RuvC_P4
  SITE 93: note = RuvC_P5
  REGION 210..297: note = Tnp_domain
  SITE 218: note = Tnp_P1
  SITE 248: note = Tnp_P2
  SITE 256: note = Tnp_P3
  SITE 257: note = Tnp_P4
  SITE 269: note = Tnp_P5
MEQIIRIGMDTSKSVFQLHGVNVMEQPILRKKLSRKEMLKFFANTPPTTVAVEACGGSHHWARLLSSFGHDVKLIAPQLAKPYVKRGKNDAADAEALCEAMSRPTMRFVTVKTADQQAALMLIGVRQRLLHNRTQLANAIRGFAMEFGVVAAKGMCRIEPLLERLAADESLPELARELFAMHGEEHRELLRKIEEVDERLMKLHRADECSKRLAEIPGVGPVGASLLMMKTPDPRMFKSGRDFAAWIGLTPKDHSTAGKVRLGVITRAGDEMLRSVLVVGATSLLQQVRSGRSRHASSWLLGLLQRKRPKLVAVALANKIARIAWKLMISGETYQRAEGQRPTA

SEQ ID NO: 14046 - protein, 307 aa, unidentified
  source 1..307: note = protein_b7ace43
  REGION 1..76: note = RuvC_domain
  SITE 7: note = RuvC_P3
  SITE 9: note = RuvC_P4
  SITE 12: note = RuvC_P5
  REGION 176..261: note = Tnp_domain
  SITE 184: note = Tnp_P1
  SITE 214: note = Tnp_P2
  SITE 222: note = Tnp_P3
  SITE 223: note = Tnp_P4
  SITE 234: note = Tnp_P5
MFPGAAKTDPIDTRKILELFHLKDHLPLAKDALQEVVSTPPVNDKLKRLSRRRRQLVNDKIRVVNRIQSDLQAVCPELLAITNKLSNLCFLRFLTCRDELTQLARLRRSTLLKVRGIGQKYAWTIQQWQRKASFSSEASYVGPMIISDARRILELLSQIHILDEALAELADQSEFACRIASIGGFGKTSIAELAGEIGTIERFTGEGSLALYLGMSPLSKDSGQHHGSKCPRQVNHRAKGAMMTAVARHIDHVSESKAYYDKKRAEGKKHNQAVRALGRHLVRVIWSMVKNERDYELRTPGGDTNVT

SEQ ID NO: 14047 - protein, 409 aa, unidentified
  source 1..409: note = protein_78a92a3
  REGION 5..166: note = RuvC_domain
  SITE 8: note = RuvC_P1
  SITE 63: note = RuvC_P2
  SITE 108: note = RuvC_P3
  SITE 110: note = RuvC_P4
  SITE 113: note = RuvC_P5
  REGION 282..369: note = Tnp_domain
  SITE 290: note = Tnp_P1
  SITE 320: note = Tnp_P2
  SITE 328: note = Tnp_P3
  SITE 329: note = Tnp_P4
  SITE 342: note = Tnp_P5
MKLFVGIDVSSKDLVTSMISEEAHQEVFQGNFPNDLKGASELKNSIIDTANSCHLTQVVIGMEATSIYSFHPAMFFQEDNDLKQFDAQSVVIDPKKTKRYHDVFAEDKNDRIDAFYIADYLRVGHYSVGIVRQENYIALQRLTRSRYELVQSLTRAKQHFIENLYYKLNKLVVSEELNTSIFGSTMMKLLTEDMTTDDLLNLSITDLAQYLDEHGRGRFADPEALARTIQKAVRASYRLNQVVANSVDTVLSVYAEEIKAFQKMIKDLDKSIEKVVQVTPEEQILRSIPGIGPVYAAGILAEIGQIDRFDNEAKLAKYAGLSWQEKQSGSYKSDNTPMKRTGNAYLRYYLVEAANRVKSLDPVFGEYYQRKYKEVNRTPSKRALVLTARKLIRVIFFLLKNHQIYQEKR

SEQ ID NO: 14048 - protein, 353 aa, unidentified
  source 1..353: note = protein_1e5ba06
  REGION 11..152: note = RuvC_domain
  SITE 14: note = RuvC_P1
  SITE 57: note = RuvC_P2
  SITE 92: note = RuvC_P3
  SITE 94: note = RuvC_P4
  SITE 97: note = RuvC_P5
  REGION 216..301: note = Tnp_domain
  SITE 224: note = Tnp_P1
  SITE 254: note = Tnp_P2
  SITE 262: note = Tnp_P3
  SITE 263: note = Tnp_P4
  SITE 275: note = Tnp_P5
MSTPNTAIAVIGIDIGKNSFHVVGHDTRGAIVLRQKWSRGQVEARLANMSRCLIGMEACVGAHHLSRKLASLGHDARLMPAKYVRPYSKGQKNDFNDAEAIAEAVQRPTMKFVATKTAEQLDLQALHRVRERLVSQRTGIINQIRAFMLERGIAMRQGIGFLRTELPTILATRTDALSPRMLRVIEELAVDWRRLDQRIDGLSGEIEAIARQDQACSRLMTVPGIGPIISSAMGAAIGTEDVFSKGRDFGAWLGLVPKQISTGDRTILGKVSRRGNRYLRGLFVQAAWVVLVRIKNWERYGFTSWIEVAKKRLHHNVLAIALANKLARIAWAVLAKGRAFEMTRIGDADARSA

SEQ ID NO: 14049 - protein, 400 aa, unidentified
  source 1..400: note = protein_4451c29
  REGION 7..163: note = RuvC_domain
  SITE 10: note = RuvC_P1
  SITE 61: note = RuvC_P2
  SITE 101: note = RuvC_P3
  SITE 103: note = RuvC_P4
  SITE 106: note = RuvC_P5
  REGION 269..356: note = Tnp_domain
  SITE 277: note = Tnp_P1
  SITE 308: note = Tnp_P2
  SITE 316: note = Tnp_P3
  SITE 317: note = Tnp_P4
  SITE 329: note = Tnp_P5
MAQPVWAGVDAGKADHYCVVIDADGASLLSRRVTNDEAALLELIDMVTSLADSGEITWAIDLNAGGAALLITLLIAAEQRLLYIPGRTVHHASGGYRGDGKTDAKDAAVIADQARMRRDLQPLRPGDDIAIELRILTSRRSDLVADRTRAINRLRAQLLEYFPALERAFDYSKSKAALILLTGYQTPDGLRRAGAARVAAFLRKRKARNADAVATGAIEAANAQYTVVPGQQLAAGVVARLAEEVMALDTEIGDTDAMIEDRFRRHRHAEIILSMPGFGVTLGAEFIAATGGDMSTFPSVDRLAGVSGLAPVPRDSGRITGNLKRPRRYDRRLLRACYLSALVSIRTDPASRTYYDRKRAEGKRHTQAVLALARRRLNVLWAMLRDHTTYQPTAPNTAAA

SEQ ID NO: 14050 - protein, 422 aa, unidentified
  source 1..422: note = protein_a2d772a
  REGION 7..164: note = RuvC_domain
  SITE 10: note = RuvC_P1
  SITE 63: note = RuvC_P2
  SITE 103: note = RuvC_P3
  SITE 105: note = RuvC_P4
  SITE 108: note = RuvC_P5
  REGION 277..371: note = Tnp_domain
  SITE 285: note = Tnp_P1
  SITE 315: note = Tnp_P2
  SITE 323: note = Tnp_P3
  SITE 324: note = Tnp_P4
  SITE 337: note = Tnp_P5
MNFGPVVGIDVSKRFSDMCILSPDNQIFAQTKIYHDSTSMKRAEALLKKATEAFGGRPAVVMEATSHYHLILFQFFSDCGYDVLVVNPLQSSSMKDFSIRKRKTDKVDALKLAMLYRTKTLRPSQIPQSAIRALRLLCRERVELLNDVTRYKNRLTAFLDQIFPGYDKVFSDVGSITSRAVLSHFPTPAILLASDEYELVEVIATASKSGYKFAKKKAEALIKTAETAKVLGIHTCADESMILSIIPVLNTLSDSVTYLEQSIGNLLAQVKTVRKNVELLQTIPGVGPHSASLIMAEIGDISLFKKPKQLAAYFGLDPSERQSGTFRGTKNKLSKRGSPYARAALHMAVVNAVFKHANAPAANPVLSGYYENKCKTKPAKVALAASMHKLIFIIFAVLRDQKPFELRTPEQHAREQGFIKVA

SEQ ID NO: 14051 - protein, 343 aa, unidentified
  source 1..343: note = protein_114901e
  REGION 6..148: note = RuvC_domain
  SITE 9: note = RuvC_P1
  SITE 52: note = RuvC_P2
  SITE 87: note = RuvC_P3
  SITE 89: note = RuvC_P4
  SITE 92: note = RuvC_P5
  REGION 210..301: note = Tnp_domain
  SITE 218: note = Tnp_P1
  SITE 248: note = Tnp_P2
  SITE 256: note = Tnp_P3
  SITE 257: note = Tnp_P4
  SITE 269: note = Tnp_P5
MQITTIGLDLAKHWFQVHGVDADGHVVVRRRLRRSGVIAYFRSLEPCLVGMEACATAHYWARELIALGHTVKLMPPAYVKAYVKRNKNDAADAAAICEAVTRPSMRFVPVKDAEQQSVLMLHRARSLLARQRTMLVNPLRAHMAEFGIVAPQGLRHVGILTRTIAHQQERLPELARSILQTTVDQLNGTRVRIREIEGRLVKWHQQSRVSRLLATVPGVGIMGASAIAATVDDPFLFRSGREFAAWLGMTPRQNSSGGKERLGRTSKRGDKYIRSLLTAGAVAVLRHVHNRPTRDGEWVRALLARKPTKLAVVALANKTARIVWAVMMRGDGYRVKEVFERPA

SEQ ID NO: 14052 - protein, 387 aa, unidentified
  source 1..387: note = protein_a61be00
  REGION 4..159: note = RuvC_domain
  SITE 7: note = RuvC_P1
  SITE 57: note = RuvC_P2
  SITE 98: note = RuvC_P3
  SITE 100: note = RuvC_P4
  SITE 103: note = RuvC_P5
  REGION 263..347: note = Tnp_domain
  SITE 269: note = Tnp_P1
  SITE 299: note = Tnp_P2
  SITE 307: note = Tnp_P3
  SITE 308: note = Tnp_P4
  SITE 320: note = Tnp_P5
MYYIGIDISKFKHDCAVIDDSGEIVTPSWSFTNDAEGFSQLKLLLNSLDTETRIGLESTGHYGMNLKLFLESNNFSFMEFNPLLINRFVKSKSLRKTKSDSIDCMMIAHYLMTVEYKPYPSSFYHTEKLKSLTRFRDSLIRLRSRQLVELTNILDNVFPEFKPFFGSRFSVTALYILSNYSSPEKIANMNSKSYEALRKLSRGRFSTVDFAKLKQLAKNTIGTTEDYLLLQMQIVLDIYRQLDSKIDETEVSIKECVSDMNPPMLSVPGIGIESAAVILAEFGDFSKFKNASQMLFFAGLEPGYFQSGTSETTGKMVKHGSSYLRYALMNCAQTVVNYEPTFAMFYSKKRAEGKPHRVALSHVVKKLLRVIYTLQTKNIAYDADFVR

SEQ ID NO: 14053 - protein, 345 aa, unidentified
  source 1..345: note = protein_b0728f8
  REGION 24..155: note = RuvC_domain
  SITE 57: note = RuvC_P2
  SITE 95: note = RuvC_P3
  SITE 97: note = RuvC_P4
  SITE 100: note = RuvC_P5
  REGION 215..301: note = Tnp_domain
  SITE 223: note = Tnp_P1
  SITE 253: note = Tnp_P2
  SITE 261: note = Tnp_P3
  SITE 262: note = Tnp_P4
  SITE 274: note = Tnp_P5
MENSRGRIYRSRRIDERDGGLDPPRCQRIWRGKCASDPRVIAELIRKRAPAVKRVVFETGPLSVWFYHALCAEGLPAICIDARHAKAALDMAANKTDANDADGLAHLAEVGFFREVRVKGFDSMLTRTLVAARTRLVRITVELSNQIRGLMKTFGLLVPAGKGSSFEKNVRGLLIDQEGLAPILLPMLEAWRSMRLRAAELGRQLVADARQSQACRILMSIPGVGVITATAFATAIENPDNFKQSRSVGAWVGLTTRRYQSGEVDYDGHISRRGDRHLRGLLYEAAAVILTRSSTDSSLRRWGLQLRERIGFKRAAVAVARKLAVVMHSMLKTGEFFDRNAGATT

SEQ ID NO: 14054 - protein, 408 aa, unidentified
  source 1..408: note = protein_0809f65
  REGION 4..165: note = RuvC_domain
  SITE 7: note = RuvC_P1
  SITE 64: note = RuvC_P2
  SITE 102: note = RuvC_P3
  SITE 104: note = RuvC_P4
  SITE 107: note = RuvC_P5
  REGION 273..359: note = Tnp_domain
  SITE 281: note = Tnp_P1
  SITE 312: note = Tnp_P2
  SITE 320: note = Tnp_P3
  SITE 321: note = Tnp_P4
MLFVGDDWAEDHHDVELMDAAGRRLAKARLSEGVAGIARLHALIGAQLGDDVEDAAGQVKIGIETDRGPWVQALVAAGYTVFAVNPLQAARYRERLAVSGAKSDAADAHMLADMVRTDSHQLRPVAGDSVEVEAVKVVTRMHKTLIWERTRAGQRLRHALREYFPAALEAFEDLDAVDTLELLAKAPDPASAARLSTAQISVALKRARRRDIAVKAATIQAVLRAQHLGQPALITAAYAVSVRALVAVLGTLGEQVKILQGQVEAHFGQHPAAEIVLSQPGLGAVLGARVLAEFGDDHDRYVSAKARKNYAGTSPITRASGKKKTVAARFVHNDRLIDALMTQAFTSLRNSPGARAYYDRQRARGASYNAALRQLANRLVGILHGCLKTGTPYNEATAWSHHLSKAPA

SEQ ID NO: 14055 - protein, 386 aa, unidentified
  source 1..386: note = protein_ca44db7
  REGION 42..185: note = RuvC_domain
  SITE 79: note = RuvC_P2
  SITE 118: note = RuvC_P3
  SITE 120: note = RuvC_P4
  SITE 123: note = RuvC_P5
  REGION 255..342: note = Tnp_domain
  SITE 263: note = Tnp_P1
  SITE 292: note = Tnp_P2
  SITE 300: note = Tnp_P3
  SITE 301: note = Tnp_P4
  SITE 313: note = Tnp_P5
MQKLNDLSRCLTPLEPDSTLIAVIEMSLSSWLVAGIVPGVERQPLKKLAVDESVLLKLLHRWREEAKKAGYMIKRIAVAFEAGRDGFWLARCLRARDVEVHVIHASSVAVSREHRRAKTDRLDTELLKRAFLGWLRGERDHCKMVAIPTIKDEDGKRPNRERESLVGEQSRVINRIKATLVRLGIRGFNPKLKKAPERLEGLRTPEGERIPPNTLSELHRDMERRRLLRDQIRQIESARRDRLEHAPGEGAHAMVRLLARVMGIGIETADMLVQEVLSRNLRDRRAVARYAGLTGSPDESGKKRREKGLARSGNPRVRRGMIQLAWRFLLFQKDSTLAQWFRARTENARGTRKTMIVALARKLLIALWRLVREGVVPDGVILRPAQ

SEQ ID NO: 14056 - protein, 345 aa, unidentified
  source 1..345: note = protein_8d039c8
  REGION 6..148: note = RuvC_domain
  SITE 9: note = RuvC_P1
  SITE 52: note = RuvC_P2
  SITE 87: note = RuvC_P3
  SITE 89: note = RuvC_P4
  SITE 92: note = RuvC_P5
  REGION 211..298: note = Tnp_domain
  SITE 219: note = Tnp_P1
  SITE 249: note = Tnp_P2
  SITE 257: note = Tnp_P3
  SITE 258: note = Tnp_P4
  SITE 270: note = Tnp_P5
MKISTIGIDLAKEVFQIHAADERGKVVQRKKLKRKEMTAYFANLEPCLIGMEACSSSHYWARKLQSMGHTVKLMAPQFVKPYVKSNKNDVADAEAICEAVTRPTMRFVGIKNVNQQTVLCLHRARRLLVAERTAQANQIRGLLAEFGIVSPQGIRTLRNRIPDILEDAENELTAEMRELLTMMSERIKDIDEKVGDLELKIRQSNQRNEMIAELQKIPGIGPLTASAVVATIGDFKEFRNGRELAAFLGIVPRQHSSGGKQNLLGISKRGDGYLRTLLVHGARSVIRFAETKQEKNAWLVDLIGRRNKNIAAVALANKNIRTIWAMMTRGEQFNPAHISQAPVPV

SEQ ID NO: 14057 - protein, 444 aa, unidentified
  source 1..444: note = protein_5cc6661
  REGION 42..205: note = RuvC_domain
  SITE 45: note = RuvC_P1
  SITE 99: note = RuvC_P2
  SITE 145: note = RuvC_P3
  SITE 147: note = RuvC_P4
  SITE 150: note = RuvC_P5
  REGION 317..403: note = Tnp_domain
  SITE 324: note = Tnp_P1
  SITE 354: note = Tnp_P2
  SITE 362: note = Tnp_P3
  SITE 363: note = Tnp_P4
  SITE 376: note = Tnp_P5
MACSGMILIREVADAPVIMGISKSAGLKSRRGEVKIVNPLFVGIDVSSRSNVAYLMKPDGSKHSSFSVQNNLGGAKLLSERIVSALHSMQLSDVVIGLEATSIYGDSLVYALREDGGLGRFQRKIYVLNPKQVKKFKEAYPDLPKNDFVDAFVIADHLRFGRIAKEVYMDDYRYQALRTLTRARFDVIQNLTREKQRFANYLFLKCSGIAQTKDIQNTSATTIALMEHFETVDDLANADMEELTSFITEAGRGRFSDPAAAAKAVRAAARGSYRLPKTVNDTVNQAMSVSIASMRALKEQVKVLDKAIEQQFEIVPNTLTSIPGIGKVYSAGIIAEIGNIHRFGSQASVAKFAGLVWHKDQSGEFEAEHSRMIKSGNRYLRYYLLEAANSVRRCDSEFRRYYDLKFHEVNKYQHKRALALTARKLVRLIFRLLKDNRLYIPPEG

SEQ ID NO: 14058 - protein, 391 aa, unidentified
  source 1..391: note = protein_6228d12
  REGION 4..163: note = RuvC_domain
  SITE 7: note = RuvC_P1
  SITE 60: note = RuvC_P2
  SITE 101: note = RuvC_P3
  SITE 103: note = RuvC_P4
  SITE 106: note = RuvC_P5
  REGION 266..353: note = Tnp_domain
  SITE 274: note = Tnp_P1
  SITE 304: note = Tnp_P2
  SITE 312: note = Tnp_P3
  SITE 313: note = Tnp_P4
  SITE 326: note = Tnp_P5
MIYAGIDVSKDKHDCFITNSDGKILFKSFTIPNNREGFEVLYQKITSTTDDLTNVKVGLEATGHYSYNILGFLLDKGLTTFVINPLHTSLFRKSLSLRKTKTDKVDSHTIATMLMSDVNLKSYSDISYHNEELKSLTRYRFDKVRERAKLKTSVSRLVTILFPELEKLVPTLHMPSISALLSEFPGAFQIASAHLTRLTNLLYETSKGRYGRDNAILFRETARASIGSNMPVKSLELKHTLKLIGELDAEIDEIEQEIKRIMDELHSPILTIPGISYRMGAMILAEIGDFSRFDSPDKILAYAGLSPSTYQSGQLESSHSHMEKRGSRYLRYALFNAAKFVCKWDPVFAAYLAKKRAEGKHYNVAVSHAAKKLVRVIYRLEKSGQAYNKVS

SEQ ID NO: 14059 - protein, 320 aa, unidentified
  source 1..320: note = protein_59f653d
  REGION 8..155: note = RuvC_domain
  SITE 11: note = RuvC_P1
  SITE 56: note = RuvC_P2
  SITE 96: note = RuvC_P3
  SITE 98: note = RuvC_P4
  SITE 101: note = RuvC_P5
  REGION 195..279: note = Tnp_domain
  SITE 203: note = Tnp_P1
  SITE 232: note = Tnp_P2
  SITE 240: note = Tnp_P3
  SITE 241: note = Tnp_P4
  SITE 252: note = Tnp_P5
MSVTSTTVGIDVAKAHVDVCVLGTKSDAQRLDNDAEGHSALAAALQPLGVGLVVMEATGGYEAALACALQAAGLPVAVVNPRQARDFAKSMGRLAKTDAVDARMLAELGSVLVRREDLDRFLRPLADERQQWLAALVTRRRQLLTMMHSERQRPQITPKKLHASIEVIVAVIKAQLDEIEGQMVAHVREHFGELDSLLQFAAGIGPVASATLIAELPELGKLNRREIAALVGVAPMANDSGSSKGRRRVQGGRFEIRRALYMATLTATRYNPAIKAFYERLKAAGKMPKVALVAYMRKLLTTLNAMVRTGKPWDKSLHGA

SEQ ID NO: 14060 - protein, 341 aa, unidentified
  source 1..341: note = protein_29adf15
  REGION 7..149: note = RuvC_domain
  SITE 10: note = RuvC_P1
  SITE 53: note = RuvC_P2
  SITE 88: note = RuvC_P3
  SITE 90: note = RuvC_P4
  SITE 93: note = RuvC_P5
  REGION 211..296: note = Tnp_domain
  SITE 219: note = Tnp_P1
  SITE 249: note = Tnp_P2
  SITE 257: note = Tnp_P3
  SITE 258: note = Tnp_P4
  SITE 270: note = Tnp_P5
MSEVSTIGLDIAKHVFQGHGADASGRVVFRKKITRSKLMEFFASQPRCVVALEACGGAHHWGREIGKLGHTVRLIPPAYVKPFVKRQKNDAADAEAICEAAQRPSMRFVAVKDEEQQANGVVFRARDVLVRQRTQCINALRGHLTEYGWVVPKGTAHVATLIGQIEDPNCSLPESARAIFRVLVTSLTSLEESIAVLDSEISRRSKEDPVARRLMTIPGVGPITATAITALAPPIETFATGRDFAAWLGLTPLQKSTGGKQRLGAISKMGERTLRRLLIIGGSAVVSHACRRGAPDGSWLARMLARKPRMLVTVALANKMARIVWALLAKGGAYRAPVAAA

SEQ ID NO: 14061 - protein, 344 aa, unidentified
  source 1..344: note = protein_6872eb7
  REGION 7..150: note = RuvC_domain
  SITE 10: note = RuvC_P1
  SITE 55: note = RuvC_P2
  SITE 90: note = RuvC_P3
  SITE 92: note = RuvC_P4
  SITE 95: note = RuvC_P5
  REGION 214..300: note = Tnp_domain
  SITE 222: note = Tnp_P1
  SITE 252: note = Tnp_P2
  SITE 260: note = Tnp_P3
  SITE 261: note = Tnp_P4
  SITE 273: note = Tnp_P5
MNKLNRVGIDLAKSVFQLHGADRHGKALWKRRLSRNKWLKALLEVAAPDCEIGMEACGGAHHWARVLQSYGYTVKLIPPQFVKPYVKSNKNDAKDAEAICEAMSRPGMRFVSVKTVEQQDIQAVHRVRSGLMTERTALANRIRGLVAEYGLVAPRALTALRRALPDWLEDADNGLSDCFRSLLRGLWEDLQRLNQRIGELDKEIILIAQNNSVTQRLQQLRGVGPLVATALVATVGTGQQYGKGKQMAASIGLTPRQHSSGNKDRLLGISKRGDAYLRTLLIHGARAVVSQAKHRDDRLSRWCTDLARRSHPNVAAVALANKTVRMAWAMMQNESDYDPGFSSP

SEQ ID NO: 14062 - protein, 310 aa, unidentified
  source 1..310: note = protein_7970815
  REGION 8..168: note = RuvC_domain
  SITE 11: note = RuvC_P1
  SITE 55: note = RuvC_P2
  SITE 95: note = RuvC_P3
  SITE 97: note = RuvC_P4
  SITE 100: note = RuvC_P5
  REGION 191..275: note = Tnp_domain
  SITE 199: note = Tnp_P1
  SITE 228: note = Tnp_P2
  SITE 236: note = Tnp_P3
  SITE 237: note = Tnp_P4
  SITE 248: note = Tnp_P5
MKQTIVYIGIDVAKAHLDVAWQKRLRRFDNDKAGRATLVKWIKQKQSDPVQVICEASGGYEQELLDALAEADLAFSLVQATRVRQYARAAGILAKTDKVDARVLARFGAAMRPEPTSPRSAAQKLLRELEAQRRHLSDLLVAEQNRLEQLNDEKLRRLTRALMGTLKKQIALIDSRIATLIMQDQELCQKAQKLTSVKGVGERTAALLLAQMPELGTLNRREAAALAGLAPFNRDSGTMRGKRLIFGGRRAVRHGLYMAALVASRRNPILSSFYRRLRIKDKPHKVALTAVMRKLLLALNQALTPNQSFT

SEQ ID NO: 14063 - protein, 353 aa, unidentified
  source 1..353: note = protein_9916947
  REGION 15..162: note = RuvC_domain
  SITE 18: note = RuvC_P1
  SITE 68: note = RuvC_P2
  SITE 104: note = RuvC_P3
  SITE 106: note = RuvC_P4
  SITE 109: note = RuvC_P5
  REGION 235..318: note = Tnp_domain
  SITE 240: note = Tnp_P1
  SITE 270: note = Tnp_P2
  SITE 278: note = Tnp_P3
  SITE 279: note = Tnp_P4
  SITE 291: note = Tnp_P5
MTSLTDLREVVDVVIGVDTHVHTHSAAVIDSATGGVIGEITVPATAAGYAELVEFAGEYPTLRAWAIEGTGGHGAGLTRHLLESSKLVVELDRPKRSARRNGAKSDPLDAIRAAREAMARPRLGTPRSGSERQALSVLLTARRSAINASTEAQLQVFSLVVAAPGPIRVRFRGQKLAAMLNTAAALRVQSAWDVETTSTVVALRTLARRAHAMLKEARELQKAILAIIRGWRPDLLAEFGVGPIVAATVLCAWSHPGRVHSEAAFAMLAGVAPIPANSGQVTTRYRLNRYGDRHLNAALHTVVQSRIQYQPATRDYVARRTGEGKTSREIKRCLARYVARDLYRLLESGAAAA

SEQ ID NO: 14064 - protein, 361 aa, unidentified
  source 1..361: note = protein_28ce748
  REGION 4..162: note = RuvC_domain
  SITE 7: note = RuvC_P1
  SITE 59: note = RuvC_P2
  SITE 99: note = RuvC_P3
  SITE 101: note = RuvC_P4
  SITE 104: note = RuvC_P5
  REGION 236..324: note = Tnp_domain
  SITE 244: note = Tnp_P1
  SITE 274: note = Tnp_P2
  SITE 282: note = Tnp_P3
  SITE 283: note = Tnp_P4
  SITE 296: note = Tnp_P5
MISVGIDVAKEKSVVAIMNEERKLLRKVVTLNHTMSEIGAFIELLTLYQEEEEVNIIMEATGYYHESVLQLLCESGFKVYVVNVLVIKKHNDAKLHQVKTDKQDAIKLAEYLLGNHYQLRQHKEEGVKYQELRFYAREYHKSMGIKVKIKNQLTQLIDKCFPGIKKIYHNNMEGTLLDVLEKYPTIDHVSRLGQKRFNNLFVKWATKKGHRITEQIEITTSILAQMKTIAESIPEYEVVREMSGVGDRTGPRLLAGIGDIRRFHSSKALVAYAGIDVSPYQSGQFEARERKITKRGSKYLRKVLYEIVQSLKTVKPTKDNAVYQYILRKELEGKASKKAKVAGVNKFLRIYYARVIEVYQL

SEQ ID NO: 14065 - protein, 340 aa, unidentified
  source 1..340: note = protein_416fc32
  REGION 5..151: note = RuvC_domain
  SITE 8: note = RuvC_P1
  SITE 91: note = RuvC_P3
  SITE 93: note = RuvC_P4
  SITE 96: note = RuvC_P5
  REGION 211..294: note = Tnp_domain
  SITE 219: note = Tnp_P1
  SITE 249: note = Tnp_P2
  SITE 257: note = Tnp_P3
  SITE 258: note = Tnp_P4
  SITE 270: note = Tnp_P5
MGEYIGLDVSLKETAVSIRRDGQRIWRGKCVSDPQALAGLIRKRAADAEKVVFETGPLSVWFYHALTSHGLPAICIDARHAKAALDMAANKTDANDADGLAHLAEAGFYREVRVKAFDSMLSRTLVNARSKLVRIGIEISNQIRGMMKIFGLMVPRSAGSKFDIQVQDLLSAHSELSAIILPLLDAWRAVRARAADLGRKVLAQARADEKCQLLMSVPGVGAITATAFIAAVEDPANFERSRSVGAWLGLTTRHYQSGEVDYDGHISRRGDAHLRGLLHEAATVILTRTGPVVICGPWGTKPCERIGFKRAAVAVARKLTVIMHAMLQSGELFNKVTAAV

SEQ ID NO: 14066 - protein, 338 aa, unidentified
  source 1..338: note = protein_6e4dfbc
  REGION 6..152: note = RuvC_domain
  SITE 9: note = RuvC_P1
  SITE 53: note = RuvC_P2
  SITE 91: note = RuvC_P3
  SITE 93: note = RuvC_P4
  SITE 96: note = RuvC_P5
  REGION 211..298: note = Tnp_domain
  SITE 219: note = Tnp_P1
  SITE 249: note = Tnp_P2
  SITE 257: note = Tnp_P3
  SITE 258: note = Tnp_P4
  SITE 270: note = Tnp_P5
MAILYVGIDLAKNVFAVHGVDEHGKPALVWPKVTRDKLHERIAALPPCTIGMEACSGAHHWARLFGDLGHAVRLMAPKFVAPYRLRGRRGKNDAADAAAICEAVQRPNMRFVPVKSVDQQARLTLHRTRQGFVEQRTATLNRIRGLLSEFGVVLPLKAATVRREAAAGLEALSGWARLAIGDLLEEVRRLDERVVEYDRHLAQMARQDERARRLMRLSGVGETTATALLATVGNGHDFRCGRQFAAWLGLVPGQYSSGGKTRLGRITKTGDPYLRSLLVLGARAVLALAKTKADAISRWAAALEQRRGYWKAVVAIAAKNARLAWAVLAKGEAFKMPA

SEQ ID NO: 14067 - protein, 357 aa, unidentified
  source 1..357: note = protein_a94fb12
  REGION 4..163: note = RuvC_domain
  SITE 7: note = RuvC_P1
  SITE 60: note = RuvC_P2
  SITE 101: note = RuvC_P3
  SITE 103: note = RuvC_P4
  SITE 106: note = RuvC_P5
  REGION 249..319: note = Tnp_domain
  SITE 270: note = Tnp_P2
  SITE 278: note = Tnp_P3
  SITE 279: note = Tnp_P4
  SITE 292: note = Tnp_P5
MILVGIDVAKDKHDCFIMNSDGEILAKSFTFANTKEGFDFFYERLCSVSVSADKIKVGLEATGHYSYNLLGFLLDKGLPTFVINPLHTNLYRKSLSLRKTKTDKVDSRTIAMMLLSDVDLKPYSDISYHNENLKSLTRYRFTKVQERAKLKTSISRLVQILFPELEKLVPTLHMISIYKLLEEYPGASFIASAHLTKLTNLLKESSHGHYNRDTSLKFRDTARNSIGSHMSAKSLELKHTIKLIRELNLEIEEIEAEIRKMMDSMASPITTIPATYQSGKLDNCHSHMEKRGSRYLRYALFNAAQKVCIWDSTFSEYLSKKRAEGKHYYVALSHAVKKLVRVICHLERTGQPYIKTI

SEQ ID NO: 14068 - protein, 386 aa, unidentified
  source 1..386: note = protein_6115b9d
  REGION 4..161: note = RuvC_domain
  SITE 7: note = RuvC_P1
  SITE 59: note = RuvC_P2
  SITE 99: note = RuvC_P3
  SITE 101: note = RuvC_P4
  SITE 104: note = RuvC_P5
  REGION 259..346: note = Tnp_domain
  SITE 267: note = Tnp_P1
  SITE 297: note = Tnp_P2
  SITE 305: note = Tnp_P3
  SITE 306: note = Tnp_P4
  SITE 319: note = Tnp_P5
MKLVGIDIAKYEHAAYIMDAATGESLCDPFFFKNNKNGFQKLYIELNKYAKDELFIGMEDTGHYNFDIETNLLAKGYKVALINPITTKNLRKAALKSVKTDKEDAILITNALLDKDYYRIISIQDEKLKEAKELTRYRTQLTIEMNRKKNVLQRHIDIVFPEFNTLFHDEYTITYLNILRKYGDAYTIAHTDIRSLRKCFKYCNSFTAEELKKLASNSVGIHDVSISFIIQSVISSIDLINSQIEELDKKIEELAITQDSSITSIPGISIITGTSILAELGDISKYSNAGKLIKFAGVNPYISESGEFSADKTVITKKGSKYLRTTLYRVIIPVIRHNPVFNNYYHLKRSQGKKHLCALGHCVRKLLRIIYHLETNHLSFDINSLK

SEQ ID NO: 14069 - protein, 392 aa, unidentified
  source 1..392: note = protein_3796b43
  REGION 4..161: note = RuvC_domain
  SITE 7: note = RuvC_P1
  SITE 60: note = RuvC_P2
  SITE 100: note = RuvC_P3
  SITE 102: note = RuvC_P4
  SITE 105: note = RuvC_P5
  REGION 267..354: note = Tnp_domain
  SITE 275: note = Tnp_P1
  SITE 305: note = Tnp_P2
  SITE 313: note = Tnp_P3
  SITE 314: note = Tnp_P4
  SITE 327: note = Tnp_P5
MFYIGIDIAKRSHQAAVTDVSGNIIVKPFNFKNTAAGFTQFLSVLETNSVSKDNCVIGLEATGHYWYPLYFFLVEQKFSVKVFNPIQTAAFREITIRKVKNDNLDSIMIADFTRFGRYSETYIPSENMLALKNLSRFRLSVCDICGSLKKRTIVLLDLVFPEYSTIFCDIFGTTSKQLLEKYSTPDEFSEISTTKLANFILKASRGRNGREKAELIKTAAQNSIGISYAIDTFSFEIKQLIEQIEFMENQLSEIDAEMAKLLAESEYSVITTISGVGPTLGSIIVSEIGDIERFETSSKLVAYAGLDASVKQSGEFNSSRNKISKRGSPYLRRALWMAAFMSLQCDPALYDYYSRLRARGKSHRLATTAVARKLCIIVWAIMKSKQPYSPHI

SEQ ID NO: 14070 - protein, 328 aa, unidentified
  source 1..328: note = protein_51d3945
  REGION 8..159: note = RuvC_domain
  SITE 11: note = RuvC_P1
  SITE 57: note = RuvC_P2
  SITE 95: note = RuvC_P3
  SITE 97: note = RuvC_P4
  SITE 100: note = RuvC_P5
  REGION 200..287: note = Tnp_domain
  SITE 208: note = Tnp_P1
  SITE 238: note = Tnp_P2
  SITE 246: note = Tnp_P3
  SITE 247: note = Tnp_P4
  SITE 260: note = Tnp_P5
MKKEKVFIGIDVSKLTLDICIVKNTTTSLVIKNNKTDIKKFLNEETKGSSEVYLCIENTGKYGWLITELAPDYLTNFYIINPLHLKRSMGLIRGKNDKIDAVRIAQFIKRNYQEEVCYVRERSLITALKVLLSERGYKVKSKTQQKVKNKDIEVISDKKLAKKLIKSNLKLIVTLEQQIKEIELEIKRLIESDKQLKQHSYLLKSIPGVGDILSTSLIIKTNEFKSITDPRKLACYCGVVPFENRSGTSIFGKKRLSLLADKKIKKVLHLGAMRAIQMENDFRVYYIRKVKEGKNKMSVLNAIRNKIIHTAYALIKNQELFQNRLVLS

SEQ ID NO: 14071 - protein, 404 aa, unidentified
  source 1..404: note = protein_99e5b07
  REGION 6..169: note = RuvC_domain
  SITE 9: note = RuvC_P1
  SITE 63: note = RuvC_P2
  SITE 109: note = RuvC_P3
  SITE 111: note = RuvC_P4
  SITE 114: note = RuvC_P5
  REGION 280..366: note = Tnp_domain
  SITE 287: note = Tnp_P1
  SITE 317: note = Tnp_P2
  SITE 325: note = Tnp_P3
  SITE 326: note = Tnp_P4
  SITE 339: note = Tnp_P5
MNKLYVGIDVGSRGNATYLMTPDGSKHCAFTVENNTGGARLLTDKVISAMESLGLDAVNIGMEATGVYGNHLVHFLRENGRLGRYQREIHVLNPKQVKKFKESYPDLPKNDPVDAFVVADCLRFGRIKSEVYMDDYRYEALKTLTRARFYAVQNLTREKNRFANYLFLKCSGLAQDSDTKNTSATVLALMERYETADDLAFANLDELTAFIDETGRNFANPVDKAKEIQRAARDSYRLPVRVNGSVNQAMSVSIATMRSMDKQIKVLEKAIEQQFKIIPNTLTSIPGIGKIYSAGIIAEIGEINRFHSQASVAKFAGLVWNSNESGEFVGEDTHMIKSGNRFLRYYLLEAANSVRRCDPEFRRYYDLKFHEVNKHQHKRALALTARKLVRLIFRLLKDNRLYIR

SEQ ID NO: 14072 - protein, 326 aa, unidentified
  source 1..326: note = protein_b5f051a
  REGION 4..155: note = RuvC_domain
  SITE 7: note = RuvC_P1
  SITE 60: note = RuvC_P2
  SITE 100: note = RuvC_P3
  SITE 102: note = RuvC_P4
  SITE 105: note = RuvC_P5
  REGION 200..286: note = Tnp_domain
  SITE 208: note = Tnp_P1
  SITE 237: note = Tnp_P2
  SITE 245: note = Tnp_P3
  SITE 246: note = Tnp_P4
  SITE 259: note = Tnp_P5
MFFIGIDVSKAKLDCSLLLDAANSKRRAKSVSNSKTGIADLLAWCAKQQVIIHELHAIMEGTGVYHEQAALALSDAGVTVSIVNPAQVKDFGRSLGVRTKTDSVDSLVLARYGALLNPRVWTPPSQEARTLQALLARREAIAKDLQREHNRLEKADATDTPVLIRQSLVESIAFLEKQLAKLQQEIDDHINKHPGLKADRDLLTSIPAVGPQVGNHLLAVMHNHDFQSAEQLAAYLGLVPVEWQSGTSVLGRPRLSKAGPARIRAVLYMAAIVGTQHNPHIKALYQRLQERGKTKMSALGAAMRKLVHLCFGVLKTRQPYQANYAV

SEQ ID NO: 14073 - protein, 346 aa, unidentified
  source 1..346: note = protein_dd25e7d
  REGION 7..149: note = RuvC_domain
  SITE 10: note = RuvC_P1
  SITE 53: note = RuvC_P2
  SITE 88: note = RuvC_P3
  SITE 90: note = RuvC_P4
  SITE 93: note = RuvC_P5
  REGION 212..300: note = Tnp_domain
  SITE 220: note = Tnp_P1
  SITE 250: note = Tnp_P2
  SITE 258: note = Tnp_P3
  SITE 259: note = Tnp_P4
  SITE 272: note = Tnp_P5
MSYSTTVGVDLAKNVIQVSVVSKRGKELLNRSLTRRKFAEFLCKQKPALVAFEACATSHYWARAAQRHGHTARIIPAKAVAPFRQGHKTDSNDALAVAEAARRPNIKEAPMKTLDQQGLQAIQRSRELLVQESTALSNHLRGLLMEFGEVIPKGFAALQRRLPEILEDGDNEVPDMYRPALHRLYYRFLELRSDIRAMDAEVKALVKQHPGCRRLTALEGVGPISAVLLYASLGTGEAFSGSREFAAYLGLTPRQLSSGGKTNIVGLSKKIGNRQLRSVLIQGARSYVNKLKEPKTPKDRWLMELIERAGPGKATVALANKNARTAWALLTQGTEYQRQAQPTVVA

SEQ ID NO: 14074 - protein, 268 aa, unidentified
  source 1..268: note = protein_5930e2f
  REGION 10..151: note = RuvC_domain
  SITE 13: note = RuvC_P1
  SITE 55: note = RuvC_P2
  SITE 95: note = RuvC_P3
  SITE 97: note = RuvC_P4
  SITE 100: note = RuvC_P5
  REGION 190..268: note = Tnp_domain
  SITE 198: note = Tnp_P1
  SITE 227: note = Tnp_P2
  SITE 235: note = Tnp_P3
  SITE 236: note = Tnp_P4
  SITE 248: note = Tnp_P5
MAMHVIPNRIGVDVAKDELVLYDPTTDQIFALPNTKTAIRRWLKGLPQNTHIALEATGIYHLELAEQAHAAGHTVFIINGYQLNHYRESMGRRAKTDANDARLLSDYLEANQRRLQPWTPPPKAYCTLQRLLRRRATLVQARVALQQSWKDEGSLKALIKPVLAHMDRLDQALQKRLRLALREAGLQAERARCQALEGVGELTATALVMAFQRGDFRTSDAFIAFLGLDLRVRQSSKREQRRRLTKRGDAEVRRLLHNAAMAACHSPR

SEQ ID NO: 14075 - protein, 387 aa, unidentified
  source 1..387: note = protein_471ceb1
  REGION 6..159: note = RuvC_domain
  SITE 9: note = RuvC_P1
  SITE 57: note = RuvC_P2
  SITE 98: note = RuvC_P3
  SITE 100: note = RuvC_P4
  SITE 103: note = RuvC_P5
  REGION 221..306: note = Tnp_domain
  SITE 229: note = Tnp_P1
  SITE 259: note = Tnp_P2
  SITE 267: note = Tnp_P3
  SITE 268: note = Tnp_P4
  SITE 279: note = Tnp_P5
MEHVVIGMDPHKRSVTIEVITGTEQVLAKHRFDTTAEGFKDLLRYARQWPDRLWAVEGCNGIGRHVASRLVIAGETVVDVPPKLSARLRMFDTRQGRKTDPDDAHAIALVALRMNGLRPVVNDEQQALLRILADRRRALGEDHTRMVSQLHQLLLELIPGGAKKDLSAAQARVLLSTVRPRDVVGKTRKRVALELVGDLEKTYQRSKALDKELKQAVADTGSTLMELHGIGPSSAARLLIEVGDIARFPDRNHFASWNGTAPLDASSGDQTRHRLSRAGNRQINRALHVMAVVQLRNPTEGRTYYDRRKAAGKTSMEAMRSLKRRLSDIVYRTMVTDALAKGASPGGQRGASATSSAAGSHPHTSTSEKPLPGPATPSLRPALPAAS

SEQ ID NO: 14076 - protein, 343 aa, unidentified
  source 1..343: note = protein_873c8e0
  REGION 7..149: note = RuvC_domain
  SITE 10: note = RuvC_P1
  SITE 53: note = RuvC_P2
  SITE 88: note = RuvC_P3
  SITE 90: note = RuvC_P4
  SITE 93: note = RuvC_P5
  REGION 212..300: note = Tnp_domain
  SITE 220: note = Tnp_P1
  SITE 250: note = Tnp_P2
  SITE 258: note = Tnp_P3
  SITE 259: note = Tnp_P4
  SITE 271: note = Tnp_P5
MNEVITIGVDLAKNVFQVHGIDAEGAVIVRRQLRRSQMLPFFKKQPPCLVGMEACATGHHWARQLVALGHAVKLMPPKYVKPYVKRNKNDMADAEAICEAVTRPTMRFAAIKTVDQQSVLLLHRTRQLFVRQRPSLINALRAHLAEFGIVAGVGRNGLERLLQVIEDGDDERVPPTARDCLLALRDQLEMVKHQILGADRHILAWHRSSEVSQRLDDIPGVGPLIASALVASVPDPHAFKSGRDLAAWIGLVPKQNSTGGKDRLGHISKAGNRYLRTMLVVGALSVIRRAKQLGYTRRPWLTKLLERRPTKIAAIALANKNARTAWAMMAHGTFYEEPQSEAV

SEQ ID NO: 14077 - protein, 393 aa, unidentified
  source 1..393: note = protein_7386dbf
  REGION 10..163: note = RuvC_domain
  SITE 13: note = RuvC_P1
  SITE 61: note = RuvC_P2
  SITE 102: note = RuvC_P3
  SITE 104: note = RuvC_P4
  SITE 107: note = RuvC_P5
  REGION 225..311: note = Tnp_domain
  SITE 233: note = Tnp_P1
  SITE 263: note = Tnp_P2
  SITE 271: note = Tnp_P3
  SITE 272: note = Tnp_P4
  SITE 283: note = Tnp_P5
MDEQVPRVVIGMDPHKRSVTIEVMTAEEAIVGSGRFGTDLDGYGRLLAYARQWPQRVWAVEGRAGIGKHVADRLVADGEDVVDVPAKMSARVRIFATGQGRKTDATDAHSIALVGVRMSGLRPVVSDDQLEILRMCVDRRRSLGEEHVRKVCQLHKLLLELIPGGAKTFLSAAQAKELLKKVRPTTAAGKVRKTHALELTEDLAPIYARTKAADKELTALVAETGSSLMDLHGIGPSGAARLLVEVGDITRSPDRNHFASWTGTAPVDASSGEHVRHRLSRGGNRQINRVLHIMAVVQLRTRTTEGRAYYDRKKAAGKTSMEALRCLKRRLSDLVYKAMLDDLAGHTTTGPGGQLGDDSDSSATGSQPAAGSSDKPLPGPAAPKTRTPLPAAS

SEQ ID NO: 14078 - protein, 392 aa, unidentified
  source 1..392: note = protein_5867cb8
  REGION 1..149: note = RuvC_domain
  SITE 46: note = RuvC_P2
  SITE 86: note = RuvC_P3
  SITE 88: note = RuvC_P4
  SITE 91: note = RuvC_P5
  REGION 257..343: note = Tnp_domain
  SITE 265: note = Tnp_P1
  SITE 296: note = Tnp_P2
  SITE 304: note = Tnp_P3
  SITE 305: note = Tnp_P4
MEVQDETGRRLAKARLPEGISGIARLHALVGRFLPEDGNAAAVKIGIETDRGPWVAALVASGYQVYAVNPLQSARARQGNGVSGAKSDAGDAHVLADLVRTGCHQLRTVAGDSAQAGAVKVLTRMHQSLIWDRTRQVLRLRSSLREFFPAALEAYENLASPDVLELLTKAPEPSRAAALTRAQITSALKRAHRRDREAKTTVIMAALRSEHLTQPPLIAAAYGATVRALAAMITTSNEQITALEGPVEACFGQHPDAEIYLSQPGLGPILGARVLAEFGDDPTRYDGARARKNYAGTSPITRASGKKKVVLARYVRNKRLADALHRQAFCALRRSPGARAYYDALRDRDIGYNAALRQLGNRLVGILHGCLKTHTLYDEAVAWNELAQQVAA

SEQ ID NO: 14079 - protein, 411 aa, unidentified
  source 1..411: note = protein_ad63805
  REGION 5..164: note = RuvC_domain
  SITE 8: note = RuvC_P1
  SITE 61: note = RuvC_P2
  SITE 101: note = RuvC_P3
  SITE 103: note = RuvC_P4
  SITE 106: note = RuvC_P5
  REGION 272..358: note = Tnp_domain
  SITE 280: note = Tnp_P1
  SITE 311: note = Tnp_P2
  SITE 319: note = Tnp_P3
  SITE 320: note = Tnp_P4
MRLLVGDDWAEDHHDVEVMSEAGKVLARRRLPEGVAGIAQLHALVGAQLGDDADEAEVAVGIETDRGPWVAALIAAGYLVFPVNPLQASRYRERHGVSRAKSDAGDAHMLADMVRTDSHQLRPAAGDSPEAEAVKVLARAHKTLIWERTRAVQRLRHQLLGYFPAALEAFEDLDAPDALELLAKAPEPARAARLTRAQVSAALKRARRRNIKDKTDAILAALRGEHLGQPEILTAAYAATVRSLIAVITTLNEQVKTLQGQVGEHFGRHPDAEIILSQPGLGPVLGARVLAEFGDDPRRYRDGKARRNYAATSPVTRASGKKKVITARFIHNDRLVDALNAQAFAALNASPGARALYDELRARGIEHNDALRRLANRLVGILHGCLKTRTLYAEATAWGHRGNLPQSPPAA

SEQ ID NO: 14080 - protein, 351 aa, unidentified
  source 1..351: note = protein_8fe6c53
  REGION 13..154: note = RuvC_domain
  SITE 16: note = RuvC_P1
  SITE 59: note = RuvC_P2
  SITE 94: note = RuvC_P3
  SITE 96: note = RuvC_P4
  SITE 99: note = RuvC_P5
  REGION 218..305: note = Tnp_domain
  SITE 226: note = Tnp_P1
  SITE 256: note = Tnp_P2
  SITE 264: note = Tnp_P3
  SITE 265: note = Tnp_P4
  SITE 277: note = Tnp_P5
MSRSSSSAAIATLGIDLGKNTFHLIGQDERGAIVLRIKLSRAQLTQRLATIPPCLIGMEACAGAHHIGRQLQALGHDVRLIPAQYVKPFLKGHKNDYRDAEAIAEAVQRPTMSFVAIKTPEQMDLLALHRVRSRLVSQRTGVTNQIRTFLLERGITVRQGLAPLRQALPGILASPSDALSPRMVRLIVDLAEDWRGLDERIANVSAEIEALAVQDEHCQRLMSVPGVGPVISSAVVAAIGTGAGFKQGRDFGAWLGLVPKQESTGDRIILGKISKRGNKYLRTLFVQAAHIVLVRRPHGARLGLWPWIEAAGRRLHRNMLVIALANKLARIAWAVLARGHAYQPRNASQAI

SEQ ID NO: 14081 - protein, 342 aa, unidentified
  source 1..342: note = protein_67c12ec
  REGION 6..147: note = RuvC_domain
  SITE 9: note = RuvC_P1
  SITE 52: note = RuvC_P2
  SITE 87: note = RuvC_P3
  SITE 89: note = RuvC_P4
  SITE 92: note = RuvC_P5
  REGION 211..293: note = Tnp_domain
  SITE 219: note = Tnp_P1
  SITE 249: note = Tnp_P2
  SITE 257: note = Tnp_P3
  SITE 258: note = Tnp_P4
  SITE 270: note = Tnp_P5
MEIVVLGVDLGKNSCSVAGLDASGRVVLRRRLHRDGVIKLAEGLPSCVMAMEACCGAHHLGRVLQGHGHEVRLMSPEYVRPYVKAQKNDDRDAEAIAEAATRPTMRFVELKSEGQLDMQSLHRARDRLVGVRTALINQLRAFLLERGIIVPQGRRKMEAHLDAVMAAEQISLSPRTRRLIEDQRAEWCELNRRIRAFDEEFALQARTEESARLLTTIPGIGPLNATALVAAIGRAETFARGRDLAAWIGLVPRQMTTGGKPKLLGISKRGNEYLRRMLIHGARAALPALAKGETPLGGWLRGLLARAHVNTVVVALAAKLARIICAILHSGQRFRMQAATAS

SEQ ID NO: 14082 - protein, 348 aa, unidentified
  source 1..348: note = protein_c5c39da
  REGION 6..147: note = RuvC_domain
  SITE 9: note = RuvC_P1
  SITE 52: note = RuvC_P2
  SITE 87: note = RuvC_P3
  SITE 89: note = RuvC_P4
  SITE 92: note = RuvC_P5
  REGION 209..295: note = Tnp_domain
  SITE 217: note = Tnp_P1
  SITE 246: note = Tnp_P2
  SITE 254: note = Tnp_P3
  SITE 255: note = Tnp_P4
  SITE 267: note = Tnp_P5
MNLKRIGLDTSKAVFTLHGVGQDEKAILRRNMRRAEMEAFFAKLPPTHVALEACGGSHHWGRRLAAMGHTVQLIPPQYVKPFVRRGKNDRNDAEAISEAAARPDMPSVPVKSAEQQAEAIVLSARELLVRQRTQLVNAVRGHAAEFGVIAAKTISQLPSLLEAVAAAETVPATAKEMLAFLGAQVAQLDTQIAELEPRMKQQHKANPVSQLLAEVPGIGPIGALSLALTIDPGRFTSGRHFAAWLGLVPKQHSTGGRQRLGGISRAGDERLRQLLVLGATAVIRFAKPGSKSASAWLLALLERKPRKVAAVALANKMARIVWAMMATGEAYRGSKKVATPAAGAATAA

SEQ ID NO: 14083 - protein, 430 aa, unidentified
  source 1..430: note = protein_afd95bc
  REGION 18..174: note = RuvC_domain
  SITE 21: note = RuvC_P1
  SITE 71: note = RuvC_P2
  SITE 111: note = RuvC_P3
  SITE 113: note = RuvC_P4
  SITE 116: note = RuvC_P5
  REGION 288..375: note = Tnp_domain
  SITE 296: note = Tnp_P1
  SITE 326: note = Tnp_P2
  SITE 334: note = Tnp_P3
  SITE 335: note = Tnp_P4
  SITE 348: note = Tnp_P5
MAFIHCKLILGVLSMNAVGIDISSKKSTVAVLRPFGEVVRVPFEVSHSAEGLASLVQQLKALDGATRVAMEHTGRYYEAVANALYEAGFFVSTVNPLLIKEYGGNSLRKVKTDKADAVKIARYALDNWAELRDYTPMDRIRYDLKTLNRQFHLASKQKTATSNNLIALLEQSFPCVRKCFDSPVRRDGTQKWVDFSHDFWHADCVRKHSLAAFTERYHKWCKRHGYNFKQSTAQKVYDLAKSAVVLVSKGNLTKVLVQEAANQLTTISKSVETYRAEMDRLASHLPEYPVVMGMYGVGDSLGPQLMAEIGDVRRFERKQSLVAFAGVDPIPNQSGEKNVRSNKSSKRGSPHLRKTLFNVMTCCLRKAPADEPIFQFLDRKRVEGKPYYVYMTAGANKFLRRYYGKVTEYFSNLEDLPPVDMDSTGLLKRQ

SEQ ID NO: 14084 - protein, 407 aa, unidentified
  source 1..407: note = protein_a207568
  REGION 5..161: note = RuvC_domain
  SITE 8: note = RuvC_P1
  SITE 57: note = RuvC_P2
  SITE 98: note = RuvC_P3
  SITE 100: note = RuvC_P4
  SITE 103: note = RuvC_P5
  REGION 267..354: note = Tnp_domain
  SITE 276: note = Tnp_P1
  SITE 307: note = Tnp_P2
  SITE 315: note = Tnp_P3
  SITE 316: note = Tnp_P4
  SITE 327: note = Tnp_P5
MRYYIGVDWADEEDAVWVANDAGDKMLSRRFAHTVAARSEWARWLRERQAEGIELWAAIERPHGRIVDFLLDHGVVVYPINPKSLDRARDRFRVGGSRSDPFDAKVLALFLRSDHLQLRPLRPNSEAAQELQGLTRDYRRQVHLQTRLLNQLTATLKEYYPRALELGEDLTAGWAQAFLARYPTPAAAAALTEPDWQAFAHAHRLSPTRTAALWETLQQPQLPLPAHVVRLKARLLQALLRELAPTLATIAEYRQAIDDFFATMPTAEIARSLPVGKSGTTVPTVWAELGDHADRWASFRHLQAYAGSVPETDCSGKHHVVKFRFACNPALRDAMHQLAFLSLPHSLWARAYYDRYRERGHTHHQALRALGAKWLKIIFVMWTRHVPYSETHHLATMARQHLHQTAA

SEQ ID NO: 14085 - protein, 339 aa, unidentified
  source 1..339: note = protein_8683b04
  REGION 21..162: note = RuvC_domain
  SITE 24: note = RuvC_P1
  SITE 68: note = RuvC_P2
  SITE 106: note = RuvC_P3
  SITE 108: note = RuvC_P4
  SITE 111: note = RuvC_P5
  REGION 211..298: note = Tnp_domain
  SITE 219: note = Tnp_P1
  SITE 249: note = Tnp_P2
  SITE 257: note = Tnp_P3
  SITE 258: note = Tnp_P4
  SITE 271: note = Tnp_P5
MMNFSNHLLNRKNKVMKNIIIGIDISKKTLDICVKEEAINYFTIENEINDITRFFKRYAKENVILAMENTGRYNWNIFEALEKFNFKVYVISALHIKKSIGLVRGKNDKIDALRICSFIEKNYQENREWKPSSSSIKKIKILLTERALRIKIKKQLMVQQHDYKLMKGIGLDKELKNLNIKLIKSIEAQIMIIENDIEAIILKNENLNHQQKLIKSVPGVGQVLSWTLLSKTEGFTVITDPRKMACYSGVVPFDFQSGTSLKKRPGVSMLADKNLKTVLHMAAMSAIRLDNDLRKYYIRKVDEGKNKMSVLNAVRNKIIHRVFAVIKNQTSYQKDLVLS

SEQ ID NO: 14086 - protein, 335 aa, unidentified
  source 1..335: note = protein_24c7d51
  REGION 6..144: note = RuvC_domain
  SITE 9: note = RuvC_P1
  SITE 52: note = RuvC_P2
  SITE 83: note = RuvC_P3
  SITE 85: note = RuvC_P4
  SITE 88: note = RuvC_P5
  REGION 207..299: note = Tnp_domain
  SITE 215: note = Tnp_P1
  SITE 245: note = Tnp_P2
  SITE 253: note = Tnp_P3
  SITE 254: note = Tnp_P4
  SITE 266: note = Tnp_P5
MQVTTVGLDLAKNIFQVHGISENGDVVFNQALRRAQLIAFFEKLPPCLVGMEACGSSHHWARQLSKLGHDVRLIPAMYVKWGKSDAVDAAAICEAVTRPTIRFVAIKSEEQQGVLFLHRARDLIVKHRTQLSNMLRGLLSEFGIVIAQGVGSAIKFAKGVLDGDKPGIPDVAIDVLANLSNQLVALHLRVRWYEMHMRLQAKQDPRVMLLRTIPGVGPVTASAIVATAGDASQFRNGREFAAWLGLTPLNRSSGGKERLGRISKMGDRYIRRLLVTGMTSRLRQMKTHPERADPWAQALIDRKPVRLATVAMANKTARIIWAVLTKNEYYRPRTA

SEQ ID NO: 14087 - protein, 322 aa, unidentified
  source 1..322: note = protein_fe1b9d3
  REGION 3..125: note = RuvC_domain
  SITE 32: note = RuvC_P2
  SITE 67: note = RuvC_P3
  SITE 69: note = RuvC_P4
  SITE 72: note = RuvC_P5
  REGION 191..275: note = Tnp_domain
  SITE 199: note = Tnp_P1
  SITE 228: note = Tnp_P2
  SITE 236: note = Tnp_P3
  SITE 237: note = Tnp_P4
  SITE 249: note = Tnp_P5
MNGNIAFNRKVSRAKLLDTIRQFPSGSMIAMEACVTSHYWGRTFQSIGFQVRLIPTQHVKALTHHQKNDANDALAICETAFLPGIHFVVIKTLEQQDIKVLRAARQLMVEQRTALANQARSLAAEQGVEIPVGIHILQQRLPDIIEDAEQLISSVLRQLLFSLLENIHSLNERILSVEHSLAALCQQQPKYKVLMTIPGIGPLIAAAFLSEVNAAQFTNGRQLSARCGLVPRQHSSGRKNSLFAMTKNGNRDLRTLIIHGARSVMYCAHKRDDALGMWLKRLTERRGKMKATVALANKMTRIVRRLLTESTSFNIDKAFAMN

SEQ ID NO: 14088 - protein, 341 aa, unidentified
  source 1..341: note = protein_230a2f0
  REGION 6..148: note = RuvC_domain
  SITE 9: note = RuvC_P1
  SITE 52: note = RuvC_P2
  SITE 87: note = RuvC_P3
  SITE 89: note = RuvC_P4
  SITE 92: note = RuvC_P5
  REGION 211..300: note = Tnp_domain
  SITE 219: note = Tnp_P1
  SITE 249: note = Tnp_P2
  SITE 257: note = Tnp_P3
  SITE 258: note = Tnp_P4
  SITE 270: note = Tnp_P5
MNIKRVGIDLAKDVFQVHGVDSQEKVILRKQFRRVQLLAYFEKIAPCLIGMEACGSAHYWARELQKLGHTVKLMAPQFVKPYVKSNKNDANDAEAICEAVARPTMRFVAVKTIAQQDIQAIHRVRSELVSHRTAKVNQIRGLLAEYGLAVGRRIEVLRTALPLLLEDAENGLTLDFRILLDELRQDLINLDERVQVMDKKIKTLANSHGEAKRLLAIPGIGPITATAIISAIGNGKQFKRGRDFAAWLGLTPRQYSSGGKERLLGISKRGDSYLRTLLIQGARAVLRVVGQKDDPRSRWLQNLCSRRNKNIAAVALANKNARIIWALLTKETDFLPDSEPA

SEQ ID NO: 14089 - protein, 390 aa, unidentified
  source 1..390: note = protein_ad1ac5e
  REGION 4..162: note = RuvC_domain
  SITE 7: note = RuvC_P1
  SITE 60: note = RuvC_P2
  SITE 100: note = RuvC_P3
  SITE 102: note = RuvC_P4
  SITE 105: note = RuvC_P5
  REGION 266..353: note = Tnp_domain
  SITE 274: note = Tnp_P1
  SITE 304: note = Tnp_P2
  SITE 312: note = Tnp_P3
  SITE 313: note = Tnp_P4
  SITE 326: note = Tnp_P5
MIYVGIDIAKLNHFASAISSDGKELMKPFKFTNDGDGFQMLHSRLEELSRSGDSIIIGLESTAHYGDNLVRYLVACDYSVCVLNPIKTSVMRKDNIRKTKTDKVDTFLIARTLMVQDSYRFVSFYDLDLMDLKQLGRFRQKTIKQRTRLKIQLTSYVDQVFPELQYFFKSGLHQKAVYALLKEAPTPQDIASMHMTHLSHLLVAASHGHFKKEQAKELRVLARKSVGASDSALSIQITHSIAQIELLDSQLDSVEAQMAEIMKFHDSVIMTIPGIGYINGGMILGEIGDIHRFSSPNKLLAFAGLDPSVYQSGNYSAKRTRMSKRGSRVLRYALMNAAHNVVKNNATFKGYYDKKMAEGRTHYNALGHCAGKLVRVIWKMLTDEVEFNLD

SEQ ID NO: 14090 - protein, 409 aa, unidentified
  source 1..409: note = protein_62fb830
  REGION 4..163: note = RuvC_domain
  SITE 7: note = RuvC_P1
  SITE 60: note = RuvC_P2
  SITE 100: note = RuvC_P3
  SITE 102: note = RuvC_P4
  SITE 105: note = RuvC_P5
  REGION 273..359: note = Tnp_domain
  SITE 281: note = Tnp_P1
  SITE 312: note = Tnp_P2
  SITE 320: note = Tnp_P3
  SITE 321: note = Tnp_P4
MLFVGDDWAEDHHDVEVQDEHGRALRTARLPEGVEGMARFHELVAGFLPDDATPSQVLVCIETDRGPWVRALIAAGYQVYGVNPKQAARHRELMSVSGAKSDKADAHALADMVRTRRHQLRQVAADSDIAEAVKVVARAHQTLIWERTRHTLRLRAALREYFPAALHAYQPLTLTGADTLELLAKAPTPAAAAKLSVAQISAALKRARRRDIAAKATAIQQALRTAHLGQPEIVTGAYAATVRATVAVLTTLNAEIRTMEGQVEAHFGQHPDAEVYLSQPGIGTVLGARVLAEFGDAAGRYTDAKSRKNYAGTAPITRQSGKTKTVHARFVHNDRLVDALHVQAGAAILHDTAVRAYYDELRARDVSHNAALRQIGNRLVGILHGCLKTKTRYNQATAWSHRATTPIAA

SEQ ID NO: 14091 - protein, 400 aa, unidentified
  source 1..400: note = protein_e9e611e
  REGION 8..173: note = RuvC_domain
  SITE 11: note = RuvC_P1
  SITE 64: note = RuvC_P2
  SITE 104: note = RuvC_P3
  SITE 106: note = RuvC_P4
  SITE 109: note = RuvC_P5
  REGION 273..358: note = Tnp_domain
  SITE 281: note = Tnp_P1
  SITE 311: note = Tnp_P2
  SITE 319: note = Tnp_P3
  SITE 320: note = Tnp_P4
  SITE 331: note = Tnp_P5
MNPLSIRVAVDVGSTRHRVAIGLPDGKLLDEFDIDHNAVGFGEFFNHIETVENLHHLPVAVAMESYNGWARPLDGHILRHGYSLYSVNNLKLARYKEIFPAPAKTDAIDARRILELFRLSEHLPLARDALHEVAPTPVANDQLKRLTRRRKQLVWERVRVINRLQSDLQAVCPGLLAITGEAGNLWFLNFLTCRDKLPKLAKLRQSSLLAIRGVGKLYASRIQAWQLQAQFAPEVEWVGEMIQQDARRILALGEEIKAIEQQIAGIAVQSELAQIIGSIPGFGKTTMAEIAGEIGTLERFETEAGLAIYTGMAPLDNSSGKKNSTKAPRQVNTRAKAAMMVAVARHIECVPASRAYYNRKRAEGKKHNQAIRALGRQLVRVIWSLVKQGRKYEIREENSK

SEQ ID NO: 14092 - protein, 351 aa, unidentified
  source 1..351: note = protein_0989c3d
  REGION 12..152: note = RuvC_domain
  SITE 15: note = RuvC_P1
  SITE 58: note = RuvC_P2
  SITE 93: note = RuvC_P3
  SITE 95: note = RuvC_P4
  SITE 98: note = RuvC_P5
  REGION 217..302: note = Tnp_domain
  SITE 225: note = Tnp_P1
  SITE 255: note = Tnp_P2
  SITE 263: note = Tnp_P3
  SITE 264: note = Tnp_P4
  SITE 276: note = Tnp_P5
MSQQLRTTITVIGIDIGKNSFHVVGLDQRGAIVLRQKWSRGQVESRFANMPPCLIGMEACVGAHHLSRKLKGLGHDARLMPAKYVRPYSRGQKNDFRDAEAIAEAVQRPTMKFVATKTADQLDLQALHRVRERLVSQRTGIINQIRAFLLERGVAVRQGQRFLRAELPRILATPPDVLSPRMVRVIEDLAGDWRRLDERIDGLSGEIEAIAHGDAGCERLMSVPGIGPIISSAMVAAISAGDAFSKGRDFAAWLGLVPKQISTGDRTILGKISKRGNRYLRVLFVQAAWVVLIKPKSWERHGLKPWLEAAKKRLHHNVLAIALANKLARIAWSVLAHGRNFEARKIPAATQ

SEQ ID NO: 14093 - protein, 339 aa, unidentified
  source 1..339: note = protein_fcec0e3
  REGION 6..148: note = RuvC_domain
  SITE 9: note = RuvC_P1
  SITE 52: note = RuvC_P2
  SITE 87: note = RuvC_P3
  SITE 89: note = RuvC_P4
  SITE 92: note = RuvC_P5
  REGION 211..298: note = Tnp_domain
  SITE 219: note = Tnp_P1
  SITE 249: note = Tnp_P2
  SITE 257: note = Tnp_P3
  SITE 258: note = Tnp_P4
  SITE 270: note = Tnp_P5
MKITTIGLDIAKKFFQLHWVDMTTGEVHRKQLKREQMAEFFATCEPSLVAMEACGSAHYWARKLRAFGHEVRLVAAQFVRPFVKTNKTDAADARAIWEAVQRPEMKFVAIKTEAQQSILALHRLREQMVKFRTMQSNQLRGLLYEFGVALPPGRAKGMPAALEALGALEETLPAMVIDALRQQMIRIQKLDEDIADIEKKLTLWKKEERSAMNLMEIPGVGILSATAAVATIGDATAFKSGREFAAFLGLVPKQSGTGGRVRMLGISKRGNVYLRTLLIHGARARINFQKQRDPWIEQLLARRPFNTVVVALANKMARTIWAMMAHDRTYQKNYAANIA

SEQ ID NO: 14094 - protein, 348 aa, unidentified
  source 1..348: note = protein_79227c2
  REGION 8..149: note = RuvC_domain
  SITE 11: note = RuvC_P1
  SITE 54: note = RuvC_P2
  SITE 89: note = RuvC_P3
  SITE 91: note = RuvC_P4
  SITE 94: note = RuvC_P5
  REGION 216..294: note = Tnp_domain
  SITE 224: note = Tnp_P1
  SITE 254: note = Tnp_P2
  SITE 262: note = Tnp_P3
  SITE 263: note = Tnp_P4
  SITE 275: note = Tnp_P5
MTKEIAVLGIDLGKNSCSLAGLDASGAVVKRRRMRPDSVTAFTAKIPACVIAMEACCGAHYLGRLLAAQGHTVRLMSPEYVRPYVKAQKNDDRDAEAIAEAATRPTMRFVDLKSEEQLDVQTLHRARDRLVVERTALINQLRAILLERGITVPKGRSKLAQYLVGRFDQNDGGSIALSPRTQALIADMRKEWRELDHRIEAFDDEFVARARADEAARRLLSIPGIGPVNATALIAAIGKGESFGHGRDLAAWLGLVPRQITTGGRPRLVGISKRGNKYLRKQLIHGARSALPGLLTSATPLGGWLRGLITRVHKNAVVVALANKLARIAWAVLRHGDKFDAKAVGVTV

SEQ ID NO: 14095 - protein, 432 aa, unidentified
  source 1..432: note = protein_ff511b1
  REGION 14..167: note = RuvC_domain
  SITE 17: note = RuvC_P1
  SITE 69: note = RuvC_P2
  SITE 104: note = RuvC_P3
  SITE 106: note = RuvC_P4
  SITE 109: note = RuvC_P5
  REGION 295..381: note = Tnp_domain
  SITE 302: note = Tnp_P1
  SITE 333: note = Tnp_P2
  SITE 341: note = Tnp_P3
  SITE 342: note = Tnp_P4
  SITE 354: note = Tnp_P5
MMVTAEGDGRVLGIGIDWAEEFHDVAVGTPEKGVIEQFRIEHGPDGVAALVERALRLEPDPAEVRVVLETRHGLLVEALLDAGFTVVPVNPDLVARRRGPARKKDDAEDARICCLLALDRHAGLRALVPHGELGGELRAIARDDERAARDQRRLLNRLRADLQTTYPAALTLAGKDLGAPTVLRLLQRWPTQAELAAATREELVTFALASKHGWPERFADRVTAALATPSLPTRDYLVRAKSAGIRLAAVQLLALHEARRGWEQRMAELLLGGRRTGRDHTVKDPDPGKAFPGGAIYLSFPGLGDRLAARVAGEIGEHVTQYESPNALQCYAGRAPVTRRSGKSDFVVARRLAHNRYLGDAVHQWAFCSLTQSGWAREFYDQKIAAGKSHHNALRALGNRWLEILWHCLSRGVPYDEATHVANRNRALGRAA

SEQ ID NO: 14096 - protein, 342 aa, unidentified
  source 1..342: note = protein_43323a9
  REGION 20..162: note = RuvC_domain
  SITE 23: note = RuvC_P1
  SITE 66: note = RuvC_P2
  SITE 107: note = RuvC_P3
  SITE 109: note = RuvC_P4
  SITE 112: note = RuvC_P5
  REGION 208..295: note = Tnp_domain
  SITE 216: note = Tnp_P1
  SITE 246: note = Tnp_P2
  SITE 254: note = Tnp_P3
  SITE 255: note = Tnp_P4
  SITE 268: note = Tnp_P5
MIKSFTPEREPCSREANIFCGIDVGAETLVVAVQPDQHREFPNSSCGHRQLIAWLGKFGFTRVTLEATGIYWLDLGLALDAAAGIECAVLNPKSAHNFAKTLGRRSKTDKLDAQSLAEYSRRMGFIAWRRPSVEALQLRSLSRHIESLTIERVRDSNRLHAAEATASTPRCVLQDLRRSLKAMEKRIRDLRSAAVQLIRTHEVLRQQFQLLIAMPGIADISAVHLLGELAALPSGLSVREWVAYSGLDPAHQVSGTSVHKPSRISRSGSRHLRRALYMPALVASRRDPHLKAFYQALLSRHKAKLHALIAVARKILHAIYGIFKHQTPYNGALLFPNLTPTD

SEQ ID NO: 14097 - protein, 396 aa, unidentified
  source 1..396: note = protein_fa46090
  REGION 30..181: note = RuvC_domain
  SITE 33: note = RuvC_P1
  SITE 84: note = RuvC_P2
  SITE 121: note = RuvC_P3
  SITE 123: note = RuvC_P4
  SITE 126: note = RuvC_P5
  REGION 247..331: note = Tnp_domain
  SITE 255: note = Tnp_P1
  SITE 285: note = Tnp_P2
  SITE 293: note = Tnp_P3
  SITE 294: note = Tnp_P4
  SITE 306: note = Tnp_P5
MSQFNAESTSIHTVGATVEPEQLPVHTAYVGLDVHKETIAISVADPGRQEPGYEGEIANTPKRIDRKIQQLSERYGGGLLQFVYEAGPCGYGLYRQLLASGHDVQVVAPSRIPKAPGERIKTDRRDALKLARLARSGDLTPVWVPDTEQEAMRDLTRARDDMKAQERKARQQLNAFVLRHGHHWPKGRSRWTQTHFNWLESLRFQHDWQQVVLQEYIDAVRAATRRVADIAAQMERALPQWSLAPVVEALVALRGIDKLAAMVLMAELGDISRFDSPRQLMAFLGLVPSEHSSGSRRRQGAITLTGNSHARRMLVESAWSYRFPARQTGHLKRKAANAPEEAKAIAWKAQKRLCGRYRDLTRAGKNAKLVCVAVARELTGFIWDIVCRVMPRAHAV

SEQ ID NO: 14098 - protein, 343 aa, unidentified
  source 1..343: note = protein_29b4d45
  REGION 6..148: note = RuvC_domain
  SITE 9: note = RuvC_P1
  SITE 52: note = RuvC_P2
  SITE 87: note = RuvC_P3
  SITE 89: note = RuvC_P4
  SITE 92: note = RuvC_P5
  REGION 211..298: note = Tnp_domain
  SITE 219: note = Tnp_P1
  SITE 249: note = Tnp_P2
  SITE 257: note = Tnp_P3
  SITE 258: note = Tnp_P4
  SITE 270: note = Tnp_P5
MQIVRIGLDLAKHVFEVHGIDAHGKIIVQKTLRRETLVRFFANLPPCLIGMEACAGAHYWAQVFTDLGHDVRLISPQFVKPYVKSNKNDRNDAEAICEAVGRPSMRFVPVKSSEQLAIQAVHRIRQRLVSDRVQLANQIRGLLAEHGIIIARDMAKLRSALAEILAGIDANLNELIRTLVQEVYLELAELDQRIASYNQRIRELFRNSELCQRIGKIEGIGPITATALIAAIGDRTSFKNGRQFAAWLGLVPKQYSSGGRTRLLGISKRGDRYLRTLLIHGARAALARAGKKEDPRSLWLSKLRQRRHPNIAAVALANKNARIVWSVLANDNLYDPARSTEAA

SEQ ID NO: 14099 - protein, 303 aa, unidentified
  source 1..303: note = protein_e17420e
  REGION 6..146: note = RuvC_domain
  SITE 9: note = RuvC_P1
  SITE 52: note = RuvC_P2
  SITE 87: note = RuvC_P3
  SITE 89: note = RuvC_P4
  SITE 92: note = RuvC_P5
  REGION 170..253: note = Tnp_domain
  SITE 178: note = Tnp_P1
  SITE 208: note = Tnp_P2
  SITE 216: note = Tnp_P3
  SITE 217: note = Tnp_P4
  SITE 229: note = Tnp_P5
MAITVLGIDLGKNSCSVAGFDETGRVVLRRRLTRDGVVRLGAKLPACTMAMEACCGAHHLGHVLREQGHEVRLMSPEYVQPYVKAQKNDERDAEAIAEAATRPTMRFVELKSEAQLDAQILHRARTRLVGQRTALINQLRAVLLERGELDRRVAALTTEFVARAREDQAARRLVSIPGFGALNATALVAAIGTGETFRSGRDLAAWLGLVPRQATTGGKPRLLGITKRGNTYLRTLLIHGARAALPSLSAGQTLIGDWLRGLVGRAHKNKVVVALAGKLARIAWAVLRSGEGYAARVSQPVAA

SEQ ID NO: 14100 - protein, 310 aa, unidentified
  source 1..310: note = protein_1832472
  REGION 8..152: note = RuvC_domain
  SITE 11: note = RuvC_P1
  SITE 54: note = RuvC_P2
  SITE 94: note = RuvC_P3
  SITE 96: note = RuvC_P4
  SITE 99: note = RuvC_P5
  REGION 190..274: note = Tnp_domain
  SITE 198: note = Tnp_P1
  SITE 227: note = Tnp_P2
  SITE 235: note = Tnp_P3
  SITE 236: note = Tnp_P4
  SITE 247: note = Tnp_P5
MIIHPGFVGIDVSKPMLDVFDAAIGRSECIDNTSAPIAALVARWRSKDVFVLFEATGSYDRLLRDALTEAGIRFARVNPARARDFARSAGFLAKTDAIDARMLAAMAQCLAPEPQAAANPVREQLARAHKRRDQLVYARQKERTRRSECVDPDIAADIDDHLDWLDHKIVAWDREIDRLIQQSEELAQAARRLRSMPGFGPVATTTLLALMPELGTLSPKAAAAIAGLAPFNIDSGQFRGSRRIKGGRKRVRDALYMAALAAARCNSRFRAFYRSLRAAGKPAKVAIIAVARKLLITANAILRDKSAYQR

SEQ ID NO: 14101 - protein, 344 aa, unidentified
  source 1..344: note = protein_88e51a1
  REGION 4..157: note = RuvC_domain
  SITE 7: note = RuvC_P1
  SITE 55: note = RuvC_P2
  SITE 96: note = RuvC_P3
  SITE 98: note = RuvC_P4
  SITE 101: note = RuvC_P5
  REGION 219..304: note = Tnp_domain
  SITE 227: note = Tnp_P1
  SITE 257: note = Tnp_P2
  SITE 265: note = Tnp_P3
  SITE 266: note = Tnp_P4
  SITE 277: note = Tnp_P5
MITIGIDPHKSSLTAVALDETGHLLATRRITVNAAAYKTLTDWVARWPQRRFAVEGAAGLGRGIAQLLAAAGEHVVDVPATLAARARLLDTGGTRKTDAADAASVAHAAMRHQRLRQVVAEDHHTRLRLLSERRDDLARERVRLLNRLHVLLRDLLPGGAALDLTADKATALLRNIRPLTATDSCRRDLAREMITDLRHLDRRLHANQAQIRQVLNETQSTITEIRGVGHIIAAKILGHVGDISRFPSADNFASYAGTSPLEASSGERRRHRLNPTGNRQLNTALHTIALVQARDEGPGRVYYQRKLSQGKTPAEARRALKRRLANVLYRHLIKDQLKLATGTG

SEQ ID NO: 14102 - protein, 341 aa, unidentified
  source 1..341: note = protein_4fe4fbb
  REGION 7..148: note = RuvC_domain
  SITE 10: note = RuvC_P1
  SITE 53: note = RuvC_P2
  SITE 88: note = RuvC_P3
  SITE 90: note = RuvC_P4
  SITE 93: note = RuvC_P5
  REGION 210..297: note = Tnp_domain
  SITE 218: note = Tnp_P1
  SITE 247: note = Tnp_P2
  SITE 255: note = Tnp_P3
  SITE 256: note = Tnp_P4
  SITE 268: note = Tnp_P5
MTQYKRVGIDTSKSVFTLHGIDHEDRPILRINLRRAQVVSFFRKLAPTVIAQEACGGSHYWARELKELGHTVLLVPPQYVKPYVKRGKNDRNDAEAICEAAGRPGMHFVPVKTIDQQAQGMIVKIRETFAGQRTALINTARGHATEFGIVAAKGAKKVADLFVAIERENDMPPEAKEMFAHLRHQIDELDARIEQIEARLSAAHKANEVSQRLATIPGVGPITALTLAVEIDPEAFRSGRHLAAWAGLTPKECSTGGKQRMAGISRAGHERLRTLLVSGATSIINAALKPGSRHMTDWLRALLLRKPRKLVAVALANKMARVAWAIMKRGGAWRRPSVAAA

SEQ ID NO: 14103 - protein, 396 aa, unidentified
  source 1..396: note = protein_d0cba15
  REGION 4..162: note = RuvC_domain
  SITE 7: note = RuvC_P1
  SITE 60: note = RuvC_P2
  SITE 101: note = RuvC_P3
  SITE 103: note = RuvC_P4
  SITE 106: note = RuvC_P5
  REGION 267..354: note = Tnp_domain
  SITE 275: note = Tnp_P1
  SITE 305: note = Tnp_P2
  SITE 313: note = Tnp_P3
  SITE 314: note = Tnp_P4
  SITE 327: note = Tnp_P5
MLYLGIDIGKNTHVASLIDDNAKLLFKAFSFGNTTEGGESLISKLASHVPSISEVEIGMEATGHYWLSLYSFLVGKGYVIHVVNPIQTDGWRKGTEIRKRKTDIIDSVLIAELIRYGDFLETSLADENTMSLRNLTRFRHYLVSSIGDLKRKAICVLDQVFPEYQSVFSNVFGQTSKELLLQLQSPDDFQSISAEKLEDILKSITLKKFAKNKISTISELAANSFGLSFCRDSFSLQLKLLLEQIKFIEAQVADVEAEIRQLLEKINSPITTIPGIGPINGATILGEIGDISRFSTPAKLVAYAGIDASVNQSGMYQSTNNKMSKRGSPYLRKALFQAALVASNCDPTFKAFYQKKRIEGKHHLTAIGAVARKLCYTIHAILKSNCPYQVQTVSSD

SEQ ID NO: 14104 - protein, 421 aa, unidentified
  source 1..421: note = protein_667d285
  REGION 23..177: note = RuvC_domain
  SITE 26: note = RuvC_P1
  SITE 74: note = RuvC_P2
  SITE 114: note = RuvC_P3
  SITE 116: note = RuvC_P4
  SITE 119: note = RuvC_P5
  REGION 284..369: note = Tnp_domain
  SITE 292: note = Tnp_P1
  SITE 322: note = Tnp_P2
  SITE 330: note = Tnp_P3
  SITE 331: note = Tnp_P4
  SITE 343: note = Tnp_P5
MSGSDKRHHGADSDDGLGYAVFCGLDVARENHHAVALNTAGRRLADAPLRNDETALRALFTSLSEHGPVLVIVDQPASIGALAVEVARSMGLDVAYLPGLVMRRLADLHPGEAKTDARDGYVIADAARTLPHTLRRVGPDDETVIALGVLAGYDADLAAEATRLTNRLHDALLHVHPALERLLGRHLRRGGVLDLLAEAGTPQQLQAVGKEGMAAVMAKRSPQLAKTLPTRILAALAEQSVVIAGTAQYGRVISGLAASLRTVLDTRAELAAELEDLLEAHPLAPVLTSMPGVGVRTAIQLLLTLGDGSAFRTAAHLASYAGLAPVTRKSGRSIRGEHPARRGNRDLKRVLYLSAFASLRDPASRAYYDRKRREGKHHVAAVLCLARRRCDVLHAMIRTGQPYRRPTPDPAVTPPAGLAAA

SEQ ID NO: 14105 - protein, 343 aa, unidentified
  source 1..343: note = protein_df0fedc
  REGION 6..147: note = RuvC_domain
  SITE 9: note = RuvC_P1
  SITE 52: note = RuvC_P2
  SITE 87: note = RuvC_P3
  SITE 89: note = RuvC_P4
  SITE 92: note = RuvC_P5
  REGION 211..299: note = Tnp_domain
  SITE 219: note = Tnp_P1
  SITE 249: note = Tnp_P2
  SITE 257: note = Tnp_P3
  SITE 258: note = Tnp_P4
  SITE 270: note = Tnp_P5
MQIKRIGLDLAKYVFEVHAVGTTEEVVLRKTLRRDAVAHFFAELPPCIVGMEACCGSHYWARLLTDLGHEVRLISPQFVKPYVKSNKNDRNDAEAICEAAGRPSMRFVPPKSAEQLEIQAVHRIRQRVVANRTRLVNQVRGLLGEHGVVVARDITRIRRALSEIVDNNQGEFGEIFIDMLRDMREELAELDSRLAGCNRRIKNLFRANEMCQRIGQIEGVGPITATALVAAVGDKSCFKNGRQFAAWLGLVPKQRSSGGKARLFGISKRGDRYLRTLLIHGARAVLGKAAGKTDPRSQWIARMRERRHPNVVSVALANKNARIVWSLLARDQNYRPEPAMSFA

SEQ ID NO: 14106 - protein, 349 aa, unidentified
  source 1..349: note = protein_12dd1fd
  REGION 6..147: note = RuvC_domain
  SITE 9: note = RuvC_P1
  SITE 52: note = RuvC_P2
  SITE 87: note = RuvC_P3
  SITE 89: note = RuvC_P4
  SITE 92: note = RuvC_P5
  REGION 211..299: note = Tnp_domain
  SITE 219: note = Tnp_P1
  SITE 249: note = Tnp_P2
  SITE 257: note = Tnp_P3
  SITE 258: note = Tnp_P4
  SITE 270: note = Tnp_P5
MDRTTYGLDIAKNVMQLHWVDAETGEIGRKKLARARLAAYFAQLQPARIVMEACGSAHHWARVFTALGHQVELLPAAQVRAFVRSHKDDAADARAIWLAAQQGDIRRVPQKNVQQQAMLSLHRTRQHWVSVRTATVNSLRGLLYEFGVVLRGGRQAGLKALAEQRAAIDPQLPTAMHSLLDGQLHTLELLQQRIDALECQIAALQGQLKGAPELDQVPGIGVLGATALAATLSDGKAWRSGREFSASLGLVPAHSGTGGKVRVGHLSKRGDPYLRTLLIHGARSVIEHAKHQPKWLEELLARRPKNVAVVALANKMARTAWAMVAHGRAYQRDWKSARPGSAAAQAAGA

SEQ ID NO: 14107 - protein, 273 aa, unidentified
  source 1..273: note = protein_7ea1780
  REGION 1..48: note = RuvC_domain
  REGION 161..238: note = Tnp_domain
  SITE 165: note = Tnp_P1
  SITE 195: note = Tnp_P2
  SITE 203: note = Tnp_P3
  SITE 204: note = Tnp_P4
  SITE 216: note = Tnp_P5
MPHTLRAVDRNSEVLAALKMLSGFDDDTARDCTRTINRLRSVLTQIYPSLERIFAGSTLTRSPVLDLLIHYKSPTGLKKAGRSRVLTWLSRRTHHNPDILVDNIFTALAAQTVTVPGTQAAKLVIPQLAANIKTLKAQRDTIAGQVEDMLEDFPLSEVLDRVCRGSTIKTAAQILLSIGDGSDFASSCHLAAYAGNAPVTRRSGSSIRGEFPARAGNKRLKTPQCRSHMFGTTTVQRHLRDDEEQGVLPRNPSPPSRRIAVNKNSRPEIMLVG

SEQ ID NO: 14108 - protein, 399 aa, unidentified
  source 1..399: note = protein_774e085
  REGION 3..158: note = RuvC_domain
  SITE 6: note = RuvC_P1
  SITE 55: note = RuvC_P2
  SITE 95: note = RuvC_P3
  SITE 97: note = RuvC_P4
  SITE 100: note = RuvC_P5
  REGION 265..352: note = Tnp_domain
  SITE 273: note = Tnp_P1
  SITE 304: note = Tnp_P2
  SITE 312: note = Tnp_P3
  SITE 313: note = Tnp_P4
  SITE 324: note = Tnp_P5
MFCGWDWGSTIHGVCLLDDDGVTIKTWMVKHTDTELAALFAELAQLGDPALIPVAIERGEGLVVGLIARAGHPVLMVEPAAFKASRPRWGAAGAKSDAADAFMLADYARTDGHRLRRVEPLAQATRELAALVRARTSLVEARTAASNQLWAILAEHWPGAALVFAKLTSQIALAFLADYPTPRSAARLGQGRMHQFCRRHSYRGGKSPAELVSRLRAAPASADPIAEKVLEAIVRSSLAQIGLLNAEITGLERQLADALATHPKTALLKTLPRVATVSLAALIAEIGPLLERCENPEQVAAMCGAAPVTKASGKSRDVGFRYTANKPARVAITSFADNSRHCSAWAGDSYRRARARGARHPHAVRILARGWVRVIWACWTTDTAYDPSRHRGEQRLLAA

SEQ ID NO: 14109 - protein, 342 aa, unidentified
  source 1..342: note = protein_c40de00
  REGION 7..148: note = RuvC_domain
  SITE 10: note = RuvC_P1
  SITE 53: note = RuvC_P2
  SITE 88: note = RuvC_P3
  SITE 90: note = RuvC_P4
  SITE 93: note = RuvC_P5
  REGION 211..294: note = Tnp_domain
  SITE 219: note = Tnp_P1
  SITE 249: note = Tnp_P2
  SITE 257: note = Tnp_P3
  SITE 258: note = Tnp_P4
  SITE 270: note = Tnp_P5
MNEVSIIGLDLAKRVFQLHGAHPDGSVAFRRKLSRHHLLTFLSNQPRCVVAMEACATAHYWAREIGALGHEVRLIPPAYVKPFVKRQKNDAADAEAIAEAASRPTMRFVVAKTTAQQAGAMVFRTRDLFVRQRTQLINALRGQLAEHGVIAPQGVLNVKALADIVEDTASGLDLLIVETARLYLEQIVLLSLRIATLEKALRDEAAQATTTSRLMTMPGIGPVTAMAIEAFAPAMTTFKRGRDFAAWLGLVPRQNSSGGKQVLGSISKMGQRDIRRLLIIGAMAVLRSVSRKGLPDGSWLAGMLSRKPRKLVAIALANKMARAAWAMLSRNEDYRAPVAVPA

SEQ ID NO: 14110 - protein, 339 aa, unidentified
  source 1..339: note = protein_e681f01
  REGION 7..148: note = RuvC_domain
  SITE 10: note = RuvC_P1
  SITE 53: note = RuvC_P2
  SITE 88: note = RuvC_P3
  SITE 90: note = RuvC_P4
  SITE 93: note = RuvC_P5
  REGION 212..301: note = Tnp_domain
  SITE 220: note = Tnp_P1
  SITE 250: note = Tnp_P2
  SITE 258: note = Tnp_P3
  SITE 259: note = Tnp_P4
  SITE 271: note = Tnp_P5
MGEVTTIGLDLAKNVFQVHGVDAAEAVAVRRALRRGQVLGCFAKLPPCLVGMEACATAHYWGRELARLGHRVRLIPPAYAKAYVRWNKNDAADAAAICEAVSRPSMRFVALKTAEQQAAAGLHKVRELLVKQRTMLINALRGLLAEFGLVAAAGPQHVDELVRMLNEPAGAVIPEPLHGGLMQLVHSLRLVQREVETIEKEIVRWGRDNRTCRHLDTIPGYGPILASAMAAMVVEPGAFKSGRHFAASLGLVPRQDGTGGKVKLGPISKRGNGYLRRLLVNGAMSVLRGKRARHDPWLAKLLAEKKRMVVACALANKMARIGWAVMVRQEEFRARPAAT

SEQ ID NO: 14111 - protein, 355 aa, unidentified
  source 1..355: note = protein_f15bd80
  REGION 7..158: note = RuvC_domain
  SITE 10: note = RuvC_P1
  SITE 64: note = RuvC_P2
  SITE 102: note = RuvC_P3
  SITE 104: note = RuvC_P4
  SITE 107: note = RuvC_P5
  REGION 202..289: note = Tnp_domain
  SITE 210: note = Tnp_P1
  SITE 240: note = Tnp_P2
  SITE 248: note = Tnp_P3
  SITE 249: note = Tnp_P4
  SITE 262: note = Tnp_P5
MKRSYYIGIDISKKTLDASIFVEKMEEKRFPHLKVDNNKTGFKEILKWARKEKVNLKDCMFCMENTGHYGLDLYSFLEQKGIEYCSICPLVMKRSMGISRDKNDKIDSARIATFAFEKAYKLKPSKLASEDILKLKQLQSERAMYVSERAKYKAYISDKSNKKGSTFKRMSLLVEALSQQIEAVEAEIQSVIQRNEELKTSYDLITSVPGVGKVIAISTLTHTNNFQSFSNARQYACYAGVAPFARTSGTSIHGAATVSRIGDAQIKAELSQGAMSARHNDPEMSVYAARKREEGKHPGVILNAIKFKLIERMFAVIHRGTPYVLTHEYKTMKNTAEGCHSGGRRKVSQERVFAS

SEQ ID NO: 14112 - protein, 338 aa, unidentified
  source 1..338: note = protein_e040fde
  REGION 7..149: note = RuvC_domain
  SITE 10: note = RuvC_P1
  SITE 53: note = RuvC_P2
  SITE 88: note = RuvC_P3
  SITE 90: note = RuvC_P4
  SITE 93: note = RuvC_P5
  REGION 211..299: note = Tnp_domain
  SITE 219: note = Tnp_P1
  SITE 249: note = Tnp_P2
  SITE 257: note = Tnp_P3
  SITE 258: note = Tnp_P4
  SITE 270: note = Tnp_P5
MGAMATIGLDLAKNVFQVHGVDADGKVLVRRQLRRGDVLKFFRGLPACLVGIEACATAHHWARAISALGHMVKMMPPAYVKPYVKRGKTDAADAEAICEAVTRPTMRFVAIKTVDQQGALMLHKTRDLLVRQRTMLINGLRGHLAEFGIIAAKGAGGVKAAIEALHEAQEQLPEAARMALHGIVDQLGQLATAIERLEARIVAWHRTNDVSRRLATIPGIGPITASAIAAAVPDGSMFRSGRQFAAWLGLTPKAHSSGGKDRQVGISKQGDGYIRRLLVVGATSVMRLARQDNASRQWAAKLLARKSAKLAAVALANKTARIAWAVMTRGEIYVAPAM

SEQ ID NO: 14113 - protein, 417 aa, unidentified
  source 1..417: note = protein_5bdbb88
  REGION 18..170: note = RuvC_domain
  SITE 21: note = RuvC_P1
  SITE 69: note = RuvC_P2
  SITE 107: note = RuvC_P3
  SITE 109: note = RuvC_P4
  SITE 112: note = RuvC_P5
  REGION 277..363: note = Tnp_domain
  SITE 285: note = Tnp_P1
  SITE 316: note = Tnp_P2
  SITE 324: note = Tnp_P3
  SITE 325: note = Tnp_P4
  SITE 336: note = Tnp_P5
MSVTPETSTTPARPRVCAGLDWAKDDHVVCILDTDGEVIDRFTIAHTAAGLKRLVHRLARMGVAEIGIERGDGPVIEALLATDITVLVISPNQVKNLRSRYGSAGNKDDRFDAYVLADVVRTDRRRLTPLQRSSPATRALRTSVRARRDLVEHRVATTNQLRAHLQIVLPALVGLFSELDSAISLSFIERFTTQTKIDWLTPTRTGEWLKKTGYTDRTDPALLYQRLIAAPRGTTGNDAETAAAVTLAYVAVLRALNTQIEALAHTISEQFDAHPDREIFASLPRSGTLRAARLLAEIGDARGRFPTADSLACLAGVAPSTRQSGKVKAVTFRWSADRDLRDALCDFAGDCRRANVWADDLYNHARARGHDHPHAVRILGRAWADIIWRCWQDRLPYQPERHNALQRVLNQRAQQAA

SEQ ID NO: 14114 - protein, 406 aa, unidentified
  source 1..406: note = protein_3ccac5b
  REGION 4..163: note = RuvC_domain
  SITE 7: note = RuvC_P1
  SITE 60: note = RuvC_P2
  SITE 100: note = RuvC_P3
  SITE 102: note = RuvC_P4
  SITE 105: note = RuvC_P5
  REGION 271..357: note = Tnp_domain
  SITE 279: note = Tnp_P1
  SITE 310: note = Tnp_P2
  SITE 318: note = Tnp_P3
  SITE 319: note = Tnp_P4
MLFVGDDWAEDHHDIELQDPAGRRLGRARLPEGVVGIARLHELVVAQLGADDGPEQVVVGIETDRGPWMQALVAAGYQVFPVNPRQVARYRERHGTSGAKSDAGDAHTLADMVRTDRHQLRAAAGDSALAEAIKLLARAHQRLIWDRHRHLLRLRAALVEFFPAALTAFPDLAAADALELLQAAPDPTSAARLSRPRIAAALTRASRRGVPAKATQVQQALRAEQLPQPERVVAAYAATVGAAVAVIGTLNAQIQALAGQVDAHFGEHPDAEIYRSQPGLGGVLGARVLGEFGDDPGRYRDARARRNYAGSSPVTKQSGKKKVVVARFVRNDRLADPLHQQAFCALTASPGARAYYDQLRARGTGHHAALRQLSNRLVGILHGCLKTRTRYSEATAWSHRASTAAA

SEQ ID NO: 14115 - protein, 320 aa, unidentified
  source 1..320: note = protein_449b15a
  REGION 7..152: note = RuvC_domain
  SITE 10: note = RuvC_P1
  SITE 57: note = RuvC_P2
  SITE 97: note = RuvC_P3
  SITE 99: note = RuvC_P4
  SITE 102: note = RuvC_P5
  REGION 192..278: note = Tnp_domain
  SITE 200: note = Tnp_P1
  SITE 230: note = Tnp_P2
  SITE 238: note = Tnp_P3
  SITE 239: note = Tnp_P4
  SITE 251: note = Tnp_P5
MTAFTPVGIDIASKKFDAAIWIEGKKYKNKVFANTPTGFHAFLLWLAPYGPCHICMEATGAYSLPLATYLYDAGYPVSVENAARIHAFGQSELIRNKTDKGDAKMIARYCHLHKPPEWKPVPVNERKLQVLINRLNALKEMKRMEENRALTSETIVQGSIQKVIAALDEEIKEIEQAIKKHIDNDPDLKKNQALLESIPGVGEILSTTLLGYVGDMSRFSSNKALVAYAGLNPMLKESGCWKGSTKLSKKGNALLRKALYMPAITALKYNPVVAALCKRLKEKGKRGKCLVCAAMKKLLQLAYGVLKSGKPFAAEIPLAR

SEQ ID NO: 14116 - protein, 402 aa, unidentified
  source 1..402: note = protein_0085a3d
  REGION 5..164: note = RuvC_domain
  SITE 8: note = RuvC_P1
  SITE 61: note = RuvC_P2
  SITE 102: note = RuvC_P3
  SITE 104: note = RuvC_P4
  SITE 107: note = RuvC_P5
  REGION 271..356: note = Tnp_domain
  SITE 279: note = Tnp_P1
  SITE 309: note = Tnp_P2
  SITE 317: note = Tnp_P3
  SITE 318: note = Tnp_P4
  SITE 329: note = Tnp_P5
MGVTIGLDIAKEFHWAVAVSTDTGDVLVSQRVNNDPDSIAGLVTAVRGLMREHGEVMVGIDIMGGIASLLTAMLLDAQLPLVHVPGLVVNRARHATRGGEHKSDPRDAKVIADQLRMRQDWRVVTDEDPVVADIRMLISRRRELVTEQTRRLNRLRELLTTFFPGAEKVVDVTNLGDLHLLSRYVTPAQLRRAGTQRLTQYLRGLGVKTTYADRLVTNVLTAARAQRIEVTGQSRLAEFAREFAIEAIGVRRRISKIDAEIAKALDSHPDTTLIRSLPGMGATLTAEFIAAAGDLDRFPSPNALASAAGLAPVLQQSGKMHYLRRANAGSKRLKFIFTQSAFVAIQRDPASRAFYDRKRAEGKRRDQALIALARRRVNVLTAILRTRQPYQPGYPNQATHAA

SEQ ID NO: 14117 - protein, 329 aa, unidentified
  source 1..329: note = protein_903fa12
  REGION 8..134: note = RuvC_domain
  SITE 74: note = RuvC_P3
  SITE 76: note = RuvC_P4
  SITE 79: note = RuvC_P5
  REGION 204..290: note = Tnp_domain
  SITE 212: note = Tnp_P1
  SITE 242: note = Tnp_P2
  SITE 250: note = Tnp_P3
  SITE 251: note = Tnp_P4
  SITE 263: note = Tnp_P5
MSEATQLKRFSQSPDPDALYAHLVRNYPEAEYHSVYEAGFCGFWIHYRLVGLGIHNIVVNPADVPTTTSEKLRKTDAVDSAKLARSLRAGELKGIYVPGSESLETRSLIRLRDSITKDQTRLKNRIKSHLRYLGIEIPEEFSGPGRCWNRCFVVWLKGAETGTAYGRQTLDFLVRQYEALRGQRLEMLRAVRALSRTERFEKPLENLMTVPGIGQLTGMSLLSEIDDIRRFKSADQLAAFIGMIPMCHSSGEREGVGDITVRRSARLRSVLVEASWVAVRQDPALSMAYGNYCKRMAPGKAIIKIARKLVNRIYFVMKRNQPYVKCVVA

SEQ ID NO: 14118 - protein, 398 aa, unidentified
  source 1..398: note = protein_4d5ee28
  REGION 6..162: note = RuvC_domain
  SITE 9: note = RuvC_P1
  SITE 60: note = RuvC_P2
  SITE 100: note = RuvC_P3
  SITE 102: note = RuvC_P4
  SITE 105: note = RuvC_P5
  REGION 267..354: note = Tnp_domain
  SITE 275: note = Tnp_P1
  SITE 306: note = Tnp_P2
  SITE 314: note = Tnp_P3
  SITE 315: note = Tnp_P4
  SITE 327: note = Tnp_P5
MSRIWAGIDSGKGHHHGLALDADGKTLLSRRVANDEPELLKLIGDVLDLADGRQVTWAIDMTGGEPALLLALLVSHGQEILYIPGRLVNRASDGYRGEGKTDARDAYVIADQARMRRDLRPVRPGDEAAIELRLLTGRRGDLVEDRTRSVNRLRGTLLGMFPALERALDLTNTGPLKLLTGYQTPAAIRRAGVTRLTKWLANRKVRNARALAEAVVEAAERQHTAVPGEKTIARLVHTLAEEVMALNEQISEMDKLIEGRFREHELADIVQSVPGIGTVLGAEFLAAVGGSLDGFDSPDALAAFAGVAPAPRDSGKVSGNLHRPAVYHRRLQRVFYTSALVSVRYDPNSRAFYDRKRAEGKKHVQAVLALARRRVNVLWALIRDRRCYQVAPPVTTAA

SEQ ID NO: 14119 - protein, 295 aa, unidentified
  source 1..295: note = protein_04d8221
  REGION 2..119: note = RuvC_domain
  SITE 17: note = RuvC_P2
  SITE 57: note = RuvC_P3
  SITE 59: note = RuvC_P4
  SITE 62: note = RuvC_P5
  REGION 227..295: note = Tnp_domain
  SITE 235: note = Tnp_P1
  SITE 266: note = Tnp_P2
  SITE 274: note = Tnp_P3
  SITE 275: note = Tnp_P4
  SITE 287: note = Tnp_P5
MDRCAGHRRRGRLWAIDLNSGGAALLIGLLVNHAQELVYITGLKVHRAAGTYRGEGKTDAKDAFVIADQARLRRDLGPLRAGDEIAVDLRTLTNRRTDLVCDRTRAINRIGHQLLEYFPALERSLDPSRKGHLVLLTEHQTPDRIRRLGEQHLTHWLQHRKVRKAESVAHAAIEAAATQHTTLPGQKLAAAMVERLAKRTIALNAEIAEIAEIDAMIEERFRQHRHAEVILTLPGFGPTLAAEFLAATGGEMTAFGSVDRLAGYAGLAPVPRDSGRIRGNLRRPRRYHRGLLRAC

SEQ ID NO: 14120 - protein, 303 aa, unidentified
  source 1..303: note = protein_f6e8086
  REGION 10..61: note = RuvC_domain
  REGION 168..254: note = Tnp_domain
  SITE 176: note = Tnp_P1
  SITE 207: note = Tnp_P2
  SITE 215: note = Tnp_P3
  SITE 216: note = Tnp_P4
  SITE 227: note = Tnp_P5
MPLMHSCSPTTRTDKHRLRRVEPVAAATRELAALVRARMSLVEARTAASNQLWAILAEHWPGAAAVFQKLTSQVALAFLADYPTPQSAALLGEGRMRQFCRRHSYRGGKSPAELVGRLRSAPVTANPLAPKVLESIVRGSIAQISLLTTEIAHLEDALAEALAAHPKTPLLKSLPRVANVSLAALIAEIGPLLERCQNPEQVAALCGAAPVTKASGKSRTVGFRYTANRPARVAITSFADNSRHSSAWANDCYRRARSRGARHPHAVRILARGWVRVIWTCWTTDTAYDPSRHRGEQRLVGAT

SEQ ID NO: 14121 - protein, 397 aa, unidentified
  source 1..397: note = protein_5a2de9e
  REGION 6..160: note = RuvC_domain
  SITE 9: note = RuvC_P1
  SITE 58: note = RuvC_P2
  SITE 98: note = RuvC_P3
  SITE 100: note = RuvC_P4
  SITE 103: note = RuvC_P5
  REGION 266..353: note = Tnp_domain
  SITE 274: note = Tnp_P1
  SITE 305: note = Tnp_P2
  SITE 313: note = Tnp_P3
  SITE 314: note = Tnp_P4
  SITE 326: note = Tnp_P5
MAQIWAGVDVGRTHHHCVVIDSEGKRLLSRRIANDETELLRLMGDAADLGDQVTWAMDVPDGGAALLIGLLVTHDQQLLYLPGRTLNRAAGGYRGEGKTDSRDAAIIADQARMRRDLRPLRPGDEVTVELKLLTARRSDLVADRTRVINRMRALLVGIFPALDRALEDLTRTGQLMLLTGYQTAAALRRIGLVRLECWLRTRKARHADKIAAAAVAAAHQQHIRLPGEALTATVIAELAGEVMALNDQIKKTDTLIETRFRQHELAEVITSLPGFGSLLGAEFLAVTGGDLASFATPDRLAAFAGLAPAPWDSGRIRGNLHRPRRYHRGLNRVFYMSAMVSITCCPESRRFYDRKRAEGKRHNQAVLALARRRVNVVWALIRDHRLYQPAPPGTAAA

SEQ ID NO: 14122 - protein, 422 aa, unidentified
  source 1..422: note = protein_21b08ed
  REGION 4..157: note = RuvC_domain
  SITE 7: note = RuvC_P1
  SITE 57: note = RuvC_P2
  SITE 94: note = RuvC_P3
  SITE 96: note = RuvC_P4
  SITE 99: note = RuvC_P5
  REGION 285..371: note = Tnp_domain
  SITE 292: note = Tnp_P1
  SITE 323: note = Tnp_P2
  SITE 331: note = Tnp_P3
  SITE 332: note = Tnp_P4
  SITE 344: note = Tnp_P5
MLGVGIDWAEEFHLVALGRPGEGVIEVTRVRHTPSAVDTLIGKVAALESDPAEVRVAIETRHGLLVERLVDAGYTVAPVNPDLVARRRGPARKKDDTEDARILCLLALDRFAALRPLIPHGELAGELRAIARDDERAARDQRRLLNRLRQDLLQTFPAALQLAAGDLAAPTILKLLQRWPTQDALAATTRTELVAFARAAHHGWPDRLADKVQQALATDHFTPRDYLVRAKADTIRLTTTQLLAIGAQRKLWERRMGELLLGGARQGRARTPRQERPDNAIPGGKVYLSFPGLGDRLAARIAGEIGDHPEQFESPNALASYAGKAPVTRRSGRSEFTVACRLAYNHWLGNAVQQWAFCSLQESPWAREFYDAQRARGKRHHAALRALGNRWLEVLWHCLRNNIPYSEAVHATNRDRALKRAA

SEQ ID NO: 14123 - protein, 338 aa, unidentified
  source 1..338: note = protein_5074c3e
  REGION 6..146: note = RuvC_domain
  SITE 9: note = RuvC_P1
  SITE 51: note = RuvC_P2
  SITE 86: note = RuvC_P3
  SITE 88: note = RuvC_P4
  SITE 91: note = RuvC_P5
  REGION 210..296: note = Tnp_domain
  SITE 218: note = Tnp_P1
  SITE 248: note = Tnp_P2
  SITE 256: note = Tnp_P3
  SITE 257: note = Tnp_P4
  SITE 269: note = Tnp_P5
MKTSVIGLDIAKNVFHLYSIGDDNKAIKKKLKRAELLAFFANYPVSLIGIEACGSAHHWARELIKLGHEVILLNARYVKSFVIGNKNDFNDAAGIFDAVTRPNKRTVTIKTIEQQDIQLVHTIRSGLVGKRTALVNQTRGLLSERGIVIPKSINQLRKQLPLILEDAENNLTPLSREMFSEHYERLVVLDEEITNQDQRIIRLCHANELSQRFTEVRGVGPLIATAVLFDIGNGKGYTKGSDYAANLGVVPRQHSSGDKQLYLGISKRGNRYIRTLLIHGARSVISHCDKKQDKLSLWLKALVERRGFNRAAVALANKNARILWAMTTQGTKYDESMV

SEQ ID NO: 14124 - protein, 354 aa, unidentified
  source 1..354: note = protein_ad2f6e1
  REGION 14..155: note = RuvC_domain
  SITE 17: note = RuvC_P1
  SITE 60: note = RuvC_P2
  SITE 95: note = RuvC_P3
  SITE 97: note = RuvC_P4
  SITE 100: note = RuvC_P5
  REGION 218..303: note = Tnp_domain
  SITE 226: note = Tnp_P1
  SITE 256: note = Tnp_P2
  SITE 264: note = Tnp_P3
  SITE 265: note = Tnp_P4
  SITE 277: note = Tnp_P5
MPHNTSRLEAVATIGIDIGKNTFHLIGLDRNGAIVLRQKLSRRQIEARLANTPPCLIGMEACVGAHHLGRQLKAYGHDARLMPARYVRPYSKGQKNDFRDAEAIAEAVLRPTMKFVAIKTVEQLDLQALHRVRERLVCQRTSVINQIRAFLLERGIAVRQGPSALRSEIPIVLSMTDKLSPRMIQMIEDLCADWRYLDERIETVSDEIKTLSEQDEGAKRLMTVPGIGPIISTATVAAIGNGDAFSKGRDFGAWLGLVPRQMSTGGRTVLGPISKRGNRYLRMLFVQAAHAVLLHPQCWERHGLKSWIAAAARRLNRFKLAIALANKLARIAWGVLHGGRSFEVRSMKPAAQCL

SEQ ID NO: 14125 - protein, 400 aa, unidentified
  source 1..400: note = protein_fc6696d
  REGION 1..157: note = RuvC_domain
  SITE 4: note = RuvC_P1
  SITE 54: note = RuvC_P2
  SITE 94: note = RuvC_P3
  SITE 96: note = RuvC_P4
  SITE 99: note = RuvC_P5
  REGION 266..352: note = Tnp_domain
  SITE 274: note = Tnp_P1
  SITE 305: note = Tnp_P2
  SITE 313: note = Tnp_P3
  SITE 314: note = Tnp_P4
MGIDWAEAHHDVCVLDEVGVVQAKGRVPDGVEGVARLHAMVADHAEDAAEVLVGIETDRGLLVGALVAAGYRVYAVNPFAVSRYRDRHGTSGAKSDPGDAKVLANLVRTDRHNHREVAGDSELAEAVKVLARAHQSLIWTRQRQVSALRGALREFYPAALRALPELGTVEACSILGMAPTPERGRRLTLAKVRRSLAASGRTRNLDRRAAEILEALLAPQLEAPPILSEAYGSVVGSLVVVIDGLLHQIARLETELAERFERHPDAEILRSLPGLGLVLGARVLAEFGDDPARYADPKARKNYAGTSPITRASGKRMVVLARVAHNRRLADACYLWAFASLNASPGARRYYDARRTAGKTHHQALRALANRLVGIFHGCLQHRQLHREEVAWPTGLDAVA

SEQ ID NO: 14126 - protein, 342 aa, unidentified
  source 1..342: note = protein_d4bcdbd
  REGION 6..148: note = RuvC_domain
  SITE 9: note = RuvC_P1
  SITE 52: note = RuvC_P2
  SITE 87: note = RuvC_P3
  SITE 89: note = RuvC_P4
  SITE 92: note = RuvC_P5
  REGION 210..295: note = Tnp_domain
  SITE 218: note = Tnp_P1
  SITE 248: note = Tnp_P2
  SITE 256: note = Tnp_P3
  SITE 257: note = Tnp_P4
  SITE 269: note = Tnp_P5
MLETMIGVDLAKSVFQVHGASMTGVVKFRKRLTRSQFRRFLAAEPRAVFVMEACGSAHYWAREMVKTGHEVKLIAPQYVRPFVRRQKNDAADAEAIVIAAQRPEMTFVGTKDEDQQAGAVLFRSRERLIQQRTVAVNALRSILYEFGHVVPSGIRNIQRIEEILADENSDLPSLVQSECLDIIAQIREQTARIEAKTKTAKELASKDDVARRLQTIPGVGPLTALAVETFAPEMSTFKGGRNFAAWLGLVPRQFSSGGREKLGRISKAGQADIRRLLIVGAMSRLNWMGRKTVPEGSWLARMIAKKPRMLVAIALANKMARTIWAMLTKQEDYRESATGLAT

SEQ ID NO: 14127 - protein, 407 aa, unidentified
  source 1..407: note = protein_748ecf8
  REGION 4..160: note = RuvC_domain
  SITE 7: note = RuvC_P1
  SITE 57: note = RuvC_P2
  SITE 97: note = RuvC_P3
  SITE 99: note = RuvC_P4
  SITE 102: note = RuvC_P5
  REGION 269..355: note = Tnp_domain
  SITE 277: note = Tnp_P1
  SITE 308: note = Tnp_P2
  SITE 316: note = Tnp_P3
  SITE 317: note = Tnp_P4
MIFVGVDWAEAHHDVHVQDENGKRLGGGRLPEGVEGIARFHELAARHAQEPAEVVIGIETDRGLFAAALMAAGYQVFVVNPLSASRYRDRHAVSGAKSDPGDAKVLADLVRTDRHNHRPAAGDSDLAEAVKVLARAHQSMIWSRRQHANRLRSALREFYPAALTAFDDLTSGDAVEVLRAAPTPVLGAALSRAKIAAALRRGGRQRHIDARAAQIQAALRTPQLAPAPVIASAMGASVSASVAVIAEMTTQIAVLERQLAADFEAHPDAEVVRSLPGLGTILGARVLGEFGDDPGRYATAKSRKNYAGTSPITRASGTRRVVLARHVRNQRLADAIYLWAFAALTASPGARAFYDTRRAAGDTHHAALRALGNRLVGILHGCLANHAQYNETTAWGHRTGTSFTQAA

SEQ ID NO: 14128 - protein, 413 aa, unidentified
  source 1..413: note = protein_74b3520
  REGION 14..166: note = RuvC_domain
  SITE 17: note = RuvC_P1
  SITE 65: note = RuvC_P2
  SITE 103: note = RuvC_P3
  SITE 105: note = RuvC_P4
  SITE 108: note = RuvC_P5
  REGION 273..359: note = Tnp_domain
  SITE 281: note = Tnp_P1
  SITE 312: note = Tnp_P2
  SITE 320: note = Tnp_P3
  SITE 321: note = Tnp_P4
  SITE 332: note = Tnp_P5
MSVADAPVLPRPTAGVDWAKDDHAIAIVDPDGEPIDRFPVAHDTAGLRTMVRKLLAAEVSEVGIERPDGPVVDALRQAGLVVYVIPPGQLKNLRSRYGSAGNKDDRFDAYVLADVVRTDRRRLRPLLVDTEATTALRQTVRARRDLVAHRVAVANQLRAHLQICFPGTVGLFADIDSAISLRFLDRFDTQDRADWLSPKRWTAWLSAAGYCGRTSPDTFHTRLTNAPRGATGSASESAATVTAAFTAVLRTITTQIEALATRIAEQLDLHPDAPIFTSLPRSGTVRAARLLAEIGDARGRFPTADSMACLAGVAPSTRQSGKTTAVSFRWGADKQLRDALCDFAGDTRHANPWAADLYQRARTRGHDHPHAVRILARAWVDNIWACWTTTTPYHPDHHRALQRILNQHQPAAA

SEQ ID NO: 14129 - protein, 327 aa, unidentified
  source 1..327: note = protein_868eeff
  REGION 13..131: note = RuvC_domain
  SITE 28: note = RuvC_P2
  SITE 68: note = RuvC_P3
  SITE 70: note = RuvC_P4
  SITE 73: note = RuvC_P5
  REGION 245..322: note = Tnp_domain
  SITE 253: note = Tnp_P1
  SITE 283: note = Tnp_P2
  SITE 291: note = Tnp_P3
  SITE 292: note = Tnp_P4
  SITE 305: note = Tnp_P5
MSVTVLKIWPGLPGSSKTLDGETRVVMEHTGRYYEPVANVLHEAGLHVSAVNPLLIREYGGNSLRRVKTDKADAVKIARYALDNWADLRDYTPMDTIRYDLKTLNRQFQLASKQKTATANNLIALQEQSFPGIRKCFDSPVRQDGTQKWVDFTYTFWHADCVRKHSLNAFAERYRKWCKRHGYIFKQSNAEEVYALAKSAVTLVSSSEVTKLLVQEAANQLTGISHSVETYRAEMNRLASMLPEYPVVMEMYGVGESFGPQLMAEIGDIRRFEHKKSLVAFAGVDPMPNQSGEKNVRSNRSSKRGSPYLRKTLFNIMGDLPQMLASR

SEQ ID NO: 14130 - protein, 322 aa, unidentified
  source 1..322: note = protein_72b8221
  REGION 9..162: note = RuvC_domain
  SITE 12: note = RuvC_P1
  SITE 56: note = RuvC_P2
  SITE 96: note = RuvC_P3
  SITE 98: note = RuvC_P4
  SITE 101: note = RuvC_P5
  REGION 195..279: note = Tnp_domain
  SITE 203: note = Tnp_P1
  SITE 232: note = Tnp_P2
  SITE 240: note = Tnp_P3
  SITE 241: note = Tnp_P4
  SITE 252: note = Tnp_P5
MSQPNQICVGIDVAKGSFDICVGTGKASFTVINSTDGFEQIIKALKSVSVSLILMEATGGLEAPVAYHLQAEGYEIAVVNPRQARDFCRAMGYLAKTDSIDARALAQMADVINNHPERERFILALPDNQRQVLTARVARRRQLVGMLVAERNRLHTTHPAVMKSVECLICALNGELELIDIEIKEHVQKHFIDLSALLRSVKGVGPTTIASLLADVPELGNLTRREICALVGVAPVNRDSGKMRGRRSIFGGRASVRTALYMATLCAVRFNPALKTFYTRLVLAGKPKKVAIVASMRKLLTIINAMIKKGEEWDNTFHNLAC

SEQ ID NO: 14131 - protein, 347 aa, unidentified
  source 1..347: note = protein_c2f4f8d
  REGION 14..162: note = RuvC_domain
  SITE 17: note = RuvC_P1
  SITE 65: note = RuvC_P2
  SITE 105: note = RuvC_P3
  SITE 107: note = RuvC_P4
  SITE 110: note = RuvC_P5
  REGION 207..293: note = Tnp_domain
  SITE 214: note = Tnp_P1
  SITE 244: note = Tnp_P2
  SITE 252: note = Tnp_P3
  SITE 253: note = Tnp_P4
  SITE 266: note = Tnp_P5
MNKPVTTPTATVFCGIDVSATTLAVAVIEQDQPLQQRQFINRPSGHKALIGWLAKRQACVRVSMEATGIYSLDLALALDAQTSIELAVLNPKLANRFQQTLSRSKTDAADAVVLAHYSQRMPFTRWQRPGLKGLQLRALARHIGALVSQQSREKNRQHALKNSSTAPRAVIDDLSRSLASVARRIVKMRGMAMELIRADDQLNERFCLLTSIPGIAAVSAIQLLAETVLLAPDLTARQWVASSGLDPMHCTSGTSVHKRPRISRSGNRHLRRALYMPALAAVRWDQHLKAFYEALQMRHKTKLQALIAVARKLLHAIYGIFKTRTPYNGSKLFPQMNLTPELQSVSR

SEQ ID NO: 14132 - protein, 403 aa, unidentified
  source 1..403: note = protein_84b2b92
  REGION 11..166: note = RuvC_domain
  SITE 14: note = RuvC_P1
  SITE 63: note = RuvC_P2
  SITE 103: note = RuvC_P3
  SITE 105: note = RuvC_P4
  SITE 108: note = RuvC_P5
  REGION 273..358: note = Tnp_domain
  SITE 281: note = Tnp_P1
  SITE 311: note = Tnp_P2
  SITE 319: note = Tnp_P3
  SITE 320: note = Tnp_P4
  SITE 332: note = Tnp_P5
MDTGARPGVFAGLDVGKTNHHLCALAPDGTRVLDRVVANDEPALRQVFGALLGGGGEVLLIVDQPASIGALPVAVARAMGIAVAYLPGLVMRRLADLHPGEGKTDARDAWVIADAARTLPHTLRLVGGDDETVAGLGVLAGYDDDLAAECTRLSNRARDLLLGISPALERTLGPRIGHPAVLALLAAYPTPELLRGAGRRRLARIVTPLAPRIADQILEQLHLALAAQTVVVPGTADSGRVLAGIARALSATLTERRALDRELKERLDAHPLAPVLTSMPGVGVRTAVKILTIVGDGSAFPTAGHLAAYAGLAPVTRRSGTSIRGEHRAHRGHRALKSTLFLSAFASLSDPTSRAYYDRKRAEGKRHNAALICLARRRVDVLHALLRTRTAYRQPASTTPAAA

SEQ ID NO: 14133 - protein, 277 aa, unidentified
  source 1..277: note = protein_babd4e5
  REGION 7..149: note = RuvC_domain
  SITE 10: note = RuvC_P1
  SITE 53: note = RuvC_P2
  SITE 88: note = RuvC_P3
  SITE 90: note = RuvC_P4
  SITE 93: note = RuvC_P5
  REGION 211..271: note = Tnp_domain
  SITE 219: note = Tnp_P1
  SITE 249: note = Tnp_P2
  SITE 257: note = Tnp_P3
  SITE 258: note = Tnp_P4
MSEITTVGLDLAKNVFQAHGADSSARAVLRRKLRRDQVLAFFSQLPPCVVAMEACGGVHFWGREIGKLGHEVRLIPPAYVKPFVKRQKNDAADAEAICEAALRPTMRFVPVKSEETQGAAMVFRVRELLIRQRTQAINALRGHLAEFGQIVPQGAANAARLIAIVEDPDSGLPADATDTLKVLVAALANLEAEIARLDSEIARGAKESEVARRLMTVPGIGPLIGTAIAVLAPPPETFRRGRDFAAWLGLVPRQHSTGGKQRLGATTKMESGPSGGC

SEQ ID NO: 14134 - protein, 412 aa, unidentified
  source 1..412: note = protein_dc9d4f8
  REGION 12..167: note = RuvC_domain
  SITE 15: note = RuvC_P1
  SITE 64: note = RuvC_P2
  SITE 104: note = RuvC_P3
  SITE 106: note = RuvC_P4
  SITE 109: note = RuvC_P5
  REGION 275..361: note = Tnp_domain
  SITE 283: note = Tnp_P1
  SITE 314: note = Tnp_P2
  SITE 322: note = Tnp_P3
  SITE 323: note = Tnp_P4
  SITE 334: note = Tnp_P5
MSLALPEALFFTGIDWAAATHAVCVMDAAGKIMTEFTIEHSADGIAALIRRLARYGDPADMPAGIERPNGQLVDLLLEAGHPVVPVSPNAIKAWREGEVLSGAKSDAGDAAVIAEYLRLRQHRLRVAAPYSDQTKALRTLMRTRDDVVVMRVAATNQLSALLDAHWPGARAIFADVESPISLAFLTRYPTPAAARHLGEKRITAFCASQGYSGKRPAAVLLARLRSAPAGTTGPALTVTLRDAVLALVAVLTALNTAVKDLDRSAAARLGEHPDGEIFTSLPRSGQVNAAQMLAEWGDCRQAYDGPDAVAALAGCTPVTKQSGKHRDVTFRWACNKRFRQAMTTFAGNSRHASPWAAKIYDDARAAGKDHPHAVRILARAWIRVIWPCWLNHTPCDPARHGAAAALAEPIAA

SEQ ID NO: 14135 - protein, 411 aa, unidentified
  source 1..411: note = protein_3899688
  REGION 4..163: note = RuvC_domain
  SITE 7: note = RuvC_P1
  SITE 60: note = RuvC_P2
  SITE 100: note = RuvC_P3
  SITE 102: note = RuvC_P4
  SITE 105: note = RuvC_P5
  REGION 276..362: note = Tnp_domain
  SITE 284: note = Tnp_P1
  SITE 315: note = Tnp_P2
  SITE 323: note = Tnp_P3
  SITE 324: note = Tnp_P4
MLFVGDDWAEGHHDLQVEDDQGRVLARGRVDEGIAGMVRFHELVAEFLGDDAGPEEVVIGIETDRGPWVAALLAAGYVVFAVNPKLAARHRESLSLSGAKDDKTDARTLADLVRTRRHQLRPVTADSELADGVKVLARAHQSLIQERTRHLLRLRAALREYFPAALVAYQQGTLTLTGADVLALLAKAPTPAAAAKLTIVQITAALKTAGRRGDLAERAAAVQAALRTEHLGQPEIITAAYAATVGSTVAILQTLNTQIPALQEGVEASFGRHPDVEIYRSQPGLGPILGARVLAEFGDAPGRYADAKARKNYAGTAPITRQSGKLKTVHARFIHNNRLVNAIDLWASAATLHDADVRAYYDQLRGRGLGHHAALRQIGNRLVGILHGCLKTHTLYNPQTAWSHRATTQAA

SEQ ID NO: 14136 - protein, 399 aa, unidentified
  source 1..399: note = protein_2ba2406
  REGION 4..160: note = RuvC_domain
  SITE 7: note = RuvC_P1
  SITE 57: note = RuvC_P2
  SITE 97: note = RuvC_P3
  SITE 99: note = RuvC_P4
  SITE 102: note = RuvC_P5
  REGION 274..362: note = Tnp_domain
  SITE 282: note = Tnp_P1
  SITE 312: note = Tnp_P2
  SITE 320: note = Tnp_P3
  SITE 321: note = Tnp_P4
  SITE 334: note = Tnp_P5
MVSVGIDVSKGKSTVCLMRPFGEIVAGPMEITHVDSELKTLVKLMKSMRDDVKVVMESTGIYHLPVLTYLKENGIFTAVINPYQMKQYRVQGLRRVKTDKADSMTIAKYGLDNWDELKDFVSSEDKYRELTLLSRQYRHYMRIHVTSLQELTHILDFTMPDVKKEFNSWNPENGKDKLSDFVEKYWHYDNIRKKSERQFVESYLAWAKKKGYRCNQNKAAKIYSMAKEGIPTLPADQTTKMLVIQAIEVLRRVDETLNTILARMQEIAKTLPEYSVVRSMGGVGDVLAPKLIADIGDVRRFHNSKALIAYAGIDAPPYQSGQFIGTNRSISKRGSSAIRKTGYEVMRSLKSHPMPEDGAVYQFILKKEAEGKPKKVAKMAGLNKFLRIYYARVMEVYNC

SEQ ID NO: 14137 - protein, 381 aa, unidentified
  source 1..381: note = protein_fb87288
  REGION 8..152: note = RuvC_domain
  SITE 11: note = RuvC_P1
  SITE 57: note = RuvC_P2
  SITE 97: note = RuvC_P3
  SITE 99: note = RuvC_P4
  SITE 102: note = RuvC_P5
  REGION 197..284: note = Tnp_domain
  SITE 205: note = Tnp_P1
  SITE 235: note = Tnp_P2
  SITE 243: note = Tnp_P3
  SITE 244: note = Tnp_P4
  SITE 257: note = Tnp_P5
MQAIKTLVGVDVSAKTLAAKRRRKNEGKDEAKEFPNDAAGHRELLKWIGRGARLCMEATGVYHLQLALMLVAAEVEVMVVNPRVAKDFGRALANRSKTDRIDAGTLLEYVARMDFVAWKAPSSAVMELRELGRRLSELVHAGTEEKNRFHAKNVAAISRAVISDVQAHVAQIEKRVTQIEKAAALVIRADADLREQFEILTKIPGIGRRSAILLLSELAVLDPTMTVKQIVGHAGLDPREYESGSSVQKPPRISKAGNAHLRAILYMPALTAIRHDRGARLFFAQLVARGKKKMQAIVAVMRKVLHGIWIVLQRRVAFDSSVLFAVSLAKAESSDSAVAANQPEPSQDHPKGRSEAEELRQQLDPGSAQATRSRRKRSKAA

SEQ ID NO: 14138 - protein, 353 aa, unidentified
  source 1..353: note = protein_970c7f8
  REGION 20..162: note = RuvC_domain
  SITE 23: note = RuvC_P1
  SITE 66: note = RuvC_P2
  SITE 101: note = RuvC_P3
  SITE 103: note = RuvC_P4
  SITE 106: note = RuvC_P5
  REGION 225..311: note = Tnp_domain
  SITE 233: note = Tnp_P1
  SITE 263: note = Tnp_P2
  SITE 271: note = Tnp_P3
  SITE 272: note = Tnp_P4
  SITE 284: note = Tnp_P5
MRLYSAAKEGKPSMSKIVTIGLDIAKHVFQVHGVDFVGEIALRRKLRRSEVLSFFEGLEPCLVGMEACATSHHWARQLVALGHQVRLMPPAYVKPYVKRQKNDTADAEAICEAVTRPSMRFVPVKDEQQQAVLMLHRSRELLIRQRTMLINALRAHMAELGIVVRQGATGVDTLVTFVEDDEHDMIPPIARTALLPLVDHLRDVQRRIAKLDHTIIEWHRSSEQSRRLATVPGIGPITASALVATISDPTLFSSGRQLAAWLGLVPRQNSSGGKERLGGITKKGDPYLRRLLVIGAHAVLRFVRKSKATTMQWAARLLDRRPYKLAAVALANKLARIVWAVMVRNVEYRPQGT

SEQ ID NO: 14139 - protein, 343 aa, unidentified
  source 1..343: note = protein_e59a96f
  REGION 7..149: note = RuvC_domain
  SITE 10: note = RuvC_P1
  SITE 53: note = RuvC_P2
  SITE 88: note = RuvC_P3
  SITE 90: note = RuvC_P4
  SITE 93: note = RuvC_P5
  REGION 212..303: note = Tnp_domain
  SITE 220: note = Tnp_P1
  SITE 250: note = Tnp_P2
  SITE 258: note = Tnp_P3
  SITE 259: note = Tnp_P4
  SITE 271: note = Tnp_P5
MQAVTTIGLDIAKSVFQVHGVDADGNVVLRRQLKRRYVLAFFQKLPPCLIGIEACASSHYWSRELQALGHTVRLMPPAYVKPYVKRQKNDAADAEAICEAVTRPNMRFVPTKTPEQQSCLTLHRTRHLFIRQQTAVINSIRAYLAEFGIVAPVGRSGVEALLEVVANANDTRLPEIARACVAALGTQLLGLKTQILAFDRRIMAWHRSNETSKRLDEIPGVGPALATALVASVADPKAFRSGRDFSAWIGLVPKQNSSGGKDKLGSISKQGDRYLRSLFTTGALAVIRQAKLHGTKHRPWLTALLARRPTKVAAIALANKIARMAWAMMARGERYKEPVALAA

SEQ ID NO: 14140 - protein, 401 aa, unidentified
  source 1..401: note = protein_5af7dfe
  REGION 4..160: note = RuvC_domain
  SITE 7: note = RuvC_P1
  SITE 57: note = RuvC_P2
  SITE 97: note = RuvC_P3
  SITE 99: note = RuvC_P4
  SITE 102: note = RuvC_P5
  REGION 274..361: note = Tnp_domain
  SITE 282: note = Tnp_P1
  SITE 312: note = Tnp_P2
  SITE 320: note = Tnp_P3
  SITE 321: note = Tnp_P4
  SITE 334: note = Tnp_P5
MNAVGIDVSKGKSMVAILRPYGEIVSKPFEVRHTASGIYSLIEHIKSIDGESRIVMEHTGRYYEPLIHELSKSGLFVSAVNPKLIKDFSDNSLRKVKSDKADAVKIARYTLDSWTELKQYCLMDEIRNQLKTMNRQFDFYMKHKTAMKNNLISILDQTYPGANTYFDSPAREDGSQKWVDFAATFWHVDCVRKISLKVFVDHYQKWCKRKKYNFSQSKAEEIYGKAKELVSVLPKDDLTKLIIKQAIDQLNTASQTVEQLRTMMNEAASKLPEYPVVMAMKGVGKSLGPQLMAEIGDVSRFTHKGAITAFAGVDPGVNESGSYEQKSVHASKRGSGALRKTLFQVMDALIKTKPQDDPVYLFMDKKRAQGKPYYVYMTAGANKFLRIYYGRVKEYLSTLSE

SEQ ID NO: 14141 - protein, 342 aa, unidentified
  source 1..342: note = protein_5357250
  REGION 6..148: note = RuvC_domain
  SITE 9: note = RuvC_P1
  SITE 52: note = RuvC_P2
  SITE 87: note = RuvC_P3
  SITE 89: note = RuvC_P4
  SITE 92: note = RuvC_P5
  REGION 211..299: note = Tnp_domain
  SITE 219: note = Tnp_P1
  SITE 249: note = Tnp_P2
  SITE 257: note = Tnp_P3
  SITE 258: note = Tnp_P4
  SITE 270: note = Tnp_P5
MQITTIGLDIAKNVFQVHAIDGDEKVVVRKQLRRRQVLEFFKGQPPCLVGMEACATAHYWARELSKLGHLVRLMPAKDVKAYVKRNKNDAADAEAICEAVRRPTMRFVQIKSVEQQARLMLHRTRDLLMRQRTQVINALRAHMAELGIVAAQGREGIKELLKIIASEEDERLPVDAHASLMVLAAELQAIQTMIGSIEQRIVVQHRSNEASQRLETIPGIGVTGATAIAATIPDPKVFRSGRDFAAWIGIVPREDSTGGKRKLGPISKRGDRYLRRILVVGACAVLRYARQNPEKHPWLTRLLARKPFKVAAVALANKMARIAWALLAKGGTYRAPALATAP

SEQ ID NO: 14142 - protein, 387 aa, unidentified
  source 1..387: note = protein_469162f
  REGION 6..159: note = RuvC_domain
  SITE 9: note = RuvC_P1
  SITE 57: note = RuvC_P2
  SITE 98: note = RuvC_P3
  SITE 100: note = RuvC_P4
  SITE 103: note = RuvC_P5
  REGION 221..306: note = Tnp_domain
  SITE 229: note = Tnp_P1
  SITE 259: note = Tnp_P2
  SITE 267: note = Tnp_P3
  SITE 268: note = Tnp_P4
  SITE 279: note = Tnp_P5
MGQVVIGVDPHKRSATIEVIDHRERVLGKGRFGTDSDGYQAMLTAGREHTDRIWAVEGCNGIGRHVAQRLVADGETVLDVPAKLSARARVFSTGQGRKTDPVDAHSVAVVALRTPDLRQVTADDTTVALRLLVDRRDQLGHARTEIISRLHHLLLELIPGGAKKFLSAQQARALLNTVRPRDVVGKTRRWLASELIHELVTIDKKIKVANTELNDLVASTGSRLQQLHGIGPSGAARLIGDIADISRFASRGHFASWNGTAPIDASSGDQNRHRLSRAGNRRINRVLHIMAVVQLRNDTEGRRHYRRKLAEGKTTMEAMRALKRRLSDVAYRQMVADAKRLRTGPGGHVGATLQSSADDPNPKVDTSEKSLPGPVEDQLRAPLLTAS

SEQ ID NO: 14143 - protein, 340 aa, unidentified
  source 1..340: note = protein_8646a2f
  REGION 5..147: note = RuvC_domain
  SITE 8: note = RuvC_P1
  SITE 51: note = RuvC_P2
  SITE 86: note = RuvC_P3
  SITE 88: note = RuvC_P4
  SITE 91: note = RuvC_P5
  REGION 211..297: note = Tnp_domain
  SITE 218: note = Tnp_P1
  SITE 248: note = Tnp_P2
  SITE 256: note = Tnp_P3
  SITE 257: note = Tnp_P4
  SITE 269: note = Tnp_P5
MEQIIGIDLAKRVFQVHVASFSGQTHINKMISRDKLPAFIAQQPPSLIVTEACGSANFWARKCLQYGHEVKQISPQYVSPFRMGNKNDKNDAIAIVEAACRSGMRYVPGKSIRQQDMQCLHRVRQRLMKNRTALINQIRGLALEYGIAMPEGAHKVTSCLPGYLEDAENELTTLSRELFQEMLLELQDSQQRIKTLDVRLKQMNAQNEDTLRLENIPGVGSLGASALTIALGDSKDFNNGRHFASYLGLVPGEHSSGGKTRLQGITKRGDGYLRGLLIHGARSVVYRTVNLPDERCSHLQRWLKGIIARCGVNKAVVALANKNARIAWALVNQKTDYITK

SEQ ID NO: 14144 - protein, 345 aa, unidentified
  source 1..345: note = protein_8ece399
  REGION 6..147: note = RuvC_domain
  SITE 9: note = RuvC_P1
  SITE 52: note = RuvC_P2
  SITE 87: note = RuvC_P3
  SITE 89: note = RuvC_P4
  SITE 92: note = RuvC_P5
  REGION 211..296: note = Tnp_domain
  SITE 219: note = Tnp_P1
  SITE 249: note = Tnp_P2
  SITE 257: note = Tnp_P3
  SITE 258: note = Tnp_P4
  SITE 270: note = Tnp_P5
MEIRTIGIDLGKTVFHLVGVDALGRVVVRKKCSRTQLLRFTSNLRECLIGMEACGGSHFLGRALREQGHDVRLMPAQYVKPFVKTNKNDYIDAEAIAEAVTRSSMRFVPIKSDNQLDLQSLHRVRERWVVRRTAVINQMRGLLLERGITIRKGRRHLEASLPSILEDANIKLSGALRVLLTQLQMEMQYLHRQIEESDKLIVRIAGELEACRRLVAIPGIGPLIATATIAAIGNGAAFKKGRGFAAWLGVVPGEHSTGGKQKLTGTSRRGNKYLRKLFVQGAHTVLLQRTKQAPGLSMWLANLVSRKRKQVATVALANKMARMAWAVLFKGEAYRPPQIPQTVAA

SEQ ID NO: 14145 - protein, 372 aa, unidentified
  source 1..372: note = protein_3c7d404
  REGION 2..139: note = RuvC_domain
  SITE 37: note = RuvC_P2
  SITE 78: note = RuvC_P3
  SITE 80: note = RuvC_P4
  SITE 83: note = RuvC_P5
  REGION 247..334: note = Tnp_domain
  SITE 254: note = Tnp_P1
  SITE 284: note = Tnp_P2
  SITE 292: note = Tnp_P3
  SITE 293: note = Tnp_P4
  SITE 307: note = Tnp_P5
MVGQSIRFSNNLNSFSDFLSQIKKGIPEKSNIQAGMESTGHYWLNLNDFLKNSGIENIQIINPIETQKISKTRIRKVKNDKVDSFEIAKIVCDKKNISVAMQNEKIIKLKRLTRFCDKMKRQEKFLKREIVNLLEVVCPEFEGLFKNIFLKTPLLILEKYSDLRKLEHIKKDSFIELLRKNSHGRIEKTKAELILQTINNSVGKNYWDEFSVMQIEMLLDNFHLIQKQVNQLKKEIEKFSDQFKEKVYVNSVVGVSSFSAAVYLAELGDIERFKSKHQLTAFAGIDASVFESGEYKRKQGNRISKRGSKYLRKQLYYAAKTAIIFDPELKKFYEKKKKEGKHYNVIMIAIARKILIRIYTVLKQKRLYEVRS

SEQ ID NO: 14146 - protein, 410 aa, unidentified
  source 1..410: note = protein_ade5d7d
  REGION 14..166: note = RuvC_domain
  SITE 17: note = RuvC_P1
  SITE 65: note = RuvC_P2
  SITE 103: note = RuvC_P3
  SITE 105: note = RuvC_P4
  SITE 108: note = RuvC_P5
  REGION 274..359: note = Tnp_domain
  SITE 281: note = Tnp_P1
  SITE 312: note = Tnp_P2
  SITE 320: note = Tnp_P3
  SITE 321: note = Tnp_P4
  SITE 332: note = Tnp_P5
MSVTDPATGPRPCGGIDWATTDHAVSVVGADGAQLQRFTVAHTAAGLRTLVRRLGQAGADAVGIQRPDGPVVAALLAAGLTVSVIPPGQLVHLRGRSGSAGNKDDRFDAFVLADVVRTDQARLRPLVPDQPATVTLRMTCRARKDLVGHRVALTNQLRAHLQLAFPGAVGLFGQLDSPISLRFLARFPTQQAADWLTRKRLDAWLRSVGSPGGKPAAQLHAHLASAPRGPAGTAGQARAQVTGALLAAISAITAQLAVLAAHITEQLALHPDRLVFASLPRAGRVRAARLLAEIGDCRGRFPTPESLACLAGVAPSTRQSGKHKVVAFRWSAAKQLRDAVTDFAGDRRRASPWAQAIYQRAIDRGCDHPHATRILARAWLRVSWHCWQHHTPYNPALHGIRPHQRLPLTA

SEQ ID NO: 14147 - protein, 364 aa, unidentified
  source 1..364: note = protein_e6c79d1
  REGION 11..158: note = RuvC_domain
  SITE 14: note = RuvC_P1
  SITE 63: note = RuvC_P2
  SITE 99: note = RuvC_P3
  SITE 101: note = RuvC_P4
  SITE 104: note = RuvC_P5
  REGION 227..313: note = Tnp_domain
  SITE 235: note = Tnp_P1
  SITE 266: note = Tnp_P2
  SITE 274: note = Tnp_P3
  SITE 275: note = Tnp_P4
  SITE 286: note = Tnp_P5
MMSDQHVHVIAGVDTHGQTHHAAMIDSLGRHLADREFPATGSGYRQLLSWLGGHGTVQAVGVEGTGAYGAELSRVLARAGLSVVEVDRPDRKTRRMKGKSDPIDAYAAATAVASGRATGVPKTRDGIVEAVRALRVPRRSAVKARTQAINQARQLVITAPEELRAQLRGLPARELAAVCARFRPSDLASPLGATKAALRILSRRILALSEEIADLDVELKALTAQTAPTLMNRMGVGPDVAGQLLATAGDNPDRLRSEAAFAHLCGVAPIPASSGRRDRHRLNRGGDRAANHALHTIALSRMRWDERTRSYVDRRTAQGLSKKDIMRCLKRHIAREIYHALINDLQARDPATKAPTTADLAKAA

SEQ ID NO: 14148 - protein, 320 aa, unidentified
  source 1..320: note = protein_ab20831
  REGION 7..148: note = RuvC_domain
  SITE 52: note = RuvC_P2
  SITE 92: note = RuvC_P3
  SITE 94: note = RuvC_P4
  SITE 97: note = RuvC_P5
  REGION 187..272: note = Tnp_domain
  SITE 195: note = Tnp_P1
  SITE 224: note = Tnp_P2
  SITE 232: note = Tnp_P3
  SITE 233: note = Tnp_P4
  SITE 245: note = Tnp_P5
MSDRLAFGIDADSKTLVVAHHGTKGSARITNSASAITKWVSALPARSRIGVEATNRYHELVVQAAQKAGHAVFVLNPRDIKHYAKGVACRGKTDSGDAQVIARYIAKEADNLHEHVARSPAQEQLHVLLQQRDSLVRSKAKLNLSLGAGASESAIFGRIFGGLKEAIAMLDQQIQQLCRSGEQRDLYRRIMTIPGIGPTVAAFITHHITRWPLTNANAWIACTGLDPRPNESGGRTGRRRLSKQGAPMLRQMLYMAAMGLKRCRRGQPLYDELSKRGHPSTAVFNILARKLARIAWGVFKSGRDFDPAMLKVGQACFQQA

SEQ ID NO: 14149 - protein, 343 aa, unidentified
  source 1..343: note = protein_3935bcf
  REGION 6..150: note = RuvC_domain
  SITE 9: note = RuvC_P1
  SITE 54: note = RuvC_P2
  SITE 89: note = RuvC_P3
  SITE 91: note = RuvC_P4
  SITE 94: note = RuvC_P5
  REGION 213..300: note = Tnp_domain
  SITE 221: note = Tnp_P1
  SITE 251: note = Tnp_P2
  SITE 259: note = Tnp_P3
  SITE 260: note = Tnp_P4
  SITE 272: note = Tnp_P5
MKLIRVGVDLAKNVFQVHGVDRNEKAVWRRKLSRENWLKVLLETVEPGCEIGMESCGGAHHWARRLQARGFRVRMIAPQFVKPYVKSNKNDANDAEAICEAVGRPHMRFVAVKTVEQQDIQAVHRIRAELTKQRTAKGNQIRGLVTEYGLVAPKELVQLRRALPCWLEDAENGLSARFRRLLNGLWGDLRTLDERITELDREIAVIAQNDPVAKRLQQLRGVGPITATALVAAVGNGEQFANGRQMSAAFGLTPRQHSSGGKERLLGISKRGDAYLRVLLIHGARSVIRTSKDKDDRLSQWVTRLAARSHPNVAAVAMANKTARMVWAMLKNGTDYQPTMITS

SEQ ID NO: 14150 - protein, 342 aa, unidentified
  source 1..342: note = protein_8693524
  REGION 6..148: note = RuvC_domain
  SITE 9: note = RuvC_P1
  SITE 52: note = RuvC_P2
  SITE 87: note = RuvC_P3
  SITE 89: note = RuvC_P4
  SITE 92: note = RuvC_P5
  REGION 210..294: note = Tnp_domain
  SITE 218: note = Tnp_P1
  SITE 248: note = Tnp_P2
  SITE 256: note = Tnp_P3
  SITE 257: note = Tnp_P4
  SITE 269: note = Tnp_P5
MKDMMIGVDLAKNVFQVHGALHTGEIQFRKKLTRTQFPVFMAKQEPSLVILEACGSAHYWAREMEALGHEVKLIAPQYARPFVKRQKNDAADAEAIVIAARQPEMRFVEPKTVEQQSRAAVFRGRERLVHQRTADVNALRALLYEHGHVFPQGIRSLNRITALVEDKTADLLSLIREECLDLLAQIAEKTARINERTAKLESLAAESDRARRLQTMPGVGPLTAIAVEAFGPDMAQFKTGRDFAAWLGLVPKQHSSGGKERLGRMTKAGQADIRRLLIIGAMSRLGWLGRRTITEGSWLSRLLARKPKMLVAIALANKMARQIWAMLTKNEDYKDPALAVAA

SEQ ID NO: 14151 - protein, 343 aa, unidentified
  source 1..343: note = protein_6bf5c9e
  REGION 5..152: note = RuvC_domain
  SITE 8: note = RuvC_P1
  SITE 55: note = RuvC_P2
  SITE 92: note = RuvC_P3
  SITE 94: note = RuvC_P4
  SITE 97: note = RuvC_P5
  REGION 212..300: note = Tnp_domain
  SITE 220: note = Tnp_P1
  SITE 250: note = Tnp_P2
  SITE 258: note = Tnp_P3
  SITE 259: note = Tnp_P4
  SITE 271: note = Tnp_P5
MKHHAGLDVSVKETSVCIVDEGGKVCREMKVPSHPEDLVQALKDPAWRLERVGLEAGPLSQWLFSGLAEAGLPVVCIETRHTKAFLQAQVNKSDRNDARGIAQMMRVNLFRPVHVKTLASQRRRSLLTARKLLQEKAIAVDNDIRGLLRNFGLKVGPVGASKFEARIRELIEDMPELAEIIGPLLDARRKLRELFALLHRKLLAIVRDDAVCRRLMTVPGIGPVVSMAFTATVDVPARFKNSKVVGAALGLTPILNQSGESKRIGRVSLCGDGMTRTLLYEAAQVMLTRTTKWSWLKAWAMKVAARRGMQKAIVALARRLAVVLHRMWVSGTDFRWTRDVQPT

SEQ ID NO: 14152 - protein, 405 aa, unidentified
  source 1..405: note = protein_a21d7f2
  REGION 6..162: note = RuvC_domain
  SITE 9: note = RuvC_P1
  SITE 58: note = RuvC_P2
  SITE 99: note = RuvC_P3
  SITE 101: note = RuvC_P4
  SITE 104: note = RuvC_P5
  REGION 271..357: note = Tnp_domain
  SITE 279: note = Tnp_P1
  SITE 310: note = Tnp_P2
  SITE 318: note = Tnp_P3
  SITE 319: note = Tnp_P4
MGKVFVGHDWAEAHHDVHVEDADGRRLAKARLPEGVEGVARFHELVAPFVDEPTEVVIATETDRGLFIGAMVAAGYTVLAVNPMSTSRYRERHSTSGAKSDPGDARILAELARTDGHNHRPIAGDSDVAEVVKVLARAHQGLVWTRQRQLNQLRSTLREFYPAVLDAFDELGSADALAIVAIAPTPTLGRRLSQSKIAAVLRRAGRQRRVEERAIEIQGALRGAQLEAPTIVADAMGTSARALVAVIVELTTQIRQLETELADRFEQHPDAKIIRSLPGLGMILGARVLGEFGDDPNRYADAKSRKNYAGTSPITKASGTRRVVLARYARNRRLADACYLWAFAALTASPGARAFYDQHRAAGDSHHRALRVLANRLVGILHGCLRHHTPYDEHTAWGHRQQAAA

SEQ ID NO: 14153 - protein, 338 aa, unidentified
  source 1..338: note = protein_aac1340
  REGION 6..148: note = RuvC_domain
  SITE 9: note = RuvC_P1
  SITE 52: note = RuvC_P2
  SITE 87: note = RuvC_P3
  SITE 89: note = RuvC_P4
  SITE 92: note = RuvC_P5
  REGION 211..299: note = Tnp_domain
  SITE 219: note = Tnp_P1
  SITE 249: note = Tnp_P2
  SITE 257: note = Tnp_P3
  SITE 258: note = Tnp_P4
  SITE 270: note = Tnp_P5
MNITRIGIDLAKQVFQLHGVDHHGKVLVRKQLRRAQMLAYFGKLTPCLVGMEACGSAHYWARELGRLGHDVRLMAPQFVKPYVKRGKNDANDAEAICEAVSRPNMRFVTVKTVEQQVMQAEHRIRARLIKTRTALSNEIRGLLAEFGIVVPTSLGQLRRALPELLEDGENGLLGHFRMLLAELAEELRSLDDRLKVYDVRLAQHARADDRVKRLLAVEGIGPVSASALVAAVGDGKQFGKGRDLAAWLGLTPREHSSGGKQRLGGISKQGDKHVRTLLIHGARAAMNAAVNKDDPRSRWVASLAARRNKNIATVALANKNARIAWAILSRGEDYRVSV

SEQ ID NO: 14154 - protein, 341 aa, unidentified
  source 1..341: note = protein_81bbc95
  REGION 6..148: note = RuvC_domain
  SITE 9: note = RuvC_P1
  SITE 52: note = RuvC_P2
  SITE 87: note = RuvC_P3
  SITE 89: note = RuvC_P4
  SITE 92: note = RuvC_P5
  REGION 212..296: note = Tnp_domain
  SITE 219: note = Tnp_P1
  SITE 249: note = Tnp_P2
  SITE 257: note = Tnp_P3
  SITE 258: note = Tnp_P4
  SITE 270: note = Tnp_P5
MKIITIGIDLAKNVFQVHGVDSRGKPVLRKPLKRAQFTLFFSNLEPCLIGMEACGSAHHWARKLQTFGHTVKLMAPQFVKPYVKTNKSDSADAEAICEAVTRPNMRFVAIKTLEQQAVLSLHRARQGFVKARTAQANQIRGLLAEYGLVIPKGISHVSKQVPLILEDAENELPGMFRQLIDGLLEHFRELHRQVTELEMQIKAWHQDNEASCKLAAIPGIGPMTASALVASIGDAKTFKNGRQLAAWLGLVPRQHSTGGKPTLLGISKRGDVYLRTLLIHGARSAILAAQRRSENTGWLAQLLERRHPNVVAAALANKNARVVWALLAHDQEYQPAYARTA

SEQ ID NO: 14155 - protein, 345 aa, unidentified
  source 1..345: note = protein_137dcfd
  REGION 6..147: note = RuvC_domain
  SITE 9: note = RuvC_P1
  SITE 52: note = RuvC_P2
  SITE 87: note = RuvC_P3
  SITE 89: note = RuvC_P4
  SITE 92: note = RuvC_P5
  REGION 211..296: note = Tnp_domain
  SITE 219: note = Tnp_P1
  SITE 249: note = Tnp_P2
  SITE 257: note = Tnp_P3
  SITE 258: note = Tnp_P4
  SITE 270: note = Tnp_P5
MEIHTIGIDLAKTIFHLVGVNARGEVVVRKKCSRNQLLRFTSNLRVSLIGMEACGGSHFLGRALREQGHDVRLMPAQYVKPYVKTNKNDYIDAEAIAEAVTRPSMRFVPIKTDDQLDLQSLHRVRERWVGRRTAVINQIRGMLLERGITVTKGRRHIEESLPGILEDGDNKLSGALRVLLTELRLEMQYLGRQIEESDQLILRIASELEPCRRLVAIPGIGPVIATATIAAIGNGAAFKKGRGFAAWLGVVPGEHSTGGKQTLTKTSRRGNRYLRKLFVQGAHAVLQQRRTQSTGLSTWLAQLTTRKRIQVAAVALANKLARMVWAVLYKGEAYRPPLLPQPVVA

SEQ ID NO: 14156 - protein, 413 aa, unidentified
  source 1..413: note = protein_956e3ad
  REGION 14..166: note = RuvC_domain
  SITE 17: note = RuvC_P1
  SITE 65: note = RuvC_P2
  SITE 103: note = RuvC_P3
  SITE 105: note = RuvC_P4
  SITE 108: note = RuvC_P5
  REGION 273..359: note = Tnp_domain
  SITE 281: note = Tnp_P1
  SITE 312: note = Tnp_P2
  SITE 320: note = Tnp_P3
  SITE 321: note = Tnp_P4
  SITE 332: note = Tnp_P5
MSIAPDPLHVRVTAGLDWAKDDHAVCVVGDQGEVLDRFTVRHDAAGLKQMARRILRAGVEQVGIERGDGPVVDTLLAAGLVVFVIPPGQLKNLRSRYGSAGNKDDRFDAYVLADVVRTDARRLRPMLTDSAATTALRSSVRARRDLVGHRVAAANQLRAHLQIVFPAAATLFADIDSAITLSFLDRFATQDAADWLSPTRLATWLKSVSYSGGVDPTMLHARILAAPRGATGAHATTHAGTTAALVALLRVLNTQIHALATSIGEQLTTHPDAAIFTSLPRSGTIRAARLLAEIGDARGRFPTRESLTCLAGVAPSTRQSGKVKTVTFRWGADKQLRDALCDFAGDSRRANPWAADLYAKAIARGCDHPHAVRILARAWAHIIWRCWQDNLPYNPALHGALQTLLNQDQPAAA

SEQ ID NO: 14157 - protein, 339 aa, unidentified
  source 1..339: note = protein_da72ed3
  REGION 6..148: note = RuvC_domain
  SITE 9: note = RuvC_P1
  SITE 52: note = RuvC_P2
  SITE 87: note = RuvC_P3
  SITE 89: note = RuvC_P4
  SITE 92: note = RuvC_P5
  REGION 211..298: note = Tnp_domain
  SITE 219: note = Tnp_P1
  SITE 249: note = Tnp_P2
  SITE 257: note = Tnp_P3
  SITE 258: note = Tnp_P4
  SITE 270: note = Tnp_P5
MKAIVIGVDIAKRVFQLHWVETETGEIVALQLKREKFLEHFANRSTCVIGMEACGGSQHWARSLQKLGHEVKLMSGRMVKPFVVGNKNDAADAHGIWMAVQQPGIKAVAVKSEEQQAVLALHRMREQLVKFRTSQINGLRGLLTEYGEVMPLGRAGIKRDIAGALGRLSDRLPAIVIETLREQYARLSALDEQIRQIERRLRQWQNQDSATQRIAAIPGVGLLSATAAVATMGDPKAFKSGREFAAWLGLVPRQTGTGGRVRLLGISKRGDKYLRTLLIHGARAVLTHSKSPPEWLSELVKRRPKNVAVVAMANKMARTIWALMAYERAYQSGYVSRPA

SEQ ID NO: 14158 - protein, 339 aa, unidentified
  source 1..339: note = protein_fc9afb3
  REGION 7..147: note = RuvC_domain
  SITE 10: note = RuvC_P1
  SITE 53: note = RuvC_P2
  SITE 88: note = RuvC_P3
  SITE 90: note = RuvC_P4
  SITE 93: note = RuvC_P5
  REGION 210..296: note = Tnp_domain
  SITE 218: note = Tnp_P1
  SITE 248: note = Tnp_P2
  SITE 256: note = Tnp_P3
  SITE 257: note = Tnp_P4
  SITE 269: note = Tnp_P5
MEKLIRIGMDTSKQFFQLHGVDAAEQPVLRKQLRRREVLPFFQRVEPTLIVLEACGGSHYWARELAGLGHDVKLIAPQRVKPYVPRGKNDAADAAGLCEAASRPTMRYVPVKTAEQQAALMLAGVRDRLVRNRARLANTIRGYAAEFGLVAAKGMARIEGLLSSAQTDETLPDLARELFAGLGREYERLDTELVAIEAKLLAWHRASDLSRRLAAIPTVGPVIASLLVMKTPDPHAFSSGRQFAAWLGLTPKDHSTAGKQKLGAITRAGDETLRSLLVVGATAVIWQTRRGKGRNPSPWLVKLLDRKPPKLAAVALANKTARIAWKLMATGETYKQATA

SEQ ID NO: 14159 - protein, 399 aa, unidentified
  source 1..399: note = protein_a900b49
  REGION 8..164: note = RuvC_domain
  SITE 11: note = RuvC_P1
  SITE 62: note = RuvC_P2
  SITE 102: note = RuvC_P3
  SITE 104: note = RuvC_P4
  SITE 107: note = RuvC_P5
  REGION 270..357: note = Tnp_domain
  SITE 278: note = Tnp_P1
  SITE 309: note = Tnp_P2
  SITE 317: note = Tnp_P3
  SITE 318: note = Tnp_P4
  SITE 330: note = Tnp_P5
MAGPSLWAGIDAGKLDHHCVLIDASGERLLSRRVRNDEAPLTALIDDVIALADGGLVQWAIDLNGGGAALVISLLLARDQHLLYIPGRIVHHASAAYRGDGKTDAKDAAIIADQARMRRDLLEFRHRDEFTVELRTLCARRTDVAADRNRAINRLRAQLLEYFPALERAFDYSHRRGALILLTGYQTPEALRRTGRTRLEKWLRGRNAYNPVAIADRAIAAANAQHVVVTGQRLGSTIVTRIAQQILDIDAELSDLDDMIEERFTQHQQAAVIRSMPGFGPLLGAELIAATNGGLDSFHSADRLAAVAGLAPVPRDSGRISGNLKRPRRYDRRLLRVFYLAANNSIKTCPQSRAHYDRKRAEGKHHRQAILSLARRRVNVLWAMQRDNTAYRSTAKTAA

SEQ ID NO: 14160 - protein, 349 aa, unidentified
  source 1..349: note = protein_203c99b
  REGION 4..158: note = RuvC_domain
  SITE 7: note = RuvC_P1
  SITE 57: note = RuvC_P2
  SITE 97: note = RuvC_P3
  SITE 99: note = RuvC_P4
  SITE 102: note = RuvC_P5
  REGION 221..306: note = Tnp_domain
  SITE 229: note = Tnp_P1
  SITE 259: note = Tnp_P2
  SITE 267: note = Tnp_P3
  SITE 268: note = Tnp_P4
  SITE 279: note = Tnp_P5
MIVVGIDPHKQTHTAVAVDAASGRSLGELTVKARTAGFERLVEWAREFDQERTFAVEDGRHVSGHLERHLIARGERSVRVPPRMMGEARRIDRVWGKSDPVDATAVARAALAHPDLPEATLAGPEREIGLLVAHRESLVRERADKICKLRWLLHDIDPDLAPVPRSLNRFVTLRRLAQVLQAMDASVEVEICLDLIARCAEITTRANELERRITLLMRTHASALLQIPGCGALTAAKIVAETAQIDRFPTEGHFARYAGTAPIPASSGARHRQRFNPRGNRQLNTAVHRIAVTQIRMHPSARDYVAKKRAEGKTKTEAIRALKRHITRVVFKTLISMEQPTDRLTAAAA

SEQ ID NO: 14161 - protein, 341 aa, unidentified
  source 1..341: note = protein_473209b
  REGION 6..148: note = RuvC_domain
  SITE 9: note = RuvC_P1
  SITE 52: note = RuvC_P2
  SITE 87: note = RuvC_P3
  SITE 89: note = RuvC_P4
  SITE 92: note = RuvC_P5
  REGION 211..297: note = Tnp_domain
  SITE 219: note = Tnp_P1
  SITE 249: note = Tnp_P2
  SITE 257: note = Tnp_P3
  SITE 258: note = Tnp_P4
  SITE 270: note = Tnp_P5
MKLTTIGIDLAKNVFQVHGTDDKGRAVLRKQLKRAQMLPFFANLPPCRIGLEACGSTHYWAKKLQALGHTVQLIAPQYVKPFVRRNKNDAADAAAICEAVTRPDMPTVPIKSAEQQAILSAHRARQGFVKARTAQANQIRGLLAEYGIVLPQGIGHIAQRVPAIIEDGQNDLPGSFRLLIQRLLDHMKELGRQIGELAAEIQLWHRQNAASQKLAAIPGLGPLTATAIVASIGDARNFKNGRQLAAWLGIVPRQHSTGGKPTLLGISKRGDAYLRTLLIHGARAVIRTAERKPDAGPWLTQLLARRNKNVAAVALASKNARTIWALLAHDREYEPDYGMTA

SEQ ID NO: 14162 - protein, 344 aa, unidentified
  source 1..344: note = protein_14d2615
  REGION 5..158: note = RuvC_domain
  SITE 8: note = RuvC_P1
  SITE 57: note = RuvC_P2
  SITE 97: note = RuvC_P3
  SITE 99: note = RuvC_P4
  SITE 102: note = RuvC_P5
  REGION 220..305: note = Tnp_domain
  SITE 228: note = Tnp_P1
  SITE 258: note = Tnp_P2
  SITE 266: note = Tnp_P3
  SITE 267: note = Tnp_P4
  SITE 278: note = Tnp_P5
MEVAIGVDPHKGSLAVAAVDPLGKVIDAREFSNDPPGHGALLGWVRERSPDRVIGIECSLSYGASLSRLLLGAGEDVREVPTTLTHRERRRRRSHGKSDLVDSVAIARIVASGEVLPSAHRVEVLSDLRALVDYRDQLVRARTQVANRAHADLLNIRPGYGRAVPNLRAKVHRAKARSLLRGDRSVRAELLRRRLGELSRLDGEIAAMDRRIEATVRETGTSLTDIPGVGPFVAAKILGEVGNPSRVRSKAAFAVLSGTAPLAASSGQTHRHRLNRGGNRQLNWALHYIALVQCRISSEAQAYMARQREAGKSHKEAMRCFKRQLSNVVYRHLLADARGAELAA

SEQ ID NO: 14163 - protein, 341 aa, unidentified
  source 1..341: note = protein_c17253d
  REGION 6..146: note = RuvC_domain
  SITE 9: note = RuvC_P1
  SITE 52: note = RuvC_P2
  SITE 87: note = RuvC_P3
  SITE 89: note = RuvC_P4
  SITE 92: note = RuvC_P5
  REGION 211..296: note = Tnp_domain
  SITE 219: note = Tnp_P1
  SITE 249: note = Tnp_P2
  SITE 257: note = Tnp_P3
  SITE 258: note = Tnp_P4
  SITE 270: note = Tnp_P5
MEIDVLGIDLAKQIFQLHGADRRGHVVHRAKVSRSSFFESVRALNPKVVVMEACGTAHHWARRFQSLGIEVRLISPQYVAPFVKTNKNDRNDAEAIVEAASRPTMRFVTIKSVEQQDIQAAHRMRAVMLRHRTALINQMRGLLGERGLAISRSPEAFKRAMPEILHTSADELTSFCQTLLTELLQHLSAIEERVRLIEASIQSFMKKSTLCKKIAEIPGIGPITATAVVAAVGDARQFRNGRHLSAWLGLVPRQYSSGGKPRLHGISRRGDTYLRTLLIHGARAVLRYAPTKTDPQSVWLQHLMARRGHNCAAVALANKNARIIQALLSSDATYITRTATA

SEQ ID NO: 14164 - protein, 329 aa, unidentified
  source 1..329: note = protein_3370394
  REGION 1..131: note = RuvC_domain
  SITE 29: note = RuvC_P2
  SITE 70: note = RuvC_P3
  SITE 72: note = RuvC_P4
  SITE 75: note = RuvC_P5
  REGION 194..277: note = Tnp_domain
  SITE 201: note = Tnp_P1
  SITE 231: note = Tnp_P2
  SITE 239: note = Tnp_P3
  SITE 240: note = Tnp_P4
  SITE 251: note = Tnp_P5
MGRYGTDKPGYAQMLAAGRRFADRIWAVEGCNGIGRHIAHRLVHDGEVVVDVPAKLSAQVRVFATGNGRKSDPVDAHSVAMVALRTPNLVQVRVDADLQVMGMLVDRRDELGRARTQTINRLHRLLLELLPGGAKKFLTAPQARALIAAVKPRDVVGKTRRRLAVELIGELDGIDKKIKAAEKDLKELVTARGCTLMDLHGIGPSGAARLLADVGDIRRFADRDRFACWNGTAPLDASFGQQQRHRLSRAGNRRINRTVHIMAVVQLRTAPKDGPTSTPRRPPGRPRWKPCARSNAGCPTWSTPAWSPTRNDARRQAREGTRGRLCNPA

SEQ ID NO: 14165 - protein, 284 aa, unidentified
  source 1..284: note = protein_bd66b27
  REGION 6..147: note = RuvC_domain
  SITE 9: note = RuvC_P1
  SITE 52: note = RuvC_P2
  SITE 87: note = RuvC_P3
  SITE 89: note = RuvC_P4
  SITE 92: note = RuvC_P5
  REGION 210..268: note = Tnp_domain
  SITE 218: note = Tnp_P1
  SITE 248: note = Tnp_P2
  SITE 256: note = Tnp_P3
  SITE 257: note = Tnp_P4
MKYTPVGVGIAKHLIQVHFINEYTGEVVDKQVRRQDFMTFFSNREPCLIGMEACGGSQYWARELTKLGHKVRLMQGRLVKAFVMGNKNDVMDAHAIWMAVQQPGKEIAVKTEEQQSVLVVHRSRRQLVKFRTAQINALHGTLLEFGETIHKGRAAMDRELPAALERLKTKLPPYLINVLEDQYHRLSELDTQIDGLEKQLISVVRHNETCKRLIEIPGVGPLIATAAVVTMGEASAFKSGREFAAYVGLVPKQTGSGGKVRLPEASVAIPICEPCLSMVREQLH

SEQ ID NO: 14166 - protein, 402 aa, unidentified
  source 1..402: note = protein_cf9fbf7
  REGION 1..156: note = RuvC_domain
  SITE 4: note = RuvC_P1
  SITE 53: note = RuvC_P2
  SITE 93: note = RuvC_P3
  SITE 95: note = RuvC_P4
  SITE 98: note = RuvC_P5
  REGION 264..350: note = Tnp_domain
  SITE 272: note = Tnp_P1
  SITE 303: note = Tnp_P2
  SITE 311: note = Tnp_P3
  SITE 312: note = Tnp_P4
MGIDWAGAEHAVCVLDHTGKKIAAFTIDHTAAGFGRLAARLGSLGPAEQIPVAIERPDGRLVDALLEAGHPVLPVKPNAIKTWREAEVLSGAKSDPGDAHVIADYLRVRIHRLRPAAPLSSHTKALRTVVRTRSDLVEARIAATNQLAALLDAHWPGAKAIFANIESAIALAFLTRYPTAVSAASLTEKQLAAFCAKQGYSGRKPAAVLLARLRSAPAGTLDPVVSTGVQDAVLAQVGMLTALNTAIKALDRSIAEKMDTHPDGKVFRSFPRAGTINAAQILAEWGDSRAAFDHPDAIAALAGITPVTKVSGKQRGVSFRWACNKRLRLAITTFADNSRHSSPWAADIYNRARASGKDHPHATRILARAWIRVLWRCWQNHTPYDPALHGGAQHRMKQPTAA

SEQ ID NO: 14167 - protein, 317 aa, unidentified
  source 1..317: note = protein_98e9e1e
  REGION 8..154: note = RuvC_domain
  SITE 11: note = RuvC_P1
  SITE 53: note = RuvC_P2
  SITE 93: note = RuvC_P3
  SITE 95: note = RuvC_P4
  SITE 98: note = RuvC_P5
  REGION 189..273: note = Tnp_domain
  SITE 197: note = Tnp_P1
  SITE 226: note = Tnp_P2
  SITE 234: note = Tnp_P3
  SITE 235: note = Tnp_P4
  SITE 247: note = Tnp_P5
MQAIRRIVGVDVAKEELVVAVHTEAGSGKVANSAQAISTWLGNLERGSVVAMEATGKYHRLLAELAHAAGMRVFVLNARDVHFYAKALGARGKTDRLDAMVIARYVAEHQDELVAWQPAQGVEQQVQDLLNRRWMLTRQVVTLKLSLRDMPTLQVASERLQEQFGRTFEEIDRQLEELVSSQDELAKGVARLRTITGFGAQASIRCAALLSKHAFRNADAAVAYSGLDPRPSDSGKKKGLRRLSKRGSGDLRRQLYQAAFAASHSKVFAPTYKALRAKGFATTEALVILARKLLRVAFAVWKSGEAFDPNKFALKTT

SEQ ID NO: 14168 - protein, 342 aa, unidentified
  source 1..342: note = protein_d2a72b5
  REGION 7..149: note = RuvC_domain
  SITE 10: note = RuvC_P1
  SITE 53: note = RuvC_P2
  SITE 88: note = RuvC_P3
  SITE 90: note = RuvC_P4
  SITE 93: note = RuvC_P5
  REGION 211..296: note = Tnp_domain
  SITE 219: note = Tnp_P1
  SITE 249: note = Tnp_P2
  SITE 257: note = Tnp_P3
  SITE 258: note = Tnp_P4
  SITE 270: note = Tnp_P5
MSEIITVGLDLAKNVFQAHGADASGHAVLHKTLRRDQVLAFFEQSQPCLVAMEACGGAHFWGREIGKLGHEVQLIPPAYVKPFVKRQKNDTADAEAICEAAQRPSMRFVPVKSEETQGAAMVFRIRELLIRQRTQAINALRGHLGEFGQIVPQGAANATRLIAIVKDPDSSLPADAISTLKALVGGLTHLETEIGKLDAEIARRARENEVARRLMTVPGIGPLIATAIAVLAPPPETFRKARDFAAWLGLTPRQHSTGGKPRLGATTKMGERSLRRLLIIGANSVIIKRHVHAAAQPGTWLGEMLKRKPPMLVRVALANKMARIVWALMARGGAYKSPAATA

SEQ ID NO: 14169 - protein, 421 aa, unidentified
  source 1..421: note = protein_4be331a
  REGION 27..183: note = RuvC_domain
  SITE 30: note = RuvC_P1
  SITE 79: note = RuvC_P2
  SITE 120: note = RuvC_P3
  SITE 122: note = RuvC_P4
  SITE 125: note = RuvC_P5
  REGION 289..375: note = Tnp_domain
  SITE 297: note = Tnp_P1
  SITE 327: note = Tnp_P2
  SITE 335: note = Tnp_P3
  SITE 336: note = Tnp_P4
  SITE 348: note = Tnp_P5
MLAGLSVGNMVDDKRIGGSMEADQLWAGADVGKEHHWVCVVDDKGTAVLSRKLTNDEQPIRELIDEIDALGCDVSWTVDLTTVYASLLLTVLADAGKSVRYLTGRAVWQASVTYRGGEAKTDAKDARVIADQSRMRGADLPVLHPDDDLITELRMLTAHRADLVADRTRTINRLRHQLIAVCPALERVAQLTQDRGWVVLLTRYQRPKAIRHSGVSRLTKMLGDAGVRNAATIAAAAVTAAKSQTVRLPGEDVAAGLVADLAGEVVALDDRIKSTDADIEDRFRRHPAAEVITSLPGMGFRLGAEFLAAVGDPTLIGSADQLAAWAGLAPVSRDSGKRTGRLHTPKRYSRRLRRVMYMSALTAIRCDPHSKAYYQRKRDEGKRPIPTTLCLARRRTNVLYALIRDNRTWQPESPPITKSAA

SEQ ID NO: 14170 - protein, 342 aa, unidentified
  source 1..342: note = protein_60ce20f
  REGION 7..148: note = RuvC_domain
  SITE 10: note = RuvC_P1
  SITE 53: note = RuvC_P2
  SITE 88: note = RuvC_P3
  SITE 90: note = RuvC_P4
  SITE 93: note = RuvC_P5
  REGION 211..296: note = Tnp_domain
  SITE 219: note = Tnp_P1
  SITE 249: note = Tnp_P2
  SITE 257: note = Tnp_P3
  SITE 258: note = Tnp_P4
  SITE 270: note = Tnp_P5
MEEVTMIGIDLAKNVFQLHGATAEGQPVFRRKLTRPQFQRFMAAHPACTVAMEACPGAHYWAREMERLGHTVKMISPHYVTPYVKRQKNDAADAEAIAEAATRPHMRFVEPKSADQQSRAVVFRVRQMAIAQRTELVNALRSHLYEFGYIAPVGVRHLPKLIAMVEDERSNLPGPARPACRAILRQIESLDHEIRALDAQIAELSKESHCAELVQTMSGVGPITAMAIEAFAPPMESFKRGRDFAAWLGLVPRQNSSGGKARLGKVSKAGQHDIRRLLIVGAMSAIVGASRRGISENTWLGQLMLRKPRMLAAIALANKMARRIWAMITKGESYRDPALAMT

SEQ ID NO: 14171 - protein, 399 aa, unidentified
  source 1..399: note = protein_911b69d
  REGION 5..164: note = RuvC_domain
  SITE 8: note = RuvC_P1
  SITE 62: note = RuvC_P2
  SITE 102: note = RuvC_P3
  SITE 104: note = RuvC_P4
  SITE 107: note = RuvC_P5
  REGION 274..363: note = Tnp_domain
  SITE 282: note = Tnp_P1
  SITE 312: note = Tnp_P2
  SITE 320: note = Tnp_P3
  SITE 321: note = Tnp_P4
  SITE 334: note = Tnp_P5
MDPVIGLDVAKGKSQVQAFLQKKDPYKKSFVFEHNVLGLHDFHRLWLEMEEITGRPPVVVFESTGHYHEPVLQFLEEHQIVYYLVNPVLSHEAKKMSLRKVKTDAIDAFRLGELYYLYDDLQPFKKKAVKIMNLRNLTRQHDALTGTYVQIKLQFQTVLDQVFPEYKTVFGSLYSPTSLQTLLHYQTPQGVREDTKEKIAEVILQQGVKRSYGWALDKAHQLKEAAGRDPFKRNLYSSHVVSLTMFIQLLLQYQRHLSKLLKEIDALAEEFDEYKIIRSIPGIGGKIAATILSEIGDIDQFNHPKKLVAYAGIDPSVHESGQFKATINRITKRGSSSLRKSLYNAVQCGITKNRNPKLRAYYDKKREEGKPHKVAIIACANKLIHWIYAILKSKKAFVI

SEQ ID NO: 14172 - protein, 394 aa, unidentified
  source 1..394: note = protein_59610c1
  REGION 5..159: note = RuvC_domain
  SITE 8: note = RuvC_P1
  SITE 57: note = RuvC_P2
  SITE 97: note = RuvC_P3
  SITE 99: note = RuvC_P4
  SITE 102: note = RuvC_P5
  REGION 265..352: note = Tnp_domain
  SITE 273: note = Tnp_P1
  SITE 304: note = Tnp_P2
  SITE 312: note = Tnp_P3
  SITE 313: note = Tnp_P4
  SITE 325: note = Tnp_P5
MSFFIGVDVSKEKFDACGIDEQGGKVFSLVCSMDRGGFEKLVLKLPMDKSSFLLGMESTASYHLPLFSYLTAQGYQVVIINPLLINHFAKRSLRKTKTDKKDAFTIAQFLLREKEAFAPQTTDHRATELKDLARRREKLVDHVTSLKGDMKRILSVIFPELEHITGVFTKATLRLLTEYPSAHAIREAGHNAIAEIFINQSRGNRPRASVKTLIDAAASSVGVVSSAKELALKQEASLLMHIQEQIKETAGLLMNLLNKRMKHDMELLCSIKGIAENTAMNFLVEMGGAVEIYENDKKLIAASGLDPSTYESGKYAGKSRISKRGNRHLRRVIWLMATRVIINNALFKAYFKKRRQDGLPYKKAVLATAHKLIRIIFVMPSRKTCFVEGGIKYS

SEQ ID NO: 14173 - protein, 350 aa, unidentified
  source 1..350: note = protein_009dd87
  REGION 6..147: note = RuvC_domain
  SITE 9: note = RuvC_P1
  SITE 52: note = RuvC_P2
  SITE 87: note = RuvC_P3
  SITE 89: note = RuvC_P4
  SITE 92: note = RuvC_P5
  REGION 211..297: note = Tnp_domain
  SITE 219: note = Tnp_P1
  SITE 249: note = Tnp_P2
  SITE 257: note = Tnp_P3
  SITE 258: note = Tnp_P4
  SITE 270: note = Tnp_P5
MELHAIGIDLGKTVFHLVGLSQTGEITVRKKFSRTQLLRFTANVQVHLIGMEACPGSHFLGKALREQGHQVRLMPAQYVKPFVKTNKNDYIDAEAIAEAVSRPTMRFVPIKTDDQLDMQSLHRVRERWIMRRTAVVNQIRGLLLERGITVRTGRCHLDAALPNILEDGSTSLSGALRFLLIELRQELEQLAGHIEQAETLIQRAAQQSEACQRLDAIPGIGPLTATALIAAIGNGEAFRKGREFSAWLGLVPREHSTGGKQKLLGISKRGNCYLRKLFIQGARAVLQFRDKQCSGLRYWLAELSSRSHYNVVGVALANKLARMAWAVLARGEAYRPPLLADMNGLQMAPG

SEQ ID NO: 14174 - protein, 336 aa, unidentified
  source 1..336: note = protein_316af09
  REGION 6..147: note = RuvC_domain
  SITE 9: note = RuvC_P1
  SITE 52: note = RuvC_P2
  SITE 87: note = RuvC_P3
  SITE 89: note = RuvC_P4
  SITE 92: note = RuvC_P5
  REGION 211..297: note = Tnp_domain
  SITE 219: note = Tnp_P1
  SITE 249: note = Tnp_P2
  SITE 257: note = Tnp_P3
  SITE 258: note = Tnp_P4
  SITE 270: note = Tnp_P5
MEPTIIAIDLATRVFQIHFVDSDTGAIHNKALKRAQLLPFFANRPVSRVVMEACGSAHHWARQLARLGHDVRLIAAQFVRPFVKSNKNDAADAAAIWEAAQRQGMRFVAVKTEDQQAMLALHRMRQQLVRFRVMQVNQMRGLLYEFGVILPQGRRASIEAAKAALATLADQLPAMLTESLQDQLSRMLVLDEQIGRIEQRIIEWRRSDEACLRISEIPGVGLLTATAAVSVIGQAKNFRSGREFAAYLGLVPRQNSSGGKIRLGGISKRGDVYLRTLLIHGARAVISSSKHLPERLRLLLTRRPTNVVAVALANKMARTIWALLAYGRTYQATPAQ

SEQ ID NO: 14175 - protein, 328 aa, unidentified
  source 1..328: note = protein_6f965de
  REGION 4..156: note = RuvC_domain
  SITE 7: note = RuvC_P1
  SITE 60: note = RuvC_P2
  SITE 100: note = RuvC_P3
  SITE 102: note = RuvC_P4
  SITE 105: note = RuvC_P5
  REGION 200..286: note = Tnp_domain
  SITE 208: note = Tnp_P1
  SITE 237: note = Tnp_P2
  SITE 245: note = Tnp_P3
  SITE 246: note = Tnp_P4
  SITE 259: note = Tnp_P5
MFFIGIDVSKAKLDCSLLLDVATAKRRAKSVTNSKAGVDDLLAWCVKQQATPDTLHAILEGTGVYHEQATLALSDAGVTVSIVNPAQVKDFGRSLGVRTKTDGVDSLVLARYGALLNPRPWTPPTPEARTLQALLSRREAIAQDLQRERNRLEKAQATDTPVLIHQSLLDSITFLETQLAKLQIDIDDHIDQHPELKADRTLLISIPGVGPQVSNHLLAVMHNHHFQSAEQLAAYLGLVPVERQSGSSIQGRPRLSKAGPARIRAILYMATVVGVQYNPHLKALYLRLQARGKTKMSALGGAMRKLVHLCFGVLKTREPYRGDYAFQS

SEQ ID NO: 14176 - protein, 412 aa, unidentified
  source 1..412: note = protein_849c361
  REGION 5..164: note = RuvC_domain
  SITE 8: note = RuvC_P1
  SITE 63: note = RuvC_P2
  SITE 103: note = RuvC_P3
  SITE 105: note = RuvC_P4
  SITE 108: note = RuvC_P5
  REGION 274..374: note = Tnp_domain
  SITE 282: note = Tnp_P1
  SITE 312: note = Tnp_P2
  SITE 320: note = Tnp_P3
  SITE 321: note = Tnp_P4
  SITE 334: note = Tnp_P5
MNLVIGLDVAKGVSQVQAFLDKGKPYRKSFSVLHNVEELNNVFLVFLKEIETLTGKKPSVVLESTGHYHSPVIQFLEEHQYVYIIVNPLISYRAKSSSLRKVKTDAIDAYHLCELYYKEELEPYKKRGVQLLNLRNLTRLQESISGVSAQTKIQFHSLLDQIFPEYVGVFGDLYSKVSLQTLLKFPTSESVLSISESILEDEIASLCKSRSFDWAKERAQKLKDAASRNPFQNNLFQSHIFNLEILVTIILQYQEHLSKLEAEIDALAKEIDEYKILQSIPGIGEKIAATIISEIGEIDRFNHPRKLVAFAGVDPSVYSSGKFTASVNRITKRGSSSLRHALYMAVRCGIRDARKKKTTEEVIPRNKRLREFYDKKRNEGKPFRVAIIAYVNKLLHWIYAVLKSKTNFQDPA

SEQ ID NO: 14177 - protein, 304 aa, unidentified
  source 1..304: note = protein_6d22c30
  REGION 4..150: note = RuvC_domain
  SITE 7: note = RuvC_P1
  SITE 50: note = RuvC_P2
  SITE 90: note = RuvC_P3
  SITE 92: note = RuvC_P4
  SITE 95: note = RuvC_P5
  REGION 183..266: note = Tnp_domain
  SITE 190: note = Tnp_P1
  SITE 219: note = Tnp_P2
  SITE 227: note = Tnp_P3
  SITE 228: note = Tnp_P4
  SITE 239: note = Tnp_P5
MFGIGIDVSKDRLDVAVHEQQFRHFSNSKRGFEALVRWLQKWPAKQVVLEASGGYEQAALDALHEAGLPMVRINPGRARSFAKATGQLAKTDRIDAMVLAQMAHLLKHTRYTPVAPWQRKLAEFSLRRRHLVQMRSSEKQRMRAFSEPVLQVMMNSQLEYLDEQIRVLDKAIAEQLRNQPSWNSLVEMKGVSTVVMTTLACELPELGKLSGKAISALVGVAPMNRESGSWQGHRRITGGRAVVRQALYMAALSACRYEPQLRDFFKSLKAKGKPGKVALVAVMRKMLVILNARKRDAEAMMASA

SEQ ID NO: 14178 - protein, 343 aa, unidentified
  source 1..343: note = protein_455f098
  REGION 7..148: note = RuvC_domain
  SITE 10: note = RuvC_P1
  SITE 53: note = RuvC_P2
  SITE 88: note = RuvC_P3
  SITE 90: note = RuvC_P4
  SITE 93: note = RuvC_P5
  REGION 212..304: note = Tnp_domain
  SITE 220: note = Tnp_P1
  SITE 250: note = Tnp_P2
  SITE 258: note = Tnp_P3
  SITE 259: note = Tnp_P4
  SITE 271: note = Tnp_P5
MKEVSIIGVDLSKNSFQMHGAYSDGSVAFRRKLSRGRVLAFLLSQPRCTVAMEACGGAHYWGREIGKLGHEVRVIPPIYVKPYVKRQKNDAADAEAICEAAQRPTMRFVAVKSEESQAGAMQLGVRMLLVRQRTQTINALRGHLAEFGLVAPKGPAHVARLAWALEGEEGASLPALTRAMGALLLERIAELDGKVRELDRVLRAAAREDEEAVRAMTVPGVGPVTALALQALAPPLETFRKGRDFAAWLGLTPRQHSTAGKPRLGKISKMGQKDLRRLLVVGAMSVIQNAIRRGKCDDPWLARLLASKPGKRKLVAVALANRMARILWALAVKKETYRAPAAA

SEQ ID NO: 14179 - protein, 311 aa, unidentified
  source 1..311: note = protein_3b6cba5
  REGION 6..151: note = RuvC_domain
  SITE 9: note = RuvC_P1
  SITE 53: note = RuvC_P2
  SITE 93: note = RuvC_P3
  SITE 95: note = RuvC_P4
  SITE 98: note = RuvC_P5
  REGION 189..273: note = Tnp_domain
  SITE 197: note = Tnp_P1
  SITE 226: note = Tnp_P2
  SITE 234: note = Tnp_P3
  SITE 235: note = Tnp_P4
  SITE 246: note = Tnp_P5
MADIICGVDVSSETLDGRIGLSGPVTQVKRTPQGIAELRSFCAAHGVELVVMEATGGYEKLPFSLLWASGVPCAIVNPRSVRRFAEAMGFLEKTDRIDTGVIADYARVKRIAAHEPASESQERLRALVVRLRQLTELKVAQINQRRLLEDTQAQASVDELLTVIRRQIKTFEGLIAELLGSDPLWRALDAAFREIKGVADRTVARLAAEMPEIGTVSNKAIAKLAGLAPIAKDSGKRQSKRSIRGGRSSVRSILVTVAAVVQRHDPDLAAFHQRLIQAGKPKMAARIAVARKLLVRLNAKARDARKTLATT

SEQ ID NO: 14180 - protein, 402 aa, unidentified
  source 1..402: note = protein_8ed49cd
  REGION 15..169: note = RuvC_domain
  SITE 18: note = RuvC_P1
  SITE 66: note = RuvC_P2
  SITE 106: note = RuvC_P3
  SITE 108: note = RuvC_P4
  SITE 111: note = RuvC_P5
  REGION 276..360: note = Tnp_domain
  SITE 284: note = Tnp_P1
  SITE 313: note = Tnp_P2
  SITE 321: note = Tnp_P3
  SITE 322: note = Tnp_P4
  SITE 334: note = Tnp_P5
MVNHPVGDVVIDVFVGVDVGKAEHHAVALDAAGEVILDRSLPQDEGRLRQLIGDLKQRGRVLFVVDQPATIGALPLAVARAEAVEVGYLPGLAMRRIADIHAGEAKTDARDAAVIAHGARSMPHALRSLRPDDETVAELAMLAGFDQDLAEQINQASNRIRGLLTQVHPALERAIGPRMQHPAVLDLIGRYPSPQAMRSAGRARLASRLRKVAPRLAERVADEIVAALDEQTVVVTGTDAAGQVLARLVEQLTVLRRQRDEIALQVERLVEAHPLSLVLTSMPGVGFKTAAIIVVEVSGKHFASAAHLAAYAGLAPVTRRSGSSIRGEHHSRRGNKRLKRALYLSAFAALRDPASRTYYDRKRLERKGHQQALIALARRRCDVLFAMLRDATTYDADRHVAA

SEQ ID NO: 14181 - protein, 342 aa, unidentified
  source 1..342: note = protein_23f4a91
  REGION 6..148: note = RuvC_domain
  SITE 9: note = RuvC_P1
  SITE 52: note = RuvC_P2
  SITE 87: note = RuvC_P3
  SITE 89: note = RuvC_P4
  SITE 92: note = RuvC_P5
  REGION 210..295: note = Tnp_domain
  SITE 218: note = Tnp_P1
  SITE 248: note = Tnp_P2
  SITE 256: note = Tnp_P3
  SITE 257: note = Tnp_P4
  SITE 269: note = Tnp_P5
MKDMMIGVDLAKNVFQAHGALLTGEVQFRKKLTRQHFTAFMAQQAPCLVIFEACGGAHYWAREMEALGHEVKLIAPQYVRPFVKRQKNDAADAEAIVIAARQPEMRFVEPKSVEQQSCAAVFRGRERLVHQRTADVNALRALLYEHGHVFPVGMRYLDRITALVDEETSGLPALIREECQDLLAQIAEKTARVTERTAKLKALASQSDRARRLQTMPGVGPMTAVAVEAFGPDMAQFKTGRDYAAWLGLVPRQHSSGGKERLGRMTKAGQADIRRLLIIGAMSRLGWLGRRTIAEGSWLSRMLARKPKMLAAIALANKMARQMWAMLTKNEDYRDPALAVAA

SEQ ID NO: 14182 - protein, 342 aa, unidentified
  source 1..342: note = protein_0b9233d
  REGION 7..148: note = RuvC_domain
  SITE 10: note = RuvC_P1
  SITE 53: note = RuvC_P2
  SITE 88: note = RuvC_P3
  SITE 90: note = RuvC_P4
  SITE 93: note = RuvC_P5
  REGION 211..297: note = Tnp_domain
  SITE 219: note = Tnp_P1
  SITE 249: note = Tnp_P2
  SITE 257: note = Tnp_P3
  SITE 258: note = Tnp_P4
  SITE 270: note = Tnp_P5
MSEVTIIGIDLAKRIFHLHGAGHDGSVVFRKRLSRGQLLAFMSQVPRCVVAMEACATAHGWGRAFETFGHEVRLIPPVYVKPFVKRQKNDCADAEAIVEAAVRPTMRFVALKTEDQQARAMLFRTRQMFVGQRTQLINALRGHLAEHGLVAARGVAQLKKLADAIGDVKTPLPATVRELGQMYLNAIEGLSERIAELDRKMGQATKEAASTRRAQTMPGVGPITALAIETFAPDLTSFRRGRDFAAWLGLVPRQHSTGGKPRLGKTSKMGQRDIRRLLISGAMAVLQAVERYGSSKHGWLVRLRGRKPRMVAAVALANKMARGLWAMMTKQEDYRNPAATMA

SEQ ID NO: 14183 - protein, 343 aa, unidentified
  source 1..343: note = protein_ecc13d8
  REGION 6..146: note = RuvC_domain
  SITE 9: note = RuvC_P1
  SITE 52: note = RuvC_P2
  SITE 87: note = RuvC_P3
  SITE 89: note = RuvC_P4
  SITE 92: note = RuvC_P5
  REGION 211..298: note = Tnp_domain
  SITE 219: note = Tnp_P1
  SITE 249: note = Tnp_P2
  SITE 257: note = Tnp_P3
  SITE 258: note = Tnp_P4
  SITE 270: note = Tnp_P5
MNVSVLGIDIAKNIFQLHGVDSSGKRILKQRVERDKLSAYVANLQMSTIVMESCGGANYWARVFQRQGHSVKLISPQFVKPFVKTNKNDANDAEAIVEAASRPSMHFVPIKQVEQQDIQSLHRVRSRLVKNRTALINEIRGLNLEYGIAIPQGALKVKSHLRSIIDDTENELTVSSRELMQELYDELVELEGRLKKLENKIKLICKENDQCQRLLSIPGIGELTATAIVAAVPNANEFKNGRHMAAWLGLVPRQSSSGNKQVLLGISKRGDRYLRTLLIHGARAALCRCKNTDNKYGEWLISKRESLSLNKAAVALANKNARIIWSLLKTGELFDSNQQKSAA

SEQ ID NO: 14184 - protein, 408 aa, unidentified
  source 1..408: note = protein_f19955c
  REGION 5..165: note = RuvC_domain
  SITE 8: note = RuvC_P1
  SITE 62: note = RuvC_P2
  SITE 102: note = RuvC_P3
  SITE 104: note = RuvC_P4
  SITE 107: note = RuvC_P5
  REGION 273..359: note = Tnp_domain
  SITE 281: note = Tnp_P1
  SITE 312: note = Tnp_P2
  SITE 320: note = Tnp_P3
  SITE 321: note = Tnp_P4
MRLFVGDDWAEDHHDVELMDGTGRRLAKARLPEGVAGMARLHAMIGEQLGETDDEDVEVLVGIETDRGPWVAALVAAGYTVLAVNPLQAARFRDRLGVSGAKSDAGDAHVLADMARTHSHELRPVAGDSSEAEAIKVLARIHKTLIWERTRHTQRLRHALLDYFPAALDAFEDLDAADTLELLAKASTPARAARLTIAQISGVLKRARRKNIAEKASLIQAALRTGHLGRPEIVAEAYAASVQALIAVLATLNTQVKTLQGQVEAHFGQHPAAEIIGSQPGLGPILSARVLAEFGDDPGRYACAKARKNYAGTSPITRASGRKKVALARFIHNDRLIDALMSQAFGALKTSPGARAYYDRQRARGAGHNAALRQLANRLVGILHGCLKTGTLYDETTAWSHHAENVAA

SEQ ID NO: 14185 - protein, 346 aa, unidentified
  source 1..346: note = protein_6cd7457
  REGION 14..156: note = RuvC_domain
  SITE 17: note = RuvC_P1
  SITE 60: note = RuvC_P2
  SITE 95: note = RuvC_P3
  SITE 97: note = RuvC_P4
  SITE 100: note = RuvC_P5
  REGION 218..304: note = Tnp_domain
  SITE 226: note = Tnp_P1
  SITE 256: note = Tnp_P2
  SITE 264: note = Tnp_P3
  SITE 265: note = Tnp_P4
  SITE 277: note = Tnp_P5
MGNGTVDMSAVAAVGLDLAKHVFQVHAVDAAGRVLASKSVRRKDLLAFFEKLPGCLVGLEACGSAHHWARELIRLGHDVRLMPPAYVKPYVRRQKNDAADAAAICEAVTRPSMRFVPVRSVENQAVLMHHKVRELLVAQRTQLLNALRGHLTEIGIITAQGPNNARSLAAHVMDSHDMIPAGVRTALMPLVRQLHLLDEEIAESDRTIQAIAKTDATARRLMSIPGIGPVTASAIAASVQDISVFSGPREFAAFLGLTPRQNSSGGRERLGRVSKMGNRYLRKLLVVGAHAVLYHRKVHKDALRTWASHLMETKPFKLVAVAIANKLARIVFAILRGGTRYAGVNA

SEQ ID NO: 14186 - protein, 397 aa, unidentified
  source 1..397: note = protein_49e05c1
  REGION 9..163: note = RuvC_domain
  SITE 12: note = RuvC_P1
  SITE 60: note = RuvC_P2
  SITE 100: note = RuvC_P3
  SITE 102: note = RuvC_P4
  SITE 105: note = RuvC_P5
  REGION 270..355: note = Tnp_domain
  SITE 278: note = Tnp_P1
  SITE 308: note = Tnp_P2
  SITE 316: note = Tnp_P3
  SITE 317: note = Tnp_P4
  SITE 329: note = Tnp_P5
MDTSYAVFCGIDVGKSDHHAVGLDTAGGRLFDKALPNDEARLRAVFADLAVHGPILVVVDQPNTIGALPVTVARACGHDVAYLPGLSMRRVADLYPGQAKTDARDAFIIADTARTMPHTLRRVDVGDETLTEFGVLVGFDDDLAGEATRVSNRIRGLLTGIHPALERVLGPRINHLAVLEILSRYGGPVGIRQAGKRRITTLAVKHAPRMGARLAEEIFAALDAQTVTVPGSKAAEIVLPKLADSLKEVLQQRRTIGDDVERILDEHPLSQVLTSMPGIGVRTAARILIEIGDGSDFASAGHLAAYAGIAPVTHRSGTSIRGEHPARSGNRKLKRALFLSAFAALHDPTSRAYYDRKRAEGKRHNAALICLARRRCDVLHAMLKNKTFYQPPTADAA

SEQ ID NO: 14187 - protein, 364 aa, unidentified
  source 1..364: note = protein_e2fa4ac
  REGION 1..134: note = RuvC_domain
  SITE 31: note = RuvC_P2
  SITE 71: note = RuvC_P3
  SITE 73: note = RuvC_P4
  SITE 76: note = RuvC_P5
  REGION 241..325: note = Tnp_domain
  SITE 249: note = Tnp_P1
  SITE 278: note = Tnp_P2
  SITE 286: note = Tnp_P3
  SITE 287: note = Tnp_P4
  SITE 299: note = Tnp_P5
MFDKALPNDENKLRALISDLKQHGQILLVVDQPATIGALPVAVARSEGVLVGYLPGLAMRRIADLHAGEAKTDARDAAIIAEAARTLPHALRTLKLADEQIAELSMLCGFDDDLAAQTTQASNRIRGLLTQIHPALERVLGPRLDHPAVLDLLQRYPSPEKLASLGEKKLATQLSKLAPRLGKSLAADISQALTEQTVVVPGTNAAVIVLPRLALQLITLRKQRDEVALEVEQRVLAHPLYPVLTSMPGVGVRTAARLLTEVACRAFASAAHLAAYAGLAPVTRRSGSSIRGEHPSRRGNKTLKRALFLSAFAALRDPISRAYYTRKMSQGKRHNQALIALARRRCDVLYAMMRDGTFYTPTAS

SEQ ID NO: 14188 - protein, 341 aa, unidentified
  source 1..341: note = protein_e74ca01
  REGION 6..148: note = RuvC_domain
  SITE 9: note = RuvC_P1
  SITE 52: note = RuvC_P2
  SITE 87: note = RuvC_P3
  SITE 89: note = RuvC_P4
  SITE 92: note = RuvC_P5
  REGION 211..297: note = Tnp_domain
  SITE 219: note = Tnp_P1
  SITE 249: note = Tnp_P2
  SITE 257: note = Tnp_P3
  SITE 258: note = Tnp_P4
  SITE 270: note = Tnp_P5
MSTITIGLDIAKSVFHLVWMNAAGKVLKRKQLSRKKVAEYFANLEACTVVMEACGSTHYWSRVITRCGHEVKAIAPQFITAYRKGNKNDYNDAEAIAEASQRQNMRFVPLKSLAQQDIQMLHRIRERLVKNRTALSNQIRGLLAEYGLVMPKGVNHLKAQLPGFLEDATNELSTSARRYFQGLSEELDDLSVQIKSVDSEVLGINKQNEVCQRLSTMTGIGPIVATAFYAGIGDGKAFTSGRHVSAWLGLVPKQHSTGGKPTLLGISQRGNTYLRTQLINGARAALRHCENKTDQVSVWARQLKERSNYNNATVALANKMARMAWAMLHHQEDYKFKAVKN

SEQ ID NO: 14189 - protein, 369 aa, unidentified
  source 1..369: note = protein_b0bd5c7
  REGION 8..155: note = RuvC_domain
  SITE 11: note = RuvC_P1
  SITE 59: note = RuvC_P2
  SITE 95: note = RuvC_P3
  SITE 97: note = RuvC_P4
  SITE 100: note = RuvC_P5
  REGION 222..305: note = Tnp_domain
  SITE 228: note = Tnp_P1
  SITE 258: note = Tnp_P2
  SITE 266: note = Tnp_P3
  SITE 267: note = Tnp_P4
  SITE 279: note = Tnp_P5
MDKDTTYVALDDSKRKIVAGILRPSDTQPELREIANDARQIRRLFERLKREGPVAACYEAGVSGYDLHRQITGLGVACAVIAPALTPRRPGQRIKTDRRDAAKLVRLFRAGELTAIHVLDESEEAVRDLVRCRDDIRRDVLRWRHRVLKLLARHGRAYLTGKNWSHAHWRWIREQRFELPPLQRAFEATVFALEQALARQAELDKELEALAATAPYREPVGWLRCFRGIDTLSAIILLAEVVDFQRFRRPRELMAYLGLVPSEYSSGETQRRGALTKAGNSHARRVLVEAAWHYRHRPTIGRALANRSQGQPDEIVSHAWRAQQRLHRRYRHLLGHGKRTPVAVAAVARELVGFIWAAMTRHESRRQAA

SEQ ID NO: 14190 - protein, 341 aa, unidentified
  source 1..341: note = protein_341022f
  REGION 6..152: note = RuvC_domain
  SITE 9: note = RuvC_P1
  SITE 53: note = RuvC_P2
  SITE 91: note = RuvC_P3
  SITE 93: note = RuvC_P4
  SITE 96: note = RuvC_P5
  REGION 211..298: note = Tnp_domain
  SITE 219: note = Tnp_P1
  SITE 249: note = Tnp_P2
  SITE 257: note = Tnp_P3
  SITE 258: note = Tnp_P4
  SITE 270: note = Tnp_P5
MPIVTVGIDLAKNVFAIHGVDESGKAVLVKPRVMRDQLTALIAQLPPCLIGMEACSGAHHWARVFQQYGHTVKLMAPKLVAPYRMSGKRGKNDAADAAAICEAVTRPSMRFVPLKDEHQQATLCLHRTRQGFVEERTAIYNRIRGLLSEFGVVLPQSPERLRREITVPLEALPGWARRCISDLLEHAGNIEDRLAEYDRAISEIARYDARSRRLMQLRGIGPTTASALLASLGVGHDFSNGRQVAAWLGLTPGQHSSGGKQRLGSITKAGDAYLRSLLVNGARAVLANLGEKQDRFSRWVRSLVERRGYWRAAVAIAAKNARMAWAVLKYGDDFKHDPVVA

SEQ ID NO: 14191 - protein, 401 aa, unidentified
  source 1..401: note = protein_4863415
  REGION 4..160: note = RuvC_domain
  SITE 7: note = RuvC_P1
  SITE 57: note = RuvC_P2
  SITE 97: note = RuvC_P3
  SITE 99: note = RuvC_P4
  SITE 102: note = RuvC_P5
  REGION 275..360: note = Tnp_domain
  SITE 283: note = Tnp_P1
  SITE 313: note = Tnp_P2
  SITE 321: note = Tnp_P3
  SITE 322: note = Tnp_P4
  SITE 335: note = Tnp_P5
MISVGIDVSKEKSTVCILKEYGEVISEPHEINHTETDLKALVESISELNEETRVVMEATGAYHLPLLTYLKNHGIFVAVINPLIMKKYSAIGLRKGKTDKLDSIKIANYGIDNWFKLTDYEATDEVYSELKLLGRQYSHYIAMRIESKLVLSNLLDRTMPGIKNLLKDRSDKPEKDKLNDFVKEYWHYDNITQKNEKQFINSYLKWAKNKGYHQSETKAKQIYALAQEGIPTLSSSTPSTKMLVLEAVRVLSEIDRTLSMILSQMQELASSLKEYNVVRNMPGVGDTLAPRLIAEIGDLRRFYNKKALISYTGIDSPPFESGQFVANKRRISKRGSALLRKTGYEIMKCIKSTRPKDDPIFLYMLKKEAEGKSKKVAKIAALNKFLRIYYARVKEVYNTQV

SEQ ID NO: 14192 - protein, 342 aa, unidentified
  source 1..342: note = protein_68b3673
  REGION 6..148: note = RuvC_domain
  SITE 9: note = RuvC_P1
  SITE 52: note = RuvC_P2
  SITE 87: note = RuvC_P3
  SITE 89: note = RuvC_P4
  SITE 92: note = RuvC_P5
  REGION 210..293: note = Tnp_domain
  SITE 218: note = Tnp_P1
  SITE 248: note = Tnp_P2
  SITE 256: note = Tnp_P3
  SITE 257: note = Tnp_P4
  SITE 269: note = Tnp_P5
MKDMMIGVDLAKNVFQVHGALRTGDVQFRKKLTRKQFPVFMARQEPCLVLFEACGSAHHWAREMEAFGHEVKLIAPQYVRPFVKRQKNDAADAEAIVIAGRQPEMRFVAPKTVEQQSRAAVFRGRERLIHQRTADVNALRALLHEHGHVFPIGIRHLDRITALVEDETSDLPALIREECQDLLAQIGEKKARIAERTTKLKTLATRSDRVRRLQTMPGVGPLTAVAVEAFGPDMAQFETGRDFAAWLGLVPRQHSSGGKERLGRMTKAGQVDIRRLLIIGAMSRLGWLGQRTIPEGSWLARMLARKPRMLVAIALANKMARQIWAMLTKDEDYRDPALAGAA

SEQ ID NO: 14193 - protein, 407 aa, unidentified
  source 1..407: note = protein_94b89d1
  REGION 5..164: note = RuvC_domain
  SITE 8: note = RuvC_P1
  SITE 61: note = RuvC_P2
  SITE 101: note = RuvC_P3
  SITE 103: note = RuvC_P4
  SITE 106: note = RuvC_P5
  REGION 272..358: note = Tnp_domain
  SITE 280: note = Tnp_P1
  SITE 311: note = Tnp_P2
  SITE 319: note = Tnp_P3
  SITE 320: note = Tnp_P4
MRLFVGDDWAEDRHDVEVMDVSGRRLAKARLPEGVAGMARFHTMIGGLVGEDPEDVEVLVGIETDRGPWVAALVASGHTVLAVNPLQAARFRDRLGVSGAKSDAADAHVLADMVRTHAHQLRPVAGDSAQAEAIKVVARTHKTLIWEQTRHTQRLRHALRDYFPAALAAFEDLDAADTLELLAKAPTPAKAARLTTAQITAALKRARRRNVTEKTELVQAALRADHLGQPEVVTSAYAASVQALIAVLTVLNTQIKAMQGQVEAHFGRHPAAEIVTSQPGLGPILGARVLAEFGDDPDRYATAKSRKNYAGTSPITRASGKKKVALARFVHNDRLIDALMAQAQSALLRSPGARAYYDRQKARGAGHNAALRQLANRLVGILHGCLKTGTHYNETTAWSHHTNNIAA

SEQ ID NO: 14194 - protein, 309 aa, unidentified
  source 1..309: note = protein_cc29426
  REGION 8..152: note = RuvC_domain
  SITE 11: note = RuvC_P1
  SITE 54: note = RuvC_P2
  SITE 94: note = RuvC_P3
  SITE 96: note = RuvC_P4
  SITE 99: note = RuvC_P5
  REGION 190..274: note = Tnp_domain
  SITE 198: note = Tnp_P1
  SITE 227: note = Tnp_P2
  SITE 235: note = Tnp_P3
  SITE 236: note = Tnp_P4
  SITE 247: note = Tnp_P5
MNKELVYLGVDVAKKYLDAAVGSEKRRLPNDSSGHRQLIKWIKQSQEPVQVICEPSGGYERGLIQALIKSDVKVSLVPANRVRQFARAAGVLAKTDDIDAKVLCTFGAALKPATLTANRLQQEQLRELESQRRHLSRVLVMEQNRGTRLAHASVCKFNRSLVNQIKKQIEQIDLLIKQHIEQSPELSAKADKMIAISGVGPRTAALLLAQMPELGQLNRREVAALVGVAPFNRDSGVMRGRRTIFGGRREVRHGLYMAALVAARHNPVLRSFYQRLRGAGKPAKLALTATMRKLLIVLNSSLKTDLSYA

SEQ ID NO: 14195 - protein, 321 aa, unidentified
  source 1..321: note = protein_aed960d
  REGION 9..159: note = RuvC_domain
  SITE 12: note = RuvC_P1
  SITE 57: note = RuvC_P2
  SITE 97: note = RuvC_P3
  SITE 99: note = RuvC_P4
  SITE 102: note = RuvC_P5
  REGION 196..280: note = Tnp_domain
  SITE 204: note = Tnp_P1
  SITE 233: note = Tnp_P2
  SITE 241: note = Tnp_P3
  SITE 242: note = Tnp_P4
  SITE 253: note = Tnp_P5
MSATSVVVVGIDVAKAHVDCAALGAQLAPRQFVNDIDGHSALAAALQPLGVVLVVMEATGGYESALACALQAAGYAVAVVNPKQARDFAKSIGRLAKTDRIDAEALAEFAATLLRRGDLERFIRPLPDVQQRELAALVTRRRQLLTMLGAERLRLQLATAKVRLSIEALIEAIQAQLDDLEAQMRSHVREHFAALDDLLRSARGIGPIASATLIATLPELGRLNRRQISALVGVAPMANDSGTVRGRRRVVGGRFEVRRVLYMATLSAITHNPTIKTFYQRLIAAGKIPKVALVACMRKLLIMLNAMIRTNTQWAKAPHHA

SEQ ID NO: 14196 - protein, 343 aa, unidentified
  source 1..343: note = protein_cb0a1ea
  REGION 7..149: note = RuvC_domain
  SITE 10: note = RuvC_P1
  SITE 53: note = RuvC_P2
  SITE 88: note = RuvC_P3
  SITE 90: note = RuvC_P4
  SITE 93: note = RuvC_P5
  REGION 211..304: note = Tnp_domain
  SITE 219: note = Tnp_P1
  SITE 249: note = Tnp_P2
  SITE 257: note = Tnp_P3
  SITE 258: note = Tnp_P4
  SITE 270: note = Tnp_P5
MKEISIIGVDLAKNVFQLHGAAADGSVMFRKKLSRPQFQRFMAEHPQCLVVMEACGGAHHWARELVRVGHEVKLIAPRYVKPFIKRQKNDAADAEAIVEAALRPTMRYVEPKTSDQQSRSILFRTREQFVKQRTEAVNALRSHLYEFGFIAPEGIGYLPRLDALIKDANSDLPPLAREICSELLDQVAHLTARINVMKKRIDAIAREGETSRRLQTMPGVGPISALAVETFAPPMAQFKRGRDFAAWLGLVPRQASTGGKQRLGKTSKMGQRDIRRLLITGAMAVIRWALRRGAPQNPWLERMLERKPPMVAAFALANKMARGLWAMLTRGEDYRDPVIASAA

SEQ ID NO: 14197 - protein, 344 aa, unidentified
  source 1..344: note = protein_5cefee0
  REGION 7..148: note = RuvC_domain
  SITE 10: note = RuvC_P1
  SITE 53: note = RuvC_P2
  SITE 88: note = RuvC_P3
  SITE 90: note = RuvC_P4
  SITE 93: note = RuvC_P5
  REGION 209..295: note = Tnp_domain
  SITE 217: note = Tnp_P1
  SITE 247: note = Tnp_P2
  SITE 255: note = Tnp_P3
  SITE 256: note = Tnp_P4
  SITE 268: note = Tnp_P5
MEKIIRIGMDTSKSVFQLHGVNEVEQPVVRKKLHRKEMVKFFSQLEPTVVGIEACGGSHHWARALGALGHTVKLMAPQLVKPYVKRGKNDAADAAALCEAMSRPTMRFVPVKSLDQQAALMLIGLRDGLVRRRTQLSNAIRGYATEFGLVAAKGLERIERLLARAQAADLPALAGELFGLLGRDYACLQEQVREVEARLMAWHRENEVSRRLAQAPGIGPIGATMLVMKTPDPHAFRSARDFAAWIGLTPKDHSTAGKVRLGGITRAGDEALRSVLVVGAMSVIRQARQGKGHRSPWLAGLLQRKPPKVAAVALANKMARVAWKMMATGECYDAGRSSPAPKTA

SEQ ID NO: 14198 - protein, 346 aa, unidentified
  source 1..346: note = protein_ded1906
  REGION 7..150: note = RuvC_domain
  SITE 10: note = RuvC_P1
  SITE 54: note = RuvC_P2
  SITE 89: note = RuvC_P3
  SITE 91: note = RuvC_P4
  SITE 94: note = RuvC_P5
  REGION 213..301: note = Tnp_domain
  SITE 221: note = Tnp_P1
  SITE 251: note = Tnp_P2
  SITE 259: note = Tnp_P3
  SITE 260: note = Tnp_P4
  SITE 273: note = Tnp_P5
MEDNLLLAIDLAKNSFQVCYMRNNGEVLLNKAISRNSLIKLLTGKKRFSLVAMEACGGAHYWARLAKGNGHEVKIIQPRSVKGLQLKQKTDKNDAYAVGVAALLPHIFSCNLMSEDEQGLQCLDRARALQLAQRTALSNQMRGFLNEYGIVLPKGIAPLVKRIPEILEDAENGLPDSLRQVLASQADILAMQTEQIEYYDCLIAEHIKQNKICQKLSKLEGVGPIVALGLMIRLGDGKEFTHSRDASACIGLTPKQHSTGGKERIGHISKSCADKRLRSLLYQGAMSIVYKVTLRAPTTEKERWLKSIVERRGKKIAAIAMANKTVRTAVALIKSDSDYQPLPIQA

SEQ ID NO: 14199 - protein, 337 aa, unidentified
  source 1..337: note = protein_b3129e5
  REGION 4..157: note = RuvC_domain
  SITE 7: note = RuvC_P1
  SITE 60: note = RuvC_P2
  SITE 100: note = RuvC_P3
  SITE 102: note = RuvC_P4
  SITE 105: note = RuvC_P5
  REGION 200..286: note = Tnp_domain
  SITE 208: note = Tnp_P1
  SITE 237: note = Tnp_P2
  SITE 245: note = Tnp_P3
  SITE 246: note = Tnp_P4
  SITE 259: note = Tnp_P5
MYQLGIDVSKATLDICLLLDGIHGRIKTKKVKNDYQAVHIILAWLQQQNCRPEDVHTIMEATGVYHELLATGLHLAGVTVSLANPHRSREFARGMDILIKTDKVDAWMLACYGALKQPQPWTPPPEEIRYLSALLKRRDLLVADAVREKNRLEKYHATSTPEVIVQSVEKMLLRLNEEIAVLESLLKEHIDSHLSLKEDLALLTSIKSVGAQLALNMLVIMRSHDFDSAEQVAAFLGVVPVEKRSGTSVRGRPQMSKIGPPKIRAKLYLSALCGLRFNPLMKSIYERLCLAGKPKMVAVGALMRKLIHWCFGVLKNRHPFDVNYQRVDAQSACKAAL

SEQ ID NO: 14200 - protein, 344 aa, unidentified
  source 1..344: note = protein_dc0c76a
  REGION 5..152: note = RuvC_domain
  SITE 8: note = RuvC_P1
  SITE 55: note = RuvC_P2
  SITE 92: note = RuvC_P3
  SITE 94: note = RuvC_P4
  SITE 97: note = RuvC_P5
  REGION 212..299: note = Tnp_domain
  SITE 220: note = Tnp_P1
  SITE 250: note = Tnp_P2
  SITE 258: note = Tnp_P3
  SITE 259: note = Tnp_P4
  SITE 271: note = Tnp_P5
MYYYAGIDVSLECSSVCVVDGTGKILREAKVASEPEALIAWFRSQGLGLERIGLEAGPLSQWLYAALREAGFAVELLETRHVRDAFKAMPVKSDRNDARGIAQLMRLGWFRPVHCKSMEAQEMRAVLTARKLLQSKLRDVENSLRGVLRGFGLKVGKTTECTFAERIRELVAGHPGLELVAKALLEAHAVLRREFNGLDKCTQKLARAHPSAKLLMTTPAVGPIVALTYASAIDDPKRFSSSKATGAHFGLTPKKYQSGQTDYTGRISKIGDASVREALYQAAHVMLTKPVKNCSALKSWAMRIAKRAGMRKAKVALARKLAVILHRMLADAKPFNPVAKAAAT

SEQ ID NO: 14201 - protein, 319 aa, unidentified
  source 1..319: note = protein_cfcaf0c
  REGION 10..154: note = RuvC_domain
  SITE 13: note = RuvC_P1
  SITE 56: note = RuvC_P2
  SITE 96: note = RuvC_P3
  SITE 98: note = RuvC_P4
  SITE 101: note = RuvC_P5
  REGION 196..280: note = Tnp_domain
  SITE 204: note = Tnp_P1
  SITE 233: note = Tnp_P2
  SITE 241: note = Tnp_P3
  SITE 242: note = Tnp_P4
  SITE 253: note = Tnp_P5
MDNLSHGRVIGIDVSRDWLDLHCLPDGLQCRMPNGPEGHAAVSDLARDRDAVVCFESTGGQEWQLWETLEAEGVIARQVPPAQVKAFARSRGTRAKTDRIDAELIARFFAFRPDAGRRLPTEKLRSLRALTSKRAQIVEMRKRLLAQIRAHQKLGTAEMFDSVDSDLKARLDCLIKELEDRIGATLSGDVLLAETAGVLRSIPGIGPVASTVLIAEMPELGTITGEQAAALVGLAPVAQDSGTLRGKRTIAGGRRALRHVMFQAALVAAHHNPSMKAFADRLRKAGKPHKVIITAVARKLVNLANALCKSRQKWKPSTA

SEQ ID NO: 14202 - protein, 349 aa, unidentified
  source 1..349: note = protein_8ac25f9
  REGION 14..167: note = RuvC_domain
  SITE 17: note = RuvC_P1
  SITE 66: note = RuvC_P2
  SITE 107: note = RuvC_P3
  SITE 109: note = RuvC_P4
  SITE 112: note = RuvC_P5
  REGION 208..295: note = Tnp_domain
  SITE 216: note = Tnp_P1
  SITE 246: note = Tnp_P2
  SITE 254: note = Tnp_P3
  SITE 255: note = Tnp_P4
  SITE 268: note = Tnp_P5
MAKNSSEAEVRVFAGIDVSARELSVAVRCGSEDEKAVKTFGNNAAGHKALLAYLLQGNVRARVCLEASGNYSLDLALTLQAHRQVEVSVVNPRRARRFAESLGQRSKTDPVDARVLCQYALRMPWVSWVPPDLLTLRLRALTRAIEALTVMQTQEKNRQHSLLASQALPRLVIRELQQHLDYLELRITRLRREARRLIARNLELDRRFRLMLTTPGIAETSALQILGELAVLPDSLDARQWVAFAGLDPLRFTSGNSVEKKPRISRGGSRHLRRALYMPALVAIRHEPHLRAFYQRLLARGKAPLQAIVAVMRKLLHAFFAMFRSDHSYDGSKLCPAELASDTGALCAA

SEQ ID NO: 14203 - protein, 415 aa, unidentified
  source 1..415: note = protein_1dbcebd
  REGION 6..162: note = RuvC_domain
  SITE 9: note = RuvC_P1
  SITE 59: note = RuvC_P2
  SITE 99: note = RuvC_P3
  SITE 101: note = RuvC_P4
  SITE 104: note = RuvC_P5
  REGION 276..363: note = Tnp_domain
  SITE 284: note = Tnp_P1
  SITE 314: note = Tnp_P2
  SITE 322: note = Tnp_P3
  SITE 323: note = Tnp_P4
  SITE 336: note = Tnp_P5
MTANAVGIDVSNGHSTVAVFRPFGEVVELPFEVRHTPKALNALAERLKSYEGETRIIMEHTGRYYESIANVLYENGLYVSAVNPLLVKEYGNNSLRRVKTDKADAKKLARYGLDNWAELREYTPMDEIRYNLKTLNRQFQQASGQRTASVNNLIALLEQSFPGIRKLFDSPPRADGHQKWVDFVNAYPHADCVCSVSLKKFTKSYQKWCKSEKYNFSEEKAAEIYAAAREMVVLTPRTELHELMIRQAAEQVTAISKSVEIYRAEMDKLASQLPEYPVVMEMYAVGKSLGPQLMAEIGDVMRFAGKQSLVAFAGVDPMPSQSGDKSARSNKTSKRGSPYLRKTLFNVMDIYLRLSPQEEPIYQFLDRKRAEGKPYYVYMTAGTNKFLRRYYAKVRDYLATLDIPKTPSAANVPDA

SEQ ID NO: 14204 - protein, 392 aa, unidentified
  source 1..392: note = protein_6fe18c5
  REGION 4..163: note = RuvC_domain
  SITE 7: note = RuvC_P1
  SITE 60: note = RuvC_P2
  SITE 101: note = RuvC_P3
  SITE 103: note = RuvC_P4
  SITE 106: note = RuvC_P5
  REGION 266..355: note = Tnp_domain
  SITE 274: note = Tnp_P1
  SITE 304: note = Tnp_P2
  SITE 312: note = Tnp_P3
  SITE 313: note = Tnp_P4
  SITE 328: note = Tnp_P5
MVCVGIDVAKDKHDCFILSSEGEVLANAFTIANNREGFETLLRTIRSCSGPTDNIKVGLEATGHYSYNILGFLLEKGMPPFLINPLHTNLYRKSLSLRQTKTDRIDARTIASMLMSDVDLKSYTDTAYHNEELKSLTRYRFDKVKERAKLKQSISRLVNILFPELETLVPTLHMASVYAMLSEFPGARRIAEAHLTHFKAILSDASKGRYDRDKALEIREAARRSIGSTMPAKSLELQHTIRLIRELDKEIDEIEAAIKGIIDEMAPPILTIPGISYRMGAMILAEIGDFSRFDSPDKLLAYAGLSPSTYESGKFVATGGYAHMEKRGSRYLRYALFNAAKYVCIWEPSFAAYLAKKRAEGKHYNVAISHASKKLVRLIFALQTSGRAFQPA

SEQ ID NO: 14205 - protein, 406 aa, unidentified
  source 1..406: note = protein_0e9ec31
  REGION 9..162: note = RuvC_domain
  SITE 12: note = RuvC_P1
  SITE 60: note = RuvC_P2
  SITE 101: note = RuvC_P3
  SITE 103: note = RuvC_P4
  SITE 106: note = RuvC_P5
  REGION 224..309: note = Tnp_domain
  SITE 232: note = Tnp_P1
  SITE 262: note = Tnp_P2
  SITE 270: note = Tnp_P3
  SITE 271: note = Tnp_P4
  SITE 282: note = Tnp_P5
MHQSEHVIIGVDPHKLSATIEVVDRHEKRLGAGRFTTDKAGYAAMRIYAKAWPDRVWAVEGANGVGRPLAQRLLEAGERVVDVPAKLAARVRLFDTGHNRKTDALDAHSIAIVAVRTTTLRVLQVDGELEALRMLTDRREALTRRRVQTVDRLQALLAELLPGQSKKDITTGQAKAMLATVRPRDIAGKTRRRIAAEELSELVAVEAKMKKATAELKAIVTARGSHLMDIHGVGPVVAARVLADVGDVARFADRNRFASWTGTAPLDASSGEQNRHRLSRAGNRRMNHMIHIAAITQLRSDTDGRAYYRRKRAEGKKPLEALRCLKRRISDALYRQLVADAAAATARGVEAGPGGHCGASQESSAVDLPPHIDTSDQPLPGPANPTLRPAPTPRKTNPGTPIAATG

SEQ ID NO: 14206 - protein, 311 aa, unidentified
  source 1..311: note = protein_cb4b227
  REGION 6..154: note = RuvC_domain
  SITE 9: note = RuvC_P1
  SITE 53: note = RuvC_P2
  SITE 92: note = RuvC_P3
  SITE 94: note = RuvC_P4
  SITE 97: note = RuvC_P5
  REGION 188..272: note = Tnp_domain
  SITE 196: note = Tnp_P1
  SITE 225: note = Tnp_P2
  SITE 233: note = Tnp_P3
  SITE 234: note = Tnp_P4
  SITE 245: note = Tnp_P5
MSKDTIGIDISKDTLDAHRLSTGTAAQFANSPAGLRALRRWIGAETPDLVVYEATGAYHAALERSCAGALPLVKVNPLQARRFAQARGTRAKTDPVDARILAAMGAALDLAPDAPEGEDHCALKELQVARMALVKERTRLLNRSKTQSLALLKRQSKARLEQIKRQLAALEDAMLDLARQCERRARAVDILCSVPGLGRVTAVAILVECPEIGTMNRKQIASLAGLAPMTRQSGQWQGRAFIQGGRKFLRDALYMPALVAARHNPDLRQKYQAMIQAGKPAKVALTALMRKLIELANALVQQDREWTPKSA

SEQ ID NO: 14207 - protein, 398 aa, unidentified
  source 1..398: note = protein_9ede413
  REGION 6..159: note = RuvC_domain
  SITE 9: note = RuvC_P1
  SITE 57: note = RuvC_P2
  SITE 98: note = RuvC_P3
  SITE 100: note = RuvC_P4
  SITE 103: note = RuvC_P5
  REGION 221..306: note = Tnp_domain
  SITE 229: note = Tnp_P1
  SITE 259: note = Tnp_P2
  SITE 267: note = Tnp_P3
  SITE 268: note = Tnp_P4
  SITE 279: note = Tnp_P5
MEHVVIGVDPHKLSATIEVVDQREQLLGSGRFTTDRAGFTAMRAYAKAWPDRTWAVEGANGVGRPLAQRLLESGEQVVDVPAKLAARVRLFDSGHNRKTDAHDAHSIAMVAVRTKGLRVLQVDGELEALRMLVERREALTRRRVQTVDRLQALLAELLPGQAKRDLTTGQAKTMLATVRPRDIAGKTRRRIAVEELAELVAVEAKMKKATAELKAIVLARGSHLMDLHGVGPVVAARVLADVGDVARFADRNRFASWTGTAPLDASSGEQTRHRLSRAGDRRVNHMIHIAAISQIRLDTDGRTYYRRKRADGKRPLEALRCLKRRISDAIFRQLLADAAAPQEHVEAGPGGHRGATQESSAAGSHPHTDTSDQPHPGPAPTTLRRPLTARKRQLDPIS

SEQ ID NO: 14208 - protein, 339 aa, unidentified
  source 1..339: note = protein_8266ff3
  REGION 6..147: note = RuvC_domain
  SITE 9: note = RuvC_P1
  SITE 52: note = RuvC_P2
  SITE 87: note = RuvC_P3
  SITE 89: note = RuvC_P4
  SITE 92: note = RuvC_P5
  REGION 211..296: note = Tnp_domain
  SITE 219: note = Tnp_P1
  SITE 249: note = Tnp_P2
  SITE 257: note = Tnp_P3
  SITE 258: note = Tnp_P4
  SITE 270: note = Tnp_P5
MQIHSVGIDLGKTTFHLVALGASGKVLVKKKFTQRQLLAYTANMQTSLIGLEACSGAHFLGRALRKQGHDVRLIAAQFVKPFVKSNKNDFVDAEAIAEAVERKNMRFVPIKTDDQLDLQAIHRVRDRLISRRTAVINQLRAFLLERGMVFAQKPAKLKAAMADILENADADLTPLMRNLIDTLWGEWKLVEQQIEELNDELERISASDAGCTRIRKIPGIGPVVATAIVAAIGNGAAFRKGREFAAWLGIVPRQYSTGGKAKLLGISKRGNVYLRKILIHGARAAVLRIKRDRAPIGAWLDALDHRAPKNVVVVAMANKLARIAWAVLSSGNDYRPVPV

SEQ ID NO: 14209 - protein, 391 aa, unidentified
  source 1..391: note = protein_ccaaaa3
  REGION 4..163: note = RuvC_domain
  SITE 7: note = RuvC_P1
  SITE 60: note = RuvC_P2
  SITE 101: note = RuvC_P3
  SITE 103: note = RuvC_P4
  SITE 106: note = RuvC_P5
  REGION 266..353: note = Tnp_domain
  SITE 274: note = Tnp_P1
  SITE 304: note = Tnp_P2
  SITE 312: note = Tnp_P3
  SITE 313: note = Tnp_P4
  SITE 326: note = Tnp_P5
MVCVGIDVAKDKHDCFILSSEGEVLADVFTISNNREGFKTLLARLRSCASPQDKIKVGLEATGHYSYNILGFLLDKGLPTFVINPLHTNLYRKSLSLRLTKTDRVDARTIAAMLMSDVDLKSYTDTAYHNEELKSLTRYRFDKVRERAKLKQSISRLVNILFPELEKLVPSLHMVSVYALLSELPGAAQIANSHLTHLKTVLHDASKGRYDRDMAVTIRDAARSSIGSRMPAKSLELQHTIRLIRELDREINDIEAEIDAIMETIQSPITSVPGIGTRMGAMILAEVGDFSRFDSPDKLLAYAGLSPTTYQSGQLNNAYAHMEKRGSRYLRYAIFNATKYVCHWEPSFAAYLAKKRAEGKHYNVAISHAAKKLVRLIFALHRTGQTFNQAA

SEQ ID NO: 14210 - protein, 411 aa, unidentified
  source 1..411: note = protein_bfb8d61
  REGION 5..163: note = RuvC_domain
  SITE 8: note = RuvC_P1
  SITE 62: note = RuvC_P2
  SITE 102: note = RuvC_P3
  SITE 104: note = RuvC_P4
  SITE 107: note = RuvC_P5
  REGION 273..373: note = Tnp_domain
  SITE 281: note = Tnp_P1
  SITE 311: note = Tnp_P2
  SITE 319: note = Tnp_P3
  SITE 320: note = Tnp_P4
  SITE 333: note = Tnp_P5
MNPVIGLDVSKGESQIQAFLDKGKPYRKSFKVSHTLEGLDYLVRFIEEVKAETGKKPPVILEATGHYQSPIVHYLEERGYLLIIINPLISYKAKSSSLRKVKTDAVDAYLLCELFYKEELEPYKKRGVQLLNLRNLTRQHENITGTVIQTKLQFQAILDQVFPEYRGVFGDLYSIVSLLTLRTFPSSEDILNADDETLTSTIHEFCKSRSRVWASEKTEQLRAAAMRNPFEKTVYQSHILSLGMFINILLQYKEHLSTLESEIDALAKEVEEYTIIKSIPGIGEKIAATIISEIGEIDRFDHPKKLVAFAGVDPSVFESGKFTATKNRITKRGSSRLRHALYMGVRCAIRDCRKKKTSDEIIPRNKKLREFYDKKRDEGKPFKVAVIACVNKLLHWIFALLKSNTLFQDVV

SEQ ID NO: 14211 - protein, 326 aa, unidentified
  source 1..326: note = protein_19ca83a
  REGION 4..159: note = RuvC_domain
  SITE 7: note = RuvC_P1
  SITE 60: note = RuvC_P2
  SITE 100: note = RuvC_P3
  SITE 102: note = RuvC_P4
  SITE 105: note = RuvC_P5
  REGION 200..286: note = Tnp_domain
  SITE 208: note = Tnp_P1
  SITE 237: note = Tnp_P2
  SITE 245: note = Tnp_P3
  SITE 246: note = Tnp_P4
  SITE 259: note = Tnp_P5
MFYLGIDVSKAKFDCCLFLDDSIGKIKTKCFSNSNKGFHQLLSWLNRFGLVAEETRALMEATSVYHEMLAQFLFDLKFQVCVANPARTRYFAQSISKLHKTDKIDSEVLARFAMTVDLHLWQPTPDNIRLLNALLDRRSSLANDLKREQNRLEKVNSTLIIVPILKSIKTNIKSLTRQIQNLDTQIQNHIDQDHELKRDQKLLESIPAIAERTSLLMLVFLRAHSFEKASQAAAFVGLVPIHRQSGSSVLGKSRLSKAGSPKIRSGLYMAAIVATRYNPHIKELSERLLAKGKTKMVAIAAAMRKLIHLCYGVLKNQQPYQANYKA

SEQ ID NO: 14212 - protein, 344 aa, unidentified
  source 1..344: note = protein_028f7c1
  REGION 6..147: note = RuvC_domain
  SITE 9: note = RuvC_P1
  SITE 52: note = RuvC_P2
  SITE 87: note = RuvC_P3
  SITE 89: note = RuvC_P4
  SITE 92: note = RuvC_P5
  REGION 211..294: note = Tnp_domain
  SITE 219: note = Tnp_P1
  SITE 249: note = Tnp_P2
  SITE 257: note = Tnp_P3
  SITE 258: note = Tnp_P4
  SITE 270: note = Tnp_P5
MSIVILGVDLGKNVCSVVGVDGNGAVVVRRSMRRQGLIDYVRKLPACVIAMEACCGAHHLGRLFAAQGHEIRLMSPEYVRPYIKAQKNDDRDAEGIAEAASRPTMRFVELKSQEQLDIQSLHRARSRLVASRTMLINQLRAFLLERGVIFAAGRRKLEMGVDALLGDGEESLSSRMRQMVADLRAEWQELNARIDALNGEFVALARQDESMRRLISVPGIGVLNATALVAAVGDASSFAKARDLGAWLGLVPRQHTTGGKARLFGITKRGNTYLRTLLIHGARAALPSLSQSNTPLGHWLKAMIERGVHRNAIVVALANKLARIAWAVLRKDQSFERGHACMAA

SEQ ID NO: 14213 - protein, 325 aa, unidentified
  source 1..325: note = protein_50264c4
  REGION 8..150: note = RuvC_domain
  SITE 11: note = RuvC_P1
  SITE 55: note = RuvC_P2
  SITE 95: note = RuvC_P3
  SITE 97: note = RuvC_P4
  SITE 100: note = RuvC_P5
  REGION 194..281: note = Tnp_domain
  SITE 202: note = Tnp_P1
  SITE 232: note = Tnp_P2
  SITE 240: note = Tnp_P3
  SITE 241: note = Tnp_P4
  SITE 254: note = Tnp_P5
MQSQTNYAGIDISKLFFDVAFMHSGHYTYHQFSNDRTGFMALLKVLPPDSWVVMEASGPYYLQLACFLREQSVAVSVINPLVIRRFSQMRMSRAKTDKKDAKMIAEYGSISQLVLWQKPQQHVITLQQMEALLSRLQTEHTALSNQLESFDNSGMLTKELRKEICAELLHKDRLIKKLTGKMEQIAQEHYSGMLADLESIPGIGKKTAMMLTVLSGGFTRFDDYRKLSSYIGICPRIFESGTSVKGKARICKMGMSRIRAILYVCSWSAKRCNKACRELYERLLAKGKAKKLALIAVTNKLLKQAFAIAKQQTKYNENYSNIICF

SEQ ID NO: 14214 - protein, 317 aa, unidentified
  source 1..317: note = protein_df062fa
  REGION 7..150: note = RuvC_domain
  SITE 10: note = RuvC_P1
  SITE 50: note = RuvC_P2
  SITE 90: note = RuvC_P3
  SITE 92: note = RuvC_P4
  SITE 95: note = RuvC_P5
  REGION 186..270: note = Tnp_domain
  SITE 194: note = Tnp_P1
  SITE 223: note = Tnp_P2
  SITE 231: note = Tnp_P3
  SITE 232: note = Tnp_P4
  SITE 244: note = Tnp_P5
MTSEMLIGIDVAKDELVIDSELGIVTIANTAKAIDKWLKTLPAESYIGLEATGAYHQLLCERAVSMGKVVYLLNPRDMRHYALGLGRRGKTDRVDAQMIRRFITAERGHLRPYQPASTTQHQLALLQRRRATVVKHRQALQKALRSVSELEEPLRDALTAVDGLLTRIDQQLDSLLTLQPALKADARRLESIPGIGRQTSTQLAVLFDRVPLSHSDADVAFVGLDPRASDSGQKRGRRRVSKRGPSELRRLLYNCAQAATKTAVWKPYYQALRAREFSATQALVIISRKLLRIAFSLWKQTGAKFDAQKIGCLKNAH

SEQ ID NO: 14215 - protein, 400 aa, unidentified
  source 1..400: note = protein_2da1b81
  REGION 10..167: note = RuvC_domain
  SITE 13: note = RuvC_P1
  SITE 65: note = RuvC_P2
  SITE 105: note = RuvC_P3
  SITE 107: note = RuvC_P4
  SITE 110: note = RuvC_P5
  REGION 273..360: note = Tnp_domain
  SITE 281: note = Tnp_P1
  SITE 312: note = Tnp_P2
  SITE 320: note = Tnp_P3
  SITE 321: note = Tnp_P4
  SITE 333: note = Tnp_P5
MNKTSFCGFLGIDISKDKFDAYCMDMKGEKHFYISCSMDRTGFEKLMSRLEILPISKEGLLIGMESTACYHMNLFSFLLVSGYMAVIINPLLISNFVKMQLRKTKTDKKDAFVIAHFLSMYADGLIQSSVSTHISDLRDLSRQRESLLSQMTALKCDMKRILTIVFPELERLTGVFTKSILKLLGRFPSAHAIVQADPAEITQLLIDHSMGKNSAKAAEIIIKAARSSVGTTSPAREVILKQKAEVLIHLDGHLKELTALMIELCRSDMGDDIEIMTSLRGIGDKTATNFLVEMGGDIRKFKDHKKLIAMAGIDPAIYQSGKHDGQGRITKRGNRHLRRVVWLMSIKVIQFNDFFRNYYKKRMQDGLPFKKAVLATAHKLLRIIFAMLTQRTLFRCVVNS

SEQ ID NO: 14216 - protein, 346 aa, unidentified
  source 1..346: note = protein_bfd3b3f
  REGION 6..148: note = RuvC_domain
  SITE 9: note = RuvC_P1
  SITE 52: note = RuvC_P2
  SITE 87: note = RuvC_P3
  SITE 89: note = RuvC_P4
  SITE 92: note = RuvC_P5
  REGION 211..302: note = Tnp_domain
  SITE 219: note = Tnp_P1
  SITE 249: note = Tnp_P2
  SITE 257: note = Tnp_P3
  SITE 258: note = Tnp_P4
  SITE 270: note = Tnp_P5
MEITTIGIDLAKNVFQIHGVDERGKMVVRKQLKRAEMSKYFAKLEQCLIGMEACGSAHYWARKLEGYGHTVKLMAPQFVKPYVKTNKNDMADAEAICEAVGRPNMRFVARKTVEQQAIISVHRARQGFVKARTAQGNQIRGLLSEFGIAIPQGIGQIMKQVPEILEDGENGLPGTMRNLIERLTENLKEMDRQAKELEAQIQLWHRENEASRKLAEIPGLGPITASAIVATIGDAREFKNGRQLAAWLGLVPRQNSSGGKQTLLGISKRGDTYLRTLMIHGARAVIRFAEHKAEPESWMRKLMARRNKNVAAVALANKNARIVWALLAHDRTFRPDYTPAAVVAGM

SEQ ID NO: 14217 - protein, 346 aa, unidentified
  source 1..346: note = protein_1be82b1
  REGION 8..150: note = RuvC_domain
  SITE 11: note = RuvC_P1
  SITE 54: note = RuvC_P2
  SITE 89: note = RuvC_P3
  SITE 91: note = RuvC_P4
  SITE 94: note = RuvC_P5
  REGION 213..299: note = Tnp_domain
  SITE 221: note = Tnp_P1
  SITE 251: note = Tnp_P2
  SITE 259: note = Tnp_P3
  SITE 260: note = Tnp_P4
  SITE 272: note = Tnp_P5
MQQRVVTVGVDLAKNVFAVHGVDEQGKVVFRKSLRRPKVEAFFAKLPPCLIGMEACATAHHWSRVLTELGHEVKLMPPAYVKPYVKSQKNDATDAEAICEAVTRPTMRFVTPKSVEQQGVLTLHRTRTMIMTHRTRLVNTVRAHLAEFGIIAPIGRLGFEQLAAIVADHEDDRIPGPVRDCLVMLIIQFDQVNQQILDLDRQINRWHRDSELSKRLATIPGVGPLSATALVATIGDGKAFSSGRSLSAFMGLVPKQRSSGGKERLGGISKRGDRYLRGLLVTGALAVIRYAQRHGTRRPWLVRLLERRSTKIAAVALANKIARMVWALMTKGGTYKDPVPTVPAAA

SEQ ID NO: 14218 - protein, 345 aa, unidentified
  source 1..345: note = protein_3e1fd45
  REGION 6..147: note = RuvC_domain
  SITE 9: note = RuvC_P1
  SITE 51: note = RuvC_P2
  SITE 86: note = RuvC_P3
  SITE 88: note = RuvC_P4
  SITE 91: note = RuvC_P5
  REGION 210..300: note = Tnp_domain
  SITE 218: note = Tnp_P1
  SITE 250: note = Tnp_P2
  SITE 258: note = Tnp_P3
  SITE 259: note = Tnp_P4
  SITE 272: note = Tnp_P5
MKNTIVGVDLAKHVIQVCLFSNKTVQYNIDMTPAEFAEWLAVTNSVTIVFEACGTSNYWKQKAILFGHDARLISPKLVSAVRQNQKTDKNDALAIVQAALLPDVSFVRGKSPEQQQLQSILRLRELCVKQKTATGNQLTALLAEFNIKASTRNGGLKKVITATLEDAENGLSFEFREALSAAWQQYLSILESISVYDRCLEKAIEKHADCKKLLKIEGVGVLNAINLYIALGCAELGTFSKGKDAAACIGLTPMQHSSGGKAKLGSIGKYVKNGMLRSQLITGAMSAVNHAVNRKAKTKKDIWIAALVGRRGKKCAAVALANKTVRTAFAMLTQGTEYKADLVEA

SEQ ID NO: 14219 - protein, 433 aa, unidentified
  source 1..433: note = protein_e6cd036
  REGION 6..159: note = RuvC_domain
  SITE 9: note = RuvC_P1
  SITE 57: note = RuvC_P2
  SITE 98: note = RuvC_P3
  SITE 100: note = RuvC_P4
  SITE 103: note = RuvC_P5
  REGION 221..306: note = Tnp_domain
  SITE 229: note = Tnp_P1
  SITE 259: note = Tnp_P2
  SITE 267: note = Tnp_P3
  SITE 268: note = Tnp_P4
  SITE 279: note = Tnp_P5
MDRVFIGVDPHKKSVTLEARDSREILRATGSFPTDAAGYRLLVEYARQWSDRVWAVEGANGIGRPLAQRLLAAGERVLDVPAKLAARARVFDTGQGRKTDATDAHAIVMVALRDRGLREVSNDPELTMLRLLCDRRDELSRARAQALNRMHRLFLELVPGGAPVKKSASQYKTLLASVRPSDPAGKMRRRMAAEELADIERLDAKLKAMKAELKTAVLATGSHLMDIHGIGPAGAARILADVGDVTRFPNRSHFASWTGTAPIDASSGQHIRHRLSRAGNRRINHVLYMAGIVQLRNDTIGRRYYRRRRADGKTSMEAMRCLRRRLSDAVYRQLAADTMTPRQAGPGGHSGATLSSSAADHSPVIGSSDKPLPGPALPTLLPPTAATKPADPGTGATPRRRAGGVNVQRPAGRTTLTPTSAVASSEASRIHAP

SEQ ID NO: 14220 - protein, 343 aa, unidentified
  source 1..343: note = protein_8235cea
  REGION 7..149: note = RuvC_domain
  SITE 10: note = RuvC_P1
  SITE 53: note = RuvC_P2
  SITE 88: note = RuvC_P3
  SITE 90: note = RuvC_P4
  SITE 93: note = RuvC_P5
  REGION 212..303: note = Tnp_domain
  SITE 220: note = Tnp_P1
  SITE 250: note = Tnp_P2
  SITE 258: note = Tnp_P3
  SITE 259: note = Tnp_P4
  SITE 271: note = Tnp_P5
MQTVTTIGLDIAKSVFQVHGIDAEGKVVIRRQLKRRYVLAFFQKLPPCLIGIEACASSHHWSRELQALGHTVRLMPPAYVKPYVKRQKNDATDAEAICEAVTRANMRFVATKSPEQQSGLVLHRTRHLFIRQQTAVINAIRAHLAEFGIVAPVGRNGVEELLGVVVNPSDKRLPEVARACLTALGAQLRMLKAQILEFDRMIRAWQRSSETSRRLDHCPGVGPVLATALVATVADPKSFRSGRNFSAWIGLVPKQHSSGGKNRLGSISKQGDRYLRGLFVAGALAVIRYAKIHGTKHRPWLTALLARRPTKVAAIALANKIARMAWAMMAKSERYKEPVALAA

SEQ ID NO: 14221 - protein, 340 aa, unidentified
  source 1..340: note = protein_1792e12
  REGION 6..148: note = RuvC_domain
  SITE 9: note = RuvC_P1
  SITE 52: note = RuvC_P2
  SITE 87: note = RuvC_P3
  SITE 89: note = RuvC_P4
  SITE 92: note = RuvC_P5
  REGION 211..297: note = Tnp_domain
  SITE 219: note = Tnp_P1
  SITE 249: note = Tnp_P2
  SITE 257: note = Tnp_P3
  SITE 258: note = Tnp_P4
  SITE 270: note = Tnp_P5
MEISTIGLDLAKSVFQVHAINDAGEVLVRKALRRSQVLSFFAKLSPCLVGMEACGTSHHWARELIKLGHEVRLMPPAYVKPYVKRGKTDANDAEAICEAVTRATMRFVPVKSPEQQAALALHHTRDLLVKQRTQLVNMIRGVLAEFGIELARGLQHALALAKRLTDGDAAEVPTLAQRVVASLAQQIGAVQEQLARLEKELVAWHRASDLSQRLATIPGVGVIAATALAASVSEPERFRSGRQFAASLGLTPLQQSSGGKEKMGRISKMGDRYLRRLLVVGMTSLVRRARTAPESVDPRIPAMLERRPARVVTVAAANRTARVAWAIMTRGGSYRKPVAA

SEQ ID NO: 14222 - protein, 341 aa, unidentified
  source 1..341: note = protein_5963ef5
  REGION 8..165: note = RuvC_domain
  SITE 11: note = RuvC_P1
  SITE 64: note = RuvC_P2
  SITE 102: note = RuvC_P3
  SITE 104: note = RuvC_P4
  SITE 107: note = RuvC_P5
  REGION 205..292: note = Tnp_domain
  SITE 213: note = Tnp_P1
  SITE 243: note = Tnp_P2
  SITE 251: note = Tnp_P3
  SITE 252: note = Tnp_P4
  SITE 265: note = Tnp_P5
MLKNTFFVGIDIACDDFVASIYQSPKQSILTKEGIENTFDGFNVFISWLKEHRLSKTNSIICMEATGVYNEAIAHYLVSRGFRVSIEPPLKVKRAFDPVGHKTDPVDSRQIAEYAYRYSDELRFWQPKDEIIEKIKQLLTAREQFTKQSTAIQNAIASYRRHVVQVPLIVKAHHQTLKELKKHIAEIDKELDRLIRQNPIISQMTHQLKSIPGVGLLLASDLIAITGAFNDISSYKTLSAFLGICPYQHRSGKSIYKAAHIRNFGPTYARKLLMLAARSVATHNISFRKYYVRKLAEGKAKQLVLNNISNKLIKIACALIKNNSQYTEGYYSVNPLCLNLT

SEQ ID NO: 14223 - protein, 407 aa, unidentified
  source 1..407: note = protein_0570fec
  REGION 4..161: note = RuvC_domain
  SITE 7: note = RuvC_P1
  SITE 57: note = RuvC_P2
  SITE 98: note = RuvC_P3
  SITE 100: note = RuvC_P4
  SITE 103: note = RuvC_P5
  REGION 276..363: note = Tnp_domain
  SITE 284: note = Tnp_P1
  SITE 314: note = Tnp_P2
  SITE 322: note = Tnp_P3
  SITE 323: note = Tnp_P4
  SITE 336: note = Tnp_P5
MISVGIDISKEKITVCALGQGSKIIWKPFDVSLKKTEVEKFLEKLEKIKEEVKITMEATGKYHLPILYELKDKDYFVTVINPLKMKQFCRALNFRKAKNDKIDAKQIAEYGLMYWKELEEYKIDEVNYRILKELNRSYQHYMELRIDQMNYIDQTMHQTFPGIKKLIPHNSGDFSKDKLLDFLEKWWHKDLVLEKTEEEFVEEYKTWAKEKRYHPNANKAKTIYKIAEDSISTQPSNNSKLETNIREGINLIKQINQILNRILSQMIEISEPLEEYKEAKKFSGISEKLAVQIVAEFGDLSKFKNKKSLISFIGIDAPPYESGNFKADQRKISKRGNAILRKVGYQAMKCMMSAKKPENEIYNYMIKKEKEGKAKKVCKFAGLNKFLRIYYVRVINSKAEKKELKVA

SEQ ID NO: 14224 - protein, 321 aa, unidentified
  source 1..321: note = protein_01d09e5
  REGION 8..150: note = RuvC_domain
  SITE 11: note = RuvC_P1
  SITE 52: note = RuvC_P2
  SITE 92: note = RuvC_P3
  SITE 94: note = RuvC_P4
  SITE 97: note = RuvC_P5
  REGION 191..278: note = Tnp_domain
  SITE 199: note = Tnp_P1
  SITE 229: note = Tnp_P2
  SITE 237: note = Tnp_P3
  SITE 238: note = Tnp_P4
  SITE 251: note = Tnp_P5
MNKNNEIYGVDISKGVFDVANSKGKHFQFKNCGSGFKGFLKILSKEDLVVMEATGYYHYRLAQFLYEQEIKVSVVNPLSVKRFIQMKLSKVKTDKSDAKSICEYASVNEVPLYTARDKSQAEALQLLRLIDIYTKQSTALKNKIHGEKVLGKPSKVVYHSLNRSLKMLQKELKTLEDRLCEIVKEEQQKMLTLLKSIPGIGNKTGIMLLVLTNGFTNFENGNQLCSYAGITPIIRQSGSTVRGKSRISKMGNPKLRNLLFMCSFTACKHNKACRDIYERIIAKGKSKKLALIAVCNKLLKQAFAVATSGLPYDENYVPKLG

SEQ ID NO: 14225 - protein, 294 aa, unidentified
  source 1..294: note = protein_eabc465
  REGION 7..149: note = RuvC_domain
  SITE 10: note = RuvC_P1
  SITE 54: note = RuvC_P2
  SITE 89: note = RuvC_P3
  SITE 91: note = RuvC_P4
  SITE 94: note = RuvC_P5
  REGION 213..264: note = Tnp_domain
  SITE 221: note = Tnp_P1
  SITE 250: note = Tnp_P2
  SITE 258: note = Tnp_P3
  SITE 259: note = Tnp_P4
MSTIKVVGIDLAKNVFQVCVWMEDGSVASNRKISRQKFLDTIRAFPPETLIAMEACATSHYWGRTLQSMGYHVRIVPTQHVKAFSHHQKNDANDALAICETACRPGLHFVPIKTVEQQDIKSLRRARQLMVEQRTALANQIRAFLAEQGIIVPVGIQKLQQHLPDILEEGDNALSCVLCRLLHTLWEDLQNLNVSIHEMDNEITALSRQQAGYGHLLTIPGVGPLIAAAFVSDVNASQFTNGRQLSAWCGLVPPATQFGREKPSFFSEQTWQPSSPNVNYSWCPSDDAGRAKTG

SEQ ID NO: 14226 - protein, 344 aa, unidentified
  source 1..344: note = protein_7357d32
  REGION 7..149: note = RuvC_domain
  SITE 10: note = RuvC_P1
  SITE 53: note = RuvC_P2
  SITE 88: note = RuvC_P3
  SITE 90: note = RuvC_P4
  SITE 93: note = RuvC_P5
  REGION 212..304: note = Tnp_domain
  SITE 220: note = Tnp_P1
  SITE 250: note = Tnp_P2
  SITE 258: note = Tnp_P3
  SITE 259: note = Tnp_P4
  SITE 271: note = Tnp_P5
MNEVITIGVDLAKNIFQVHCVDVEGGVIVGRQLRRSQVLPFFNQQPPCLVGMEACATSHHWARQLIELGHEVKLMPPHYVKPYVKRSKNDAADAAAICEAVTRPTMRFVSVKSMEQQSVLMLHRTRELLVRQRTMLINAIRAHMAEFGIVAPVGVPQVKKLLGIIADTDDARLPPLARACLESLVRQFLSLHEEIALAEKHIHAWHRSNEVSRRLETIPGIGPIIASALAASITDPEVFRNGRELAAWIGLVPRQNSTGGKERLGHISKQGDQYLRWLLVAGAMSVIRHAKRRGTTNLPWLAKLITSKPTKVAAVALANKMARIAWALLRHGGTYQRPAAAPAD

SEQ ID NO: 14227 - protein, 388 aa, unidentified
  source 1..388: note = protein_9c0020d
  REGION 5..159: note = RuvC_domain
  SITE 8: note = RuvC_P1
  SITE 58: note = RuvC_P2
  SITE 98: note = RuvC_P3
  SITE 100: note = RuvC_P4
  SITE 103: note = RuvC_P5
  REGION 263..350: note = Tnp_domain
  SITE 271: note = Tnp_P1
  SITE 301: note = Tnp_P2
  SITE 309: note = Tnp_P3
  SITE 310: note = Tnp_P4
  SITE 323: note = Tnp_P5
MTVYVGVDIAKELHYAAIMDSDGVVANPFSFENNNKGFCLLLSHLSPYLKESVLIGFESTAHYQDNLAFFLRSHGYRIAVINPLQTSALRKANIRNTKTDSVDARLICLALMQHNIHGDQRDSSRLDDLYQLCKMRMDLIKKRTSCKIQLVSFMDRIFPELASFFSNNLHINTAYRLIESYPLPSVIKKTRIDVLTRLFHKASKGHFGKEKAQALKNLAKISVGIPSVTYAFQAQQLIHQIEFYSEQIQAVDEKIDSDPEVMSSPLMTIPGVSSFCAACILSVIKNINDFDAPCKILAYAGLDPVIRQSGKFNARQTRMSKRGNSLLRYALVWTAGNAVKNNATFNEYYRHKTQDQGKSHYQALGHCAKKLTKSIYHMLKYNESFNLA

SEQ ID NO: 14228 - protein, 334 aa, unidentified
  source 1..334: note = protein_ede4bf5
  REGION 7..149: note = RuvC_domain
  SITE 10: note = RuvC_P1
  SITE 53: note = RuvC_P2
  SITE 88: note = RuvC_P3
  SITE 90: note = RuvC_P4
  SITE 93: note = RuvC_P5
  REGION 208..299: note = Tnp_domain
  SITE 216: note = Tnp_P1
  SITE 246: note = Tnp_P2
  SITE 254: note = Tnp_P3
  SITE 255: note = Tnp_P4
  SITE 267: note = Tnp_P5
MSLVSTVGIDLAKNVFSVHGVDARGEVMIRRTVSRAKLSELVAQLPPCLIGMEACSGAHDWARRFVVFGHVVKLMAPKFVTPYRMSGKNDSNDAEAICEAVRRPNMRFVPIKSIEQQTDLSLHRVRQGFVEERTAMLNRIRGLLAEFGHILPLRAVEVRRRVPELLEKLPTRVAGCVRDLLDHAMRLEAKAVEYEREIRVHARTNALAQRAQTRQGIGPITASALVATVGNAHDFKNGRQFAAWLGLVPRQYSTGGKTRLGHITKRGDAYLRSLLVMGARAVLQSAARLNDPFSRWALAVQQRRGYHRACIAIAAKNARVAWALLAKDAATAAA

SEQ ID NO: 14229 - protein, 333 aa, unidentified
  source 1..333: note = protein_fd356d3
  REGION 4..159: note = RuvC_domain
  SITE 7: note = RuvC_P1
  SITE 58: note = RuvC_P2
  SITE 98: note = RuvC_P3
  SITE 100: note = RuvC_P4
  SITE 103: note = RuvC_P5
  REGION 263..326: note = Tnp_domain
  SITE 271: note = Tnp_P1
  SITE 301: note = Tnp_P2
  SITE 309: note = Tnp_P3
  SITE 310: note = Tnp_P4
MIYVDIDIAKFNHFASDLSSDVEIILQPFKFTNDYDGFQKLISKLNSFEKDSLIIGLESKAHYDNNLVEFLVSNNNKVCVINPIQTSTMRKNNIRKTKTDKVDTLIIAKTLLMYSHRFFTSYAIDLLHLKNLGRFRQKLIKQRTRLKIQLMSYVDQSFPELQYFFKSGIHMDTCYALLKESPSAKTVASMHLTHLTHLLQLASHGHFKKDTAVNLRVLAQKSVGSNDSSISIQITQSIEQIELLDSKIDKVESEMAHILNPVDSVIMTIPSINAINGGMILGKIGDITCFSSSSKLLAFAGLDHAAYQSENFSTNNTRMSNIVQNLYVSHWLM

SEQ ID NO: 14230 - protein, 343 aa, unidentified
  source 1..343: note = protein_ecc8cd7
  REGION 7..149: note = RuvC_domain
  SITE 10: note = RuvC_P1
  SITE 53: note = RuvC_P2
  SITE 88: note = RuvC_P3
  SITE 90: note = RuvC_P4
  SITE 93: note = RuvC_P5
  REGION 212..302: note = Tnp_domain
  SITE 220: note = Tnp_P1
  SITE 250: note = Tnp_P2
  SITE 258: note = Tnp_P3
  SITE 259: note = Tnp_P4
  SITE 271: note = Tnp_P5
MQTVTTIGLDIAKSVFQVHGVDAGGHVVIRRQLKRRYVMAFFQKLPRCLVGIEACGSSHHWSRELQALGHTVRLMPPAYVKPYVKRHKNDAIDAEAICEAVTRVNMRFVATKTPEQQSCLTLHRTRHLFIRQQTSVINAIRAHLAEFGIVAPVGRHGVEQLLGVVADASDKRLPEVARACVAALGAQLQTLKAQILEFDRMIRAWHRSSEASRRLDDIPGVGPVLATALIASVGDPRAFRSGRDFSAWIGLVPRQNSSAGKDRLGSISKRGDRYLRSLFTTGALAVIRYAKIHGTKHRPWLTALLVRRPTKVAAIALANKIARMAWAMMAKGERYKEPAALAA

SEQ ID NO: 14231 - protein, 341 aa, unidentified
  source 1..341: note = protein_b76cce5
  REGION 6..148: note = RuvC_domain
  SITE 9: note = RuvC_P1
  SITE 52: note = RuvC_P2
  SITE 87: note = RuvC_P3
  SITE 89: note = RuvC_P4
  SITE 92: note = RuvC_P5
  REGION 211..296: note = Tnp_domain
  SITE 219: note = Tnp_P1
  SITE 249: note = Tnp_P2
  SITE 257: note = Tnp_P3
  SITE 258: note = Tnp_P4
  SITE 270: note = Tnp_P5
MKATTIGIDLAKEVFQIHGVDEHGKRLFNKQLKRSQIASFFTNIPPCLIGMEACASAHFWANKLQGLGHTVKLMAPQFVKPYVKTNKHDAADAEAICEAVTRPNMRFVPIKSPEQQAVLALHRSRQGFIKQRTAQANQIRGLLAEFGIVMPIGIHQLLRRLPEILEDAENQLPSLFRVQLSLLQKYIEYLFDVVSTLDKQIEQYHQQNALCQRIGKIPGIGPITARALIATIDNANNFENGRQLAAWLGLVPRQHSSGGKQVLLGISKRGDTYLRTLLIHGARAVLQSVKRKYDTVSGWASRLLERRNNNIASVALANKNARIVWALLAKDQEYCAPVMNA

SEQ ID NO: 14232 - protein, 344 aa, unidentified
  source 1..344: note = protein_686b695
  REGION 5..153: note = RuvC_domain
  SITE 8: note = RuvC_P1
  SITE 55: note = RuvC_P2
  SITE 92: note = RuvC_P3
  SITE 94: note = RuvC_P4
  SITE 97: note = RuvC_P5
  REGION 213..301: note = Tnp_domain
  SITE 221: note = Tnp_P1
  SITE 251: note = Tnp_P2
  SITE 259: note = Tnp_P3
  SITE 260: note = Tnp_P4
  SITE 272: note = Tnp_P5
MDYFVGLDVSLRSCALCIVDTKGNVILERELACEIDDIVECLSDCAFPIERVGFEAGTMSQHLYFGLEAAGFDVVCMEARQVNAALSAMRNKTDKNDARGIAHVLRTGWFSPVHMKSREAHGNRALLSARKALLKKTMDLANEVRGLLKIFGIRLPKTVKHGSFDDVVRPMILIDDVLAHALVPLLDARVILYQHFLELDRRVNRAASHDVVCMRLMTIPGVGPITALTFKSAVDDPTRFKRSRTVGAHFGLTPRRYQSGERDNPGRISKAGDRDVRAALYAAANALLMRTMAGSQIKSWGMRLMRTKGRRRAVVAVARKLAVLMHRMWIDGTEFRQEQVGGTA

SEQ ID NO: 14233 - protein, 341 aa, unidentified
  source 1..341: note = protein_03da94e
  REGION 7..149: note = RuvC_domain
  SITE 10: note = RuvC_P1
  SITE 53: note = RuvC_P2
  SITE 88: note = RuvC_P3
  SITE 90: note = RuvC_P4
  SITE 93: note = RuvC_P5
  REGION 209..296: note = Tnp_domain
  SITE 217: note = Tnp_P1
  SITE 247: note = Tnp_P2
  SITE 255: note = Tnp_P3
  SITE 256: note = Tnp_P4
  SITE 268: note = Tnp_P5
MNEVTLIGIDLGKHVFHLHAQDMKGREVFRKKLSRMQLIPFFSNLKAVTVVMEACAGAHWLARKLDTVGHQARLISPQYVRRFVKSNKNDYIDAEAICEAASRPAMRFVEPRTEAQQLLAALHRVREGLVTERTATINRIHAVLLEFGIVVPLARATLRRLPDVLAVQDSPPRLIQLIHRLHAHYRYLDQQIADVERDLTSQLHEDENAARLLSIPGIGTITASLLASEVGNVTQFAGGRNFAASIGLVPRQHSTGGRSVLCGISKRGDKHLRHLLVQGARAVIQRVEKRTDRLGEWIRSMLTRRHSNVVACAVANKLARIAWRVLTRHTTYDAARLKLAD

SEQ ID NO: 14234 - protein, 351 aa, unidentified
  source 1..351: note = protein_bce267e
  REGION 6..148: note = RuvC_domain
  SITE 9: note = RuvC_P1
  SITE 52: note = RuvC_P2
  SITE 87: note = RuvC_P3
  SITE 89: note = RuvC_P4
  SITE 92: note = RuvC_P5
  REGION 211..302: note = Tnp_domain
  SITE 219: note = Tnp_P1
  SITE 249: note = Tnp_P2
  SITE 257: note = Tnp_P3
  SITE 258: note = Tnp_P4
  SITE 270: note = Tnp_P5
MKITTVGIDLAKNVFQVHGVSERGKALLRKQLKRSEMLKFFTNLPPCLIGMEACGSAQHWARKLIELGHAVRLMAPQFVKPYVKTNKNDRNDAEAICEAVARPNMRFVPVKTPEQQAALGLHRARAGMMKARNAQANQIRGLLGEFGIVLPQGIGQLRRQLPEIAEDSNNGLPGLMRTLLRRLLAQLQQLDQQVSELEREIVLWHRQNDDSRRLERIGGIGALTASAYVASLGNAKSFNNGRQVAAWLGIVPRQDSTGGKPKLLGISKHGDVYLRTLLIHGARSVLRHLEHRPDQADSWLKRLMLRRGKNVAAVALANKNARIAWALLAHQREFDPDYVSTAPSRLTVEHR

SEQ ID NO: 14235 - protein, 391 aa, unidentified
  source 1..391: note = protein_ae01667
  REGION 4..163: note = RuvC_domain
  SITE 7: note = RuvC_P1
  SITE 60: note = RuvC_P2
  SITE 101: note = RuvC_P3
  SITE 103: note = RuvC_P4
  SITE 106: note = RuvC_P5
  REGION 266..352: note = Tnp_domain
  SITE 274: note = Tnp_P1
  SITE 304: note = Tnp_P2
  SITE 312: note = Tnp_P3
  SITE 313: note = Tnp_P4
  SITE 326: note = Tnp_P5
MICVGIDVVKDKHDCFITNSDGEFLFISFTISNNREGFDELYRRIESVLDDITKVKVGLEATGHYSYNLLDFLLDKGLTTFVINPLHTNLYRKSLSLRKTKTDKVDAHTIASMIMSDVNLKSYSDTSYHNEELKSLTRYRFDKVKERAKLKQSFSRLVTILFPELEKFVPTLHMVSVYALLSELPSAATIASAHLTRLTNLLSEVSKGRYGKDAAIMLREAARCSIGSHMPAKSLELKHTIKLIRELDNEIDEIEAEIKTLMDEINSPILSIPGINYRMGAMITAEIGDFNRFDSPDKILTYAGRSPSTYQSGQLDNCYSHMEKRGSRYLRYALYNATKYVCYWDKNFGVYLAKKQAESKHYNVALSHATKKLVRLIYQLEKSGQPYSKAS
